(19) United States
(12) Patent Application Publication
(10) Pub. No.: US 2025/0018062 A1
(43) Pub. Date: Jan. 16, 2025

(54) MODIFIED POLYNUCLEOTIDES FOR THE PRODUCTION OF BIOLOGICS AND PROTEINS ASSOCIATED WITH HUMAN DISEASE

(71) Applicant: Moderna TX, Inc., Cambridge, MA (US)

(72) Inventors: Antonin DE FOUGEROLLES, Waterloo (BE); Justin GUILD, Framingham, MA (US)

(21) Appl. No.: 18/760,652

(22) Filed: Jul. 1, 2024

Related U.S. Application Data
(63) Continuation of application No. 17/020,522, filed on Sep. 14, 2020.
Application No. 17/020,522 is a continuation of application No. 15/790,246, filed on Oct. 23, 2017, now Pat. No. 10,772,975.
Application No. 15/790,246 is a continuation of application No. 14/878,400, filed on Oct. 8, 2015, now Pat. No. 9,814,760.
Application No. 14/878,400 is a continuation of application No. 14/104,591, filed on Dec. 12, 2013, now Pat. No. 9,233,141.
Application No. 14/104,591 is a continuation of application No. 13/791,922, filed on Mar. 9, 2013, now Pat. No. 8,999,380.
(60) Provisional application No. 61/737,155, filed on Dec. 14, 2012.
(60) Provisional application No. 61/737,152, filed on Dec. 14, 2012.
(60) Provisional application No. 61/737,147, filed on Dec. 14, 2012.
(60) Provisional application No. 61/737,139, filed on Dec. 14, 2012.
(60) Provisional application No. 61/737,135, filed on Dec. 14, 2012.
(60) Provisional application No. 61/737,134, filed on Dec. 14, 2012.
(60) Provisional application No. 61/737,130, filed on Dec. 14, 2012.
(60) Provisional application No. 61/737,213, filed on Dec. 14, 2012.
(60) Provisional application No. 61/737,203, filed on Dec. 14, 2012.
(60) Provisional application No. 61/737,191, filed on Dec. 14, 2012.
(60) Provisional application No. 61/737,184, filed on Dec. 14, 2012.
(60) Provisional application No. 61/737,174, filed on Dec. 14, 2012.
(60) Provisional application No. 61/737,168, filed on Dec. 14, 2012.
(60) Provisional application No. 61/737,160, filed on Dec. 14, 2012.
(60) Provisional application No. 61/712,490, filed on Oct. 11, 2012.
(60) Provisional application No. 61/709,303, filed on Oct. 3, 2012.
(60) Provisional application No. 61/696,381, filed on Sep. 4, 2012.
(60) Provisional application No. 61/681,712, filed on Aug. 10, 2012.
(60) Provisional application No. 61/681,658, filed on Aug. 10, 2012.
(60) Provisional application No. 61/681,661, filed on Aug. 10, 2012.
(60) Provisional application No. 61/681,648, filed on Aug. 10, 2012.
(60) Provisional application No. 61/681,649, filed on Aug. 10, 2012.
(60) Provisional application No. 61/681,650, filed on Aug. 10, 2012.
(60) Provisional application No. 61/681,654, filed on Aug. 10, 2012.
(60) Provisional application No. 61/681,675, filed on Aug. 10, 2012.
(60) Provisional application No. 61/681,687, filed on Aug. 10, 2012.
(60) Provisional application No. 61/681,696, filed on Aug. 10, 2012.
(60) Provisional application No. 61/681,704, filed on Aug. 10, 2012.
(60) Provisional application No. 61/681,720, filed on Aug. 10, 2012.
(60) Provisional application No. 61/681,645, filed on Aug. 10, 2012.
(60) Provisional application No. 61/681,647, filed on Aug. 10, 2012.
(60) Provisional application No. 61/681,742, filed on Aug. 10, 2012.
(60) Provisional application No. 61/681,667, filed on Aug. 10, 2012.
(60) Provisional application No. 61/668,157, filed on Jul. 5, 2012.
(60) Provisional application No. 61/648,244, filed on May 17, 2012.
(60) Provisional application No. 61/648,286, filed on May 17, 2012.
(60) Provisional application No. 61/618,961, filed on Apr. 2, 2012.
(60) Provisional application No. 61/618,866, filed on Apr. 2, 2012.
(60) Provisional application No. 61/618,862, filed on Apr. 2, 2012.
(60) Provisional application No. 61/618,953, filed on Apr. 2, 2012.
(60) Provisional application No. 61/618,945, filed on Apr. 2, 2012.
(60) Provisional application No. 61/618,935, filed on Apr. 2, 2012.
(60) Provisional application No. 61/618,922, filed on Apr. 2, 2012.
(60) Provisional application No. 61/618,957, filed on Apr. 2, 2012.
(60) Provisional application No. 61/618,896, filed on Apr. 2, 2012.
(60) Provisional application No. 61/618,885, filed on Apr. 2, 2012.
(60) Provisional application No. 61/618,878, filed on Apr. 2, 2012.
(60) Provisional application No. 61/618,873, filed on Apr. 2, 2012.
(60) Provisional application No. 61/618,870, filed on Apr. 2, 2012.
(60) Provisional application No. 61/618,868, filed on Apr. 2, 2012.
(60) Provisional application No. 61/618,911, filed on Apr. 2, 2012.

(51) Int. Cl. A61K 48/00; A61K 9/127; A61K 9/14; A61K 9/51; A61K 31/7115; A61K 38/00; A61K 38/17; A61K 38/18; A61K 38/19; A61K 38/21; A61K 38/45; A61K 38/48; A61K 47/54; C07H 21/02; C07K 14/005; C07K 14/435; C07K 14/47; C07K 14/475; C07K 14/485; C07K 14/495; C07K 14/505; C07K 14/515; C07K 14/525; C07K 14/535; C07K 14/54; C07K 14/56; C07K 14/61; C07K 14/62; C07K 14/705; C07K 14/745; C07K 16/00; C07K 16/28; C07K 16/40; C12N 9/00; C12N 9/02; C12N 9/10; C12N 9/12; C12N 9/16; C12N 9/24; C12N 9/42; C12N 9/64; C12N 9/68; C12N 9/88; C12N 15/11; C12N 15/52; C12N 15/85; C12N 15/87; C12P 13/04; C12P 21/00

(52) U.S. Cl. CPC A61K 48/0066; A61K 9/1271; A61K 9/145; A61K 9/5123; A61K 9/5146; A61K 9/5153; A61K 31/7115; A61K 38/17; A61K 38/177; A61K 38/1816; A61K 38/1891; A61K 38/191; A61K 38/193; A61K 38/212; A61K 38/45; A61K 38/4846; A61K 47/543; A61K 48/0033; A61K 48/005; A61K 48/0075; C07H 21/02; C07K 14/005; C07K 14/435; C07K 14/43595; C07K 14/47; C07K 14/4705; C07K 14/4713; C07K 14/4723; C07K 14/4746; C07K 14/475; C07K 14/485; C07K 14/495; C07K 14/505; C07K 14/515; C07K 14/525; C07K 14/535; C07K 14/5418; C07K 14/56; C07K 14/61; C07K 14/62; C07K 14/705; C07K 14/745; C07K 16/00; C07K 16/2863; C07K 16/2887; C07K 16/40; C12N 9/0069; C12N 9/0091; C12N 9/1051; C12N 9/1241; C12N 9/16; C12N 9/2402; C12N 9/2445; C12N 9/6435; C12N 9/6437; C12N 9/644; C12N 9/6443; C12N 9/6451; C12N 9/88; C12N 9/93; C12N 15/11; C12N 15/52; C12N 15/85; C12N 15/87; C12P 13/04; C12P 21/00; C12P 21/005; C12Y 603/02019; A61K 38/00; C12Y 113/12007; C12Y 116/03001; C12Y 207/07012; C12Y 304/21007; C12Y 304/21022; C12Y 304/21027; C12Y 403/02001; Y02A 50/30

(57) ABSTRACT

The invention relates to compositions and methods for the preparation, manufacture and therapeutic use of polynucleotides, primary transcripts and mmRNA molecules.

### CROSS REFERENCE TO RELATED APPLICATIONS

[0001] This application is a continuation of U.S. patent application Ser. No. 17/020,522, filed Sep. 30, 2021, entitled Modified Polynucleotides for the Production of Biologics and Proteins Associated with Human Disease, which is a continuation of U.S. patent application Ser. No. 15/790,246, filed Oct. 23, 2017, entitled Modified Polynucleotides for the Production of Biologics and Proteins Associated with Human Disease, which is a continuation of U.S. patent application Ser. No. 14/280,867, filed May 19, 2014, entitled Modified Polynucleotides Encoding UDP Glucuronosyltransferase 1 Family, Polypeptide A1, which is a continuation of U.S. patent application Ser. No. 14/170,914, filed Feb. 3, 2014, entitled Modified Polynucleotides for Treating Lipase A, Lyosomal Acid, Cholesterol Esterase Protein Deficiency, which is a continuation of U.S. patent application Ser. No. 14/170,910, filed Feb. 3, 2014, entitled Modified Polynucleotides for Treating Cycstic Fibrosis, which is a continuation of U.S. patent application Ser. No. 14/170,903, filed Feb. 3, 2014, entitled Modified Glucosidase, Beta, Acid Polynucleotides for Treating Protein Deficiency, which is a continuation of U.S. patent application Ser. No. 14/170,897, filed Feb. 3, 2014, entitled Modified Polynucleotides for Treating Argininosuccinate Synthase 1 Protein Deficiency, which is a continuation of U.S. patent application Ser. No. 14/170,751, filed Feb. 3, 2014, entitled Modified Polynucleotides for Treating Galactosidase, Alpha Protein Deficiency, which is a continuation of U.S. patent application Ser. No. 14/170,747, filed Feb. 3, 2014, entitled Modified Polynucleotides for Treating Protein Deficiency, which is a continuation of U.S. patent application Ser. No. 14/170,744, filed Feb. 3, 2014, entitled Modified Polynucleotides for Treating Protein Deficiency, which is a continuation of U.S. patent application Ser. No. 14/104,591, filed Dec. 12, 2013, entitled Modified Polynucleotides for the Production of Proteins Associated with Blood and Lymphatic Disorders, which is a continuation of U.S. patent application Ser. No. 14/104,585, filed Dec. 12, 2013, entitled Modified Polynucleotides Encoding V-Myc Avian Melocytomatosis Viral Oncogene Homolog, which is a continuation of U.S. patent application Ser. No. 14/104,591, filed Dec. 12, 2013, entitled Modified Polynucleotides for the Production of Proteins Associated with Lymphatic Disorders, which is a continuation of U.S. patent application Ser. No. 13/791,922, filed Mar. 9, 2013, entitled Modified Polynucleotides for the Production of Biologics and Proteins Associated with Human Disease which claims priority to U.S. Provisional Patent Application No. 61/681,742, filed, Aug. 10, 2012, entitled Modified Polynucleotides for the Production of Oncology-Related Proteins and Peptides, U.S. Provisional Patent Application No. 61/618,862, filed Apr. 2, 2012, entitled Modified Polynucleotides for the Production of Biologics, U.S. Provisional Patent Application No. 61/681,645, filed Aug. 10, 2012, entitled Modified Polynucleotides for the Production of Biologics, U.S. Provisional Patent Application No. 61/737,130, filed Dec. 14, 2012, entitled Modified Polynucleotides for the Production of Biologics, U.S. Provisional Patent Application No. 61/618,866, filed Apr. 2, 2012, entitled Modified Polynucleotides for the Production of Antibodies, U.S. Provisional Patent Application No. 61/681,647, filed Aug. 10, 2012, entitled Modified Polynucleotides for the Production of Antibodies, U.S. Provisional Patent Application No. 61/737,134, filed Dec. 14, 2012, entitled Modified Polynucleotides for the Production of Antibodies, U.S. Provisional Patent Application No. 61/618,868, filed Apr. 2, 2012, entitled Modified Polynucleotides for the Production of Vaccines, U.S. Provisional Patent Application No. 61/681,648, filed Aug. 10, 2012, entitled Modified Polynucleotides for the Production of Vaccines, U.S. Provisional Patent Application No. 61/737,135, filed Dec. 14, 2012, entitled Modified Polynucleotides for the Production of Vaccines, U.S. Provisional Patent Application No. 61/618,870, filed Apr. 2, 2012, entitled Modified Polynucleotides for the Production of Therapeutic Proteins and Peptides, U.S. Provisional Patent Application No. 61/681,649, filed Aug. 10, 2012, entitled Modified Polynucleotides for the Production of Therapeutic Proteins and Peptides, U.S. Provisional Patent Application No. 61/737,139, filed Dec. 14, 2012, Modified Polynucleotides for the Production of Therapeutic Proteins and Peptides, U.S. Provisional Patent Application No. 61/618,873, filed Apr. 2, 2012, entitled Modified Polynucleotides for the Production of Secreted Proteins, U.S. Provisional Patent Application No. 61/681,650, filed Aug. 10, 2012, entitled Modified Polynucleotides for the Production of Secreted Proteins, U.S. Provisional Patent Application No. 61/737,147, filed Dec. 14, 2012, entitled Modified Polynucleotides for the Production of Secreted Proteins, U.S. Provisional Patent Application No. 61/618,878, filed Apr. 2, 2012, entitled Modified Polynucleotides for the Production of Plasma Membrane Proteins, U.S. Provisional Patent Application No. 61/681,654, filed Aug. 10, 2012, entitled Modified Polynucleotides for the Production of Plasma Membrane Proteins, U.S. Provisional Patent Application No. 61/737,152, filed Dec. 14, 2012, entitled Modified Polynucleotides for the Production of Plasma Membrane Proteins, U.S. Provisional Patent Application No. 61/618,885, filed Apr. 2, 2012, entitled Modified Polynucleotides for the Production of Cytoplasmic and Cytoskeletal Proteins, U.S. Provisional Patent Application No. 61/681,658, filed Aug. 10, 2012, entitled Modified Polynucleotides for the Production of Cytoplasmic and Cytoskeletal Proteins, U.S. Provisional Patent Application No. 61/737,155, filed Dec. 14, 2012, entitled Modified Polynucleotides for the Production of Cytoplasmic and Cytoskeletal Proteins, U.S. Provisional Patent Application No. 61/618,896, filed Apr. 2, 2012, entitled Modified Polynucleotides for the Production of Intracellular Membrane Bound Proteins, U.S. Provisional Patent Application No. 61/668,157, filed Jul. 5, 2012, entitled Modified Polynucleotides for the Production of Intracellular Membrane Bound Proteins, U.S. Provisional Patent Application No. 61/681,661, filed Aug. 10, 2012, entitled Modified Polynucleotides for the Production of Intracellular Membrane Bound Proteins, U.S. Provisional Patent Application No. 61/737,160, filed Dec. 14, 2012, entitled Modified Polynucleotides for the Production of Intracellular Membrane Bound Proteins, U.S. Provisional Patent Application No. 61/618,911, filed Apr. 2, 2012, entitled Modified Polynucleotides for the Production of Nuclear Proteins, U.S. Provisional Patent Application No. 61/681,667, filed Aug. 10, 2012, entitled Modified Polynucleotides for the Production of Nuclear Proteins, U.S. Provisional Patent Application No. 61/737,168, filed Dec. 14, 2012, entitled Modified Polynucleotides for the Production of Nuclear Proteins, U.S. Provisional Patent Application No. 61/618,922, filed Apr. 2, 2012, entitled Modified Polynucleotides for the Production of Proteins, U.S. Provisional Patent Application No. 61/681,675, filed Aug. 10, 2012, entitled Modified Polynucleotides for the Production of Proteins, U.S. Provisional Patent Application No. 61/737,174, filed Dec. 14, 2012, entitled Modified Polynucleotides for the Production of Proteins, U.S. Provisional Patent Application No. 61/618,935, filed Apr. 2, 2012, entitled Modified Polynucleotides for the Production of Proteins Associated with Human Disease, U.S. Provisional Patent Application No. 61/681,687, filed Aug. 10, 2012, entitled Modified Polynucleotides for the Production of Proteins Associated with Human Disease, U.S. Provisional Patent Application No. 61/737,184, filed Dec. 14, 2012, entitled Modified Polynucleotides for the Production of Proteins Associated with Human Disease, U.S. Provisional Patent Application No. 61/618,945, filed Apr. 2, 2012, entitled Modified Polynucleotides for the Production of Proteins Associated with Human Disease, U.S. Provisional Patent Application No. 61/681,696, filed Aug. 10, 2012, entitled Modified Polynucleotides for the Production of Proteins Associated with Human Disease, U.S. Provisional Patent Application No. 61/737,191, filed Dec. 14, 2012, entitled Modified Polynucleotides for the Production of Proteins Associated with Human Disease, U.S. Provisional Patent Application No. 61/618,953, filed Apr. 2, 2012, entitled Modified Polynucleotides for the Production of Proteins Associated with Human Disease, U.S. Provisional Patent Application No. 61/681,704, filed Aug. 10, 2012, entitled Modified Polynucleotides for the Production of Proteins Associated with Human Disease, U.S. Provisional Patent Application No. 61/737,203, filed Dec. 14, 2012, entitled Modified Polynucleotides for the Production of Proteins Associated with Human Disease, U.S. Provisional Patent Application No. 61/618,961, filed Apr. 2, 2012, entitled Dosing Methods for Modified mRNA, U.S. Provisional Patent Application No. 61/648,286, filed May 17, 2012, entitled Dosing Methods for Modified mRNA, U.S. Provisional Patent Application No. 61/681,720, filed Aug. 10, 2012, entitled Modified Polynucleotides for the Production of Cosmetic Proteins and Peptides, U.S. Provisional Patent Application No. 61/737,213, filed Dec. 14, 2012, entitled Modified Polynucleotides for the Production of Cosmetic Proteins and Peptides, U.S. Provisional Patent Application No. 61/618,957, filed Apr. 2, 2012, entitled Modified Nucleoside, Nucleotide, and Nucleic Acid Compositions, U.S. Provisional Patent Application No. 61/648,244, filed May 17, 2012, entitled Modified Nucleoside, Nucleotide, and Nucleic Acid Compositions, U.S. Provisional Patent Application No. 61/681,712, filed Aug. 10, 2012, entitled Modified Nucleoside, Nucleotide, and Nucleic Acid Compositions, U.S. Provisional Patent Application No. 61/696,381, filed Sep. 4, 2012, entitled Modified Nucleoside, Nucleotide, and Nucleic Acid Compositions, U.S. Provisional Patent Application No. 61/709,303, filed Oct. 3, 2012, entitled Modified Nucleoside, Nucleotide, and Nucleic Acid Compositions, U.S. Provisional Patent Application No. 61/712,490, filed Oct. 11, 2012, entitled Modified Nucleoside, Nucleotide, and Nucleic Acid Compositions; the contents of each of which are herein incorporated by reference in its entirety.

[0002] This application is also related to International Publication No. PCT/US2012/58519, filed Oct. 3, 2012, entitled Modified Nucleosides, Nucleotides, and Nucleic Acids, and Uses Thereof and International Publication No. PCT/US2012/69610, filed Dec. 14, 2012, entitled Modified Nucleoside, Nucleotide, and Nucleic Acid Compositions and U.S. Provisional Patent Application No. 61/737,224, filed Dec. 14, 2012, the contents of each of which is herein incorporated by reference in their entireties.

[0003] The instant application is also related to co-pending applications, each filed concurrently herewith on Mar. 9, 2013 and having Attorney Docket Number M301.20, (PCT/US13/030063) entitled Modified Polynucleotides; Attorney Docket Number M304.20 (PCT/US13/030064), entitled Modified Polynucleotides for the Production of Secreted Proteins; Attorney Docket Number M305.20 (PCT/US13/030059), entitled Modified Polynucleotides for the Production of Membrane Proteins; Attorney Docket Number M306.20 (PCT/US13/030066), entitled Modified Polynucleotides for the Production of Cytoplasmic and Cytoskeletal Proteins; Attorney Docket Number M308.20 (PCT/US13/030067), entitled Modified Polynucleotides for the Production of Nuclear Proteins; Attorney Docket Number M309.20 (PCT/US13/030060), entitled Modified Polynucleotides for the Production of Proteins; Attorney Docket Number M310.20 (PCT/US13/030061), entitled Modified Polynucleotides for the Production of Proteins Associated with Human Disease; Attorney Docket Number MNC1.20 (PCT/US13/030068), entitled Modified Polynucleotides for the Production of Cosmetic Proteins and Peptides and Attorney Docket Number MNC2.20 (PCT/US13/030070), entitled Modified Polynucleotides for the Production of Oncology-Related Proteins and Peptides, the contents of each of which are herein incorporated by reference in its entirety.

### REFERENCE TO SEQUENCE LISTING

[0004] The instant application contains a Sequence Listing which has been submitted electronically in XML format and is hereby incorporated by reference in its entirety. Said XML copy, created on Jun. 25, 2024, is named “51165-0060020_Sequence_Listing_6_25_24.xml” and is 60,880,578 bytes in size.

### FIELD OF THE INVENTION

[0005] The invention relates to compositions, methods, processes, kits and devices for the design, preparation, manufacture and/or formulation of polynucleotides, primary constructs and modified mRNA molecules (mmRNA).

### BACKGROUND OF THE INVENTION

[0006] There are multiple problems with prior methodologies of effecting protein expression. For example, introduced DNA can integrate into host cell genomic DNA at some frequency, resulting in alterations and/or damage to the host cell genomic DNA. Alternatively, the heterologous deoxyribonucleic acid (DNA) introduced into a cell can be inherited by daughter cells (whether or not the heterologous DNA has integrated into the chromosome) or by offspring. In addition, assuming proper delivery and no damage or integration into the host genome, there are multiple steps which must occur before the encoded protein is made. Once inside the cell, DNA must be transported into the nucleus where it is transcribed into RNA. The RNA transcribed from DNA must then enter the cytoplasm where it is translated into protein. Not only do the multiple processing steps from administered DNA to protein create lag times before the generation of the functional protein, each step represents an opportunity for error and damage to the cell. Further, it is known to be difficult to obtain DNA expression in cells as DNA frequently enters a cell but is not expressed or not expressed at reasonable rates or concentrations. This can be a particular problem when DNA is introduced into primary cells or modified cell lines.

[0007] In the early 1990's Bloom and colleagues successfully rescued vasopressin-deficient rats by injecting in vitro-transcribed vasopressin mRNA into the hypothalamus (Science 255: 996-998; 1992). However, the low levels of translation and the immunogenicity of the molecules hampered the development of mRNA as a therapeutic and efforts have since focused on alternative applications that could instead exploit these pitfalls, i.e. immunization with mRNAs coding for cancer antigens.

[0008] Others have investigated the use of mRNA to deliver a polypeptide of interest and shown that certain chemical modifications of mRNA molecules, particularly pseudouridine and 5-methyl-cytosine, have reduced immunostimulatory effect.

[0009] These studies are disclosed in, for example, Ribostem Limited in United Kingdom patent application serial number 0316089.2 filed on Jul. 9, 2003 now abandoned, PCT application number PCT/GB2004/002981 filed on Jul. 9, 2004 published as WO2005005622, U.S. patent application national phase entry Ser. No. 10/563,897 filed on Jun. 8, 2006 published as US20060247195 now abandoned, and European patent application national phase entry serial number EP2004743322 filed on Jul. 9, 2004 published as EP1646714 now withdrawn; Novozymes, Inc. in PCT application number PCT/US2007/88060 filed on Dec. 19, 2007 published as WO2008140615, United States patent application national phase entry Ser. No. 12/520,072 filed on Jul. 2, 2009 published as US20100028943 and European patent application national phase entry serial number EP2007874376 filed on Jul. 7, 2009 published as EP2104739; University of Rochester in PCT application number PCT/US2006/46120 filed on Dec. 4, 2006 published as WO2007064952 and U.S. patent application Ser. No. 11/606,995 filed on Dec. 1, 2006 published as US20070141030; BioNTech AG in European patent application serial number EP2007024312 filed Dec. 14, 2007 now abandoned, PCT application number PCT/EP2008/01059 filed on Dec. 12, 2008 published as WO2009077134, European patent application national phase entry serial number EP2008861423 filed on Jun. 2, 2010 published as EP2240572, United States patent application national phase entry Ser. No. 12/735,060 filed Nov. 24, 2010 published as US20110065103, German patent application serial number DE 10 2005 046 490 filed Sep. 28, 2005, PCT application PCT/EP2006/0448 filed Sep. 28, 2006 published as WO2007036366, national phase European patent EP1934345 published Mar. 21, 2012 and national phase U.S. patent application Ser. No. 11/992,638 filed Aug. 14, 2009 published as 20100129877; Immune Disease Institute Inc. in U.S. patent application Ser. No. 13/088,009 filed Apr. 15, 2011 published as US20120046346 and PCT application PCT/US2011/32679 filed Apr. 15, 2011 published as WO20110130624; Shire Human Genetic Therapeutics in U.S. patent application Ser. No. 12/957,340 filed on Nov. 20, 2010 published as US20110244026; Sequitur Inc. in PCT application PCT/US1998/019492 filed on Sep. 18, 1998 published as WO1999014346; The Scripps Research Institute in PCT application number PCT/US2010/00567 filed on Feb. 24, 2010 published as WO2010098861, and United States patent application national phase entry Ser. No. 13/203,229 filed Nov. 3, 2011 published as US20120053333; Ludwig-Maximillians University in PCT application number PCT/EP2010/004681 filed on Jul. 30, 2010 published as WO2011012316; Cellscript Inc. in U.S. Pat. No. 8,039,214 filed Jun. 30, 2008 and granted Oct. 18, 2011, U.S. patent application Ser. No. 12/962,498 filed on Dec. 7, 2010 published as US20110143436, 12/962,468 filed on Dec. 7, 2010 published as US20110143397, 13/237,451 filed on Sep. 20, 2011 published as US20120009649, and PCT applications PCT/US2010/59305 filed Dec. 7, 2010 published as WO2011071931 and PCT/US2010/59317 filed on Dec. 7, 2010 published as WO2011071936; The Trustees of the University of Pennsylvania in PCT application number PCT/US2006/32372 filed on Aug. 21, 2006 published as WO2007024708, and U.S. patent application national phase entry Ser. No. 11/990,646 filed on Mar. 27, 2009 published as US20090286852; Curevac GMBH in German patent application serial numbers DE10 2001 027 283.9 filed Jun. 5, 2001, DE10 2001 062 480.8 filed Dec. 19, 2001, and DE 20 2006 051 516 filed Oct. 31, 2006 all abandoned, European patent numbers EP1392341 granted Mar. 30, 2005 and EP1458410 granted Jan. 2, 2008, PCT application numbers PCT/EP2002/06180 filed Jun. 5, 2002 published as WO2002098443, PCT/EP2002/14577 filed on Dec. 19, 2002 published as WO2003051401, PCT/EP2007/09469 filed on Dec. 31, 2007 published as WO2008052770, PCT/EP2008/03033 filed on Apr. 16, 2008 published as WO2009127230, PCT/EP2006/004784 filed on May 19, 2005 published as WO2006122828, PCT/EP2008/00081 filed on Jan. 9, 2007 published as WO2008083949, and U.S. patent application Ser. No. 10/729,830 filed on Dec. 5, 2003 published as US20050032730, 10/870,110 filed on Jun. 18, 2004 published as US20050059624, 11/914,945 filed on Jul. 7, 2008 published as US20080267873, 12/446,912 filed on Oct. 27, 2009 published as US2010047261 now abandoned, Ser. No. 12/522,214 filed on Jan. 4, 2010 published as US20100189729, 12/787,566 filed on May 26, 2010 published as US20110077287, 12/787,755 filed on May 26, 2010 published as US20100239608, 13/185,119 filed on Jul. 18, 2011 published as US20110269950, and Ser. No. 13/106,548 filed on May 12, 2011 published as US20110311472 all of which are herein incorporated by reference in their entirety.

[0010] Notwithstanding these reports which are limited to a selection of chemical modifications including pseudouridine and 5-methyl-cytosine, there remains a need in the art for therapeutic modalities to address the myriad of barriers surrounding the efficacious modulation of intracellular translation and processing of nucleic acids encoding polypeptides or fragments thereof.

[0011] To this end, the inventors have shown that certain modified mRNA sequences have the potential as therapeutics with benefits beyond just evading, avoiding or diminishing the immune response. Such studies are detailed in published co-pending applications International Application PCT/US2011/046861 filed Aug. 5, 2011 and PCT/US2011/054636 filed Oct. 3, 2011, International Application number PCT/US2011/054617 filed Oct. 3, 2011, the contents of which are incorporated herein by reference in their entirety.

[0012] The present invention addresses this need by providing nucleic acid based compounds or polynucleotides which encode a polypeptide of interest (e.g., modified mRNA or mmRNA) and which have structural and/or chemical features that avoid one or more of the problems in the art, for example, features which are useful for optimizing formulation and delivery of nucleic acid-based therapeutics while retaining structural and functional integrity, overcoming the threshold of expression, improving expression rates, half life and/or protein concentrations, optimizing protein localization, and avoiding deleterious bio-responses such as the immune response and/or degradation pathways.

### SUMMARY OF THE INVENTION

[0013] Described herein are compositions, methods, processes, kits and devices for the design, preparation, manufacture and/or formulation of modified mRNA (mmRNA) molecules.

[0014] The details of various embodiments of the invention are set forth in the description below. Other features, objects, and advantages of the invention will be apparent from the description and the drawings, and from the claims.

### BRIEF DESCRIPTION OF THE DRAWINGS

[0015] The foregoing and other objects, features and advantages will be apparent from the following description of particular embodiments of the invention, as illustrated in the accompanying drawings in which like reference characters refer to the same parts throughout the different views. The drawings are not necessarily to scale, emphasis instead being placed upon illustrating the principles of various embodiments of the invention.

[0016] FIG. 1 is a schematic of a primary construct of the present invention.

[0017] FIG. 2 illustrates lipid structures in the prior art useful in the present invention. Shown are the structures for 98N12-5 (TETA5-LAP), DLin-DMA, DLin-K-DMA (2,2-Dilinoleyl-4-dimethylaminomethyl-[1,3]-dioxolane), DLin-KC2-DMA, DLin-MC3-DMA and C12-200.

[0018] FIG. 3 is a representative plasmid useful in the IVT reactions taught herein. The plasmid contains Insert 64818, designed by the instant inventors.

[0019] FIG. 4 is a gel profile of modified mRNA encapsulated in PLGA microspheres.

[0020] FIG. 5 is a histogram of Factor IX protein production PLGA formulation Factor IX modified mRNA.

[0021] FIGS. 6A-6C are histograms showing VEGF protein production in human keratinocyte cells after transfection of modified mRNA at a range of doses. FIG. 6A shows protein production after transfection of modified mRNA comprising natural nucleoside triphosphate (NTP). FIG. 6B shows protein production after transfection of modified mRNA fully modified with pseudouridine (Pseudo-U) and 5-methylcytosine (5 mC). FIG. 6C shows protein production after transfection of modified mRNA fully modified with N1-methyl-pseudouridine (N1-methyl-Pseudo-U) and 5-methylcytosine (5 mC).

[0022] FIG. 7 is a histogram of VEGF protein production in HEK293 cells.

[0023] FIGS. 8A and 8B are histograms of VEGF expression and IFN-alpha induction after transfection of VEGF modified mRNA in peripheral blood mononuclear cells (PBMC). FIG. 8A shows VEGF expression. FIG. 8B shows IFN-alpha induction.

[0024] FIG. 9 is a histogram of VEGF protein production in HeLa cells from VEGF modified mRNA.

[0025] FIG. 10 is a histogram of VEGF protein production from lipoplexed VEGF modified mRNA in mice.

[0026] FIG. 11 is a histogram of G-CSF protein production in HeLa cells from G-CSF modified mRNA.

[0027] FIG. 12 is a histogram of G-CSF protein production in mice from lipoplexedG-CSF modified mRNA.

[0028] FIG. 13 is a histogram of Factor IX protein production in HeLa cell supernatant from Factor IX modified mRNA.

[0029] FIG. 14 is a histogram of APOA1 protein production in HeLa cells from APOA1 wild-type modified mRNA, APOA1 Milano modified mRNA or APOA1 Paris modified mRNA.

[0030] FIG. 15 is a gel profile of APOA1 protein from APOA1 wild-type modified mRNA.

[0031] FIG. 16 is a gel profile of APOA1 protein from APOA1 Paris modified mRNA.

[0032] FIG. 17 is a gel profile of APOA1 protein from APOA1 Milano modified mRNA.

[0033] FIG. 18 is a gel profile of Fibrinogen alpha (FGA) protein from FGA modified mRNA.

[0034] FIG. 19 is a histogram of Plasminogen protein production in HeLa cell supernatant from Plasminogen modified mRNA.

[0035] FIG. 20 is a gel profile of Plasminogen protein from Plasminogen modified mRNA.

[0036] FIG. 21 is a gel profile of galactose-1-phosphate uridylyltransferase (GALT) protein from GALT modified mRNA.

[0037] FIG. 22 is a gel profile of argininosuccinate lyase (ASL) protein from ASL modified mRNA.

[0038] FIG. 23 is a gel profile of tyrosine aminotransferase (TAT) protein from TAT modified mRNA.

[0039] FIG. 24 is a gel profile of glucan (1,4-alpha-), branching enzyme 1 (GBE1) protein from GBE1 modified mRNA.

[0040] FIG. 25 is a histogram of Prothrombin protein production in HeLa cell supernatant from Prothrombin modified mRNA.

[0041] FIG. 26 is a histogram of Prothrombin protein production in HeLa cell supernatant from Prothrombin modified mRNA.

[0042] FIG. 27 is a gel profile of ceruloplasmin (CP or CLP) protein from CP modified mRNA.

[0043] FIG. 28 is a histogram of transforming growth factor beta 1 (TGF-beta1) protein production in HeLa cell supernatant from TGF-beta1 modified mRNA.

[0044] FIG. 29 is a gel profile of ornithine carbamoyltransferase (OTC) protein from OTC modified mRNA.

[0045] FIG. 30 is a flow cytometry plot of low density lipoprotein receptor (LDLR) modified mRNA.

[0046] FIG. 31 is a gel profile of UDP glucuronosyltransferase 1 family, polypeptide A1 (UGT1A1) protein from UGT1A1 modified mRNA.

[0047] FIG. 32 is a histogram of Factor XI protein production in HEK293 cells.

[0048] FIG. 33 is a gel profile of Aquaporin-5 protein from Aquaporin-5 modified mRNA.

[0049] FIG. 34 is a histogram of Factor VII protein production in HeLa cells from Factor VII modified mRNA.

[0050] FIG. 35 is a histogram of Insulin Glargine protein production in HeLa cells from Insulin Glargine modified mRNA.

[0051] FIG. 36 is a histogram of Tissue Factor protein production in HeLa cells from Tissue Factor modified mRNA.

[0052] FIG. 37 is a histogram of Factor XI protein production in HeLa cells from Factor XI modified mRNA.

[0053] FIG. 38 is a histogram of Factor XI protein production in HeLa cell supernatant from Factor XI modified mRNA.

[0054] FIG. 39 is a histogram of Insulin Aspart protein production in HeLa cells from Insulin Aspart modified mRNA.

[0055] FIG. 40 is a histogram of Insulin Lispro protein production in HeLa cells from Insulin Lispro modified mRNA.

[0056] FIG. 41 is a histogram of Insulin Glulisine protein production in HeLa cells from Insulin Glulisine modified mRNA.

[0057] FIG. 42 is a histogram of human growth hormone protein production in HeLa cells from human growth hormone modified mRNA.

[0058] FIGS. 43A and 43B are gel profiles of tumor protein 53 (p53) protein from p53 modified mRNA. FIG. 43A shows the expected size of p53. FIG. 43B shows the expected size of p53.

[0059] FIG. 44 is a gel profile of tuftelin (TUFT1) protein from TUFT1 modified mRNA.

[0060] FIGS. 45A and 45B are gel profiles of galactokinase 1 (GALK1) protein from GALK1 modified mRNA. FIG. 45A shows the expected size of GALK1. FIG. 45B shows the expected size of GALK1.

[0061] FIG. 46 is a gel profile of defensin, beta 103A (DEFB103A) protein from DEFB103A modified mRNA.

[0062] FIG. 47 is a flow cytometry plot of LDLR modified mRNA.

[0063] FIG. 48 is a histogram of vascular endothelial growth factor expression in HeLa.

[0064] FIG. 49 is a histogram of the cell vitality of HeLa cells transfected with vascular endothelial growth factor mRNA.

[0065] FIG. 50 is a histogram of Insulin Aspart protein expression.

[0066] FIG. 51 is a histogram of Insulin Glargine protein expression.

[0067] FIG. 52 is a histogram of Insulin Glulisine protein expression.

[0068] FIG. 53 is a histogram of Interleukin 7 (IL-7) protein expression.

[0069] FIG. 54 is a histogram of Erythropoietin (EPO) protein expression.

[0070] FIG. 55 is a gel profile of Lysosomal Acid Lipase protein from Lysosomal Acid Lipase modified mRNA.

[0071] FIG. 56 is a gel profile of Glucocerebrosidase protein from Glucocerebrosidase modified mRNA.

[0072] FIG. 57 is a gel profile of Iduronate 2-Sulfatase protein from Iduronate 2-Sulfatase modified mRNA.

[0073] FIG. 58 is a gel profile of Luciferase protein from Luciferase modified mRNA.

[0074] FIG. 59 is a histogram of IgG concentration after administration with formulated Herceptin modified mRNA in mammals.

[0075] FIG. 60 is a histogram of IgG concentration (in ng/ml) after transfection with Herceptin modified mRNA.

[0076] FIG. 61 is a gel profile of Herceptin protein from Herceptin modified mRNA.

[0077] FIG. 62 is a histogram of Glucocerebrosidase enzyme activity.

[0078] FIG. 63 is a histogram of Lysosomal Acid Lipase enzyme activity.

[0079] FIG. 64 is histogram of Factor VIII protein expression.

[0080] FIG. 65 is a histogram of Factor VIII Chromogenic Activity.

[0081] FIGS. 66A-66D are graphs showing LDLR Expression. FIG. 66A shows LDL Receptor Expression of cells compared to LDLR mRNA added. FIG. 66B shows LDL Receptor Expression of cells post transfection. FIG. 66C shows the saturation of BODIPY® labeled LRL. FIG. 66D shows the binding affinity of BODIPY-LDL to cells.

[0082] FIG. 67 is a graph showing the percent positive cells for UGT1A1 Expression.

[0083] FIG. 68 is a graph showing UGT1A1 protein accumulation.

[0084] FIG. 69 is a gel profile of UGT1A1 protein and OTC from eith UGT1A1 or OTC modified mRNA.

[0085] FIG. 70 is a flow cytometry plot of HEK293 cells transfected with PAh or UGT1A1.

[0086] FIG. 71 is a gel profile of UGT1A1 protein from UGT1A1 modified mRNA.

[0087] FIG. 72 is a gel profile of microsomal extracts of mice treated with LNPs containing UGT1A1.

### DETAILED DESCRIPTION

[0088] It is of great interest in the fields of therapeutics, diagnostics, reagents and for biological assays to be able to deliver a nucleic acid, e.g., a ribonucleic acid (RNA) inside a cell, whether in vitro, in vivo, in situ or ex vivo, such as to cause intracellular translation of the nucleic acid and production of an encoded polypeptide of interest. Of particular importance is the delivery and function of a non-integrative polynucleotide.

[0089] Described herein are compositions (including pharmaceutical compositions) and methods for the design, preparation, manufacture and/or formulation of polynucleotides encoding one or more polypeptides of interest. Also provided are systems, processes, devices and kits for the selection, design and/or utilization of the polynucleotides encoding the polypeptides of interest described herein.

[0090] According to the present invention, these polynucleotides are preferably modified as to avoid the deficiencies of other polypeptide-encoding molecules of the art. Hence these polynucleotides are referred to as modified mRNA or mmRNA.

[0091] The use of modified polynucleotides in the fields of antibodies, viruses, veterinary applications and a variety of in vivo settings has been explored by the inventors and these studies are disclosed in for example, co-pending and co-owned U.S. provisional patent application serial numbers 61/470,451 filed Mar. 31, 2011 teaching in vivo applications of mmRNA; 61/517,784 filed on Apr. 26, 2011 teaching engineered nucleic acids for the production of antibody polypeptides; 61/519,158 filed May 17, 2011 teaching veterinary applications of mmRNA technology; 61/533,537 filed on Sep. 12, 2011 teaching antimicrobial applications of mmRNA technology; 61/533,554 filed on Sep. 12, 2011 teaching viral applications of mmRNA technology, 61/542,533 filed on Oct. 3, 2011 teaching various chemical modifications for use in mmRNA technology; 61/570,690 filed on Dec. 14, 2011 teaching mobile devices for use in making or using mmRNA technology; 61/570,708 filed on Dec. 14, 2011 teaching the use of mmRNA in acute care situations; 61/576,651 filed on Dec. 16, 2011 teaching terminal modification architecture for mmRNA; 61/576,705 filed on Dec. 16, 2011 teaching delivery methods using lipidoids for mmRNA; 61/578,271 filed on Dec. 21, 2011 teaching methods to increase the viability of organs or tissues using mmRNA; 61/581,322 filed on Dec. 29, 2011 teaching mmRNA encoding cell penetrating peptides; 61/581,352 filed on Dec. 29, 2011 teaching the incorporation of cytotoxic nucleosides in mmRNA and 61/631,729 filed on Jan. 10, 2012 teaching methods of using mmRNA for crossing the blood brain barrier; all of which are herein incorporated by reference in their entirety.

[0092] Provided herein, in part, are polynucleotides, primary constructs and/or mmRNA encoding polypeptides of interest which have been designed to improve one or more of the stability and/or clearance in tissues, receptor uptake and/or kinetics, cellular access by the compositions, engagement with translational machinery, mRNA half-life, translation efficiency, immune evasion, protein production capacity, secretion efficiency (when applicable), accessibility to circulation, protein half-life and/or modulation of a cell's status, function and/or activity.

### I. Compositions of the Invention (mmRNA)

[0093] The present invention provides nucleic acid molecules, specifically polynucleotides, primary constructs and/or mmRNA which encode one or more polypeptides of interest. The term “nucleic acid,” in its broadest sense, includes any compound and/or substance that comprise a polymer of nucleotides. These polymers are often referred to as polynucleotides. Exemplary nucleic acids or polynucleotides of the invention include, but are not limited to, ribonucleic acids (RNAs), deoxyribonucleic acids (DNAs), threose nucleic acids (TNAs), glycol nucleic acids (GNAs), peptide nucleic acids (PNAs), locked nucleic acids (LNAs, including LNA having a β-D-ribo configuration, α-LNA having an α-L-ribo configuration (a diastereomer of LNA), 2′-amino-LNA having a 2′-amino functionalization, and 2′-amino-α-LNA having a 2′-amino functionalization) or hybrids thereof.

[0094] In preferred embodiments, the nucleic acid molecule is a messenger RNA (mRNA). As used herein, the term “messenger RNA” (mRNA) refers to any polynucleotide which encodes a polypeptide of interest and which is capable of being translated to produce the encoded polypeptide of interest in vitro, in vivo, in situ or ex vivo.

[0095] Traditionally, the basic components of an mRNA molecule include at least a coding region, a 5′UTR, a 3′UTR, a 5′ cap and a poly-A tail. Building on this wild type modular structure, the present invention expands the scope of functionality of traditional mRNA molecules by providing polynucleotides or primary RNA constructs which maintain a modular organization, but which comprise one or more structural and/or chemical modifications or alterations which impart useful properties to the polynucleotide including, in some embodiments, the lack of a substantial induction of the innate immune response of a cell into which the polynucleotide is introduced. As such, modified mRNA molecules of the present invention are termed “mmRNA.” As used herein, a “structural” feature or modification is one in which two or more linked nucleotides are inserted, deleted, duplicated, inverted or randomized in a polynucleotide, primary construct or mmRNA without significant chemical modification to the nucleotides themselves. Because chemical bonds will necessarily be broken and reformed to effect a structural modification, structural modifications are of a chemical nature and hence are chemical modifications. However, structural modifications will result in a different sequence of nucleotides. For example, the polynucleotide “ATCG” may be chemically modified to “AT-5meC-G”. The same polynucleotide may be structurally modified from “ATCG” to “ATCCCG”. Here, the dinucleotide “CC” has been inserted, resulting in a structural modification to the polynucleotide.

mmRNA Architecture

[0096] The mmRNA of the present invention are distinguished from wild type mRNA in their functional and/or structural design features which serve to, as evidenced herein, overcome existing problems of effective polypeptide production using nucleic acid-based therapeutics.

[0097] FIG. 1 shows a representative polynucleotide primary construct 100 of the present invention. As used herein, the term “primary construct” or “primary mRNA construct” refers to a polynucleotide transcript which encodes one or more polypeptides of interest and which retains sufficient structural and/or chemical features to allow the polypeptide of interest encoded therein to be translated. Primary constructs may be polynucleotides of the invention. When structurally or chemically modified, the primary construct may be referred to as an mmRNA.

[0098] Returning to FIG. 1, the primary construct 100 here contains a first region of linked nucleotides 102 that is flanked by a first flanking region 104 and a second flaking region 106. As used herein, the “first region” may be referred to as a “coding region” or “region encoding” or simply the “first region.” This first region may include, but is not limited to, the encoded polypeptide of interest. The polypeptide of interest may comprise at its 5′ terminus one or more signal sequences encoded by a signal sequence region 103. The flanking region 104 may comprise a region of linked nucleotides comprising one or more complete or incomplete 5′ UTRs sequences. The flanking region 104 may also comprise a 5′ terminal cap 108. The second flanking region 106 may comprise a region of linked nucleotides comprising one or more complete or incomplete 3′ UTRs. The flanking region 106 may also comprise a 3′ tailing sequence 110.

[0099] Bridging the 5′ terminus of the first region 102 and the first flanking region 104 is a first operational region 105. Traditionally this operational region comprises a Start codon. The operational region may alternatively comprise any translation initiation sequence or signal including a Start codon.

[0100] Bridging the 3′ terminus of the first region 102 and the second flanking region 106 is a second operational region 107. Traditionally this operational region comprises a Stop codon. The operational region may alternatively comprise any translation initiation sequence or signal including a Stop codon. According to the present invention, multiple serial stop codons may also be used.

[0101] Generally, the shortest length of the first region of the primary construct of the present invention can be the length of a nucleic acid sequence that is sufficient to encode for a dipeptide, a tripeptide, a tetrapeptide, a pentapeptide, a hexapeptide, a heptapeptide, an octapeptide, a nonapeptide, or a decapeptide. In another embodiment, the length may be sufficient to encode a peptide of 2-30 amino acids, e.g. 5-30, 10-30, 2-25, 5-25, 10-25, or 10-20 amino acids. The length may be sufficient to encode for a peptide of at least 11, 12, 13, 14, 15, 17, 20, 25 or 30 amino acids, or a peptide that is no longer than 40 amino acids, e.g. no longer than 35, 30, 25, 20, 17, 15, 14, 13, 12, 11 or 10 amino acids. Examples of dipeptides that the polynucleotide sequences can encode or include, but are not limited to, carnosine and anserine.

[0102] Generally, the length of the first region encoding the polypeptide of interest of the present invention is greater than about 30 nucleotides in length (e.g., at least or greater than about 35, 40, 45, 50, 55, 60, 70, 80, 90, 100, 120, 140, 160, 180, 200, 250, 300, 350, 400, 450, 500, 600, 700, 800, 900, 1,000, 1,100, 1,200, 1,300, 1,400, 1,500, 1,600, 1,700, 1,800, 1,900, 2,000, 2,500, and 3,000, 4,000, 5,000, 6,000, 7,000, 8,000, 9,000, 10,000, 20,000, 30,000, 40,000, 50,000, 60,000, 70,000, 80,000, 90,000 or up to and including 100,000 nucleotides). As used herein, the “first region” may be referred to as a “coding region” or “region encoding” or simply the “first region.”

[0103] In some embodiments, the polynucleotide, primary construct, or mmRNA includes from about 30 to about 100,000 nucleotides (e.g., from 30 to 50, from 30 to 100, from 30 to 250, from 30 to 500, from 30 to 1,000, from 30 to 1,500, from 30 to 3,000, from 30 to 5,000, from 30 to 7,000, from 30 to 10,000, from 30 to 25,000, from 30 to 50,000, from 30 to 70,000, from 100 to 250, from 100 to 500, from 100 to 1,000, from 100 to 1,500, from 100 to 3,000, from 100 to 5,000, from 100 to 7,000, from 100 to 10,000, from 100 to 25,000, from 100 to 50,000, from 100 to 70,000, from 100 to 100,000, from 500 to 1,000, from 500 to 1,500, from 500 to 2,000, from 500 to 3,000, from 500 to 5,000, from 500 to 7,000, from 500 to 10,000, from 500 to 25,000, from 500 to 50,000, from 500 to 70,000, from 500 to 100,000, from 1,000 to 1,500, from 1,000 to 2,000, from 1,000 to 3,000, from 1,000 to 5,000, from 1,000 to 7,000, from 1,000 to 10,000, from 1,000 to 25,000, from 1,000 to 50,000, from 1,000 to 70,000, from 1,000 to 100,000, from 1,500 to 3,000, from 1,500 to 5,000, from 1,500 to 7,000, from 1,500 to 10,000, from 1,500 to 25,000, from 1,500 to 50,000, from 1,500 to 70,000, from 1,500 to 100,000, from 2,000 to 3,000, from 2,000 to 5,000, from 2,000 to 7,000, from 2,000 to 10,000, from 2,000 to 25,000, from 2,000 to 50,000, from 2,000 to 70,000, and from 2,000 to 100,000).

[0104] According to the present invention, the first and second flanking regions may range independently from 15-1,000 nucleotides in length (e.g., greater than 30, 40, 45, 50, 55, 60, 70, 80, 90, 100, 120, 140, 160, 180, 200, 250, 300, 350, 400, 450, 500, 600, 700, 800, and 900 nucleotides or at least 30, 40, 45, 50, 55, 60, 70, 80, 90, 100, 120, 140, 160, 180, 200, 250, 300, 350, 400, 450, 500, 600, 700, 800, 900, and 1,000 nucleotides).

[0105] According to the present invention, the tailing sequence may range from absent to 500 nucleotides in length (e.g., at least 60, 70, 80, 90, 120, 140, 160, 180, 200, 250, 300, 350, 400, 450, or 500 nucleotides). Where the tailing region is a polyA tail, the length may be determined in units of or as a function of polyA Binding Protein binding. In this embodiment, the polyA tail is long enough to bind at least 4 monomers of PolyA Binding Protein. PolyA Binding Protein monomers bind to stretches of approximately 38 nucleotides. As such, it has been observed that polyA tails of about 80 nucleotides and 160 nucleotides are functional.

[0106] According to the present invention, the capping region may comprise a single cap or a series of nucleotides forming the cap. In this embodiment the capping region may be from 1 to 10, e.g. 2-9, 3-8, 4-7, 1-5, 5-10, or at least 2, or 10 or fewer nucleotides in length. In some embodiments, the cap is absent.

[0107] According to the present invention, the first and second operational regions may range from 3 to 40, e.g., 5-30, 10-20, 15, or at least 4, or 30 or fewer nucleotides in length and may comprise, in addition to a Start and/or Stop codon, one or more signal and/or restriction sequences.

Cyclic mmRNA

[0108] According to the present invention, a primary construct or mmRNA may be cyclized, or concatemerized, to generate a translation competent molecule to assist interactions between poly-A binding proteins and 5′-end binding proteins. The mechanism of cyclization or concatemerization may occur through at least 3 different routes: 1) chemical, 2) enzymatic, and 3) ribozyme catalyzed. The newly formed 5′-/3′-linkage may be intramolecular or intermolecular.

[0109] In the first route, the 5′-end and the 3′-end of the nucleic acid contain chemically reactive groups that, when close together, form a new covalent linkage between the 5′-end and the 3′-end of the molecule. The 5′-end may contain an NHS-ester reactive group and the 3′-end may contain a 3′-amino-terminated nucleotide such that in an organic solvent the 3′-amino-terminated nucleotide on the 3′-end of a synthetic mRNA molecule will undergo a nucleophilic attack on the 5′-NHS-ester moiety forming a new 5′-/3′-amide bond.

[0110] In the second route, T4 RNA ligase may be used to enzymatically link a 5′-phosphorylated nucleic acid molecule to the 3′-hydroxyl group of a nucleic acid forming a new phosphorodiester linkage. In an example reaction, 1 μg of a nucleic acid molecule is incubated at 37° C. for 1 hour with 1-10 units of T4 RNA ligase (New England Biolabs, Ipswich, MA) according to the manufacturer's protocol. The ligation reaction may occur in the presence of a split oligonucleotide capable of base-pairing with both the 5′- and 3′-region in juxtaposition to assist the enzymatic ligation reaction.

[0111] In the third route, either the 5′- or 3′-end of the cDNA template encodes a ligase ribozyme sequence such that during in vitro transcription, the resultant nucleic acid molecule can contain an active ribozyme sequence capable of ligating the 5′-end of a nucleic acid molecule to the 3′-end of a nucleic acid molecule. The ligase ribozyme may be derived from the Group I Intron, Group I Intron, Hepatitis Delta Virus, Hairpin ribozyme or may be selected by SELEX (systematic evolution of ligands by exponential enrichment). The ribozyme ligase reaction may take 1 to 24 hours at temperatures between 0 and 37° C.

mmRNA Multimers

[0112] According to the present invention, multiple distinct polynucleotides, primary constructs or mmRNA may be linked together through the 3′-end using nucleotides which are modified at the 3′-terminus. Chemical conjugation may be used to control the stoichiometry of delivery into cells. For example, the glyoxylate cycle enzymes, isocitrate lyase and malate synthase, may be supplied into HepG2 cells at a 1:1 ratio to alter cellular fatty acid metabolism. This ratio may be controlled by chemically linking polynucleotides, primary constructs or mmRNA using a 3′-azido terminated nucleotide on one polynucleotide, primary construct or mmRNA species and a C5-ethynyl or alkynyl-containing nucleotide on the opposite polynucleotide, primary construct or mmRNA species. The modified nucleotide is added post-transcriptionally using terminal transferase (New England Biolabs, Ipswich, MA) according to the manufacturer's protocol. After the addition of the 3′-modified nucleotide, the two polynucleotide, primary construct or mmRNA species may be combined in an aqueous solution, in the presence or absence of copper, to form a new covalent linkage via a click chemistry mechanism as described in the literature.

[0113] In another example, more than two polynucleotides may be linked together using a functionalized linker molecule. For example, a functionalized saccharide molecule may be chemically modified to contain multiple chemical reactive groups (SH—, NH₂—, N₃, etc. . . . ) to react with the cognate moiety on a 3′-functionalized mRNA molecule (i.e., a 3′-maleimide ester, 3′-NHS-ester, alkynyl). The number of reactive groups on the modified saccharide can be controlled in a stoichiometric fashion to directly control the stoichiometric ratio of conjugated polynucleotide, primary construct or mmRNA.

mmRNA Conjugates and Combinations

[0114] In order to further enhance protein production, primary constructs or mmRNA of the present invention can be designed to be conjugated to other polynucleotides, dyes, intercalating agents (e.g. acridines), cross-linkers (e.g. psoralene, mitomycin C), porphyrins (TPPC4, texaphyrin, Sapphyrin), polycyclic aromatic hydrocarbons (e.g., phenazine, dihydrophenazine), artificial endonucleases (e.g. EDTA), alkylating agents, phosphate, amino, mercapto, PEG (e.g., PEG-40K), MPEG, [MPEG]₂, polyamino, alkyl, substituted alkyl, radiolabeled markers, enzymes, haptens (e.g. biotin), transport/absorption facilitators (e.g., aspirin, vitamin E, folic acid), synthetic ribonucleases, proteins, e.g., glycoproteins, or peptides, e.g., molecules having a specific affinity for a co-ligand, or antibodies e.g., an antibody, that binds to a specified cell type such as a cancer cell, endothelial cell, or bone cell, hormones and hormone receptors, non-peptidic species, such as lipids, lectins, carbohydrates, vitamins, cofactors, or a drug.

[0115] Conjugation may result in increased stability and/or half life and may be particularly useful in targeting the polynucleotides, primary constructs or mmRNA to specific sites in the cell, tissue or organism.

[0116] According to the present invention, the mmRNA or primary constructs may be administered with, or further encode one or more of RNAi agents, siRNAs, shRNAs, miRNAs, miRNA binding sites, antisense RNAs, ribozymes, catalytic DNA, tRNA, RNAs that induce triple helix formation, aptamers or vectors, and the like.

Bifunctional mmRNA

[0117] In one embodiment of the invention are bifunctional polynucleotides (e.g., bifunctional primary constructs or bifunctional mmRNA). As the name implies, bifunctional polynucleotides are those having or capable of at least two functions. These molecules may also by convention be referred to as multi-functional.

[0118] The multiple functionalities of bifunctional polynucleotides may be encoded by the RNA (the function may not manifest until the encoded product is translated) or may be a property of the polynucleotide itself. It may be structural or chemical. Bifunctional modified polynucleotides may comprise a function that is covalently or electrostatically associated with the polynucleotides. Further, the two functions may be provided in the context of a complex of a mmRNA and another molecule.

[0119] Bifunctional polynucleotides may encode peptides which are anti-proliferative. These peptides may be linear, cyclic, constrained or random coil. They may function as aptamers, signaling molecules, ligands or mimics or mimetics thereof. Anti-proliferative peptides may, as translated, be from 3 to 50 amino acids in length. They may be 5-40, 10-30, or approximately 15 amino acids long. They may be single chain, multichain or branched and may form complexes, aggregates or any multi-unit structure once translated.

### Noncoding Polynucleotides and Primary Constructs

[0120] As described herein, provided are polynucleotides and primary constructs having sequences that are partially or substantially not translatable, e.g., having a noncoding region. Such noncoding region may be the “first region” of the primary construct. Alternatively, the noncoding region may be a region other than the first region. Such molecules are generally not translated, but can exert an effect on protein production by one or more of binding to and sequestering one or more translational machinery components such as a ribosomal protein or a transfer RNA (tRNA), thereby effectively reducing protein expression in the cell or modulating one or more pathways or cascades in a cell which in turn alters protein levels. The polynucleotide or primary construct may contain or encode one or more long noncoding RNA (lncRNA, or lincRNA) or portion thereof, a small nucleolar RNA (sno-RNA), micro RNA (miRNA), small interfering RNA (siRNA) or Piwi-interacting RNA (piRNA).

### Polypeptides of Interest

[0121] According to the present invention, the primary construct is designed to encode one or more polypeptides of interest or fragments thereof. A polypeptide of interest may include, but is not limited to, whole polypeptides, a plurality of polypeptides or fragments of polypeptides, which independently may be encoded by one or more nucleic acids, a plurality of nucleic acids, fragments of nucleic acids or variants of any of the aforementioned. As used herein, the term “polypeptides of interest” refer to any polypeptide which is selected to be encoded in the primary construct of the present invention. As used herein, “polypeptide” means a polymer of amino acid residues (natural or unnatural) linked together most often by peptide bonds. The term, as used herein, refers to proteins, polypeptides, and peptides of any size, structure, or function. In some instances the polypeptide encoded is smaller than about 50 amino acids and the polypeptide is then termed a peptide. If the polypeptide is a peptide, it will be at least about 2, 3, 4, or at least 5 amino acid residues long. Thus, polypeptides include gene products, naturally occurring polypeptides, synthetic polypeptides, homologs, orthologs, paralogs, fragments and other equivalents, variants, and analogs of the foregoing. A polypeptide may be a single molecule or may be a multi-molecular complex such as a dimer, trimer or tetramer. They may also comprise single chain or multichain polypeptides such as antibodies or insulin and may be associated or linked. Most commonly disulfide linkages are found in multichain polypeptides. The term polypeptide may also apply to amino acid polymers in which one or more amino acid residues are an artificial chemical analogue of a corresponding naturally occurring amino acid.

[0122] The term “polypeptide variant” refers to molecules which differ in their amino acid sequence from a native or reference sequence. The amino acid sequence variants may possess substitutions, deletions, and/or insertions at certain positions within the amino acid sequence, as compared to a native or reference sequence. Ordinarily, variants will possess at least about 50% identity (homology) to a native or reference sequence, and preferably, they will be at least about 80%, more preferably at least about 90% identical (homologous) to a native or reference sequence.

[0123] In some embodiments “variant mimics” are provided. As used herein, the term “variant mimic” is one which contains one or more amino acids which would mimic an activated sequence. For example, glutamate may serve as a mimic for phosphoro-threonine and/or phosphoro-serine. Alternatively, variant mimics may result in deactivation or in an inactivated product containing the mimic, e.g., phenylalanine may act as an inactivating substitution for tyrosine; or alanine may act as an inactivating substitution for serine.

[0124] “Homology” as it applies to amino acid sequences is defined as the percentage of residues in the candidate amino acid sequence that are identical with the residues in the amino acid sequence of a second sequence after aligning the sequences and introducing gaps, if necessary, to achieve the maximum percent homology. Methods and computer programs for the alignment are well known in the art. It is understood that homology depends on a calculation of percent identity but may differ in value due to gaps and penalties introduced in the calculation.

[0125] By “homologs” as it applies to polypeptide sequences means the corresponding sequence of other species having substantial identity to a second sequence of a second species.

[0126] “Analogs” is meant to include polypeptide variants which differ by one or more amino acid alterations, e.g., substitutions, additions or deletions of amino acid residues that still maintain one or more of the properties of the parent or starting polypeptide.

[0127] The present invention contemplates several types of compositions which are polypeptide based including variants and derivatives. These include substitutional, insertional, deletion and covalent variants and derivatives. The term “derivative” is used synonymously with the term “variant” but generally refers to a molecule that has been modified and/or changed in any way relative to a reference molecule or starting molecule.

[0128] As such, mmRNA encoding polypeptides containing substitutions, insertions and/or additions, deletions and covalent modifications with respect to reference sequences, in particular the polypeptide sequences disclosed herein, are included within the scope of this invention. For example, sequence tags or amino acids, such as one or more lysines, can be added to the peptide sequences of the invention (e.g., at the N-terminal or C-terminal ends). Sequence tags can be used for peptide purification or localization. Lysines can be used to increase peptide solubility or to allow for biotinylation. Alternatively, amino acid residues located at the carboxy and amino terminal regions of the amino acid sequence of a peptide or protein may optionally be deleted providing for truncated sequences. Certain amino acids (e.g., C-terminal or N-terminal residues) may alternatively be deleted depending on the use of the sequence, as for example, expression of the sequence as part of a larger sequence which is soluble, or linked to a solid support.

[0129] “Substitutional variants” when referring to polypeptides are those that have at least one amino acid residue in a native or starting sequence removed and a different amino acid inserted in its place at the same position. The substitutions may be single, where only one amino acid in the molecule has been substituted, or they may be multiple, where two or more amino acids have been substituted in the same molecule.

[0130] As used herein the term “conservative amino acid substitution” refers to the substitution of an amino acid that is normally present in the sequence with a different amino acid of similar size, charge, or polarity. Examples of conservative substitutions include the substitution of a non-polar (hydrophobic) residue such as isoleucine, valine and leucine for another non-polar residue. Likewise, examples of conservative substitutions include the substitution of one polar (hydrophilic) residue for another such as between arginine and lysine, between glutamine and asparagine, and between glycine and serine. Additionally, the substitution of a basic residue such as lysine, arginine or histidine for another, or the substitution of one acidic residue such as aspartic acid or glutamic acid for another acidic residue are additional examples of conservative substitutions. Examples of non-conservative substitutions include the substitution of a non-polar (hydrophobic) amino acid residue such as isoleucine, valine, leucine, alanine, methionine for a polar (hydrophilic) residue such as cysteine, glutamine, glutamic acid or lysine and/or a polar residue for a non-polar residue.

[0131] “Insertional variants” when referring to polypeptides are those with one or more amino acids inserted immediately adjacent to an amino acid at a particular position in a native or starting sequence. “Immediately adjacent” to an amino acid means connected to either the alpha-carboxy or alpha-amino functional group of the amino acid.

[0132] “Deletional variants” when referring to polypeptides are those with one or more amino acids in the native or starting amino acid sequence removed. Ordinarily, deletional variants will have one or more amino acids deleted in a particular region of the molecule.

[0133] “Covalent derivatives” when referring to polypeptides include modifications of a native or starting protein with an organic proteinaceous or non-proteinaceous derivatizing agent, and/or post-translational modifications. Covalent modifications are traditionally introduced by reacting targeted amino acid residues of the protein with an organic derivatizing agent that is capable of reacting with selected side-chains or terminal residues, or by harnessing mechanisms of post-translational modifications that function in selected recombinant host cells. The resultant covalent derivatives are useful in programs directed at identifying residues important for biological activity, for immunoassays, or for the preparation of anti-protein antibodies for immunoaffinity purification of the recombinant glycoprotein. Such modifications are within the ordinary skill in the art and are performed without undue experimentation.

[0134] Certain post-translational modifications are the result of the action of recombinant host cells on the expressed polypeptide. Glutaminyl and asparaginyl residues are frequently post-translationally deamidated to the corresponding glutamyl and aspartyl residues. Alternatively, these residues are deamidated under mildly acidic conditions. Either form of these residues may be present in the polypeptides produced in accordance with the present invention.

[0135] Other post-translational modifications include hydroxylation of proline and lysine, phosphorylation of hydroxyl groups of seryl or threonyl residues, methylation of the alpha-amino groups of lysine, arginine, and histidine side chains (T. E. Creighton, Proteins: Structure and Molecular Properties, W.H. Freeman & Co., San Francisco, pp. 79-86 (1983)).

[0136] “Features” when referring to polypeptides are defined as distinct amino acid sequence-based components of a molecule. Features of the polypeptides encoded by the mmRNA of the present invention include surface manifestations, local conformational shape, folds, loops, half-loops, domains, half-domains, sites, termini or any combination thereof.

[0137] As used herein when referring to polypeptides the term “surface manifestation” refers to a polypeptide based component of a protein appearing on an outermost surface.

[0138] As used herein when referring to polypeptides the term “local conformational shape” means a polypeptide based structural manifestation of a protein which is located within a definable space of the protein.

[0139] As used herein when referring to polypeptides the term “fold” refers to the resultant conformation of an amino acid sequence upon energy minimization. A fold may occur at the secondary or tertiary level of the folding process. Examples of secondary level folds include beta sheets and alpha helices. Examples of tertiary folds include domains and regions formed due to aggregation or separation of energetic forces. Regions formed in this way include hydrophobic and hydrophilic pockets, and the like.

[0140] As used herein the term “turn” as it relates to protein conformation means a bend which alters the direction of the backbone of a peptide or polypeptide and may involve one, two, three or more amino acid residues.

[0141] As used herein when referring to polypeptides the term “loop” refers to a structural feature of a polypeptide which may serve to reverse the direction of the backbone of a peptide or polypeptide. Where the loop is found in a polypeptide and only alters the direction of the backbone, it may comprise four or more amino acid residues. Oliva et al. have identified at least 5 classes of protein loops (J. Mol Biol 266 (4): 814-830; 1997). Loops may be open or closed. Closed loops or “cyclic” loops may comprise 2, 3, 4, 5, 6, 7, 8, 9, 10 or more amino acids between the bridging moieties. Such bridging moieties may comprise a cysteine-cysteine bridge (Cys-Cys) typical in polypeptides having disulfide bridges or alternatively bridging moieties may be non-protein based such as the dibromozylyl agents used herein.

[0142] As used herein when referring to polypeptides the term “half-loop” refers to a portion of an identified loop having at least half the number of amino acid resides as the loop from which it is derived. It is understood that loops may not always contain an even number of amino acid residues. Therefore, in those cases where a loop contains or is identified to comprise an odd number of amino acids, a half-loop of the odd-numbered loop will comprise the whole number portion or next whole number portion of the loop (number of amino acids of the loop/2+/−0.5 amino acids). For example, a loop identified as a 7 amino acid loop could produce half-loops of 3 amino acids or 4 amino acids (7/2=3.5+/−0.5 being 3 or 4).

[0143] As used herein when referring to polypeptides the term “domain” refers to a motif of a polypeptide having one or more identifiable structural or functional characteristics or properties (e.g., binding capacity, serving as a site for protein-protein interactions).

[0144] As used herein when referring to polypeptides the term “half-domain” means a portion of an identified domain having at least half the number of amino acid resides as the domain from which it is derived. It is understood that domains may not always contain an even number of amino acid residues. Therefore, in those cases where a domain contains or is identified to comprise an odd number of amino acids, a half-domain of the odd-numbered domain will comprise the whole number portion or next whole number portion of the domain (number of amino acids of the domain/2+/−0.5 amino acids). For example, a domain identified as a 7 amino acid domain could produce half-domains of 3 amino acids or 4 amino acids (7/2=3.5+/−0.5 being 3 or 4). It is also understood that subdomains may be identified within domains or half-domains, these subdomains possessing less than all of the structural or functional properties identified in the domains or half domains from which they were derived. It is also understood that the amino acids that comprise any of the domain types herein need not be contiguous along the backbone of the polypeptide (i.e., nonadjacent amino acids may fold structurally to produce a domain, half-domain or subdomain).

[0145] As used herein when referring to polypeptides the terms “site” as it pertains to amino acid based embodiments is used synonymously with “amino acid residue” and “amino acid side chain.” A site represents a position within a peptide or polypeptide that may be modified, manipulated, altered, derivatized or varied within the polypeptide based molecules of the present invention.

[0146] As used herein the terms “termini” or “terminus” when referring to polypeptides refers to an extremity of a peptide or polypeptide. Such extremity is not limited only to the first or final site of the peptide or polypeptide but may include additional amino acids in the terminal regions. The polypeptide based molecules of the present invention may be characterized as having both an N-terminus (terminated by an amino acid with a free amino group (NH2)) and a C-terminus (terminated by an amino acid with a free carboxyl group (COOH)). Proteins of the invention are in some cases made up of multiple polypeptide chains brought together by disulfide bonds or by non-covalent forces (multimers, oligomers). These sorts of proteins will have multiple N- and C-termini. Alternatively, the termini of the polypeptides may be modified such that they begin or end, as the case may be, with a non-polypeptide based moiety such as an organic conjugate.

[0147] Once any of the features have been identified or defined as a desired component of a polypeptide to be encoded by the primary construct or mmRNA of the invention, any of several manipulations and/or modifications of these features may be performed by moving, swapping, inverting, deleting, randomizing or duplicating. Furthermore, it is understood that manipulation of features may result in the same outcome as a modification to the molecules of the invention. For example, a manipulation which involved deleting a domain would result in the alteration of the length of a molecule just as modification of a nucleic acid to encode less than a full length molecule would.

[0148] Modifications and manipulations can be accomplished by methods known in the art such as, but not limited to, site directed mutagenesis. The resulting modified molecules may then be tested for activity using in vitro or in vivo assays such as those described herein or any other suitable screening assay known in the art.

[0149] According to the present invention, the polypeptides may comprise a consensus sequence which is discovered through rounds of experimentation. As used herein a “consensus” sequence is a single sequence which represents a collective population of sequences allowing for variability at one or more sites.

[0150] As recognized by those skilled in the art, protein fragments, functional protein domains, and homologous proteins are also considered to be within the scope of polypeptides of interest of this invention. For example, provided herein is any protein fragment (meaning a polypeptide sequence at least one amino acid residue shorter than a reference polypeptide sequence but otherwise identical) of a reference protein 10, 20, 30, 40, 50, 60, 70, 80, 90, 100 or greater than 100 amino acids in length. In another example, any protein that includes a stretch of about 20, about 30, about 40, about 50, or about 100 amino acids which are about 40%, about 50%, about 60%, about 70%, about 80%, about 90%, about 95%, or about 100% identical to any of the sequences described herein can be utilized in accordance with the invention. In certain embodiments, a polypeptide to be utilized in accordance with the invention includes 2, 3, 4, 5, 6, 7, 8, 9, 10, or more mutations as shown in any of the sequences provided or referenced herein.

### Encoded Polypeptides

[0151] The primary constructs or mmRNA of the present invention may be designed to encode polypeptides of interest selected from any of several target categories including, but not limited to, biologics, antibodies, vaccines, therapeutic proteins or peptides, cell penetrating peptides, secreted proteins, plasma membrane proteins, cytoplasmic or cytoskeletal proteins, intracellular membrane bound proteins, nuclear proteins, proteins associated with human disease, targeting moieties or those proteins encoded by the human genome for which no therapeutic indication has been identified but which nonetheless have utility in areas of research and discovery.

[0152] In one embodiment primary constructs or mmRNA may encode variant polypeptides which have a certain identity with a reference polypeptide sequence. As used herein, a “reference polypeptide sequence” refers to a starting polypeptide sequence. Reference sequences may be wild type sequences or any sequence to which reference is made in the design of another sequence. A “reference polypeptide sequence” may, e.g., be any one of SEQ ID NOs: 769-1392 as disclosed herein, e.g., any of SEQ ID NOs 769, 770, 771, 772, 773, 774, 775, 776, 777, 778, 779, 780, 781, 782, 783, 784, 785, 786, 787, 788, 789, 790, 791, 792, 793, 794, 795, 796, 797, 798, 799, 800, 801, 802, 803, 804, 805, 806, 807, 808, 809, 810, 811, 812, 813, 814, 815, 816, 817, 818, 819, 820, 821, 822, 823, 824, 825, 826, 827, 828, 829, 830, 831, 832, 833, 834, 835, 836, 837, 838, 839, 840, 841, 842, 843, 844, 845, 846, 847, 848, 849, 850, 851, 852, 853, 854, 855, 856, 857, 858, 859, 860, 861, 862, 863, 864, 865, 866, 867, 868, 869, 870, 871, 872, 873, 874, 875, 876, 877, 878, 879, 880, 881, 882, 883, 884, 885, 886, 887, 888, 889, 890, 891, 892, 893, 894, 895, 896, 897, 898, 899, 900, 901, 902, 903, 904, 905, 906, 907, 908, 909, 910, 911, 912, 913, 914, 915, 916, 917, 918, 919, 920, 921, 922, 923, 924, 925, 926, 927, 928, 929, 930, 931, 932, 933, 934, 935, 936, 937, 938, 939, 940, 941, 942, 943, 944, 945, 946, 947, 948, 949, 950, 951, 952, 953, 954, 955, 956, 957, 958, 959, 960, 961, 962, 963, 964, 965, 966, 967, 968, 969, 970, 971, 972, 973, 974, 975, 976, 977, 978, 979, 980, 981, 982, 983, 984, 985, 986, 987, 988, 989, 990, 991, 992, 993, 994, 995, 996, 997, 998, 999, 1000, 1001, 1002, 1003, 1004, 1005, 1006, 1007, 1008, 1009, 1010, 1011, 1012, 1013, 1014, 1015, 1016, 1017, 1018, 1019, 1020, 1021, 1022, 1023, 1024, 1025, 1026, 1027, 1028, 1029, 1030, 1031, 1032, 1033, 1034, 1035, 1036, 1037, 1038, 1039, 1040, 1041, 1042, 1043, 1044, 1045, 1046, 1047, 1048, 1049, 1050, 1051, 1052, 1053, 1054, 1055, 1056, 1057, 1058, 1059, 1060, 1061, 1062, 1063, 1064, 1065, 1066, 1067, 1068, 1069, 1070, 1071, 1072, 1073, 1074, 1075, 1076, 1077, 1078, 1079, 1080, 1081, 1082, 1083, 1084, 1085, 1086, 1087, 1088, 1089, 1090, 1091, 1092, 1093, 1094, 1095, 1096, 1097, 1098, 1099, 1100, 1101, 1102, 1103, 1104, 1105, 1106, 1107, 1108, 1109, 1110, 1111, 1112, 1113, 1114, 1115, 1116, 1117, 1118, 1119, 1120, 1121, 1122, 1123, 1124, 1125, 1126, 1127, 1128, 1129, 1130, 1131, 1132, 1133, 1134, 1135, 1136, 1137, 1138, 1139, 1140, 1141, 1142, 1143, 1144, 1145, 1146, 1147, 1148, 1149, 1150, 1151, 1152, 1153, 1154, 1155, 1156, 1157, 1158, 1159, 1160, 1161, 1162, 1163, 1164, 1165, 1166, 1167, 1168, 1169, 1170, 1171, 1172, 1173, 1174, 1175, 1176, 1177, 1178, 1179, 1180, 1181, 1182, 1183, 1184, 1185, 1186, 1187, 1188, 1189, 1190, 1191, 1192, 1193, 1194, 1195, 1196, 1197, 1198, 1199, 1200, 1201, 1202, 1203, 1204, 1205, 1206, 1207, 1208, 1209, 1210, 1211, 1212, 1213, 1214, 1215, 1216, 1217, 1218, 1219, 1220, 1221, 1222, 1223, 1224, 1225, 1226, 1227, 1228, 1229, 1230, 1231, 1232, 1233, 1234, 1235, 1236, 1237, 1238, 1239, 1240, 1241, 1242, 1243, 1244, 1245, 1246, 1247, 1248, 1249, 1250, 1251, 1252, 1253, 1254, 1255, 1256, 1257, 1258, 1259, 1260, 1261, 1262, 1263, 1264, 1265, 1266, 1267, 1268, 1269, 1270, 1271, 1272, 1273, 1274, 1275, 1276, 1277, 1278, 1279, 1280, 1281, 1282, 1283, 1284, 1285, 1286, 1287, 1288, 1289, 1290, 1291, 1292, 1293, 1294, 1295, 1296, 1297, 1298, 1299, 1300, 1301, 1302, 1303, 1304, 1305, 1306, 1307, 1308, 1309, 1310, 1311, 1312, 1313, 1314, 1315, 1316, 1317, 1318, 1319, 1320, 1321, 1322, 1323, 1324, 1325, 1326, 1327, 1328, 1329, 1330, 1331, 1332, 1333, 1334, 1335, 1336, 1337, 1338, 1339, 1340, 1341, 1342, 1343, 1344, 1345, 1346, 1347, 1348, 1349, 1350, 1351, 1352, 1353, 1354, 1355, 1356, 1357, 1358, 1359, 1360, 1361, 1362, 1363, 1364, 1365, 1366, 1367, 1368, 1369, 1370, 1371, 1372, 1373, 1374, 1375, 1376, 1377, 1378, 1379, 1380, 1381, 1382, 1383, 1384, 1385, 1386, 1387, 1388, 1389, 1390, 1391, 1392.

[0153] The term “identity” as known in the art, refers to a relationship between the sequences of two or more peptides, as determined by comparing the sequences. In the art, identity also means the degree of sequence relatedness between peptides, as determined by the number of matches between strings of two or more amino acid residues. Identity measures the percent of identical matches between the smaller of two or more sequences with gap alignments (if any) addressed by a particular mathematical model or computer program (i.e., “algorithms”). Identity of related peptides can be readily calculated by known methods. Such methods include, but are not limited to, those described in Computational Molecular Biology, Lesk, A. M., ed., Oxford University Press, New York, 1988; Biocomputing: Informatics and Genome Projects, Smith, D. W., ed., Academic Press, New York, 1993; Computer Analysis of Sequence Data, Part 1, Griffin, A. M., and Griffin, H. G., eds., Humana Press, New Jersey, 1994; Sequence Analysis in Molecular Biology, von Heinje, G., Academic Press, 1987; Sequence Analysis Primer, Gribskov, M. and Devereux, J., eds., M. Stockton Press, New York, 1991; and Carillo et al., SIAM J. Applied Math. 48, 1073 (1988).

[0154] In some embodiments, the polypeptide variant may have the same or a similar activity as the reference polypeptide. Alternatively, the variant may have an altered activity (e.g., increased or decreased) relative to a reference polypeptide. Generally, variants of a particular polynucleotide or polypeptide of the invention will have at least about 40%, 45%, 50%, 55%, 60%, 65%, 70%, 75%, 80%, 85%, 90%, 91%, 92%, 93%, 94%, 95%, 96%, 97%, 98%, 99% but less than 100% sequence identity to that particular reference polynucleotide or polypeptide as determined by sequence alignment programs and parameters described herein and known to those skilled in the art. Such tools for alignment include those of the BLAST suite (Stephen F. Altschul, Thomas L. Madden, Alejandro A. Schaffer, Jinghui Zhang, Zheng Zhang, Webb Miller, and David J. Lipman (1997), “Gapped BLAST and PSI-BLAST: a new generation of protein database search programs”, Nucleic Acids Res. 25:3389-3402.) Other tools are described herein, specifically in the definition of “Identity.”

[0155] Default parameters in the BLAST algorithm include, for example, an expect threshold of 10, Word size of 28, Match/Mismatch Scores 1, −2, Gap costs Linear. Any filter can be applied as well as a selection for species specific repeats, e.g., Homo sapiens.

### Biologics

[0156] The polynucleotides, primary constructs or mmRNA disclosed herein, may encode one or more biologics. As used herein, a “biologic” is a polypeptide-based molecule produced by the methods provided herein and which may be used to treat, cure, mitigate, prevent, or diagnose a serious or life-threatening disease or medical condition. Biologics, according to the present invention include, but are not limited to, allergenic extracts (e.g. for allergy shots and tests), blood components, gene therapy products, human tissue or cellular products used in transplantation, vaccines, monoclonal antibodies, cytokines, growth factors, enzymes, thrombolytics, and immunomodulators, among others.

[0157] According to the present invention, one or more biologics currently being marketed or in development may be encoded by the polynucleotides, primary constructs or mmRNA of the present invention. While not wishing to be bound by theory, it is believed that incorporation of the encoding polynucleotides of a known biologic into the primary constructs or mmRNA of the invention will result in improved therapeutic efficacy due at least in part to the specificity, purity and/or selectivity of the construct designs.

### Antibodies

[0158] The primary constructs or mmRNA disclosed herein, may encode one or more antibodies or fragments thereof. The term “antibody” includes monoclonal antibodies (including full length antibodies which have an immunoglobulin Fc region), antibody compositions with polyepitopic specificity, multispecific antibodies (e.g., bispecific antibodies, diabodies, and single-chain molecules), as well as antibody fragments. The term “immunoglobulin” (Ig) is used interchangeably with “antibody” herein. As used herein, the term “monoclonal antibody” refers to an antibody obtained from a population of substantially homogeneous antibodies, i.e., the individual antibodies comprising the population are identical except for possible naturally occurring mutations and/or post-translation modifications (e.g., isomerizations, amidations) that may be present in minor amounts. Monoclonal antibodies are highly specific, being directed against a single antigenic site.

[0159] The monoclonal antibodies herein specifically include “chimeric” antibodies (immunoglobulins) in which a portion of the heavy and/or light chain is identical with or homologous to corresponding sequences in antibodies derived from a particular species or belonging to a particular antibody class or subclass, while the remainder of the chain(s) is(are) identical with or homologous to corresponding sequences in antibodies derived from another species or belonging to another antibody class or subclass, as well as fragments of such antibodies, so long as they exhibit the desired biological activity. Chimeric antibodies of interest herein include, but are not limited to, “primatized” antibodies comprising variable domain antigen-binding sequences derived from a non-human primate (e.g., Old World Monkey, Ape etc.) and human constant region sequences.

[0160] An “antibody fragment” comprises a portion of an intact antibody, preferably the antigen binding and/or the variable region of the intact antibody. Examples of antibody fragments include Fab, Fab′, F(ab′)₂ and Fv fragments; diabodies; linear antibodies; nanobodies; single-chain antibody molecules and multispecific antibodies formed from antibody fragments.

[0161] Any of the five classes of immunoglobulins, IgA, IgD, IgE, IgG and IgM, may be encoded by the mmRNA of the invention, including the heavy chains designated alpha, delta, epsilon, gamma and mu, respectively. Also included are polynucleotide sequences encoding the subclasses, gamma and mu. Hence any of the subclasses of antibodies may be encoded in part or in whole and include the following subclasses: IgG1, IgG2, IgG3, IgG4, IgA1 and IgA2.

[0162] According to the present invention, one or more antibodies or fragments currently being marketed or in development may be encoded by the polynucleotides, primary constructs or mmRNA of the present invention. While not wishing to be bound by theory, it is believed that incorporation into the primary constructs of the invention will result in improved therapeutic efficacy due at least in part to the specificity, purity and selectivity of the mmRNA designs.

[0163] Antibodies encoded in the polynucleotides, primary constructs or mmRNA of the invention may be utilized to treat conditions or diseases in many therapeutic areas such as, but not limited to, blood, cardiovascular, CNS, poisoning (including antivenoms), dermatology, endocrinology, gastrointestinal, medical imaging, musculoskeletal, oncology, immunology, respiratory, sensory and anti-infective.

[0164] In one embodiment, primary constructs or mmRNA disclosed herein may encode monoclonal antibodies and/or variants thereof. Variants of antibodies may also include, but are not limited to, substitutional variants, conservative amino acid substitution, insertional variants, deletional variants and/or covalent derivatives. In one embodiment, the primary construct and/or mmRNA disclosed herein may encode an immunoglobulin Fc region. In another embodiment, the primary constructs and/or mmRNA may encode a variant immunoglobulin Fc region. As a non-limiting example, the primary constructs and/or mmRNA may encode an antibody having a variant immunoglobulin Fc region as described in U.S. Pat. No. 8,217,147 herein incorporated by reference in its entirety.

### Vaccines

[0165] The primary constructs or mmRNA disclosed herein, may encode one or more vaccines. As used herein, a “vaccine” is a biological preparation that improves immunity to a particular disease or infectious agent. According to the present invention, one or more vaccines currently being marketed or in development may be encoded by the polynucleotides, primary constructs or mmRNA of the present invention. While not wishing to be bound by theory, it is believed that incorporation into the primary constructs or mmRNA of the invention will result in improved therapeutic efficacy due at least in part to the specificity, purity and selectivity of the construct designs.

[0166] Vaccines encoded in the polynucleotides, primary constructs or mmRNA of the invention may be utilized to treat conditions or diseases in many therapeutic areas such as, but not limited to, cardiovascular, CNS, dermatology, endocrinology, oncology, immunology, respiratory, and anti-infective.

### Therapeutic Proteins or Peptides

[0167] The primary constructs or mmRNA disclosed herein, may encode one or more validated or “in testing” therapeutic proteins or peptides.

[0168] According to the present invention, one or more therapeutic proteins or peptides currently being marketed or in development may be encoded by the polynucleotides, primary constructs or mmRNA of the present invention. While not wishing to be bound by theory, it is believed that incorporation into the primary constructs or mmRNA of the invention will result in improved therapeutic efficacy due at least in part to the specificity, purity and selectivity of the construct designs.

[0169] Therapeutic proteins and peptides encoded in the polynucleotides, primary constructs or mmRNA of the invention may be utilized to treat conditions or diseases in many therapeutic areas such as, but not limited to, blood, cardiovascular, CNS, poisoning (including antivenoms), dermatology, endocrinology, genetic, genitourinary, gastrointestinal, musculoskeletal, oncology, and immunology, respiratory, sensory and anti-infective.

### Cell-Penetrating Polypeptides

[0170] The primary constructs or mmRNA disclosed herein, may encode one or more cell-penetrating polypeptides. As used herein, “cell-penetrating polypeptide” or CPP refers to a polypeptide which may facilitate the cellular uptake of molecules. A cell-penetrating polypeptide of the present invention may contain one or more detectable labels. The polypeptides may be partially labeled or completely labeled throughout. The polynucleotide, primary construct or mmRNA may encode the detectable label completely, partially or not at all. The cell-penetrating peptide may also include a signal sequence. As used herein, a “signal sequence” refers to a sequence of amino acid residues bound at the amino terminus of a nascent protein during protein translation. The signal sequence may be used to signal the secretion of the cell-penetrating polypeptide.

[0171] In one embodiment, the polynucleotides, primary constructs or mmRNA may also encode a fusion protein. The fusion protein may be created by operably linking a charged protein to a therapeutic protein. As used herein, “operably linked” refers to the therapeutic protein and the charged protein being connected in such a way to permit the expression of the complex when introduced into the cell. As used herein, “charged protein” refers to a protein that carries a positive, negative or overall neutral electrical charge. Preferably, the therapeutic protein may be covalently linked to the charged protein in the formation of the fusion protein. The ratio of surface charge to total or surface amino acids may be approximately 0.1, 0.2, 0.3, 0.4, 0.5, 0.6, 0.7, 0.8 or 0.9.

[0172] The cell-penetrating polypeptide encoded by the polynucleotides, primary constructs or mmRNA may form a complex after being translated. The complex may comprise a charged protein linked, e.g. covalently linked, to the cell-penetrating polypeptide. “Therapeutic protein” refers to a protein that, when administered to a cell has a therapeutic, diagnostic, and/or prophylactic effect and/or elicits a desired biological and/or pharmacological effect.

[0173] In one embodiment, the cell-penetrating polypeptide may comprise a first domain and a second domain. The first domain may comprise a supercharged polypeptide. The second domain may comprise a protein-binding partner. As used herein, “protein-binding partner” includes, but is not limited to, antibodies and functional fragments thereof, scaffold proteins, or peptides. The cell-penetrating polypeptide may further comprise an intracellular binding partner for the protein-binding partner. The cell-penetrating polypeptide may be capable of being secreted from a cell where the polynucleotide, primary construct or mmRNA may be introduced. The cell-penetrating polypeptide may also be capable of penetrating the first cell.

[0174] In a further embodiment, the cell-penetrating polypeptide is capable of penetrating a second cell. The second cell may be from the same area as the first cell, or it may be from a different area. The area may include, but is not limited to, tissues and organs. The second cell may also be proximal or distal to the first cell.

[0175] In one embodiment, the polynucleotides, primary constructs or mmRNA may encode a cell-penetrating polypeptide which may comprise a protein-binding partner. The protein binding partner may include, but is not limited to, an antibody, a supercharged antibody or a functional fragment. The polynucleotides, primary constructs or mmRNA may be introduced into the cell where a cell-penetrating polypeptide comprising the protein-binding partner is introduced.

### Secreted Proteins

[0176] Human and other eukaryotic cells are subdivided by membranes into many functionally distinct compartments. Each membrane-bounded compartment, or organelle, contains different proteins essential for the function of the organelle. The cell uses “sorting signals,” which are amino acid motifs located within the protein, to target proteins to particular cellular organelles.

[0177] One type of sorting signal, called a signal sequence, a signal peptide, or a leader sequence, directs a class of proteins to an organelle called the endoplasmic reticulum (ER).

[0178] Proteins targeted to the ER by a signal sequence can be released into the extracellular space as a secreted protein. Similarly, proteins residing on the cell membrane can also be secreted into the extracellular space by proteolytic cleavage of a “linker” holding the protein to the membrane. While not wishing to be bound by theory, the molecules of the present invention may be used to exploit the cellular trafficking described above. As such, in some embodiments of the invention, polynucleotides, primary constructs or mmRNA are provided to express a secreted protein. The secreted proteins may be selected from those described herein or those in US Patent Publication, 20100255574, the contents of which are incorporated herein by reference in their entirety.

[0179] In one embodiment, these may be used in the manufacture of large quantities of valuable human gene products.

### Plasma Membrane Proteins

[0180] In some embodiments of the invention, polynucleotides, primary constructs or mmRNA are provided to express a protein of the plasma membrane.

### Cytoplasmic or Cytoskeletal Proteins

[0181] In some embodiments of the invention, polynucleotides, primary constructs or mmRNA are provided to express a cytoplasmic or cytoskeletal protein.

### Intracellular Membrane Bound Proteins

[0182] In some embodiments of the invention, polynucleotides, primary constructs or mmRNA are provided to express an intracellular membrane bound protein.

### Nuclear Proteins

[0183] In some embodiments of the invention, polynucleotides, primary constructs or mmRNA are provided to express a nuclear protein.

Proteins Associated with Human Disease

[0184] In some embodiments of the invention, polynucleotides, primary constructs or mmRNA are provided to express a protein associated with human disease.

### Miscellaneous Proteins

[0185] In some embodiments of the invention, polynucleotides, primary constructs or mmRNA are provided to express a protein with a presently unknown therapeutic function.

### Targeting Moieties

[0186] In some embodiments of the invention, polynucleotides, primary constructs or mmRNA are provided to express a targeting moiety. These include a protein-binding partner or a receptor on the surface of the cell, which functions to target the cell to a specific tissue space or to interact with a specific moiety, either in vivo or in vitro. Suitable protein-binding partners include, but are not limited to, antibodies and functional fragments thereof, scaffold proteins, or peptides. Additionally, polynucleotide, primary construct or mmRNA can be employed to direct the synthesis and extracellular localization of lipids, carbohydrates, or other biological moieties or biomolecules.

### Polypeptide Libraries

[0187] In one embodiment, the polynucleotides, primary constructs or mmRNA may be used to produce polypeptide libraries. These libraries may arise from the production of a population of polynucleotides, primary constructs or mmRNA, each containing various structural or chemical modification designs. In this embodiment, a population of polynucleotides, primary constructs or mmRNA may comprise a plurality of encoded polypeptides, including but not limited to, an antibody or antibody fragment, protein binding partner, scaffold protein, and other polypeptides taught herein or known in the art. In a preferred embodiment, the polynucleotides are primary constructs of the present invention, including mmRNA which may be suitable for direct introduction into a target cell or culture which in turn may synthesize the encoded polypeptides.

[0188] In certain embodiments, multiple variants of a protein, each with different amino acid modification(s), may be produced and tested to determine the best variant in terms of pharmacokinetics, stability, biocompatibility, and/or biological activity, or a biophysical property such as expression level. Such a library may contain 10, 10², 10³, 10⁴, 10⁵, 10⁶, 10⁷, 10⁸, 10⁹, or over 10⁹ possible variants (including, but not limited to, substitutions, deletions of one or more residues, and insertion of one or more residues).

### Anti-Microbial and Anti-Viral Polypeptides

[0189] The polynucleotides, primary constructs and mmRNA of the present invention may be designed to encode on or more antimicrobial peptides (AMP) or antiviral peptides (AVP). AMPs and AVPs have been isolated and described from a wide range of animals such as, but not limited to, microorganisms, invertebrates, plants, amphibians, birds, fish, and mammals (Wang et al., Nucleic Acids Res. 2009; 37 (Database issue): D933-7). For example, anti-microbial polypeptides are described in Antimicrobial Peptide Database (aps.unmc.edu/AP/main.php; Wang et al., Nucleic Acids Res. 2009; 37 (Database issue): D933-7), CAMP: Collection of Anti-Microbial Peptides (www.bicnirrh.res.in/antimicrobial/); Thomas et al., Nucleic Acids Res. 2010; 38 (Database issue): D774-80), U.S. Pat. Nos. 5,221,732, 5,447,914, 5,519,115, 5,607,914, 5,714,577, 5,734,015, 5,798,336, 5,821,224, 5,849,490, 5,856,127, 5,905,187, 5,994,308, 5,998,374, 6,107,460, 6,191,254, 6,211,148, 6,300,489, 6,329,504, 6,399,370, 6,476,189, 6,478,825, 6,492,328, 6,514,701, 6,573,361, 6,573,361, 6,576,755, 6,605,698, 6,624,140, 6,638,531, 6,642,203, 6,653,280, 6,696,238, 6,727,066, 6,730,659, 6,743,598, 6,743,769, 6,747,007, 6,790,833, 6,794,490, 6,818,407, 6,835,536, 6,835,713, 6,838,435, 6,872,705, 6,875,907, 6,884,776, 6,887,847, 6,906,035, 6,911,524, 6,936,432, 7,001,924, 7,071,293, 7,078,380, 7,091,185, 7,094,759, 7,166,769, 7,244,710, 7,314,858, and 7,582,301, the contents of which are incorporated by reference in their entirety.

[0190] The anti-microbial polypeptides described herein may block cell fusion and/or viral entry by one or more enveloped viruses (e.g., HIV, HCV). For example, the anti-microbial polypeptide can comprise or consist of a synthetic peptide corresponding to a region, e.g., a consecutive sequence of at least about 5, 10, 15, 20, 25, 30, 35, 40, 45, 50, 55, or 60 amino acids of the transmembrane subunit of a viral envelope protein, e.g., HIV-1 gp120 or gp41. The amino acid and nucleotide sequences of HIV-1 gp120 or gp41 are described in, e.g., Kuiken et al., (2008). “HIV Sequence Compendium,” Los Alamos National Laboratory.

[0191] In some embodiments, the anti-microbial polypeptide may have at least about 75%, 80%, 85%, 90%, 95%, 100% sequence homology to the corresponding viral protein sequence. In some embodiments, the anti-microbial polypeptide may have at least about 75%, 80%, 85%, 90%, 95%, or 100% sequence homology to the corresponding viral protein sequence.

[0192] In other embodiments, the anti-microbial polypeptide may comprise or consist of a synthetic peptide corresponding to a region, e.g., a consecutive sequence of at least about 5, 10, 15, 20, 25, 30, 35, 40, 45, 50, 55, or 60 amino acids of the binding domain of a capsid binding protein. In some embodiments, the anti-microbial polypeptide may have at least about 75%, 80%, 85%, 90%, 95%, or 100% sequence homology to the corresponding sequence of the capsid binding protein.

[0193] The anti-microbial polypeptides described herein may block protease dimerization and inhibit cleavage of viral proproteins (e.g., HIV Gag-pol processing) into functional proteins thereby preventing release of one or more enveloped viruses (e.g., HIV, HCV). In some embodiments, the anti-microbial polypeptide may have at least about 75%, 80%, 85%, 90%, 95%, 100% sequence homology to the corresponding viral protein sequence.

[0194] In other embodiments, the anti-microbial polypeptide can comprise or consist of a synthetic peptide corresponding to a region, e.g., a consecutive sequence of at least about 5, 10, 15, 20, 25, 30, 35, 40, 45, 50, 55, or 60 amino acids of the binding domain of a protease binding protein. In some embodiments, the anti-microbial polypeptide may have at least about 75%, 80%, 85%, 90%, 95%, 100% sequence homology to the corresponding sequence of the protease binding protein.

[0195] The anti-microbial polypeptides described herein can include an in vitro-evolved polypeptide directed against a viral pathogen.

### Anti-Microbial Polypeptides

[0196] Anti-microbial polypeptides (AMPs) are small peptides of variable length, sequence and structure with broad spectrum activity against a wide range of microorganisms including, but not limited to, bacteria, viruses, fungi, protozoa, parasites, prions, and tumor/cancer cells. (See, e.g., Zaiou, J Mol Med, 2007; 85:317; herein incorporated by reference in its entirety). It has been shown that AMPs have broad-spectrum of rapid onset of killing activities, with potentially low levels of induced resistance and concomitant broad anti-inflammatory effects.

[0197] In some embodiments, the anti-microbial polypeptide (e.g., an anti-bacterial polypeptide) may be under 10 kDa, e.g., under 8 kDa, 6 kDa, 4 kDa, 2 kDa, or 1 kDa. In some embodiments, the anti-microbial polypeptide (e.g., an anti-bacterial polypeptide) consists of from about 6 to about 100 amino acids, e.g., from about 6 to about 75 amino acids, about 6 to about 50 amino acids, about 6 to about 25 amino acids, about 25 to about 100 amino acids, about 50 to about 100 amino acids, or about 75 to about 100 amino acids. In certain embodiments, the anti-microbial polypeptide (e.g., an anti-bacterial polypeptide) may consist of from about 15 to about 45 amino acids. In some embodiments, the anti-microbial polypeptide (e.g., an anti-bacterial polypeptide) is substantially cationic.

[0198] In some embodiments, the anti-microbial polypeptide (e.g., an anti-bacterial polypeptide) may be substantially amphipathic. In certain embodiments, the anti-microbial polypeptide (e.g., an anti-bacterial polypeptide) may be substantially cationic and amphipathic. In some embodiments, the anti-microbial polypeptide (e.g., an anti-bacterial polypeptide) may be cytostatic to a Gram-positive bacterium. In some embodiments, the anti-microbial polypeptide (e.g., an anti-bacterial polypeptide) may be cytotoxic to a Gram-positive bacterium. In some embodiments, the anti-microbial polypeptide (e.g., an anti-bacterial polypeptide) may be cytostatic and cytotoxic to a Gram-positive bacterium. In some embodiments, the anti-microbial polypeptide (e.g., an anti-bacterial polypeptide) may be cytostatic to a Gram-negative bacterium. In some embodiments, the anti-microbial polypeptide (e.g., an anti-bacterial polypeptide) may be cytotoxic to a Gram-negative bacterium. In some embodiments, the anti-microbial polypeptide (e.g., an anti-bacterial polypeptide) may be cytostatic and cytotoxic to a Gram-positive bacterium. In some embodiments, the anti-microbial polypeptide may be cytostatic to a virus, fungus, protozoan, parasite, prion, or a combination thereof. In some embodiments, the anti-microbial polypeptide may be cytotoxic to a virus, fungus, protozoan, parasite, prion, or a combination thereof. In certain embodiments, the anti-microbial polypeptide may be cytostatic and cytotoxic to a virus, fungus, protozoan, parasite, prion, or a combination thereof. In some embodiments, the anti-microbial polypeptide may be cytotoxic to a tumor or cancer cell (e.g., a human tumor and/or cancer cell). In some embodiments, the anti-microbial polypeptide may be cytostatic to a tumor or cancer cell (e.g., a human tumor and/or cancer cell). In certain embodiments, the anti-microbial polypeptide may be cytotoxic and cytostatic to a tumor or cancer cell (e.g., a human tumor or cancer cell). In some embodiments, the anti-microbial polypeptide (e.g., an anti-bacterial polypeptide) may be a secreted polypeptide.

[0199] In some embodiments, the anti-microbial polypeptide comprises or consists of a defensin. Exemplary defensins include, but are not limited to, α-defensins (e.g., neutrophil defensin 1, defensin alpha 1, neutrophil defensin 3, neutrophil defensin 4, defensin 5, defensin 6), β-defensins (e.g., beta-defensin 1, beta-defensin 2, beta-defensin 103, beta-defensin 107, beta-defensin 110, beta-defensin 136), and θ-defensins. In other embodiments, the anti-microbial polypeptide comprises or consists of a cathelicidin (e.g., hCAP18).

### Anti-Viral Polypeptides

[0200] Anti-viral polypeptides (AVPs) are small peptides of variable length, sequence and structure with broad spectrum activity against a wide range of viruses. See, e.g., Zaiou, J Mol Med, 2007; 85:317. It has been shown that AVPs have a broad-spectrum of rapid onset of killing activities, with potentially low levels of induced resistance and concomitant broad anti-inflammatory effects. In some embodiments, the anti-viral polypeptide is under 10 kDa, e.g., under 8 kDa, 6 kDa, 4 kDa, 2 kDa, or 1 kDa. In some embodiments, the anti-viral polypeptide comprises or consists of from about 6 to about 100 amino acids, e.g., from about 6 to about 75 amino acids, about 6 to about 50 amino acids, about 6 to about 25 amino acids, about 25 to about 100 amino acids, about 50 to about 100 amino acids, or about 75 to about 100 amino acids. In certain embodiments, the anti-viral polypeptide comprises or consists of from about 15 to about 45 amino acids. In some embodiments, the anti-viral polypeptide is substantially cationic. In some embodiments, the anti-viral polypeptide is substantially amphipathic. In certain embodiments, the anti-viral polypeptide is substantially cationic and amphipathic. In some embodiments, the anti-viral polypeptide is cytostatic to a virus. In some embodiments, the anti-viral polypeptide is cytotoxic to a virus. In some embodiments, the anti-viral polypeptide is cytostatic and cytotoxic to a virus. In some embodiments, the anti-viral polypeptide is cytostatic to a bacterium, fungus, protozoan, parasite, prion, or a combination thereof. In some embodiments, the anti-viral polypeptide is cytotoxic to a bacterium, fungus, protozoan, parasite, prion or a combination thereof. In certain embodiments, the anti-viral polypeptide is cytostatic and cytotoxic to a bacterium, fungus, protozoan, parasite, prion, or a combination thereof. In some embodiments, the anti-viral polypeptide is cytotoxic to a tumor or cancer cell (e.g., a human cancer cell). In some embodiments, the anti-viral polypeptide is cytostatic to a tumor or cancer cell (e.g., a human cancer cell). In certain embodiments, the anti-viral polypeptide is cytotoxic and cytostatic to a tumor or cancer cell (e.g., a human cancer cell). In some embodiments, the anti-viral polypeptide is a secreted polypeptide.

### Cytotoxic Nucleosides

[0201] In one embodiment, the polynucleotides, primary constructs or mmRNA of the present invention may incorporate one or more cytotoxic nucleosides. For example, cytotoxic nucleosides may be incorporated into polynucleotides, primary constructs or mmRNA such as bifunctional modified RNAs or mRNAs. Cytotoxic nucleoside anticancer agents include, but are not limited to, adenosine arabinoside, cytarabine, cytosine arabinoside, 5-fluorouracil, fludarabine, floxuridine, FTORAFUR® (a combination of tegafur and uracil), tegafur ((RS)-5-fluoro-1-(tetrahydrofuran-2-yl)pyrimidine-2,4(1H,3H)-dione), and 6-mercaptopurine.

[0202] A number of cytotoxic nucleoside analogues are in clinical use, or have been the subject of clinical trials, as anticancer agents. Examples of such analogues include, but are not limited to, cytarabine, gemcitabine, troxacitabine, decitabine, tezacitabine, 2′-deoxy-2′-methylidenecytidine (DMDC), cladribine, clofarabine, 5-azacytidine, 4′-thio-aracytidine, cyclopentenylcytosine and 1-(2-C-cyano-2-deoxy-beta-D-arabino-pentofuranosyl)-cytosine. Another example of such a compound is fludarabine phosphate. These compounds may be administered systemically and may have side effects which are typical of cytotoxic agents such as, but not limited to, little or no specificity for tumor cells over proliferating normal cells.

[0203] A number of prodrugs of cytotoxic nucleoside analogues are also reported in the art. Examples include, but are not limited to, N4-behenoyl-1-beta-D-arabinofuranosylcytosine, N4-octadecyl-1-beta-D-arabinofuranosylcytosine, N4-palmitoyl-1-(2-C-cyano-2-deoxy-beta-D-arabino-pentofuranosyl) cytosine, and P-4055 (cytarabine 5′-elaidic acid ester). In general, these prodrugs may be converted into the active drugs mainly in the liver and systemic circulation and display little or no selective release of active drug in the tumor tissue. For example, capecitabine, a prodrug of 5′-deoxy-5-fluorocytidine (and eventually of 5-fluorouracil), is metabolized both in the liver and in the tumor tissue. A series of capecitabine analogues containing “an easily hydrolysable radical under physiological conditions” has been claimed by Fujiu et al. (U.S. Pat. No. 4,966,891) and is herein incorporated by reference. The series described by Fujiu includes N4 alkyl and aralkyl carbamates of 5′-deoxy-5-fluorocytidine and the implication that these compounds will be activated by hydrolysis under normal physiological conditions to provide 5′-deoxy-5-fluorocytidine.

[0204] A series of cytarabine N4-carbamates has been by reported by Fadl et al (Pharmazie. 1995, 50, 382-7, herein incorporated by reference) in which compounds were designed to convert into cytarabine in the liver and plasma. WO 2004/041203, herein incorporated by reference, discloses prodrugs of gemcitabine, where some of the prodrugs are N4-carbamates. These compounds were designed to overcome the gastrointestinal toxicity of gemcitabine and were intended to provide gemcitabine by hydrolytic release in the liver and plasma after absorption of the intact prodrug from the gastrointestinal tract. Nomura et al (Bioorg Med. Chem. 2003, 11, 2453-61, herein incorporated by reference) have described acetal derivatives of 1-(3-C-ethynyl-β-D-ribo-pentofaranosyl) cytosine which, on bioreduction, produced an intermediate that required further hydrolysis under acidic conditions to produce a cytotoxic nucleoside compound.

[0205] Cytotoxic nucleotides which may be chemotherapeutic also include, but are not limited to, pyrazolo[3,4-D]-pyrimidines, allopurinol, azathioprine, capecitabine, cytosine arabinoside, fluorouracil, mercaptopurine, 6-thioguanine, acyclovir, ara-adenosine, ribavirin, 7-deaza-adenosine, 7-deaza-guanosine, 6-aza-uracil, 6-aza-cytidine, thymidine ribonucleotide, 5-bromodeoxyuridine, 2-chloro-purine, and inosine, or combinations thereof.

### Flanking Regions: Untranslated Regions (UTRs)

[0206] Untranslated regions (UTRs) of a gene are transcribed but not translated. The 5′UTR starts at the transcription start site and continues to the start codon but does not include the start codon; whereas, the 3′UTR starts immediately following the stop codon and continues until the transcriptional termination signal. There is growing body of evidence about the regulatory roles played by the UTRs in terms of stability of the nucleic acid molecule and translation. The regulatory features of a UTR can be incorporated into the polynucleotides, primary constructs and/or mmRNA of the present invention to enhance the stability of the molecule. The specific features can also be incorporated to ensure controlled down-regulation of the transcript in case they are misdirected to undesired organs sites.

### 5′ UTR and Translation Initiation

[0207] Natural 5′UTRs bear features which play roles in for translation initiation. They harbor signatures like Kozak sequences which are commonly known to be involved in the process by which the ribosome initiates translation of many genes. Kozak sequences have the consensus CCR(A/G)CCAUGG, where R is a purine (adenine or guanine) three bases upstream of the start codon (AUG), which is followed by another ‘G’. 5′UTR also have been known to form secondary structures which are involved in elongation factor binding.

[0208] By engineering the features typically found in abundantly expressed genes of specific target organs, one can enhance the stability and protein production of the polynucleotides, primary constructs or mmRNA of the invention. For example, introduction of 5′ UTR of liver-expressed mRNA, such as albumin, serum amyloid A, Apolipoprotein A/B/E, transferrin, alpha fetoprotein, erythropoietin, or Factor VIII, could be used to enhance expression of a nucleic acid molecule, such as a mmRNA, in hepatic cell lines or liver. Likewise, use of 5′ UTR from other tissue-specific mRNA to improve expression in that tissue is possible for muscle (MyoD, Myosin, Myoglobin, Myogenin, Herculin), for endothelial cells (Tie-1, CD36), for myeloid cells (C/EBP, AML1, G-CSF, GM-CSF, CD11b, MSR, Fr-1, i-NOS), for leukocytes (CD45, CD18), for adipose tissue (CD36, GLUT4, ACRP30, adiponectin) and for lung epithelial cells (SP-A/B/C/D).

[0209] Other non-UTR sequences may be incorporated into the 5′ (or 3′ UTR) UTRs. For example, introns or portions of introns sequences may be incorporated into the flanking regions of the polynucleotides, primary constructs or mmRNA of the invention. Incorporation of intronic sequences may increase protein production as well as mRNA levels.

### 3′ UTR and the AU Rich Elements

[0210] 3′ UTRs are known to have stretches of Adenosines and Uridines embedded in them. These AU rich signatures are particularly prevalent in genes with high rates of turnover. Based on their sequence features and functional properties, the AU rich elements (AREs) can be separated into three classes (Chen et al, 1995): Class I AREs contain several dispersed copies of an AUUUA motif within U-rich regions. C-Myc and MyoD contain class I AREs. Class II AREs possess two or more overlapping UUAUUUA(U/A)(U/A) nonamers. Molecules containing this type of AREs include GM-CSF and TNF-a. Class III ARES are less well defined. These U rich regions do not contain an AUUUA motif c-Jun and Myogenin are two well-studied examples of this class. Most proteins binding to the AREs are known to destabilize the messenger, whereas members of the ELAV family, most notably HuR, have been documented to increase the stability of mRNA. HuR binds to AREs of all the three classes. Engineering the HuR specific binding sites into the 3′ UTR of nucleic acid molecules will lead to HuR binding and thus, stabilization of the message in vivo.

[0211] Introduction, removal or modification of 3′ UTR AU rich elements (AREs) can be used to modulate the stability of polynucleotides, primary constructs or mmRNA of the invention. When engineering specific polynucleotides, primary constructs or mmRNA, one or more copies of an ARE can be introduced to make polynucleotides, primary constructs or mmRNA of the invention less stable and thereby curtail translation and decrease production of the resultant protein. Likewise, AREs can be identified and removed or mutated to increase the intracellular stability and thus increase translation and production of the resultant protein. Transfection experiments can be conducted in relevant cell lines, using polynucleotides, primary constructs or mmRNA of the invention and protein production can be assayed at various time points post-transfection. For example, cells can be transfected with different ARE-engineering molecules and by using an ELISA kit to the relevant protein and assaying protein produced at 6 hour, 12 hour, 24 hour, 48 hour, and 7 days post-transfection.

Incorporating microRNA Binding Sites

[0212] microRNAs (or miRNA) are 19-25 nucleotide long noncoding RNAs that bind to the 3′UTR of nucleic acid molecules and down-regulate gene expression either by reducing nucleic acid molecule stability or by inhibiting translation. The polynucleotides, primary constructs or mmRNA of the invention may comprise one or more microRNA target sequences, microRNA seqences, or microRNA seeds. Such sequences may correspond to any known microRNA such as those taught in US Publication US2005/0261218 and US Publication US2005/0059005, the contents of which are incorporated herein by reference in their entirety.

[0213] A microRNA sequence comprises a “seed” region, i.e., a sequence in the region of positions 2-8 of the mature microRNA, which sequence has perfect Watson-Crick complementarity to the miRNA target sequence. A microRNA seed may comprise positions 2-8 or 2-7 of the mature microRNA. In some embodiments, a microRNA seed may comprise 7 nucleotides (e.g., nucleotides 2-8 of the mature microRNA), wherein the seed-complementary site in the corresponding miRNA target is flanked by an adenine (A) opposed to microRNA position 1. In some embodiments, a microRNA seed may comprise 6 nucleotides (e.g., nucleotides 2-7 of the mature microRNA), wherein the seed-complementary site in the corresponding miRNA target is flanked byan adenine (A) opposed to microRNA position 1. See for example, Grimson A, Farh K K, Johnston W K, Garrett-Engele P, Lim L P, Bartel D P; Mol Cell. 2007 Jul. 6; 27(1):91-105; each of which is herein incorporated by reference in their entirety. The bases of the microRNA seed have complete complementarity with the target sequence. By engineering microRNA target sequences into the 3′UTR of polynucleotides, primary constructs or mmRNA of the invention one can target the molecule for degradation or reduced translation, provided the microRNA in question is available. This process will reduce the hazard of off target effects upon nucleic acid molecule delivery. Identification of microRNA, microRNA target regions, and their expression patterns and role in biology have been reported (Bonauer et al., Curr Drug Targets 2010 11:943-949; Anand and Cheresh Curr Opin Hematol 2011 18:171-176; Contreras and Rao Leukemia 2012 26:404-413 (Dec. 20, 2011 doi: 10.1038/leu.2011.356); Bartel Cell 2009 136:215-233; Landgraf et al, Cell, 2007 129:1401-1414; each of which is herein incorporated by reference in its entirety).

[0214] For example, if the nucleic acid molecule is an mRNA and is not intended to be delivered to the liver but ends up there, then miR-122, a microRNA abundant in liver, can inhibit the expression of the gene of interest if one or multiple target sites of miR-122 are engineered into the 3′ UTR of the polynucleotides, primary constructs or mmRNA. Introduction of one or multiple binding sites for different microRNA can be engineered to further decrease the longevity, stability, and protein translation of a polynucleotides, primary constructs or mmRNA.

[0215] As used herein, the term “microRNA site” refers to a microRNA target site or a microRNA recognition site, or any nucleotide sequence to which a microRNA binds or associates. It should be understood that “binding” may follow traditional Watson-Crick hybridization rules or may reflect any stable association of the microRNA with the target sequence at or adjacent to the microRNA site.

[0216] Conversely, for the purposes of the polynucleotides, primary constructs or mmRNA of the present invention, microRNA binding sites can be engineered out of (i.e. removed from) sequences in which they naturally occur in order to increase protein expression in specific tissues. For example, miR-122 binding sites may be removed to improve protein expression in the liver. Regulation of expression in multiple tissues can be accomplished through introduction or removal or one or several microRNA binding sites.

[0217] Examples of tissues where microRNA are known to regulate mRNA, and thereby protein expression, include, but are not limited to, liver (miR-122), muscle (miR-133, miR-206, miR-208), endothelial cells (miR-17-92, miR-126), myeloid cells (miR-142-3p, miR-142-5p, miR-16, miR-21, miR-223, miR-24, miR-27), adipose tissue (let-7, miR-30c), heart (miR-1d, miR-149), kidney (miR-192, miR-194, miR-204), and lung epithelial cells (let-7, miR-133, miR-126). MicroRNA can also regulate complex biological processes such as angiogenesis (miR-132) (Anand and Cheresh Curr Opin Hematol 2011 18:171-176; herein incorporated by reference in its entirety). In the polynucleotides, primary constructs or mmRNA of the present invention, binding sites for microRNAs that are involved in such processes may be removed or introduced, in order to tailor the expression of the polynucleotides, primary constructs or mmRNA expression to biologically relevant cell types or to the context of relevant biological processes. A listing of MicroRNA, miR sequences and miR binding sites is listed in Table 9 of U.S. Provisional Application No. 61/753,661 filed Jan. 17, 2013, in Table 9 of U.S. Provisional Application No. 61/754,159 filed Jan. 18, 2013, and in Table 7 of U.S. Provisional Application No. 61/758,921 filed Jan. 31, 2013, each of which are herein incorporated by reference in their entireties.

[0218] Lastly, through an understanding of the expression patterns of microRNA in different cell types, polynucleotides, primary constructs or mmRNA can be engineered for more targeted expression in specific cell types or only under specific biological conditions. Through introduction of tissue-specific microRNA binding sites, polynucleotides, primary constructs or mmRNA could be designed that would be optimal for protein expression in a tissue or in the context of a biological condition. Examples of use of microRNA to drive tissue or disease-specific gene expression are listed (Getner and Naldini, Tissue Antigens. 2012, 80:393-403; herein incoroporated by reference in its entirety). In addition, microRNA seed sites can be incorporated into mRNA to decrease expression in certain cells which results in a biological improvement. An example of this is incorporation of miR-142 sites into a UGT1A1-expressing lentiviral vector. The presence of miR-142 seed sites reduced expression in hematopoietic cells, and as a consequence reduced expression in antigen-presentating cells, leading to the absence of an immune response against the virally expressed UGT1A1 (Schmitt et al., Gastroenterology 2010; 139:999-1007; Gonzalez-Asequinolaza et al. Gastroenterology 2010, 139:726-729; both herein incorporated by reference in its entirety). Incorporation of miR-142 sites into modified mRNA could not only reduce expression of the encoded protein in hematopoietic cells, but could also reduce or abolish immune responses to the mRNA-encoded protein. Incorporation of miR-142 seed sites (one or multiple) into mRNA would be important in the case of treatment of patients with complete protein deficiencies (UGT1A1 type I, LDLR-deficient patients, CRIM-negative Pompe patients, etc.).

[0219] Transfection experiments can be conducted in relevant cell lines, using engineered polynucleotides, primary constructs or mmRNA and protein production can be assayed at various time points post-transfection. For example, cells can be transfected with different microRNA binding site-engineering polynucleotides, primary constructs or mmRNA and by using an ELISA kit to the relevant protein and assaying protein produced at 6 hour, 12 hour, 24 hour, 48 hour, 72 hour and 7 days post-transfection. In vivo experiments can also be conducted using microRNA-binding site-engineered molecules to examine changes in tissue-specific expression of formulated polynucleotides, primary constructs or mmRNA.

### 5′ Capping

[0220] The 5′ cap structure of an mRNA is involved in nuclear export, increasing mRNA stability and binds the mRNA Cap Binding Protein (CBP), which is responsibile for mRNA stability in the cell and translation competency through the association of CBP with poly(A) binding protein to form the mature cyclic mRNA species. The cap further assists the removal of 5′ proximal introns removal during mRNA splicing.

[0221] Endogenous mRNA molecules may be 5′-end capped generating a 5′-ppp-5′-triphosphate linkage between a terminal guanosine cap residue and the 5′-terminal transcribed sense nucleotide of the mRNA molecule. This 5′-guanylate cap may then be methylated to generate an N7-methyl-guanylate residue. The ribose sugars of the terminal and/or anteterminal transcribed nucleotides of the 5′ end of the mRNA may optionally also be 2′-O-methylated. 5′-decapping through hydrolysis and cleavage of the guanylate cap structure may target a nucleic acid molecule, such as an mRNA molecule, for degradation.

[0222] Modifications to the polynucleotides, primary constructs, and mmRNA of the present invention may generate a non-hydrolyzable cap structure preventing decapping and thus increasing mRNA half-life. Because cap structure hydrolysis requires cleavage of 5′-ppp-5′ phosphorodiester linkages, modified nucleotides may be used during the capping reaction. For example, a Vaccinia Capping Enzyme from New England Biolabs (Ipswich, MA) may be used with α-thio-guanosine nucleotides according to the manufacturer's instructions to create a phosphorothioate linkage in the 5′-ppp-5′ cap. Additional modified guanosine nucleotides may be used such as α-methyl-phosphonate and seleno-phosphate nucleotides.

[0223] Additional modifications include, but are not limited to, 2′-O-methylation of the ribose sugars of 5′-terminal and/or 5′-anteterminal nucleotides of the mRNA (as mentioned above) on the 2′-hydroxyl group of the sugar ring. Multiple distinct 5′-cap structures can be used to generate the 5′-cap of a nucleic acid molecule, such as an mRNA molecule.

[0224] Cap analogs, which herein are also referred to as synthetic cap analogs, chemical caps, chemical cap analogs, or structural or functional cap analogs, differ from natural (i.e. endogenous, wild-type or physiological) 5′-caps in their chemical structure, while retaining cap function. Cap analogs may be chemically (i.e. non-enzymatically) or enzymatically synthesized and/or linked to a nucleic acid molecule.

[0225] For example, the Anti-Reverse Cap Analog (ARCA) cap contains two guanines linked by a 5′-5′-triphosphate group, wherein one guanine contains an N7 methyl group as well as a 3′-O-methyl group (i.e., N7,3′-O-dimethyl-guanosine-5′-triphosphate-5′-guanosine (m⁷G-3′mppp-G; which may equivaliently be designated 3′ O-Me-m7G(5′)ppp(5′)G). The 3′-O atom of the other, unmodified, guanine becomes linked to the 5′-terminal nucleotide of the capped nucleic acid molecule (e.g. an mRNA or mmRNA). The N7- and 3′-O-methlyated guanine provides the terminal moiety of the capped nucleic acid molecule (e.g. mRNA or mmRNA).

[0226] Another exemplary cap is mCAP, which is similar to ARCA but has a 2′-O-methyl group on guanosine (i.e., N7,2′-O-dimethyl-guanosine-5′-triphosphate-5′-guanosine, m⁷Gm-ppp-G).

[0227] While cap analogs allow for the concomitant capping of a nucleic acid molecule in an in vitro transcription reaction, up to 20% of transcripts can remain uncapped. This, as well as the structural differences of a cap analog from an endogenous 5′-cap structures of nucleic acids produced by the endogenous, cellular transcription machinery, may lead to reduced translational competency and reduced cellular stability.

[0228] Polynucleotides, primary constructs and mmRNA of the invention may also be capped post-transcriptionally, using enzymes, in order to generate more authentic 5′-cap structures. As used herein, the phrase “more authentic” refers to a feature that closely mirrors or mimics, either structurally or functionally, an endogenous or wild type feature. That is, a “more authentic” feature is better representative of an endogenous, wild-type, natural or physiological cellular function and/or structure as compared to synthetic features or analogs, etc., of the prior art, or which outperforms the corresponding endogenous, wild-type, natural or physiological feature in one or more respects. Non-limiting examples of more authentic 5′cap structures of the present invention are those which, among other things, have enhanced binding of cap binding proteins, increased half life, reduced susceptibility to 5′ endonucleases and/or reduced 5′decapping, as compared to synthetic 5′cap structures known in the art (or to a wild-type, natural or physiological 5′cap structure). For example, recombinant Vaccinia Virus Capping Enzyme and recombinant 2′-O-methyltransferase enzyme can create a canonical 5′-5′-triphosphate linkage between the 5′-terminal nucleotide of an mRNA and a guanine cap nucleotide wherein the cap guanine contains an N7 methylation and the 5′-terminal nucleotide of the mRNA contains a 2′-O-methyl. Such a structure is termed the Cap1 structure. This cap results in a higher translational-competency and cellular stability and a reduced activation of cellular pro-inflammatory cytokines, as compared, e.g., to other 5′cap analog structures known in the art. Cap structures include, but are not limited to, 7 mG(5′)ppp(5′)N, pN2p (cap 0), 7 mG(5′)ppp(5′)NlmpNp(cap 1), and 7 mG(5′)-ppp(5′)N1mpN2mp(cap 2).

[0229] Because the polynucleotides, primary constructs or mmRNA may be capped post-transcriptionally, and because this process is more efficient, nearly 100% of the polynucleotides, primary constructs or mmRNA may be capped. This is in contrast to ˜80% when a cap analog is linked to an mRNA in the course of an in vitro transcription reaction.

[0230] According to the present invention, 5′ terminal caps may include endogenous caps or cap analogs. According to the present invention, a 5′ terminal cap may comprise a guanine analog. Useful guanine analogs include, but are not limited to, inosine, N1-methyl-guanosine, 2′fluoro-guanosine, 7-deaza-guanosine, 8-oxo-guanosine, 2-amino-guanosine, LNA-guanosine, and 2-azido-guanosine.

### Viral Sequences

[0231] Additional viral sequences such as, but not limited to, the translation enhancer sequence of the barley yellow dwarf virus (BYDV-PAV), the Jaagsiekte sheep retrovirus (JSRV) and/or the Enzootic nasal tumor virus (See e.g., International Pub. No. WO2012129648; herein incorporated by reference in its entirety) can be engineered and inserted in the 3′ UTR of the polynucleotides, primary constructs or mmRNA of the invention and can stimulate the translation of the construct in vitro and in vivo. Transfection experiments can be conducted in relevant cell lines at and protein production can be assayed by ELISA at 12 hr, 24 hr, 48 hr, 72 hr and day 7 post-transfection.

### IRES Sequences

[0232] Further, provided are polynucleotides, primary constructs or mmRNA which may contain an internal ribosome entry site (IRES). First identified as a feature Picorna virus RNA, IRES plays an important role in initiating protein synthesis in absence of the 5′ cap structure. An IRES may act as the sole ribosome binding site, or may serve as one of multiple ribosome binding sites of an mRNA. Polynucleotides, primary constructs or mmRNA containing more than one functional ribosome binding site may encode several peptides or polypeptides that are translated independently by the ribosomes (“multicistronic nucleic acid molecules”). When polynucleotides, primary constructs or mmRNA are provided with an IRES, further optionally provided is a second translatable region. Examples of IRES sequences that can be used according to the invention include without limitation, those from picornaviruses (e.g. FMDV), pest viruses (CFFV), polio viruses (PV), encephalomyocarditis viruses (ECMV), foot-and-mouth disease viruses (FMDV), hepatitis C viruses (HCV), classical swine fever viruses (CSFV), murine leukemia virus (MLV), simian immune deficiency viruses (SIV) or cricket paralysis viruses (CrPV).

### Poly-A Tails

[0233] During RNA processing, a long chain of adenine nucleotides (poly-A tail) may be added to a polynucleotide such as an mRNA molecules in order to increase stability. Immediately after transcription, the 3′ end of the transcript may be cleaved to free a 3′ hydroxyl. Then poly-A polymerase adds a chain of adenine nucleotides to the RNA. The process, called polyadenylation, adds a poly-A tail that can be between, for example, approximately 100 and 250 residues long.

[0234] It has been discovered that unique poly-A tail lengths provide certain advantages to the polynucleotides, primary constructs or mmRNA of the present invention.

[0235] Generally, the length of a poly-A tail of the present invention is greater than 30 nucleotides in length. In another embodiment, the poly-A tail is greater than 35 nucleotides in length (e.g., at least or greater than about 35, 40, 45, 50, 55, 60, 70, 80, 90, 100, 120, 140, 160, 180, 200, 250, 300, 350, 400, 450, 500, 600, 700, 800, 900, 1,000, 1,100, 1,200, 1,300, 1,400, 1,500, 1,600, 1,700, 1,800, 1,900, 2,000, 2,500, and 3,000 nucleotides). In some embodiments, the polynucleotide, primary construct, or mmRNA includes from about 30 to about 3,000 nucleotides (e.g., from 30 to 50, from 30 to 100, from 30 to 250, from 30 to 500, from 30 to 750, from 30 to 1,000, from 30 to 1,500, from 30 to 2,000, from 30 to 2,500, from 50 to 100, from 50 to 250, from 50 to 500, from 50 to 750, from 50 to 1,000, from 50 to 1,500, from 50 to 2,000, from 50 to 2,500, from 50 to 3,000, from 100 to 500, from 100 to 750, from 100 to 1,000, from 100 to 1,500, from 100 to 2,000, from 100 to 2,500, from 100 to 3,000, from 500 to 750, from 500 to 1,000, from 500 to 1,500, from 500 to 2,000, from 500 to 2,500, from 500 to 3,000, from 1,000 to 1,500, from 1,000 to 2,000, from 1,000 to 2,500, from 1,000 to 3,000, from 1,500 to 2,000, from 1,500 to 2,500, from 1,500 to 3,000, from 2,000 to 3,000, from 2,000 to 2,500, and from 2,500 to 3,000).

[0236] In one embodiment, the poly-A tail is designed relative to the length of the overall polynucleotides, primary constructs or mmRNA. This design may be based on the length of the coding region, the length of a particular feature or region (such as the first or flanking regions), or based on the length of the ultimate product expressed from the polynucleotides, primary constructs or mmRNA.

[0237] In this context the poly-A tail may be 10, 20, 30, 40, 50, 60, 70, 80, 90, or 100% greater in length than the polynucleotides, primary constructs or mmRNA or feature thereof. The poly-A tail may also be designed as a fraction of polynucleotides, primary constructs or mmRNA to which it belongs. In this context, the poly-A tail may be 10, 20, 30, 40, 50, 60, 70, 80, or 90% or more of the total length of the construct or the total length of the construct minus the poly-A tail. Further, engineered binding sites and conjugation of polynucleotides, primary constructs or mmRNA for Poly-A binding protein may enhance expression.

[0238] Additionally, multiple distinct polynucleotides, primary constructs or mmRNA may be linked together to the PABP (Poly-A binding protein) through the 3′-end using modified nucleotides at the 3′-terminus of the poly-A tail. Transfection experiments can be conducted in relevant cell lines at and protein production can be assayed by ELISA at 12 hr, 24 hr, 48 hr, 72 hr and day 7 post-transfection.

[0239] In one embodiment, the polynucleotide primary constructs of the present invention are designed to include a polyA-G Quartet. The G-quartet is a cyclic hydrogen bonded array of four guanine nucleotides that can be formed by G-rich sequences in both DNA and RNA. In this embodiment, the G-quartet is incorporated at the end of the poly-A tail. The resultant mmRNA construct is assayed for stability, protein production and other parameters including half-life at various time points. It has been discovered that the polyA-G quartet results in protein production equivalent to at least 75% of that seen using a poly-A tail of 120 nucleotides alone.

### Quantification

[0240] In one embodiment, the polynucleotides, primary constructs or mmRNA of the present invention may be quantified in exosomes derived from one or more bodily fluid. As used herein “bodily fluids” include peripheral blood, serum, plasma, ascites, urine, cerebrospinal fluid (CSF), sputum, saliva, bone marrow, synovial fluid, aqueous humor, amniotic fluid, cerumen, breast milk, broncheoalveolar lavage fluid, semen, prostatic fluid, cowper's fluid or pre-ejaculatory fluid, sweat, fecal matter, hair, tears, cyst fluid, pleural and peritoneal fluid, pericardial fluid, lymph, chyme, chyle, bile, interstitial fluid, menses, pus, sebum, vomit, vaginal secretions, mucosal secretion, stool water, pancreatic juice, lavage fluids from sinus cavities, bronchopulmonary aspirates, blastocyl cavity fluid, and umbilical cord blood. Alternatively, exosomes may be retrieved from an organ selected from the group consisting of lung, heart, pancreas, stomach, intestine, bladder, kidney, ovary, testis, skin, colon, breast, prostate, brain, esophagus, liver, and placenta.

[0241] In the quantification method, a sample of not more than 2 mL is obtained from the subject and the exosomes isolated by size exclusion chromatography, density gradient centrifugation, differential centrifugation, nanomembrane ultrafiltration, immunoabsorbent capture, affinity purification, microfluidic separation, or combinations thereof. In the analysis, the level or concentration of a polynucleotide, primary construct or mmRNA may be an expression level, presence, absence, truncation or alteration of the administered construct. It is advantageous to correlate the level with one or more clinical phenotypes or with an assay for a human disease biomarker. The assay may be performed using construct specific probes, cytometry, qRT-PCR, real-time PCR, PCR, flow cytometry, electrophoresis, mass spectrometry, or combinations thereof while the exosomes may be isolated using immunohistochemical methods such as enzyme linked immunosorbent assay (ELISA) methods. Exosomes may also be isolated by size exclusion chromatography, density gradient centrifugation, differential centrifugation, nanomembrane ultrafiltration, immunoabsorbent capture, affinity purification, microfluidic separation, or combinations thereof.

[0242] These methods afford the investigator the ability to monitor, in real time, the level of polynucleotides, primary constructs or mmRNA remaining or delivered. This is possible because the polynucleotides, primary constructs or mmRNA of the present invention differ from the endogenous forms due to the structural or chemical modifications.

### II. Design and Synthesis of mmRNA

[0243] Polynucleotides, primary constructs or mmRNA for use in accordance with the invention may be prepared according to any available technique including, but not limited to chemical synthesis, enzymatic synthesis, which is generally termed in vitro transcription (IVT) or enzymatic or chemical cleavage of a longer precursor, etc. Methods of synthesizing RNAs are known in the art (see, e.g., Gait, M. J. (ed.) Oligonucleotide synthesis: apractical approach, Oxford [Oxfordshire], Washington, DC: IRL Press, 1984; and Herdewijn, P. (ed.) Oligonucleotide synthesis: methods and applications, Methods in Molecular Biology, v. 288 (Clifton, N.J.) Totowa, N.J.: Humana Press, 2005; both of which are incorporated herein by reference).

[0244] The process of design and synthesis of the primary constructs of the invention generally includes the steps of gene construction, mRNA production (either with or without modifications) and purification. In the enzymatic synthesis method, a target polynucleotide sequence encoding the polypeptide of interest is first selected for incorporation into a vector which will be amplified to produce a cDNA template. Optionally, the target polynucleotide sequence and/or any flanking sequences may be codon optimized. The cDNA template is then used to produce mRNA through in vitro transcription (IVT). After production, the mRNA may undergo purification and clean-up processes. The steps of which are provided in more detail below.

### Gene Construction

[0245] The step of gene construction may include, but is not limited to gene synthesis, vector amplification, plasmid purification, plasmid linearization and clean-up, and cDNA template synthesis and clean-up.

### Gene Synthesis

[0246] Once a polypeptide of interest, or target, is selected for production, a primary construct is designed. Within the primary construct, a first region of linked nucleosides encoding the polypeptide of interest may be constructed using an open reading frame (ORF) of a selected nucleic acid (DNA or RNA) transcript. The ORF may comprise the wild type ORF, an isoform, variant or a fragment thereof. As used herein, an “open reading frame” or “ORF” is meant to refer to a nucleic acid sequence (DNA or RNA) which is capable of encoding a polypeptide of interest. ORFs often begin with the start codon, ATG and end with a nonsense or termination codon or signal.

[0247] Further, the nucleotide sequence of the first region may be codon optimized. Codon optimization methods are known in the art and may be useful in efforts to achieve one or more of several goals. These goals include to match codon frequencies in target and host organisms to ensure proper folding, bias GC content to increase mRNA stability or reduce secondary structures, minimize tandem repeat codons or base runs that may impair gene construction or expression, customize transcriptional and translational control regions, insert or remove protein trafficking sequences, remove/add post translation modification sites in encoded protein (e.g. glycosylation sites), add, remove or shuffle protein domains, insert or delete restriction sites, modify ribosome binding sites and mRNA degradation sites, to adjust translational rates to allow the various domains of the protein to fold properly, or to reduce or eliminate problem secondary structures within the mRNA. Codon optimization tools, algorithms and services are known in the art, non-limiting examples include services from GeneArt (Life Technologies), DNA2.0 (Menlo Park CA) and/or proprietary methods. In one embodiment, the ORF sequence is optimized using optimization algorithms. Codon options for each amino acid are given in Table 1.

TABLE 1
Codon Options

| | Single | |
|---|---|---|
| | Letter | |
| Amino Acid | Code | Codon Options |
| Isoleucine | I | ATT, ATC, ATA |
| Leucine | L | CTT, CTC, CTA, CTG, |
| | | TTA, TTG |
| Valine | V | GTT, GTC, GTA, GTG |
| Phenylalanine | F | TTT, TTC |
| Methionine | M | ATG |
| Cysteine | C | TGT, TGC |
| Alanine | A | GCT, GCC, GCA, GCG |
| Glycine | G | GGT, GGC, GGA, GGG |
| Proline | P | CCT, CCC, CCA, CCG |
| Threonine | T | ACT, ACC, ACA, ACG |
| Serine | S | TCT, TCC, TCA, TCG, |
| | | AGT, AGC |
| Tyrosine | Y | TAT, TAC |
| Tryptophan | W | TGG |
| Glutamine | Q | CAA, CAG |
| Asparagine | N | AAT, AAC |
| Histidine | H | CAT, CAC |
| Glutamic acid | E | GAA, GAG |
| Aspartic acid | D | GAT, GAC |
| Lysine | K | AAA, AAG |
| Arginine | R | CGT, CGC, CGA, CGG, |
| | | AGA, AGG |
| Selenocysteine | Sec | UGA in mRNA |
| | | in presence |
| | | of Selenocystein |
| | | insertion |
| | | element (SECIS) |
| Stop codons | Stop | TAA, TAG, TGA |

[0248] Features, which may be considered beneficial in some embodiments of the present invention, may be encoded by the primary construct and may flank the ORF as a first or second flanking region. The flanking regions may be incorporated into the primary construct before and/or after optimization of the ORF. It is not required that a primary construct contain both a 5′ and 3′ flanking region. Examples of such features include, but are not limited to, untranslated regions (UTRs), Kozak sequences, an oligo(dT) sequence, and detectable tags and may include multiple cloning sites which may have XbaI recognition.

[0249] In some embodiments, a 5′ UTR and/or a 3′ UTR may be provided as flanking regions. Multiple 5′ or 3′ UTRs may be included in the flanking regions and may be the same or of different sequences. Any portion of the flanking regions, including none, may be codon optimized and any may independently contain one or more different structural or chemical modifications, before and/or after codon optimization. Combinations of features may be included in the first and second flanking regions and may be contained within other features. For example, the ORF may be flanked by a 5′ UTR which may contain a strong Kozak translational initiation signal and/or a 3′ UTR which may include an oligo(dT) sequence for templated addition of a poly-A tail. 5′UTR may comprise a first polynucleotide fragment and a second polynucleotide fragment from the same and/or different genes such as the 5′UTRs described in US Patent Application Publication No. 20100293625, herein incorporated by reference in its entirety.

[0250] Tables 2 and 3 provide a listing of exemplary UTRs which may be utilized in the primary construct of the present invention as flanking regions. Shown in Table 2 is a listing of a 5′-untranslated region of the invention. Variants of 5′ UTRs may be utilized wherein one or more nucleotides are added or removed to the termini, including A, T, C or G.

TABLE 2
5′-Untranslated Regions

| 5′ UTR | Name/ | | SEQ ID |
|---|---|---|---|
| Identifier | Description | Sequence | NO. |
| 5UTR- | Upstream UTR | GGGAAATAAGAGAGAAAAGAAG | 1 |
| 001 | | AGTAAGAAGAAATATAAGAGCCACC | |
| 5UTR- | Upstream UTR | GGGAGATCAGAGAGAAAAGAAG | 2 |
| 002 | | AGTAAGAAGAAATATAAGAGCCACC | |
| 5UTR- | Upstream UTR | GGAATAAAAGTCTCAACACAACA | 3 |
| 003 | | TATACAAAACAAACGAATCTCAA | |
| | | GCAATCAAGCATTCTACTTCTATT | |
| | | GCAGCAATTTAAATCATTTCTTTT | |
| | | AAAGCAAAAGCAATTTTCTGAAA | |
| | | ATTTTCACCATTTACGAACGATAGCAAC | |
| 5UTR- | Upstream UTR | GGGAGACAAGCUUGGCAUUCCG | 4 |
| 004 | | GUACUGUUGGUAAAGCCACC | |

[0251] Shown in Table 3 is a representative listing of 3′-untranslated regions of the invention. Variants of 3′ UTRs may be utilized wherein one or more nucleotides are added or removed to the termini, including A, T, C or G.

TABLE 3
3′-Untranslated Regions

| 3′ UTR | Name/ | | SEQ ID |
|---|---|---|---|
| Identifier | Description | Sequence | NO. |
| 3UTR-001 | Creatine | GCGCCTGCCCACCTGCCACCGACTGCTGG | 5 |
| | Kinase | AACCCAGCCAGTGGGAGGGCCTGGCCCAC | |
| | | CAGAGTCCTGCTCCCTCACTCCTCGCCCCG | |
| | | CCCCCTGTCCCAGAGTCCCACCTGGGGGC | |
| | | TCTCTCCACCCTTCTCAGAGTTCCAGTTTC | |
| | | AACCAGAGTTCCAACCAATGGGCTCCATC | |
| | | CTCTGGATTCTGGCCAATGAAATATCTCCC | |
| | | TGGCAGGGTCCTCTTCTTTTCCCAGAGCTC | |
| | | CACCCCAACCAGGAGCTCTAGTTAATGGA | |
| | | GAGCTCCCAGCACACTCGGAGCTTGTGCT | |
| | | TTGTCTCCACGCAAAGCGATAAATAAAAG | |
| | | CATTGGTGGCCTTTGGTCTTTGAATAAAGC | |
| | | CTGAGTAGGAAGTCTAGA | |
| 3UTR-002 | Myoglobin | GCCCCTGCCGCTCCCACCCCCACCCATCTG | 6 |
| | | GGCCCCGGGTTCAAGAGAGAGCGGGGTCT | |
| | | GATCTCGTGTAGCCATATAGAGTTTGCTTC | |
| | | TGAGTGTCTGCTTTGTTTAGTAGAGGTGGG | |
| | | CAGGAGGAGCTGAGGGGCTGGGGCTGGG | |
| | | GTGTTGAAGTTGGCTTTGCATGCCCAGCG | |
| | | ATGCGCCTCCCTGTGGGATGTCATCACCCT | |
| | | GGGAACCGGGAGTGGCCCTTGGCTCACTG | |
| | | TGTTCTGCATGGTTTGGATCTGAATTAATT | |
| | | GTCCTTTCTTCTAAATCCCAACCGAACTTC | |
| | | TTCCAACCTCCAAACTGGCTGTAACCCCA | |
| | | AATCCAAGCCATTAACTACACCTGACAGT | |
| | | AGCAATTGTCTGATTAATCACTGGCCCCTT | |
| | | GAAGACAGCAGAATGTCCCTTTGCAATGA | |
| | | GGAGGAGATCTGGGCTGGGCGGGCCAGCT | |
| | | GGGGAAGCATTTGACTATCTGGAACTTGT | |
| | | GTGTGCCTCCTCAGGTATGGCAGTGACTC | |
| | | ACCTGGTTTTAATAAAACAACCTGCAACA | |
| | | TCTCATGGTCTTTGAATAAAGCCTGAGTAG | |
| | | GAAGTCTAGA | |
| 3UTR-003 | α-actin | ACACACTCCACCTCCAGCACGCGACTTCTC | 7 |
| | | AGGACGACGAATCTTCTCAATGGGGGGGC | |
| | | GGCTGAGCTCCAGCCACCCCGCAGTCACT | |
| | | TTCTTTGTAACAACTTCCGTTGCTGCCATC | |
| | | GTAAACTGACACAGTGTTTATAACGTGTA | |
| | | CATACATTAACTTATTACCTCATTTTGTTA | |
| | | TTTTTCGAAACAAAGCCCTGTGGAAGAAA | |
| | | ATGGAAAACTTGAAGAAGCATTAAAGTCA | |
| | | TTCTGTTAAGCTGCGTAAATGGTCTTTGAA | |
| | | TAAAGCCTGAGTAGGAAGTCTAGA | |
| 3UTR-004 | Albumin | CATCACATTTAAAAGCATCTCAGCCTACC | 8 |
| | | ATGAGAATAAGAGAAAGAAAATGAAGAT | |
| | | CAAAAGCTTATTCATCTGTTTTTCTTTTTCG | |
| | | TTGGTGTAAAGCCAACACCCTGTCTAAAA | |
| | | AACATAAATTTCTTTAATCATTTTGCCTCT | |
| | | TTTCTCTGTGCTTCAATTAATAAAAAATGG | |
| | | AAAGAATCTAATAGAGTGGTACAGCACTG | |
| | | TTATTTTTCAAAGATGTGTTGCTATCCTGA | |
| | | AAATTCTGTAGGTTCTGTGGAAGTTCCAGT | |
| | | GTTCTCTCTTATTCCACTTCGGTAGAGGAT | |
| | | TTCTAGTTTCTTGTGGGCTAATTAAATAAA | |
| | | TCATTAATACTCTTCTAATGGTCTTTGAAT | |
| | | AAAGCCTGAGTAGGAAGTCTAGA | |
| 3UTR-005 | α-globin | GCTGCCTTCTGCGGGGCTTGCCTTCTGGCC | 9 |
| | | ATGCCCTTCTTCTCTCCCTTGCACCTGTAC | |
| | | CTCTTGGTCTTTGAATAAAGCCTGAGTAGG | |
| | | AAGGCGGCCGCTCGAGCATGCATCTAGA | |
| 3UTR-006 | G-CSF | GCCAAGCCCTCCCCATCCCATGTATTTATC | 10 |
| | | TCTATTTAATATTTATGTCTATTTAAGCCT | |
| | | CATATTTAAAGACAGGGAAGAGCAGAACG | |
| | | GAGCCCCAGGCCTCTGTGTCCTTCCCTGCA | |
| | | TTTCTGAGTTTCATTCTCCTGCCTGTAGCA | |
| | | GTGAGAAAAAGCTCCTGTCCTCCCATCCC | |
| | | CTGGACTGGGAGGTAGATAGGTAAATACC | |
| | | AAGTATTTATTACTATGACTGCTCCCCAGC | |
| | | CCTGGCTCTGCAATGGGCACTGGGATGAG | |
| | | CCGCTGTGAGCCCCTGGTCCTGAGGGTCC | |
| | | CCACCTGGGACCCTTGAGAGTATCAGGTC | |
| | | TCCCACGTGGGAGACAAGAAATCCCTGTT | |
| | | TAATATTTAAACAGCAGTGTTCCCCATCTG | |
| | | GGTCCTTGCACCCCTCACTCTGGCCTCAGC | |
| | | CGACTGCACAGCGGCCCCTGCATCCCCTT | |
| | | GGCTGTGAGGCCCCTGGACAAGCAGAGGT | |
| | | GGCCAGAGCTGGGAGGCATGGCCCTGGGG | |
| | | TCCCACGAATTTGCTGGGGAATCTCGTTTT | |
| | | TCTTCTTAAGACTTTTGGGACATGGTTTGA | |
| | | CTCCCGAACATCACCGACGCGTCTCCTGTT | |
| | | TTTCTGGGTGGCCTCGGGACACCTGCCCTG | |
| | | CCCCCACGAGGGTCAGGACTGTGACTCTT | |
| | | TTTAGGGCCAGGCAGGTGCCTGGACATTT | |
| | | GCCTTGCTGGACGGGGACTGGGGATGTGG | |
| | | GAGGGAGCAGACAGGAGGAATCATGTCA | |
| | | GGCCTGTGTGTGAAAGGAAGCTCCACTGT | |
| | | CACCCTCCACCTCTTCACCCCCCACTCACC | |
| | | AGTGTCCCCTCCACTGTCACATTGTAACTG | |
| | | AACTTCAGGATAATAAAGTGTTTGCCTCC | |
| | | ATGGTCTTTGAATAAAGCCTGAGTAGGAA | |
| | | GGCGGCCGCTCGAGCATGCATCTAGA | |
| 3UTR-007 | Col1a2, | ACTCAATCTAAATTAAAAAAGAAAGAAAT | 11 |
| | collagen, | TTGAAAAAACTTTCTCTTTGCCATTTCTTC | |
| | type I, | TTCTTCTTTTTTAACTGAAAGCTGAATCCT | |
| | alpha 2 | TCCATTTCTTCTGCACATCTACTTGCTTAA | |
| | | ATTGTGGGCAAAAGAGAAAAAGAAGGAT | |
| | | TGATCAGAGCATTGTGCAATACAGTTTCAT | |
| | | TAACTCCTTCCCCCGCTCCCCCAAAAATTT | |
| | | GAATTTTTTTTTCAACACTCTTACACCTGT | |
| | | TATGGAAAATGTCAACCTTTGTAAGAAAA | |
| | | CCAAAATAAAAATTGAAAAATAAAAACCA | |
| | | TAAACATTTGCACCACTTGTGGCTTTTGAA | |
| | | TATCTTCCACAGAGGGAAGTTTAAAACCC | |
| | | AAACTTCCAAAGGTTTAAACTACCTCAAA | |
| | | ACACTTTCCCATGAGTGTGATCCACATTGT | |
| | | TAGGTGCTGACCTAGACAGAGATGAACTG | |
| | | AGGTCCTTGTTTTGTTTTGTTCATAATACA | |
| | | AAGGTGCTAATTAATAGTATTTCAGATACT | |
| | | TGAAGAATGTTGATGGTGCTAGAAGAATT | |
| | | TGAGAAGAAATACTCCTGTATTGAGTTGT | |
| | | ATCGTGTGGTGTATTTTTTAAAAAATTTGA | |
| | | TTTAGCATTCATATTTTCCATCTTATTCCCA | |
| | | ATTAAAAGTATGCAGATTATTTGCCCAAA | |
| | | TCTTCTTCAGATTCAGCATTTGTTCTTTGCC | |
| | | AGTCTCATTTTCATCTTCTTCCATGGTTCC | |
| | | ACAGAAGCTTTGTTTCTTGGGCAAGCAGA | |
| | | AAAATTAAATTGTACCTATTTTGTATATGT | |
| | | GAGATGTTTAAATAAATTGTGAAAAAAAT | |
| | | GAAATAAAGCATGTTTGGTTTTCCAAAAG | |
| | | AACATAT | |
| 3UTR-008 | Col6a2; | CGCCGCCGCCCGGGCCCCGCAGTCGAGGG | 12 |
| | collagen, | TCGTGAGCCCACCCCGTCCATGGTGCTAA | |
| | type VI, | GCGGGCCCGGGTCCCACACGGCCAGCACC | |
| | alpha 2 | GCTGCTCACTCGGACGACGCCCTGGGCCT | |
| | | GCACCTCTCCAGCTCCTCCCACGGGGTCCC | |
| | | CGTAGCCCCGGCCCCCGCCCAGCCCCAGG | |
| | | TCTCCCCAGGCCCTCCGCAGGCTGCCCGG | |
| | | CCTCCCTCCCCCTGCAGCCATCCCAAGGCT | |
| | | CCTGACCTACCTGGCCCCTGAGCTCTGGA | |
| | | GCAAGCCCTGACCCAATAAAGGCTTTGAA | |
| | | CCCAT | |
| 3UTR-009 | RPN1; | GGGGCTAGAGCCCTCTCCGCACAGCGTGG | 13 |
| | ribophorin | AGACGGGGCAAGGAGGGGGGTTATTAGG | |
| | I | ATTGGTGGTTTTGTTTTGCTTTGTTTAAAG | |
| | | CCGTGGGAAAATGGCACAACTTTACCTCT | |
| | | GTGGGAGATGCAACACTGAGAGCCAAGG | |
| | | GGTGGGAGTTGGGATAATTTTTATATAAA | |
| | | AGAAGTTTTTCCACTTTGAATTGCTAAAAG | |
| | | TGGCATTTTTCCTATGTGCAGTCACTCCTC | |
| | | TCATTTCTAAAATAGGGACGTGGCCAGGC | |
| | | ACGGTGGCTCATGCCTGTAATCCCAGCAC | |
| | | TTTGGGAGGCCGAGGCAGGCGGCTCACGA | |
| | | GGTCAGGAGATCGAGACTATCCTGGCTAA | |
| | | CACGGTAAAACCCTGTCTCTACTAAAAGT | |
| | | ACAAAAAATTAGCTGGGCGTGGTGGTGGG | |
| | | CACCTGTAGTCCCAGCTACTCGGGAGGCT | |
| | | GAGGCAGGAGAAAGGCATGAATCCAAGA | |
| | | GGCAGAGCTTGCAGTGAGCTGAGATCACG | |
| | | CCATTGCACTCCAGCCTGGGCAACAGTGT | |
| | | TAAGACTCTGTCTCAAATATAAATAAATA | |
| | | AATAAATAAATAAATAAATAAATAAAAAT | |
| | | AAAGCGAGATGTTGCCCTCAAA | |
| 3UTR-010 | LRP1; | GGCCCTGCCCCGTCGGACTGCCCCCAGAA | 14 |
| | low | AGCCTCCTGCCCCCTGCCAGTGAAGTCCTT | |
| | density | CAGTGAGCCCCTCCCCAGCCAGCCCTTCCC | |
| | lipoprotein | TGGCCCCGCCGGATGTATAAATGTAAAAA | |
| | receptor- | TGAAGGAATTACATTTTATATGTGAGCGA | |
| | related | GCAAGCCGGCAAGCGAGCACAGTATTATT | |
| | protein 1 | TCTCCATCCCCTCCCTGCCTGCTCCTTGGC | |
| | | ACCCCCATGCTGCCTTCAGGGAGACAGGC | |
| | | AGGGAGGGCTTGGGGCTGCACCTCCTACC | |
| | | CTCCCACCAGAACGCACCCCACTGGGAGA | |
| | | GCTGGTGGTGCAGCCTTCCCCTCCCTGTAT | |
| | | AAGACACTTTGCCAAGGCTCTCCCCTCTCG | |
| | | CCCCATCCCTGCTTGCCCGCTCCCACAGCT | |
| | | TCCTGAGGGCTAATTCTGGGAAGGGAGAG | |
| | | TTCTTTGCTGCCCCTGTCTGGAAGACGTGG | |
| | | CTCTGGGTGAGGTAGGCGGGAAAGGATGG | |
| | | AGTGTTTTAGTTCTTGGGGGAGGCCACCCC | |
| | | AAACCCCAGCCCCAACTCCAGGGGCACCT | |
| | | ATGAGATGGCCATGCTCAACCCCCCTCCC | |
| | | AGACAGGCCCTCCCTGTCTCCAGGGCCCC | |
| | | CACCGAGGTTCCCAGGGCTGGAGACTTCC | |
| | | TCTGGTAAACATTCCTCCAGCCTCCCCTCC | |
| | | CCTGGGGACGCCAAGGAGGTGGGCCACAC | |
| | | CCAGGAAGGGAAAGCGGGCAGCCCCGTTT | |
| | | TGGGGACGTGAACGTTTTAATAATTTTTGC | |
| | | TGAATTCCTTTACAACTAAATAACACAGA | |
| | | TATTGTTATAAATAAAATTGT | |
| 3UTR-011 | Nnt1; | ATATTAAGGATCAAGCTGTTAGCTAATAA | 15 |
| | cardio- | TGCCACCTCTGCAGTTTTGGGAACAGGCA | |
| | trophin- | AATAAAGTATCAGTATACATGGTGATGTA | |
| | like | CATCTGTAGCAAAGCTCTTGGAGAAAATG | |
| | cytokine | AAGACTGAAGAAAGCAAAGCAAAAACTG | |
| | factor 1 | TATAGAGAGATTTTTCAAAAGCAGTAATC | |
| | | CCTCAATTTTAAAAAAGGATTGAAAATTC | |
| | | TAAATGTCTTTCTGTGCATATTTTTTGTGTT | |
| | | AGGAATCAAAAGTATTTTATAAAAGGAGA | |
| | | AAGAACAGCCTCATTTTAGATGTAGTCCT | |
| | | GTTGGATTTTTTATGCCTCCTCAGTAACCA | |
| | | GAAATGTTTTAAAAAACTAAGTGTTTAGG | |
| | | ATTTCAAGACAACATTATACATGGCTCTG | |
| | | AAATATCTGACACAATGTAAACATTGCAG | |
| | | GCACCTGCATTTTATGTTTTTTTTTTCAACA | |
| | | AATGTGACTAATTTGAAACTTTTATGAACT | |
| | | TCTGAGCTGTCCCCTTGCAATTCAACCGCA | |
| | | GTTTGAATTAATCATATCAAATCAGTTTTA | |
| | | ATTTTTTAAATTGTACTTCAGAGTCTATAT | |
| | | TTCAAGGGCACATTTTCTCACTACTATTTT | |
| | | AATACATTAAAGGACTAAATAATCTTTCA | |
| | | GAGATGCTGGAAACAAATCATTTGCTTTA | |
| | | TATGTTTCATTAGAATACCAATGAAACAT | |
| | | ACAACTTGAAAATTAGTAATAGTATTTTTG | |
| | | AAGATCCCATTTCTAATTGGAGATCTCTTT | |
| | | AATTTCGATCAACTTATAATGTGTAGTACT | |
| | | ATATTAAGTGCACTTGAGTGGAATTCAAC | |
| | | ATTTGACTAATAAAATGAGTTCATCATGTT | |
| | | GGCAAGTGATGTGGCAATTATCTCTGGTG | |
| | | ACAAAAGAGTAAAATCAAATATTTCTGCC | |
| | | TGTTACAAATATCAAGGAAGACCTGCTAC | |
| | | TATGAAATAGATGACATTAATCTGTCTTCA | |
| | | CTGTTTATAATACGGATGGATTTTTTTTCA | |
| | | AATCAGTGTGTGTTTTGAGGTCTTATGTAA | |
| | | TTGATGACATTTGAGAGAAATGGTGGCTT | |
| | | TTTTTAGCTACCTCTTTGTTCATTTAAGCA | |
| | | CCAGTAAAGATCATGTCTTTTTATAGAAGT | |
| | | GTAGATTTTCTTTGTGACTTTGCTATCGTG | |
| | | CCTAAAGCTCTAAATATAGGTGAATGTGT | |
| | | GATGAATACTCAGATTATTTGTCTCTCTAT | |
| | | ATAATTAGTTTGGTACTAAGTTTCTCAAAA | |
| | | AATTATTAACACATGAAAGACAATCTCTA | |
| | | AACCAGAAAAAGAAGTAGTACAAATTTTG | |
| | | TTACTGTAATGCTCGCGTTTAGTGAGTTTA | |
| | | AAACACACAGTATCTTTTGGTTTTATAATC | |
| | | AGTTTCTATTTTGCTGTGCCTGAGATTAAG | |
| | | ATCTGTGTATGTGTGTGTGTGTGTGTGTGC | |
| | | GTTTGTGTGTTAAAGCAGAAAAGACTTTTT | |
| | | TAAAAGTTTTAAGTGATAAATGCAATTTGT | |
| | | TAATTGATCTTAGATCACTAGTAAACTCAG | |
| | | GGCTGAATTATACCATGTATATTCTATTAG | |
| | | AAGAAAGTAAACACCATCTTTATTCCTGC | |
| | | CCTTTTTCTTCTCTCAAAGTAGTTGTAGTT | |
| | | ATATCTAGAAAGAAGCAATTTTGATTTCTT | |
| | | GAAAAGGTAGTTCCTGCACTCAGTTTAAA | |
| | | CTAAAAATAATCATACTTGGATTTTATTTA | |
| | | TTTTTGTCATAGTAAAAATTTTAATTTATA | |
| | | TATATTTTTATTTAGTATTATCTTATTCTTT | |
| | | GCTATTTGCCAATCCTTTGTCATCAATTGT | |
| | | GTTAAATGAATTGAAAATTCATGCCCTGTT | |
| | | CATTTTATTTTACTTTATTGGTTAGGATATT | |
| | | TAAAGGATTTTTGTATATATAATTTCTTAA | |
| | | ATTAATATTCCAAAAGGTTAGTGGACTTA | |
| | | GATTATAAATTATGGCAAAAATCTAAAAA | |
| | | CAACAAAAATGATTTTTATACATTCTATTT | |
| | | CATTATTCCTCTTTTTCCAATAAGTCATAC | |
| | | AATTGGTAGATATGACTTATTTTATTTTTG | |
| | | TATTATTCACTATATCTTTATGATATTTAA | |
| | | GTATAAATAATTAAAAAAATTTATTGTAC | |
| | | CTTATAGTCTGTCACCAAAAAAAAAAAAT | |
| | | TATCTGTAGGTAGTGAAATGCTAATGTTG | |
| | | ATTTGTCTTTAAGGGCTTGTTAACTATCCT | |
| | | TTATTTTCTCATTTGTCTTAAATTAGGAGT | |
| | | TTGTGTTTAAATTACTCATCTAAGCAAAAA | |
| | | ATGTATATAAATCCCATTACTGGGTATATA | |
| | | CCCAAAGGATTATAAATCATGCTGCTATA | |
| | | AAGACACATGCACACGTATGTTTATTGCA | |
| | | GCACTATTCACAATAGCAAAGACTTGGAA | |
| | | CCAACCCAAATGTCCATCAATGATAGACT | |
| | | TGATTAAGAAAATGTGCACATATACACCA | |
| | | TGGAATACTATGCAGCCATAAAAAAGGAT | |
| | | GAGTTCATGTCCTTTGTAGGGACATGGAT | |
| | | AAAGCTGGAAACCATCATTCTGAGCAAAC | |
| | | TATTGCAAGGACAGAAAACCAAACACTGC | |
| | | ATGTTCTCACTCATAGGTGGGAATTGAAC | |
| | | AATGAGAACACTTGGACACAAGGTGGGGA | |
| | | ACACCACACACCAGGGCCTGTCATGGGGT | |
| | | GGGGGGAGTGGGGAGGGATAGCATTAGG | |
| | | AGATATACCTAATGTAAATGATGAGTTAA | |
| | | TGGGTGCAGCACACCAACATGGCACATGT | |
| | | ATACATATGTAGCAAACCTGCACGTTGTG | |
| | | CACATGTACCCTAGAACTTAAAGTATAAT | |
| | | TAAAAAAAAAAAGAAAACAGAAGCTATTT | |
| | | ATAAAGAAGTTATTTGCTGAAATAAATGT | |
| | | GATCTTTCCCATTAAAAAAATAAAGAAAT | |
| | | TTTGGGGTAAAAAAACACAATATATTGTA | |
| | | TTCTTGAAAAATTCTAAGAGAGTGGATGT | |
| | | GAAGTGTTCTCACCACAAAAGTGATAACT | |
| | | AATTGAGGTAATGCACATATTAATTAGAA | |
| | | AGATTTTGTCATTCCACAATGTATATATAC | |
| | | TTAAAAATATGTTATACACAATAAATACA | |
| | | TACATTAAAAAATAAGTAAATGTA | |
| 3UTR-012 | Col6a1; | CCCACCCTGCACGCCGGCACCAAACCCTG | 16 |
| | collagen, | TCCTCCCACCCCTCCCCACTCATCACTAAA | |
| | type VI, | CAGAGTAAAATGTGATGCGAATTTTCCCG | |
| | alpha 1 | ACCAACCTGATTCGCTAGATTTTTTTTAAG | |
| | | GAAAAGCTTGGAAAGCCAGGACACAACG | |
| | | CTGCTGCCTGCTTTGTGCAGGGTCCTCCGG | |
| | | GGCTCAGCCCTGAGTTGGCATCACCTGCG | |
| | | CAGGGCCCTCTGGGGCTCAGCCCTGAGCT | |
| | | AGTGTCACCTGCACAGGGCCCTCTGAGGC | |
| | | TCAGCCCTGAGCTGGCGTCACCTGTGCAG | |
| | | GGCCCTCTGGGGCTCAGCCCTGAGCTGGC | |
| | | CTCACCTGGGTTCCCCACCCCGGGCTCTCC | |
| | | TGCCCTGCCCTCCTGCCCGCCCTCCCTCCT | |
| | | GCCTGCGCAGCTCCTTCCCTAGGCACCTCT | |
| | | GTGCTGCATCCCACCAGCCTGAGCAAGAC | |
| | | GCCCTCTCGGGGCCTGTGCCGCACTAGCCT | |
| | | CCCTCTCCTCTGTCCCCATAGCTGGTTTTT | |
| | | CCCACCAATCCTCACCTAACAGTTACTTTA | |
| | | CAATTAAACTCAAAGCAAGCTCTTCTCCTC | |
| | | AGCTTGGGGCAGCCATTGGCCTCTGTCTCG | |
| | | TTTTGGGAAACCAAGGTCAGGAGGCCGTT | |
| | | GCAGACATAAATCTCGGCGACTCGGCCCC | |
| | | GTCTCCTGAGGGTCCTGCTGGTGACCGGC | |
| | | CTGGACCTTGGCCCTACAGCCCTGGAGGC | |
| | | CGCTGCTGACCAGCACTGACCCCGACCTC | |
| | | AGAGAGTACTCGCAGGGGCGCTGGCTGCA | |
| | | CTCAAGACCCTCGAGATTAACGGTGCTAA | |
| | | CCCCGTCTGCTCCTCCCTCCCGCAGAGACT | |
| | | GGGGCCTGGACTGGACATGAGAGCCCCTT | |
| | | GGTGCCACAGAGGGCTGTGTCTTACTAGA | |
| | | AACAACGCAAACCTCTCCTTCCTCAGAAT | |
| | | AGTGATGTGTTCGACGTTTTATCAAAGGCC | |
| | | CCCTTTCTATGTTCATGTTAGTTTTGCTCCT | |
| | | TCTGTGTTTTTTTCTGAACCATATCCATGTT | |
| | | GCTGACTTTTCCAAATAAAGGTTTTCACTC | |
| | | CTCTC | |
| 3UTR-013 | Calr; | AGAGGCCTGCCTCCAGGGCTGGACTGAGG | 17 |
| | calreticulin | CCTGAGCGCTCCTGCCGCAGAGCTGGCCG | |
| | | CGCCAAATAATGTCTCTGTGAGACTCGAG | |
| | | AACTTTCATTTTTTTCCAGGCTGGTTCGGA | |
| | | TTTGGGGTGGATTTTGGTTTTGTTCCCCTC | |
| | | CTCCACTCTCCCCCACCCCCTCCCCGCCCT | |
| | | TTTTTTTTTTTTTTTTTAAACTGGTATTTTA | |
| | | TCTTTGATTCTCCTTCAGCCCTCACCCCTG | |
| | | GTTCTCATCTTTCTTGATCAACATCTTTTCT | |
| | | TGCCTCTGTCCCCTTCTCTCATCTCTTAGCT | |
| | | CCCCTCCAACCTGGGGGGCAGTGGTGTGG | |
| | | AGAAGCCACAGGCCTGAGATTTCATCTGC | |
| | | TCTCCTTCCTGGAGCCCAGAGGAGGGCAG | |
| | | CAGAAGGGGGTGGTGTCTCCAACCCCCCA | |
| | | GCACTGAGGAAGAACGGGGCTCTTCTCAT | |
| | | TTCACCCCTCCCTTTCTCCCCTGCCCCCAG | |
| | | GACTGGGCCACTTCTGGGTGGGGCAGTGG | |
| | | GTCCCAGATTGGCTCACACTGAGAATGTA | |
| | | AGAACTACAAACAAAATTTCTATTAAATT | |
| | | AAATTTTGTGTCTCC | |
| 3UTR-014 | Col1a1; | CTCCCTCCATCCCAACCTGGCTCCCTCCCA | 18 |
| | collagen, | CCCAACCAACTTTCCCCCCAACCCGGAAA | |
| | type I, | CAGACAAGCAACCCAAACTGAACCCCCTC | |
| | alpha 1 | AAAAGCCAAAAAATGGGAGACAATTTCAC | |
| | | ATGGACTTTGGAAAATATTTTTTTCCTTTG | |
| | | CATTCATCTCTCAAACTTAGTTTTTATCTTT | |
| | | GACCAACCGAACATGACCAAAAACCAAA | |
| | | AGTGCATTCAACCTTACCAAAAAAAAAAA | |
| | | AAAAAAAAGAATAAATAAATAACTTTTTA | |
| | | AAAAAGGAAGCTTGGTCCACTTGCTTGAA | |
| | | GACCCATGCGGGGGTAAGTCCCTTTCTGC | |
| | | CCGTTGGGCTTATGAAACCCCAATGCTGC | |
| | | CCTTTCTGCTCCTTTCTCCACACCCCCCTTG | |
| | | GGGCCTCCCCTCCACTCCTTCCCAAATCTG | |
| | | TCTCCCCAGAAGACACAGGAAACAATGTA | |
| | | TTGTCTGCCCAGCAATCAAAGGCAATGCT | |
| | | CAAACACCCAAGTGGCCCCCACCCTCAGC | |
| | | CCGCTCCTGCCCGCCCAGCACCCCCAGGC | |
| | | CCTGGGGGACCTGGGGTTCTCAGACTGCC | |
| | | AAAGAAGCCTTGCCATCTGGCGCTCCCAT | |
| | | GGCTCTTGCAACATCTCCCCTTCGTTTTTG | |
| | | AGGGGGTCATGCCGGGGGAGCCACCAGCC | |
| | | CCTCACTGGGTTCGGAGGAGAGTCAGGAA | |
| | | GGGCCACGACAAAGCAGAAACATCGGATT | |
| | | TGGGGAACGCGTGTCAATCCCTTGTGCCG | |
| | | CAGGGCTGGGCGGGAGAGACTGTTCTGTT | |
| | | CCTTGTGTAACTGTGTTGCTGAAAGACTAC | |
| | | CTCGTTCTTGTCTTGATGTGTCACCGGGGC | |
| | | AACTGCCTGGGGGCGGGGATGGGGGCAG | |
| | | GGTGGAAGCGGCTCCCCATTTTATACCAA | |
| | | AGGTGCTACATCTATGTGATGGGTGGGGT | |
| | | GGGGAGGGAATCACTGGTGCTATAGAAAT | |
| | | TGAGATGCCCCCCCAGGCCAGCAAATGTT | |
| | | CCTTTTTGTTCAAAGTCTATTTTTATTCCTT | |
| | | GATATTTTTCTTTTTTTTTTTTTTTTTTTGTG | |
| | | GATGGGGACTTGTGAATTTTTCTAAAGGT | |
| | | GCTATTTAACATGGGAGGAGAGCGTGTGC | |
| | | GGCTCCAGCCCAGCCCGCTGCTCACTTTCC | |
| | | ACCCTCTCTCCACCTGCCTCTGGCTTCTCA | |
| | | GGCCTCTGCTCTCCGACCTCTCTCCTCTGA | |
| | | AACCCTCCTCCACAGCTGCAGCCCATCCTC | |
| | | CCGGCTCCCTCCTAGTCTGTCCTGCGTCCT | |
| | | CTGTCCCCGGGTTTCAGAGACAACTTCCCA | |
| | | AAGCACAAAGCAGTTTTTCCCCCTAGGGG | |
| | | TGGGAGGAAGCAAAAGACTCTGTACCTAT | |
| | | TTTGTATGTGTATAATAATTTGAGATGTTT | |
| | | TTAATTATTTTGATTGCTGGAATAAAGCAT | |
| | | GTGGAAATGACCCAAACATAATCCGCAGT | |
| | | GGCCTCCTAATTTCCTTCTTTGGAGTTGGG | |
| | | GGAGGGGTAGACATGGGGAAGGGGCTTTG | |
| | | GGGTGATGGGCTTGCCTTCCATTCCTGCCC | |
| | | TTTCCCTCCCCACTATTCTCTTCTAGATCCC | |
| | | TCCATAACCCCACTCCCCTTTCTCTCACCC | |
| | | TTCTTATACCGCAAACCTTTCTACTTCCTC | |
| | | TTTCATTTTCTATTCTTGCAATTTCCTTGCA | |
| | | CCTTTTCCAAATCCTCTTCTCCCCTGCAAT | |
| | | ACCATACAGGCAATCCACGTGCACAACAC | |
| | | ACACACACACTCTTCACATCTGGGGTTGTC | |
| | | CAAACCTCATACCCACTCCCCTTCAAGCCC | |
| | | ATCCACTCTCCACCCCCTGGATGCCCTGCA | |
| | | CTTGGTGGCGGTGGGATGCTCATGGATAC | |
| | | TGGGAGGGTGAGGGGAGTGGAACCCGTG | |
| | | AGGAGGACCTGGGGGCCTCTCCTTGAACT | |
| | | GACATGAAGGGTCATCTGGCCTCTGCTCC | |
| | | CTTCTCACCCACGCTGACCTCCTGCCGAAG | |
| | | GAGCAACGCAACAGGAGAGGGGTCTGCTG | |
| | | AGCCTGGCGAGGGTCTGGGAGGGACCAGG | |
| | | AGGAAGGCGTGCTCCCTGCTCGCTGTCCT | |
| | | GGCCCTGGGGGAGTGAGGGAGACAGACA | |
| | | CCTGGGAGAGCTGTGGGGAAGGCACTCGC | |
| | | ACCGTGCTCTTGGGAAGGAAGGAGACCTG | |
| | | GCCCTGCTCACCACGGACTGGGTGCCTCG | |
| | | ACCTCCTGAATCCCCAGAACACAACCCCC | |
| | | CTGGGCTGGGGTGGTCTGGGGAACCATCG | |
| | | TGCCCCCGCCTCCCGCCTACTCCTTTTTAA | |
| | | GCTT | |
| 3UTR-015 | Plod1; | TTGGCCAGGCCTGACCCTCTTGGACCTTTC | 19 |
| | procollagen- | TTCTTTGCCGACAACCACTGCCCAGCAGCC | |
| | lysine, | TCTGGGACCTCGGGGTCCCAGGGAACCCA | |
| | 2- | GTCCAGCCTCCTGGCTGTTGACTTCCCATT | |
| | oxoglutarte 5- | GCTCTTGGAGCCACCAATCAAAGAGATTC | |
| | dioxygenase 1 | AAAGAGATTCCTGCAGGCCAGAGGCGGAA | |
| | | CACACCTTTATGGCTGGGGCTCTCCGTGGT | |
| | | GTTCTGGACCCAGCCCCTGGAGACACCAT | |
| | | TCACTTTTACTGCTTTGTAGTGACTCGTGC | |
| | | TCTCCAACCTGTCTTCCTGAAAAACCAAG | |
| | | GCCCCCTTCCCCCACCTCTTCCATGGGGTG | |
| | | AGACTTGAGCAGAACAGGGGCTTCCCCAA | |
| | | GTTGCCCAGAAAGACTGTCTGGGTGAGAA | |
| | | GCCATGGCCAGAGCTTCTCCCAGGCACAG | |
| | | GTGTTGCACCAGGGACTTCTGCTTCAAGTT | |
| | | TTGGGGTAAAGACACCTGGATCAGACTCC | |
| | | AAGGGCTGCCCTGAGTCTGGGACTTCTGC | |
| | | CTCCATGGCTGGTCATGAGAGCAAACCGT | |
| | | AGTCCCCTGGAGACAGCGACTCCAGAGAA | |
| | | CCTCTTGGGAGACAGAAGAGGCATCTGTG | |
| | | CACAGCTCGATCTTCTACTTGCCTGTGGGG | |
| | | AGGGGAGTGACAGGTCCACACACCACACT | |
| | | GGGTCACCCTGTCCTGGATGCCTCTGAAG | |
| | | AGAGGGACAGACCGTCAGAAACTGGAGA | |
| | | GTTTCTATTAAAGGTCATTTAAACCA | |
| 3UTR-016 | Nucb1; | TCCTCCGGGACCCCAGCCCTCAGGATTCCT | 20 |
| | nucleobindin | GATGCTCCAAGGCGACTGATGGGCGCTGG | |
| | 1 | ATGAAGTGGCACAGTCAGCTTCCCTGGGG | |
| | | GCTGGTGTCATGTTGGGCTCCTGGGGCGG | |
| | | GGGCACGGCCTGGCATTTCACGCATTGCT | |
| | | GCCACCCCAGGTCCACCTGTCTCCACTTTC | |
| | | ACAGCCTCCAAGTCTGTGGCTCTTCCCTTC | |
| | | TGTCCTCCGAGGGGCTTGCCTTCTCTCGTG | |
| | | TCCAGTGAGGTGCTCAGTGATCGGCTTAA | |
| | | CTTAGAGAAGCCCGCCCCCTCCCCTTCTCC | |
| | | GTCTGTCCCAAGAGGGTCTGCTCTGAGCCT | |
| | | GCGTTCCTAGGTGGCTCGGCCTCAGCTGCC | |
| | | TGGGTTGTGGCCGCCCTAGCATCCTGTATG | |
| | | CCCACAGCTACTGGAATCCCCGCTGCTGCT | |
| | | CCGGGCCAAGCTTCTGGTTGATTAATGAG | |
| | | GGCATGGGGTGGTCCCTCAAGACCTTCCC | |
| | | CTACCTTTTGTGGAACCAGTGATGCCTCAA | |
| | | AGACAGTGTCCCCTCCACAGCTGGGTGCC | |
| | | AGGGGCAGGGGATCCTCAGTATAGCCGGT | |
| | | GAACCCTGATACCAGGAGCCTGGGCCTCC | |
| | | CTGAACCCCTGGCTTCCAGCCATCTCATCG | |
| | | CCAGCCTCCTCCTGGACCTCTTGGCCCCCA | |
| | | GCCCCTTCCCCACACAGCCCCAGAAGGGT | |
| | | CCCAGAGCTGACCCCACTCCAGGACCTAG | |
| | | GCCCAGCCCCTCAGCCTCATCTGGAGCCC | |
| | | CTGAAGACCAGTCCCACCCACCTTTCTGGC | |
| | | CTCATCTGACACTGCTCCGCATCCTGCTGT | |
| | | GTGTCCTGTTCCATGTTCCGGTTCCATCCA | |
| | | AATACACTTTCTGGAACAAA | |
| 3UTR-017 | α-globin | GCTGGAGCCTCGGTGGCCATGCTTCTTGCC | 21 |
| | | CCTTGGGCCTCCCCCCAGCCCCTCCTCCCC | |
| | | TTCCTGCACCCGTACCCCCGTGGTCTTTGA | |
| | | ATAAAGTCTGAGTGGGCGGC | |

[0252] It should be understood that those listed in the previous tables are examples and that any UTR from any gene may be incorporated into the respective first or second flanking region of the primary construct. Furthermore, multiple wild-type UTRs of any known gene may be utilized. It is also within the scope of the present invention to provide artificial UTRs which are not variants of wild type genes. These UTRs or portions thereof may be placed in the same orientation as in the transcript from which they were selected or may be altered in orientation or location. Hence a 5′ or 3′ UTR may be inverted, shortened, lengthened, made chimeric with one or more other 5′ UTRs or 3′ UTRs. As used herein, the term “altered” as it relates to a UTR sequence, means that the UTR has been changed in some way in relation to a reference sequence. For example, a 3′ or 5′ UTR may be altered relative to a wild type or native UTR by the change in orientation or location as taught above or may be altered by the inclusion of additional nucleotides, deletion of nucleotides, swapping or transposition of nucleotides. Any of these changes producing an “altered” UTR (whether 3′ or 5′) comprise a variant UTR.

[0253] In one embodiment, a double, triple or quadruple UTR such as a 5′ or 3′ UTR may be used. As used herein, a “double” UTR is one in which two copies of the same UTR are encoded either in series or substantially in series. For example, a double beta-globin 3′ UTR may be used as described in US Patent publication 20100129877, the contents of which are incorporated herein by reference in its entirety.

[0254] It is also within the scope of the present invention to have patterned UTRs. As used herein “patterned UTRs” are those UTRs which reflect a repeating or alternating pattern, such as ABABAB or AABBAABBAABB or ABCABCABC or variants thereof repeated once, twice, or more than 3 times. In these patterns, each letter, A, B, or C represent a different UTR at the nucleotide level.

[0255] In one embodiment, flanking regions are selected from a family of transcripts whose proteins share a common function, structure, feature of property. For example, polypeptides of interest may belong to a family of proteins which are expressed in a particular cell, tissue or at some time during development. The UTRs from any of these genes may be swapped for any other UTR of the same or different family of proteins to create a new chimeric primary transcript. As used herein, a “family of proteins” is used in the broadest sense to refer to a group of two or more polypeptides of interest which share at least one function, structure, feature, localization, origin, or expression pattern.

[0256] After optimization (if desired), the primary construct components are reconstituted and transformed into a vector such as, but not limited to, plasmids, viruses, cosmids, and artificial chromosomes. For example, the optimized construct may be reconstituted and transformed into chemically competent E. coli, yeast, neurospora, maize, drosophila, etc. where high copy plasmid-like or chromosome structures occur by methods described herein.

[0257] The untranslated region may also include translation enhancer elements (TEE). As a non-limiting example, the TEE may include those described in US Application No. 20090226470, herein incorporated by reference in its entirety, and those known in the art.

### Stop Codons

[0258] In one embodiment, the primary constructs of the present invention may include at least two stop codons before the 3′ untranslated region (UTR). The stop codon may be selected from TGA, TAA and TAG. In one embodiment, the primary constructs of the present invention include the stop codon TGA and one additional stop codon. In a further embodiment the addition stop codon may be TAA. In another embodiment, the primary constructs of the present invention include three stop codons.

### Vector Amplification

[0259] The vector containing the primary construct is then amplified and the plasmid isolated and purified using methods known in the art such as, but not limited to, a maxi prep using the Invitrogen PURELINK™ HiPure Maxiprep Kit (Carlsbad, CA).

### Plasmid Linearization

[0260] The plasmid may then be linearized using methods known in the art such as, but not limited to, the use of restriction enzymes and buffers. The linearization reaction may be purified using methods including, for example Invitrogen's PURELINK™ PCR Micro Kit (Carlsbad, CA), and IPLC based purification methods such as, but not limited to, strong anion exchange HPLC, weak anion exchange HPLC, reverse phase IPLC (RP-HPLC), and hydrophobic interaction IPLC (HIC-HPLC) and Invitrogen's standard PURELINK™ PCR Kit (Carlsbad, CA). The purification method may be modified depending on the size of the linearization reaction which was conducted. The linearized plasmid is then used to generate cDNA for in vitro transcription (IVT) reactions.

cDNA Template Synthesis

[0261] A cDNA template may be synthesized by having a linearized plasmid undergo polymerase chain reaction (PCR). Table 4 is a listing of primers and probes that may be usefully in the PCR reactions of the present invention. It should be understood that the listing is not exhaustive and that primer-probe design for any amplification is within the skill of those in the art. Probes may also contain chemically modified bases to increase base-pairing fidelity to the target molecule and base-pairing strength. Such modifications may include 5-methyl-Cytidine, 2,6-di-amino-purine, 2′-fluoro, phosphoro-thioate, or locked nucleic acids.

TABLE 4
Primers and Probes

| Primer/ | | | SEQ |
|---|---|---|---|
| Probe | | Hybridization | ID |
| Identifier | Sequence (5′-3′) | target | NO. |
| UFP | TTGGACCCTCGTACAGAAGCTAA | cDNA Template | 22 |
| | TACG | | |
| URP | Tₓ₁₆₀CTTCCTACTCAGGCTTTATTC | cDNA Template | 23 |
| | AAAGACCA | | |
| GBA1 | CCTTGACCTTCTGGAACTTC | Acid | 24 |
| | | glucocerebrosidase | |
| GBA2 | CCAAGCACTGAAACGGATAT | Acid | 25 |
| | | glucocerebrosidase | |
| LUC1 | GATGAAAAGTGCTCCAAGGA | Luciferase | 26 |
| LUC2 | AACCGTGATGAAAAGGTACC | Luciferase | 27 |
| LUC3 | TCATGCAGATTGGAAAGGTC | Luciferase | 28 |
| GCSF1 | CTTCTTGGACTGTCCAGAGG | G-CSF | 29 |
| GCSF2 | GCAGTCCCTGATACAAGAAC | G-CSF | 30 |
| GCSF3 | GATTGAAGGTGGCTCGCTAC | G-CSF | 31 |

*UFP is universal forward primer; URP is universal reverse primer.

[0262] In one embodiment, the cDNA may be submitted for sequencing analysis before undergoing transcription.

mRNA Production

[0263] The process of mRNA or mmRNA production may include, but is not limited to, in vitro transcription, cDNA template removal and RNA clean-up, and mRNA capping and/or tailing reactions.

### In Vitro Transcription

[0264] The cDNA produced in the previous step may be transcribed using an in vitro transcription (IVT) system. The system typically comprises a transcription buffer, nucleotide triphosphates (NTPs), an RNase inhibitor and a polymerase. The NTPs may be manufactured in house, may be selected from a supplier, or may be synthesized as described herein. The NTPs may be selected from, but are not limited to, those described herein including natural and unnatural (modified) NTPs. The polymerase may be selected from, but is not limited to, T7 RNA polymerase, T3 RNA polymerase and mutant polymerases such as, but not limited to, polymerases able to incorporate modified nucleic acids.

### RNA Polymerases

[0265] Any number of RNA polymerases or variants may be used in the design of the primary constructs of the present invention.

[0266] RNA polymerases may be modified by inserting or deleting amino acids of the RNA polymerase sequence. As a non-limiting example, the RNA polymerase may be modified to exhibit an increased ability to incorporate a 2′-modified nucleotide triphosphate compared to an unmodified RNA polymerase (see International Publication WO2008078180 and U.S. Pat. No. 8,101,385; herein incorporated by reference in their entireties).

[0267] Variants may be obtained by evolving an RNA polymerase, optimizing the RNA polymerase amino acid and/or nucleic acid sequence and/or by using other methods known in the art. As a non-limiting example, T7 RNA polymerase variants may be evolved using the continuous directed evolution system set out by Esvelt et al. (Nature (2011) 472(7344):499-503; herein incorporated by reference in its entirety) where clones of T7 RNA polymerase may encode at least one mutation such as, but not limited to, lysine at position 93 substituted for threonine (K93T), I4M, A7T, E63V, V64D, A65E, D66Y, T76N, C125R, S128R, A136T, N165S, G175R, H176L, Y178H, F182L, L196F, G198V, D208Y, E222K, S228A, Q239R, T243N, G259D, M2671, G280C, H300R, D351A, A354S, E356D, L360P, A383V, Y385C, D388Y, S397R, M401T, N410S, K450R, P451T, G452V, E484A, H523L, H524N, G542V, E565K, K577E, K577M, N601S, S684Y, L699I, K713E, N748D, Q754R, E775K, A827V, D851N or L864F. As another non-limiting example, T7 RNA polymerase variants may encode at least mutation as described in U.S. Pub. Nos. 20100120024 and 20070117112; herein incorporated by reference in their entireties. Variants of RNA polymerase may also include, but are not limited to, substitutional variants, conservative amino acid substitution, insertional variants, deletional variants and/or covalent derivatives.

[0268] In one embodiment, the primary construct may be designed to be recognized by the wild type or variant RNA polymerases. In doing so, the primary construct may be modified to contain sites or regions of sequence changes from the wild type or parent primary construct.

[0269] In one embodiment, the primary construct may be designed to include at least one substitution and/or insertion upstream of an RNA polymerase binding or recognition site, downstream of the RNA polymerase binding or recognition site, upstream of the TATA box sequence, downstream of the TATA box sequence of the primary construct but upstream of the coding region of the primary construct, within the 5′UTR, before the 5′UTR and/or after the 5′UTR.

[0270] In one embodiment, the 5′UTR of the primary construct may be replaced by the insertion of at least one region and/or string of nucleotides of the same base. The region and/or string of nucleotides may include, but is not limited to, at least 3, at least 4, at least 5, at least 6, at least 7 or at least 8 nucleotides and the nucleotides may be natural and/or unnatural. As a non-limiting example, the group of nucleotides may include 5-8 adenine, cytosine, thymine, a string of any of the other nucleotides disclosed herein and/or combinations thereof.

[0271] In one embodiment, the 5′UTR of the primary construct may be replaced by the insertion of at least two regions and/or strings of nucleotides of two different bases such as, but not limited to, adenine, cytosine, thymine, any of the other nucleotides disclosed herein and/or combinations thereof. For example, the 5′UTR may be replaced by inserting 5-8 adenine bases followed by the insertion of 5-8 cytosine bases. In another example, the 5′UTR may be replaced by inserting 5-8 cytosine bases followed by the insertion of 5-8 adenine bases.

[0272] In one embodiment, the primary construct may include at least one substitution and/or insertion downstream of the transcription start site which may be recognized by an RNA polymerase. As a non-limiting example, at least one substitution and/or insertion may occur downstream the transcription start site by substituting at least one nucleic acid in the region just downstream of the transcription start site (such as, but not limited to, +1 to +6). Changes to region of nucleotides just downstream of the transcription start site may affect initiation rates, increase apparent nucleotide triphosphate (NTP) reaction constant values, and increase the dissociation of short transcripts from the transcription complex curing initial transcription (Brieba et al, Biochemistry (2002) 41: 5144-5149; herein incorporated by reference in its entirety). The modification, substitution and/or insertion of at least one nucleic acid may cause a silent mutation of the nucleic acid sequence or may cause a mutation in the amino acid sequence.

[0273] In one embodiment, the primary construct may include the substitution of at least 1, at least 2, at least 3, at least 4, at least 5, at least 6, at least 7, at least 8, at least 9, at least 10, at least 11, at least 12 or at least 13 guanine bases downstream of the transcription start site.

[0274] In one embodiment, the primary construct may include the substitution of at least 1, at least 2, at least 3, at least 4, at least 5 or at least 6 guanine bases in the region just downstream of the transcription start site. As a non-limiting example, if the nucleotides in the region are GGGAGA the guanine bases may be substituted by at least 1, at least 2, at least 3 or at least 4 adenine nucleotides. In another non-limiting example, if the nucleotides in the region are GGGAGA the guanine bases may be substituted by at least 1, at least 2, at least 3 or at least 4 cytosine bases. In another non-limiting example, if the nucleotides in the region are GGGAGA the guanine bases may be substituted by at least 1, at least 2, at least 3 or at least 4 thymine, and/or any of the nucleotides described herein.

[0275] In one embodiment, the primary construct may include at least one substitution and/or insertion upstream of the start codon. For the purpose of clarity, one of skill in the art would appreciate that the start codon is the first codon of the protein coding region whereas the transcription start site is the site where transcription begins. The primary construct may include, but is not limited to, at least 1, at least 2, at least 3, at least 4, at least 5, at least 6, at least 7 or at least 8 substitutions and/or insertions of nucleotide bases. The nucleotide bases may be inserted or substituted at 1, at least 1, at least 2, at least 3, at least 4 or at least 5 locations upstream of the start codon. The nucleotides inserted and/or substituted may be the same base (e.g., all A or all C or all T or all G), two different bases (e.g., A and C, A and T, or C and T), three different bases (e.g., A, C and T or A, C and T) or at least four different bases. As a non-limiting example, the guanine base upstream of the coding region in the primary construct may be substituted with adenine, cytosine, thymine, or any of the nucleotides described herein. In another non-limiting example the substitution of guanine bases in the primary construct may be designed so as to leave one guanine base in the region downstream of the transcription start site and before the start codon (see Esvelt et al. Nature (2011) 472(7344):499-503; herein incorporated by reference in its entirety). As a non-limiting example, at least 5 nucleotides may be inserted at 1 location downstream of the transcription start site but upstream of the start codon and the at least 5 nucleotides may be the same base type.

cDNA Template Removal and Clean-Up

[0276] The cDNA template may be removed using methods known in the art such as, but not limited to, treatment with Deoxyribonuclease I (DNase I). RNA clean-up may also include a purification method such as, but not limited to, AGENCOURT® CLEANSEQ® system from Beckman Coulter (Danvers, MA), HPLC based purification methods such as, but not limited to, strong anion exchange HPLC, weak anion exchange HPLC, reverse phase HPLC (RP-HPLC), and hydrophobic interaction HPLC (HIC-HPLC).

Capping and/or Tailing Reactions

[0277] The primary construct or mmRNA may also undergo capping and/or tailing reactions. A capping reaction may be performed by methods known in the art to add a 5′ cap to the 5′ end of the primary construct. Methods for capping include, but are not limited to, using a Vaccinia Capping enzyme (New England Biolabs, Ipswich, MA).

[0278] A poly-A tailing reaction may be performed by methods known in the art, such as, but not limited to, 2′ O-methyltransferase and by methods as described herein. If the primary construct generated from cDNA does not include a poly-T, it may be beneficial to perform the poly-A-tailing reaction before the primary construct is cleaned.

mRNA Purification

[0279] Primary construct or mmRNA purification may include, but is not limited to, mRNA or mmRNA clean-up, quality assurance and quality control. mRNA or mmRNA clean-up may be performed by methods known in the arts such as, but not limited to, AGENCOURT® beads (Beckman Coulter Genomics, Danvers, MA), poly-T beads, LNA™ oligo-T capture probes (EXIQON® Inc, Vedbaek, Denmark) or HPLC based purification methods such as, but not limited to, strong anion exchange HPLC, weak anion exchange HPLC, reverse phase HPLC (RP-HPLC), and hydrophobic interaction HPLC (HIC-HPLC). The term “purified” when used in relation to a polynucleotide such as a “purified mRNA or mmRNA” refers to one that is separated from at least one contaminant. As used herein, a “contaminant” is any substance which makes another unfit, impure or inferior. Thus, a purified polynucleotide (e.g., DNA and RNA) is present in a form or setting different from that in which it is found in nature, or a form or setting different from that which existed prior to subjecting it to a treatment or purification method.

[0280] A quality assurance and/or quality control check may be conducted using methods such as, but not limited to, gel electrophoresis, UV absorbance, or analytical HPLC.

[0281] In another embodiment, the mRNA or mmRNA may be sequenced by methods including, but not limited to reverse-transcriptase-PCR.

[0282] In one embodiment, the mRNA or mmRNA may be quantified using methods such as, but not limited to, ultraviolet visible spectroscopy (UV/Vis). A non-limiting example of a UV/Vis spectrometer is a NANODROP® spectrometer (ThermoFisher, Waltham, MA). The quantified mRNA or mmRNA may be analyzed in order to determine if the mRNA or mmRNA may be of proper size, check that no degradation of the mRNA or mmRNA has occurred. Degradation of the mRNA and/or mmRNA may be checked by methods such as, but not limited to, agarose gel electrophoresis, HPLC based purification methods such as, but not limited to, strong anion exchange HPLC, weak anion exchange HPLC, reverse phase HPLC (RP-HPLC), and hydrophobic interaction HPLC (HIC-HPLC), liquid chromatography-mass spectrometry (LCMS), capillary electrophoresis (CE) and capillary gel electrophoresis (CGE).

### Signal Sequences

[0283] The primary constructs or mmRNA may also encode additional features which facilitate trafficking of the polypeptides to therapeutically relevant sites. One such feature which aids in protein trafficking is the signal sequence. As used herein, a “signal sequence” or “signal peptide” is a polynucleotide or polypeptide, respectively, which is from about 9 to 200 nucleotides (3-60 amino acids) in length which is incorporated at the 5′ (or N-terminus) of the coding region or polypeptide encoded, respectively. Addition of these sequences result in trafficking of the encoded polypeptide to the endoplasmic reticulum through one or more secretory pathways. Some signal peptides are cleaved from the protein by signal peptidase after the proteins are transported.

[0284] Table 5 is a representative listing of protein signal sequences which may be incorporated for encoding by the polynucleotides, primary constructs or mmRNA of the invention.

TABLE 5
Signal Sequences

| | | | SEQ | | |
|---|---|---|---|---|---|
| | | NUCLEOTIDE SEQUENCE | ID | ENCODED | SEQ ID |
| ID | Description | (5′-3′) | NO. | PEPTIDE | NO. |
| SS-001 | α-1- | ATGATGCCATCCTCAGTCTCA | 32 | MMPSSVSWGI | 94 |
| | antitrypsin | TGGGGTATTTTGCTCTTGGCG | | LLAGLCCLVP | |
| | | GGTCTGTGCTGTCTCGTGCCG | | VSLA | |
| | | GTGTCGCTCGCA | | | |
| SS-002 | G-CSF | ATGGCCGGACCGGCGACTCAG | 33 | MAGPATQSPM | 95 |
| | | TCGCCCATGAAACTCATGGCC | | KLMALQLLLW | |
| | | CTGCAGTTGTTGCTTTGGCAC | | HSALWTVQEA | |
| | | TCAGCCCTCTGGACCGTCCAA | | | |
| | | GAGGCG | | | |
| SS-003 | Factor IX | ATGCAGAGAGTGAACATGATT | 34 | MQRVNMIMAE | 96 |
| | | ATGGCCGAGTCCCCATCGCTC | | SPSLITICLLGY | |
| | | ATCACAATCTGCCTGCTTGGT | | LLSAECTVFLD | |
| | | ACCTGCTTTCCGCCGAATGCA | | HENANKILNRP | |
| | | CTGTCTTTCTGGATCACGAGA | | KR | |
| | | ATGCGAATAAGATCTTGAACC | | | |
| | | GACCCAAACGG | | | |
| SS-004 | Prolactin | ATGAAAGGATCATTGCTGTTG | 35 | MKGSLLLLLV | 97 |
| | | CTCCTCGTGTCGAACCTTCTG | | SNLLLCQSVAP | |
| | | CTTTGCCAGTCCGTAGCCCCC | | | |
| SS-005 | Albumin | ATGAAATGGGTGACGTTCATC | 36 | MKWVTFISLLF | 98 |
| | | TCACTGTTGTTTTTGTTCTCGT | | LFSSAYSRG | |
| | | CCGCCTACTCCAGGGGAGTAT | | VFRR | |
| | | TCCGCCGA | | | |
| SS-006 | HMMSP38 | ATGTGGTGGCGGCTCTGGTGG | 37 | MWWRLWWLL | 99 |
| | | CTGCTCCTGTTGCTCCTCTTGC | | LLLLLLPMWA | |
| | | TGTGGCCCATGGTGTGGGCA | | | |
| MLS- | ornithine | TGCTCTTTAACCTCCGCATCCT | 38 | MLFNLRILLNN | 100 |
| 001 | carbamoyltransferase | GTTGAATAACGCTGCGTTCCG | | AAFRNGHNFM | |
| | | AAATGGGCATAACTTCATGGT | | VRNFRCGQPLQ | |
| | | ACGCAACTTCAGATGCGGCCA | | | |
| | | GCCACTCCAG | | | |
| MLS- | Cytochrome | ATGTCCGTCTTGACACCCCTG | 39 | MSVLTPLLLRG | 101 |
| 002 | C Oxidase | CTCTTGAGAGGGCTGACGGGG | | LTGSARRLPVP | |
| | subunit 8A | TCCGCTAGACGCCTGCCGGTA | | RAKIHSL | |
| | | CCGCGAGCGAAGATCCACTCC | | | |
| | | CTG | | | |
| MLS- | Cytochrome | ATGAGCGTGCTCACTCCGTTG | 40 | MSVLTPLLLRG | 102 |
| 003 | C Oxidase | CTTCTTCGAGGGCTTACGGGA | | LTGSARRLPVP | |
| | subunit 8A | TCGGCTCGGAGGTTGCCCGTC | | RAKIHSL | |
| | | CCGAGAGCGAAGATCCATTCG | | | |
| | | TTG | | | |
| SS-007 | Type III, | TGACAAAAATAACTTTATCTC | 41 | MVTKITLSPQN | 103 |
| | bacterial | CCCAGAATTTTAGAATCCAAA | | FRIQKQETTLL | |
| | | AACAGGAAACCACACTACTA | | KEKSTEKNSLA | |
| | | AAAGAAAAATCAACCGAGAA | | KSILAVKNHFI | |
| | | AAATTCTTTAGCAAAAAGTAT | | ELRSKLSERFIS | |
| | | TCTCGCAGTAAAAATCACTTC | | HKNT | |
| | | ATCGAATTAAGGTCAAAATTA | | | |
| | | TCGGAACGTTTTATTTCGCAT | | | |
| | | AAGAACACT | | | |
| SS-008 | Viral | ATGCTGAGCTTTGTGGATACC | 42 | MLSFVDTRTLL | 104 |
| | | CGCACCCTGCTGCTGCTGGCG | | LLAVTSCLATCQ | |
| | | GTGACCAGCTGCCTGGCGACC | | | |
| | | TGCCAG | | | |
| SS-009 | viral | ATGGGCAGCAGCCAGGCGCC | 43 | MGSSQAPRMG | 105 |
| | | GCGCATGGGCAGCGTGGGCG | | SVGGHGLMAL | |
| | | GCCATGGCCTGATGGCGCTGC | | LMAGLILPGILA | |
| | | TGATGGCGGGCCTGATTCTGC | | | |
| | | CGGGCATTCTGGCG | | | |
| SS-010 | Viral | ATGGCGGGCATTTTTTATTTTC | 44 | MAGIFYFLFSF | 106 |
| | | TGTTTAGCTTTCTGTTTGGCAT | | LFGICD | |
| | | TTGCGAT | | | |
| SS-011 | Viral | ATGGAAAACCGCCTGCTGCGC | 45 | MENRLLRVFL | 107 |
| | | GTGTTTCTGGTGTGGGCGGCG | | VWAALTMDG | |
| | | CTGACCATGGATGGCGCGAGC | | ASA | |
| | | GCG | | | |
| SS-012 | Viral | ATGGCGCGCCAGGGCTGCTTT | 46 | MARQGCFGSY | 108 |
| | | GGCAGCTATCAGGTGATTAGC | | QVISLFTFAIGV | |
| | | CTGTTTACCTTTGCGATTGGC | | NLCLG | |
| | | GTGAACCTGTGCCTGGGC | | | |
| SS-013 | Bacillus | ATGAGCCGCCTGCCGGTGCTG | 47 | MSRLPVLLLLQ | 109 |
| | | CTGCTGCTGCAGCTGCTGGTG | | LLVRPGLQ | |
| | | CGCCCGGGCCTGCAG | | | |
| SS-014 | Bacillus | ATGAAACAGCAGAAACGCCT | 48 | MKQQKRLYAR | 110 |
| | | GTATGCGCGCCTGCTGACCCT | | LLTLLFALIFLL | |
| | | GCTGTTTGCGCTGATTTTTCTG | | PHSSASA | |
| | | CTGCCGCATAGCAGCGCGAGC | | | |
| | | GCG | | | |
| SS-015 | Secretion | ATGGCGACGCCGCTGCCTCCG | 49 | MATPLPPPSPR | 111 |
| | signal | CCCTCCCCGCGGCACCTGCGG | | HLRLLRLLLSG | |
| | | CTGCTGCGGCTGCTGCTCTCC | | | |
| | | GCCCTCGTCCTCGGC | | | |
| SS-016 | Secretion | ATGAAGGCTCCGGGTCGGCTC | 50 | MKAPGRLVLII | 112 |
| | signal | GTGCTCATCATCCTGTGCTCC | | LCSVVFS | |
| | | GTGGTCTTCTCT | | | |
| SS-017 | Secretion | ATGCTTCAGCTTTGGAAACTT | 51 | MLQLWKLLCG | 113 |
| | signal | GTTCTCCTGTGCGGCGTGCTC | | VLT | |
| | | ACT | | | |
| SS-018 | Secretion | ATGCTTTATCTCCAGGGTTGG | 52 | MLYLQGWSM | 114 |
| | signal | AGCATGCCTGCTGTGGCA | | PAVA | |
| SS-019 | Secretion | ATGGATAACGTGCAGCCGAA | 53 | MDNVQPKIKH | 115 |
| | signal | AATAAAACATCGCCCCTTCTG | | RPFCFSVKGHV | |
| | | CTTCAGTGTGAAAGGCCACGT | | KMLRLDIINSL | |
| | | GAAGATGCTGCGGCTGGATAT | | VTTVFMLIVSV | |
| | | TATCAACTCACTGGTAACAAC | | LALIP | |
| | | AGTATTCATGCTCATCGTATC | | | |
| | | TGTGTTGGCACTGATACCA | | | |
| SS-020 | Secretion | ATGCCCTGCCTAGACCAACAG | 54 | MPCLDQQLTV | 116 |
| | signal | CTCACTGTTCATGCCCTACCCT | | HALPCPAQPSS | |
| | | GCCCTGCCCAGCCCTCCTCTC | | LAFCQVGFLTA | |
| | | TGGCCTTCTGCCAAGTGGGGT | | | |
| | | TCTTAACAGCA | | | |
| SS-021 | Secretion | ATGAAAACCTTGTTCAATCCA | 55 | MKTLFNPAPAI | 117 |
| | signal | GCCCCTGCCATTGCTGACCTG | | ADLDPQFYTLS | |
| | | GATCCCCAGTTCTACACCCTC | | DVFCCNESEAE | |
| | | TCAGATGTGTTCTGCTGCAAT | | ILTGLTVGSAA | |
| | | GAAAGTGAGGCTGAGATTTTA | | DA | |
| | | ACTGGCCTCACGGTGGGCAGC | | | |
| | | GCTGCAGATGCT | | | |
| SS-022 | Secretion | ATGAAGCCTCTCCTTGTTGTG | 56 | MKPLLVVFVF | 118 |
| | signal | TTTGTCTTTCTTTTCCTTTGGG | | LFLWDPVLA | |
| | | ATCCAGTGCTGGCA | | | |
| SS-023 | Secretion | ATGTCCTGTTCCCTAAAGTTT | 57 | MSCSLKFTLIVI | 119 |
| | signal | ACTTTGATTGTAATTTTTTTTT | | FFTCTLSSS | |
| | | ACTGTTGGCTTTCATCCAGC | | | |
| SS-024 | Secretion | ATGGTTCTTACTAAACCTCTTC | 58 | MVLTKPLQRN | 120 |
| | signal | AAAGAAATGGCAGCATGATG | | GSMMSFENVK | |
| | | AGCTTTGAAAATGTGAAAGAA | | EKSREGGPHA | |
| | | AAGAGCAGAGAAGGAGGGCC | | HTPEEELCFVV | |
| | | CCATGCACACACACCCGAAGA | | THTPQVQTTL | |
| | | AGAATTGTGTTTCGTGGTAAC | | NLFFHIFKVLT | |
| | | ACACTACCCTCAGGTTCAGAC | | QPLSLLWG | |
| | | CACACTCAACCTGTTTTTCCAT | | | |
| | | ATATTCAAGGTTCTTACTCAA | | | |
| | | CCACTTTCCCTTCTGTGGGGT | | | |
| SS-025 | Secretion | ATGGCCACCCCGCCATTCCGG | 59 | MATPPFRLIRK | 121 |
| | signal | CTGATAAGGAAGATGTTTTCC | | MFSFKVSRWM | |
| | | TTCAAGGTGAGCAGATGGATG | | GLACFRSLAAS | |
| | | GGGCTTGCCTGCTTCCGGTCC | | | |
| | | CTGGCGGCATCC | | | |
| SS-026 | Secretion | ATGAGCTTTTTCCAACTCCTG | 60 | MSFFQLLMKR | 122 |
| | signal | ATGAAAAGGAAGGAACTCAT | | KELIPLVVFMT | |
| | | TCCCTTGGTGGTGTTCATGAC | | VAAGGASS | |
| | | TGTGGCGGCGGGTGGAGCCTC | | | |
| | | ATCT | | | |
| SS-027 | Secretion | ATGGTCTCAGCTCTGCGGGGA | 61 | MVSALRGAPLI | 123 |
| | signal | GCACCCCTGATCAGGGTGCAC | | RVHSSPVSSPS | |
| | | TCAAGCCCTGTTTCTTCTCCTT | | VSGPAALVSCL | |
| | | CTGTGAGTGGACCACGGAGGC | | SSQSSALS | |
| | | TGGTGAGCTGCCTGTCATCCC | | | |
| | | AAAGCTCAGCTCTGAGC | | | |
| SS-028 | Secretion | ATGATGGGGTCCCCAGTGAGT | 62 | MMGSPVSHLL | 124 |
| | signal | CATCTGCTGGCCGGCTTCTGT | | AGFCVWVVLG | |
| | | GTGTGGGTCGTCTTGGGC | | | |
| SS-029 | Secretion | ATGGCAAGCATGGCTGCCGTG | 63 | MASMAAVLT | 125 |
| | signal | CTCACCTGGGCTCTGGCTCTT | | WALALLSAFS | |
| | | CTTTCAGCGTTTTCGGCCACC | | ATQA | |
| | | CAGGCA | | | |
| SS-030 | Secretion | ATGGTGCTCATGTGGACCAGT | 64 | MVLMWTSGD | 126 |
| | signal | GGTGACGCCTTCAAGACGGCC | | AFKTAYFLLK | |
| | | TACTTCCTGCTGAAGGGTGCC | | GAPLQFSVCGL | |
| | | CCTCTGCAGTTCTCCGTGTGC | | LQVLVDLAILG | |
| | | GGCCTGCTGCAGGTGCTGGTG | | QATA | |
| | | GACCTGGCCATCCTGGGGCAG | | | |
| | | GCCTACGCC | | | |
| SS-031 | Secretion | ATGGATTTTGTCGCTGGAGCC | 65 | MDFVAGAIGG | 127 |
| | signal | ATCGGAGGCGTCTGCGGTGTT | | VCGVAVGYPL | |
| | | GCTGTGGGCTACCCCCTGGAC | | DTVKVRIQTEP | |
| | | ACGGTGAAGGTCAGGATCCA | | LYTGIWHCVR | |
| | | GACGGAGCCAAAGTACACAG | | DTYHRERVWG | |
| | | GCATCTGGCACTGCGTCCGGG | | FYRGLSLPVCT | |
| | | ATACGTATCACCGAGAGCGCG | | VSLVSS | |
| | | TGTGGG | | | |
| | | GCTTCTACCGGGGCCTCTCGC | | | |
| | | TGCCCGTGTGCACGGTGTCCC | | | |
| | | TGGTATCTTCC | | | |
| SS-032 | Secretion | ATGGAGAAGCCCCTCTTCCCA | 66 | MEKPLFPLVPL | 128 |
| | signal | TTAGTGCCTTTGCATTGGTTTG | | HWFGFGYTAL | |
| | | GCTTTGGCTACACAGCACTGG | | VVSGGIVGYV | |
| | | TTGTTTCTGGTGGGATCGTTG | | KTGSVPSLAA | |
| | | GCTATGTAAAAACAGGCAGC | | GLLFGSLA | |
| | | GTGCCGTCCCTGGCTGCAGGG | | | |
| | | CTGCTCTTCGGCAGTCTAGCC | | | |
| SS-033 | Secretion | ATGGGTCTGCTCCTTCCCCTG | 67 | MGLLLPLALCI | 129 |
| | signal | GCACTCTGCATCCTAGTCCTG | | LVLC | |
| | | TGC | | | |
| SS-034 | Secretion | ATGGGGATCCAGACGAGCCCC | 68 | MGIQTSPVLLA | 130 |
| | signal | GTCCTGCTGGCCTCCCTGGGG | | SLGVGLVTLL | |
| | | GTGGGGCTGGTCACTCTGCTC | | GLAVG | |
| | | GGCCTGGCTGTGGGC | | | |
| SS-035 | Secretion | ATGTCGGACCTGCTACTACTG | 69 | MSDLLLLGLIG | 131 |
| | signal | GGCCTGATTGGGGGCCTGACT | | GLTLLLLLTLL | |
| | | CTCTTACTGCTGCTGACGCTG | | AFA | |
| | | CTAGCCTTTGCC | | | |
| SS-036 | Secretion | ATGGAGACTGTGGTGATTGTT | 70 | METVVIVAIGV | 132 |
| | signal | GCCATAGGTGTGCTGGCCACC | | LATIFLASFAA | |
| | | ATGTTTCTGGCTTCGTTTGCAG | | LVLVCRQ | |
| | | CCTTGGTGCTGGTTTGCAGGC | | | |
| | | AG | | | |
| SS-037 | Secretion | ATGCGCGGCTCTGTGGAGTGC | 71 | MAGSVECTWG | 133 |
| | signal | ACCTGGGGTTGGGGGCACTGT | | WGHCAPSPLL | |
| | | GCCCCCAGCCCCCTGCTCCTT | | LWTLLLFAAPF | |
| | | TGGACTCTACTTCTGTTTGCA | | GLLG | |
| | | GCCCCATTTGGCCTGCTGGGG | | | |
| SS-038 | Secretion | ATGATGCCGTCCCGTACCAAC | 72 | MMPSRTNLAT | 134 |
| | signal | CTGGCTACTGGAATCCCCAGT | | GIPSSKVKYSR | |
| | | AGTAAAGTGAAATATTCAAGG | | LSSTDDGYIDL | |
| | | CTCTCCAGCACAGACGATGGC | | QFKKTPPKIPY | |
| | | TACATTGACCTTCAGTTTAAG | | KAIALATVLFL | |
| | | AAAACCCCTCCTAAGATCCCT | | IGA | |
| | | TATAAGGCCATCGCACTTGCC | | | |
| | | ACTGTGCTGTTTTTGATTGGC | | | |
| | | GCC | | | |
| SS-039 | Secretion | ATGGCCCTGCCCCAGATGTGT | 73 | MALPQMCDGS | 135 |
| | signal | GACGGGAGCCACTTGGCCTCC | | HLASTLRYCM | |
| | | ACCCTCCGCTATTGCATGACA | | TVSGTVVLVA | |
| | | GTCAGCGGCACAGTGGTTCTG | | GTLCFA | |
| | | GTGGCCGGGACGCTCTGCTTC | | | |
| | | GCT | | | |
| SS-041 | Vrg-6 | TGAAAAAGTGGTTCGTTGCTG | 74 | MKKWFVAAGI | 136 |
| | | CCGGCATCGGCGCTGCCGGAC | | GAGLLMLSSAA | |
| | | TCATGCTCTCCAGCGCCGCCA | | | |
| SS-042 | PhoA | ATGAAACAGAGCACCATTGCG | 75 | MKQSTIALALL | 137 |
| | | CTGGCGCTGCTGCCGCTGCTG | | PLLFTPVTKA | |
| | | TTTACCCCGGTGACCAAAGCG | | | |
| SS-043 | OmpA | ATGAAAAAAACCGCGATTGC | 76 | MKKTAIAIAV | 138 |
| | | GATTGCGGTGGCGCTGGCGGG | | ALAGFATVAQA | |
| | | CTTTGCGACCGTGGCGCAGGCG | | | |
| SS-044 | STI | ATGAAAAAACTGATGCTGGCG | 77 | MKKLMLAIFFS | 139 |
| | | ATTTTTTTTAGCGTGCTGAGCT | | VLSFPSFSQS | |
| | | TTCCGAGCTTTAGCCAGAGC | | | |
| SS-045 | STII | ATGAAAAAAAACATTGCGTTT | 78 | MKKNIAFLLAS | 140 |
| | | CTGCTGGCGAGCATGTTTGTG | | MFVFSIATNAYA | |
| | | TTTAGCATTGCGACCAACGCG | | | |
| | | TATGCG | | | |
| SS-046 | Amylase | ATGTTTGCGAAACGCTTTAAA | 79 | MFAKRFKTSL | 141 |
| | | ACCAGCCTGCTGCCGCTGTTT | | LPLFAGFLLLF | |
| | | GCGGGCTTTCTGCTGCTGTTTC | | HLVLAGPAAAS | |
| | | ATCTGGTGCTGGCGGGCCCGG | | | |
| | | CGGCGGCGAGC | | | |
| SS-047 | Alpha | ATGCGCTTTCCGAGCATTTTT | 80 | MRFPSIFTAVL | 142 |
| | Factor | ACCGCGGTGCTGTTTGCGGCG | | FAASSALA | |
| | | AGCAGCGCGCTGGCG | | | |
| SS-048 | Alpha | ATGCGCTTTCCGAGCATTTTT | 81 | MRFPSIFTTVL | 143 |
| | Factor | ACCACCGTGCTGTTTGCGGCG | | FAASSALA | |
| | | AGCAGCGCGCTGGCG | | | |
| SS-049 | Alpha | ATGCGCTTTCCGAGCATTTTT | 82 | MRFPSIFTSVLF | 144 |
| | Factor | ACCAGCGTGCTGTTTGCGGCG | | AASSALA | |
| | | AGCAGCGCGCTGGCG | | | |
| SS-050 | Alpha | ATGCGCTTTCCGAGCATTTTT | 83 | MRFPSIFTHVL | 145 |
| | Factor | ACCCATGTGCTGTTTGCGGCG | | FAASSALA | |
| | | AGCAGCGCGCTGGCG | | | |
| SS-051 | Alpha | ATGCGCTTTCCGAGCATTTTT | 84 | MRFPSIFTIVLF | 146 |
| | Factor | ACCATTGTGCTGTTTGCGGCG | | AASSALA | |
| | | AGCAGCGCGCTGGCG | | | |
| SS-052 | Alpha | ATGCGCTTTCCGAGCATTTTT | 85 | MRFPSIFTFVLF | 147 |
| | Factor | ACCTTTGTGCTGTTTGCGGCG | | AASSALA | |
| | | AGCAGCGCGCTGGCG | | | |
| SS-053 | Alpha | ATGCGCTTTCCGAGCATTTTT | 86 | MRFPSIFTEVL | 148 |
| | Factor | ACCGAAGTGCTGTTTGCGGCG | | FAASSALA | |
| | | AGCAGCGCGCTGGCG | | | |
| SS-054 | Alpha | ATGCGCTTTCCGAGCATTTTT | 87 | MRFPSIFTGVL | 149 |
| | Factor | ACCGGCGTGCTGTTTGCGGCG | | FAASSALA | |
| | | AGCAGCGCGCTGGCG | | | |
| SS-055 | Endoglucanase V | ATGCGTTCCTCCCCCCTCCTCC | 88 | MRSSPLLRSAV | 150 |
| | | GCTCCGCCGTTGTGGCCGCCC | | VAALPVLALA | |
| | | TGCCGGTGTTGGCCCTTGCC | | | |
| SS-056 | Secretion | ATGGGCGCGGCGGCCGTGCGC | 89 | MGAAAVRWH | 151 |
| | signal | TGGCACTTGTGCGTGCTGCTG | | LCVLLALGTR | |
| | | GCCCTGGGCACACGCGGGCG | | GRL | |
| | | GCTG | | | |
| SS-057 | Fungal | ATGAGGAGCTCCCTTGTGCTG | 90 | MRSSLVLFFVS | 152 |
| | | TTCTTTGTCTCTGCGTGGACG | | AWTALA | |
| | | GCCTTGGCCAG | | | |
| SS-058 | Fibronectin | ATGCTCAGGGGTCCGGGACCC | 91 | MLRGPGPGRL | 153 |
| | | GGGCGGCTGCTGCTGCTAGCA | | LLLAVLCLGTS | |
| | | GTCCTGTGCCTGGGGACATCG | | VRCTETGKSKR | |
| | | GTGCGCTGCACCGAAACCGGG | | | |
| | | AAGAGCAAGAGG | | | |
| SS-059 | Fibronectin | ATGCTTAGGGGTCCGGGGCCC | 92 | MLRGPGPGLL | 154 |
| | | GGGCTGCTGCTGCTGGCCGTC | | LLAVQCLGTA | |
| | | CAGCTGGGGACAGCGGTGCCC | | VPSTGA | |
| | | TCCACG | | | |
| SS-060 | Fibronectin | ATGCGCCGGGGGGCCCTGACC | 93 | MRRGALTGLL | 155 |
| | | GGGCTGCTCCTGGTCCTGTGC | | LVLCLSVVLR | |
| | | CTGAGTGTTGTGCTACGTGCA | | AAPSATSKKRR | |
| | | GCCCCCTCTGCAACAAGCAAG | | | |
| | | AAGCGCAGG | | | |

[0285] In the table, SS is secretion signal and MLS is mitochondrial leader signal. The primary constructs or mmRNA of the present invention may be designed to encode any of the signal sequences of SEQ ID NOs 94-155, or fragments or variants thereof. These sequences may be included at the beginning of the polypeptide coding region, in the middle or at the terminus or alternatively into a flanking region. Further, any of the polynucleotide primary constructs of the present invention may also comprise one or more of the sequences defined by SEQ ID NOs 32-93. These may be in the first region or either flanking region.

[0286] Additional signal sequences which may be utilized in the present invention include those taught in, for example, databases such as those found at www.signalpeptide.de/or proline.bic.nus.edu.sg/spdb/. Those described in U.S. Pat. Nos. 8,124,379; 7,413,875 and 7,385,034 are also within the scope of the invention and the contents of each are incorporated herein by reference in their entirety.

### Target Selection

[0287] According to the present invention, the primary constructs comprise at least a first region of linked nucleosides encoding at least one polypeptide of interest. The polypeptides of interest or “Targets” of the present invention are listed in Table 6. Shown in Table 6, in addition to the name and description of the gene encoding the polypeptide of interest are the ENSEMBL Transcript ID (ENST), the ENSEMBL Protein ID (ENSP) and when available the optimized transcript sequence ID (Optim Trans SEQ ID) or optimized open reading frame sequence ID (Optim ORF SEQ ID). For any particular gene there may exist one or more variants or isoforms. Where these exist, they are shown in the table as well. It will be appreciated by those of skill in the art that disclosed in the Table are potential flanking regions. These are encoded in each ENST transcript either to the 5′ (upstream) or 3′ (downstream) of the ORF or coding region. The coding region is definitively and specifically disclosed by teaching the ENSP sequence. Consequently, the sequences taught flanking that encoding the protein are considered flanking regions. It is also possible to further characterize the 5′ and 3′ flanking regions by utilizing one or more available databases or algorithms. Databases have annotated the features contained in the flanking regions of the ENST transcripts and these are available in the art.

TABLE 6
Targets

| Target | Target | | Trans | | Peptide | Optim ORF | Optim Trans |
|---|---|---|---|---|---|---|---|
| No. | Description | ENST | SEQ ID NO | ENSP | SEQ ID NO | SEQ ID | SEQ ID NO |
| 1 | 4-hydroxyphenyl- | 289004 | 156 | 289004 | 769 | 1673, 2293, | |
| | pyruvate | | | | | 2913, 3533, | |
| | dioxygenase | | | | | 4153, 5433- | |
| | | | | | | 5519 | |
| 2 | 4-hydroxyphenyl- | 543163 | 157 | 441677 | 770 | 1674, 2294, | |
| | pyruvate | | | | | 2914, 3534, | |
| | dioxygenase | | | | | 4154 | |
| 3 | 4- | 545969 | 158 | 437419 | 771 | 1675, 2295, | |
| | hydroxyphenylpyruvate | | | | | 2915, 3535, | |
| | dioxygenase | | | | | 4155 | |
| 4 | 6- | 280362 | 159 | 280362 | 772 | 1676, 2296, | 1609 |
| | pyruvoyltetra- | | | | | 2916, 3536, | |
| | hydropterin | | | | | 4156, 4773, | |
| | synthase | | | | | 5103, 5520- | |
| | | | | | | 5606 | |
| 5 | A disintegrin and | 563979 | 160 | 456186 | 773 | 1677, 2297, | 1609 |
| | metalloproteinase | | | | | 2917, 3537, | |
| | with thrombospondin | | | | | 4157, 4774, | |
| | motifs 13 isoform | | | | | 5104, 5607- | |
| | 1 preproprotein | | | | | 5693 | |
| 6 | activity-dependent | 349014 | 161 | 342905 | 774 | 1678, 2298, | |
| | neuroprotector | | | | | 2918, 3538, | |
| | homeobox | | | | | 4158, 4775, | |
| | | | | | | 5105, 5694- | |
| | | | | | | 5780 | |
| 7 | activity-dependent | 371602 | 162 | 360662 | 775 | 1679, 2299, | |
| | neuroprotector | | | | | 2919, 3539, | |
| | homeobox | | | | | 4159, 4776, | |
| | | | | | | 5106 | |
| 8 | activity-dependent | 396029 | 163 | 379346 | 776 | 1680, 2300, | |
| | neuroprotector | | | | | 2920, 3540, | |
| | homeobox | | | | | 4160, 4777, | |
| | | | | | | 5107 | |
| 9 | activity-dependent | 396032 | 164 | 379349 | 777 | 1681, 2301, | |
| | neuroprotector | | | | | 2921, 3541, | |
| | homeobox | | | | | 4161, 4778, | |
| | | | | | | 5108 | |
| 10 | activity-dependent | 534467 | 165 | 436181 | 778 | 1682, 2302, | |
| | neuroprotector | | | | | 2922, 3542, | |
| | homeobox | | | | | 4162, 4779, | |
| | | | | | | 5109 | |
| 11 | ADAM | 338351 | 166 | 345120 | 779 | 1683, 2303, | |
| | metallopeptidase | | | | | 2923, 3543, | |
| | with thrombospondin | | | | | 4163, 4780, | |
| | type 1 motif, 13 | | | | | 5110 | |
| 12 | ADAM | 355699 | 167 | 347927 | 780 | 1393, 1684, | |
| | metallopeptidase | | | | | 2304, 2924, | |
| | with thrombospondin | | | | | 3544, 4164, | |
| | type 1 motif, 13 | | | | | 4781, 5111 | |
| 13 | ADAM | 356589 | 168 | 348997 | 781 | 1394, 1685, | |
| | metallopeptidase | | | | | 2305, 2925, | |
| | with thrombospondin | | | | | 3545, 4165, | |
| | type 1 motif, 13 | | | | | 4782, 5112 | |
| 14 | ADAM | 371910 | 169 | 360978 | 782 | 1395, 1686, | |
| | metallopeptidase | | | | | 2306, 2926, | |
| | with thrombospondin | | | | | 3546, 4166, | |
| | type 1 motif, 13 | | | | | 4783, 5113 | |
| 15 | ADAM | 371911 | 170 | 360979 | 783 | 1396, 1687, | |
| | metallopeptidase | | | | | 2307, 2927, | |
| | with thrombospondin | | | | | 3547, 4167, | |
| | type 1 motif, 13 | | | | | 4784, 5114 | |
| 16 | ADAM | 371916 | 171 | 360984 | 784 | 1397, 1688, | |
| | metallopeptidase | | | | | 2308, 2928, | |
| | with thrombospondin | | | | | 3548, 4168, | |
| | type 1 motif, 13 | | | | | 4785, 5115 | |
| 17 | ADAM | 371929 | 172 | 360997 | 785 | 1398, 1689, | 1610 |
| | metallopeptidase | | | | | 2309, 2929, | |
| | with thrombospondin | | | | | 3549, 4169, | |
| | type 1 motif, 13 | | | | | 4786, 5116 | |
| 18 | ADAM | 536611 | 173 | 444504 | 786 | 1399, 1690, | |
| | metallopeptidase | | | | | 2310, 2930, | |
| | with thrombospondin | | | | | 3550, 4170, | |
| | type 1 motif, 13 | | | | | 4787, 5117 | |
| 19 | AIFsh | | | | | | |
| 20 | Albiglutide; | | | | | | |
| | albiglutide | | | | | | |
| 21 | aldolase A | 563060 | 174 | 455800 | 787 | 1691, 2311, | |
| | fructose- | | | | | 2931, 3551, | |
| | bisphosphate | | | | | 4171 | |
| 22 | aldolase A | 564546 | 175 | 455917 | 788 | 1692, 2312, | |
| | fructose- | | | | | 2932, 3552, | |
| | bisphosphate | | | | | 4172 | |
| 23 | aldolase A | 564595 | 176 | 457468 | 789 | 1693, 2313, | |
| | fructose- | | | | | 2933, 3553, | |
| | bisphosphate | | | | | 4173 | |
| 24 | aldolase A, | 338110 | 177 | 336927 | 790 | 1694, 2314, | |
| | fructose- | | | | | 2934, 3554, | |
| | bisphosphate | | | | | 4174 | |
| 25 | aldolase A, | 395240 | 178 | 378661 | 791 | 1695, 2315, | |
| | fructose- | | | | | 2935, 3555, | |
| | bisphosphate | | | | | 4175 | |
| 26 | aldolase A, | 395248 | 179 | 378669 | 792 | 1696, 2316, | |
| | fructose- | | | | | 2936, 3556, | |
| | bisphosphate | | | | | 4176, 5781- | |
| | | | | | | 5867 | |
| 27 | aldolase A, | 412304 | 180 | 400452 | 793 | 1697, 2317, | |
| | fructose- | | | | | 2937, 3557, | |
| | bisphosphate | | | | | 4177 | |
| 28 | ameloblastin | 322937 | 181 | 313809 | 794 | 1698, 2318, | 1611 |
| | (enamel matrix | | | | | 2938, 3558, | |
| | protein) | | | | | 4178, 4788, | |
| | | | | | | 5118, 5868- | |
| | | | | | | 5954 | |
| 29 | ameloblastin | 449493 | 182 | 391234 | 795 | 1699, 2319, | 1611 |
| | (enamel matrix | | | | | 2939, 3559, | |
| | protein) | | | | | 4179, 4789, | |
| | | | | | | 5119 | |
| 30 | ameloblastin | 538728 | 183 | 445605 | 796 | 1700, 2320, | 1611 |
| | (enamel matrix | | | | | 2940, 3560, | |
| | protein) | | | | | 4180, 4790, | |
| | | | | | | 5120 | |
| 31 | amelogenin, | 348912 | 184 | 335312 | 797 | 1701, 2321, | |
| | X-linked | | | | | 2941, 3561, | |
| | | | | | | 4181, 4791, | |
| | | | | | | 5121 | |
| 32 | amelogenin, | 380712 | 185 | 370088 | 798 | 1702, 2322, | |
| | X-linked | | | | | 2942, 3562, | |
| | | | | | | 4182, 4792, | |
| | | | | | | 5122, 5955- | |
| | | | | | | 6041 | |
| 33 | amelogenin, | 380714 | 186 | 370090 | 799 | 1703, 2323, | |
| | X-linked | | | | | 2943, 3563, | |
| | | | | | | 4183, 4793, | |
| | | | | | | 5123 | |
| 34 | amelogenin, | 215479 | 187 | 215479 | 800 | 1704, 2324, | 1612 |
| | Y-linked | | | | | 2944, 3564, | |
| | | | | | | 4184 | |
| 35 | amelogenin, | 383036 | 188 | 372505 | 801 | 1705, 2325, | 1612 |
| | Y-linked | | | | | 2945, 3565, | |
| | | | | | | 4185 | |
| 36 | amelogenin, | 383037 | 189 | 372506 | 802 | 1706, 2326, | 1612 |
| | Y-linked | | | | | 2946, 3566, | |
| | | | | | | 4186 | |
| 37 | amylo-alpha-1, 6- | 294724 | 190 | 294724 | 803 | 1707, 2327, | |
| | glucosidase, 4- | | | | | 2947, 3567, | |
| | alpha- | | | | | 4187 | |
| | glucanotransferase | | | | | | |
| 38 | amylo-alpha-1, 6- | 361302 | 191 | 354971 | 804 | 1708, 2328, | |
| | glucosidase, 4- | | | | | 2948, 3568, | |
| | alpha- | | | | | 4188 | |
| | glucanotransferase | | | | | | |
| 39 | amylo-alpha-1, 6- | 361522 | 192 | 354635 | 805 | 1709, 2329, | |
| | glucosidase, 4- | | | | | 2949, 3569, | |
| | alpha- | | | | | 4189 | |
| | glucanotransferase | | | | | | |
| 40 | amylo-alpha-1, 6- | 361915 | 193 | 355106 | 806 | 1710, 2330, | |
| | glucosidase, 4- | | | | | 2950, 3570, | |
| | alpha- | | | | | 4190, 6042- | |
| | glucanotransferase | | | | | 6128 | |
| 41 | amylo-alpha-1, 6- | 370161 | 194 | 359180 | 807 | 1711, 2331, | |
| | glucosidase, 4- | | | | | 2951, 3571, | |
| | alpha- | | | | | 4191 | |
| | glucanotransferase | | | | | | |
| 42 | amylo-alpha-1, 6- | 370163 | 195 | 359182 | 808 | 1712, 2332, | |
| | glucosidase, 4- | | | | | 2952, 3572, | |
| | alpha- | | | | | 4192 | |
| | glucanotransferase | | | | | | |
| 43 | amylo-alpha-1, 6- | 370165 | 196 | 359184 | 809 | 1713, 2333, | |
| | glucosidase, 4- | | | | | 2953, 3573, | |
| | alpha- | | | | | 4193 | |
| | glucanotransferase | | | | | | |
| 44 | amyloid P | 255040 | 197 | 255040 | 810 | 1714, 2334, | |
| | component, serum | | | | | 2954, 3574, | |
| | | | | | | 4194, 6129- | |
| | | | | | | 6215 | |
| 45 | angiotensin I | 252519 | 198 | 252519 | 811 | 1715, 2335, | |
| | converting enzyme | | | | | 2955, 3575, | |
| | (peptidyl- | | | | | 4195, 6216- | |
| | dipeptidase A) 2 | | | | | 6302 | |
| 46 | angiotensin I | 427411 | 199 | 389326 | 812 | 1716, 2336, | |
| | converting enzyme | | | | | 2956, 3576, | |
| | (peptidyl- | | | | | 4196 | |
| | dipeptidase A) 2 | | | | | | |
| 47 | Anti-TNFalpha | | | | | | |
| | (TNFRFusion; | | | | | | |
| | Enbrel) | | | | | | |
| 48 | APOA1 Milano; apo | | | | 813 | 1400, 1717, | 1613 |
| | A-I(R173C)Milano, | | | | | 2337, 2957, | |
| | ETC-216 | | | | | 3577, 4197, | |
| | | | | | | 4794, 5124 | |
| 49 | APOA1 Paris; apo | | | | 814 | 1401, 1718, | |
| | A-I(R151C)Paris | | | | | 2338, 2958, | |
| | | | | | | 3578, 4198, | |
| | | | | | | 4795, 5125 | |
| 50 | ApoA-a optimized | | | | | | 1614 |
| | mRNA | | | | | | |
| 51 | apolipoprotein A-I | 236850 | 200 | 236850 | 815 | 1402, 1719, | 1615 |
| | | | | | | 2339, 2959, | |
| | | | | | | 3579, 4199, | |
| | | | | | | 4796, 5126, | |
| | | | | | | 6303-5363 | |
| 52 | apolipoprotein A-I | 359492 | 201 | 352471 | 816 | 1720, 2340, | 1615 |
| | | | | | | 2960, 3580, | |
| | | | | | | 4200, 4797, | |
| | | | | | | 5127 | |
| 53 | apolipoprotein A-I | 375320 | 202 | 364469 | 817 | 1721, 2341, | 1615 |
| | | | | | | 2961, 3581, | |
| | | | | | | 4201, 4798, | |
| | | | | | | 5128 | |
| 54 | apolipoprotein A-I | 375323 | 203 | 364472 | 818 | 1722, 2342, | 1615 |
| | | | | | | 2962, 3582, | |
| | | | | | | 4202, 4799, | |
| | | | | | | 5129 | |
| 55 | apolipoprotein B | 233242 | 204 | 233242 | 819 | 1723, 2343, | |
| | (including Ag(x) | | | | | 2963, 3583, | |
| | antigen) | | | | | 4203 | |
| 56 | apolipoprotein B | 535079 | 205 | 439731 | 820 | 1724, 2344, | |
| | (including Ag(x) | | | | | 2964, 3584, | |
| | antigen) | | | | | 4204 | |
| 57 | aquaporin 5 | 293599 | 206 | 293599 | 821 | 1725, 2345, | 1616 |
| | | | | | | 2965, 3585, | |
| | | | | | | 4205, 4800, | |
| | | | | | | 5130, 6564- | |
| | | | | | | 6650 | |
| 58 | arginase, liver | 356962 | 207 | 349446 | 822 | 1726, 2346, | |
| | | | | | | 2966, 3586, | |
| | | | | | | 4206, | |
| 59 | arginase, liver | 368087 | 208 | 357066 | 823 | 1727, 2347, | |
| | | | | | | 2967, 3587, | |
| | | | | | | 4207, 6651- | |
| | | | | | | 6737 | |
| 60 | arginase, liver | 476845 | 209 | 417694 | 824 | 1728, 2348, | |
| | | | | | | 2968, 3588, | |
| | | | | | | 4208 | |
| 61 | argininosuccinate | 304874 | 210 | 307188 | 825 | 1729, 2349, | |
| | lyase | | | | | 2969, 3589, | |
| | | | | | | 4209, 6738- | |
| | | | | | | 6876 | |
| 62 | argininosuccinate | 380839 | 211 | 370219 | 826 | 1730, 2350, | |
| | lyase | | | | | 2970, 3590, | |
| | | | | | | 4210 | |
| 63 | argininosuccinate | 395331 | 212 | 378740 | 827 | 1731, 2351, | |
| | lyase | | | | | 2971, 3591, | |
| | | | | | | 4211 | |
| 64 | argininosuccinate | 395332 | 213 | 378741 | 828 | 1732, 2352, | |
| | lyase | | | | | 2972, 3592, | |
| | | | | | | 4212 | |
| 65 | argininosuccinate | 502022 | 214 | 441778 | 829 | 1733, 2353, | |
| | lyase | | | | | 2973, 3593, | |
| | | | | | | 4213 | |
| 66 | argininosuccinate | 334909 | 215 | 361470 | 830 | 1403, 1734, | |
| | synthase 1 | | | | | 2354, 2974, | |
| | | | | | | 3594, 4214 | |
| 67 | argininosuccinate | 352480 | 216 | 253004 | 831 | 1735, 2355, | |
| | synthase 1 | | | | | 2975, 3595, | |
| | | | | | | 4215, 6877- | |
| | | | | | | 6963 | |
| 68 | argininosuccinate | 372386 | 217 | 361461 | 832 | 1404, 1736, | |
| | synthase 1 | | | | | 2356, 2976, | |
| | | | | | | 3596, 4216 | |
| 69 | argininosuccinate | 372393 | 218 | 361469 | 833 | 1737, 2357, | |
| | synthase 1 | | | | | 2977, 3597, | |
| | | | | | | 4217 | |
| 70 | argininosuccinate | 372394 | 219 | 361471 | 834 | 1738, 2358, | |
| | synthase 1 | | | | | 2978, 3598, | |
| | | | | | | 4218 | |
| 71 | argininosuccinate | 422569 | 220 | 394212 | 835 | 1405, 1739, | |
| | synthase 1 | | | | | 2359, 2979, | |
| | | | | | | 3599, 4219 | |
| 72 | argininosuccinate | 443588 | 221 | 397785 | 836 | 1406, 1740, | |
| | synthase 1 | | | | | 2360, 2980, | |
| | | | | | | 3600, 4220 | |
| 73 | artemin | 372354 | 222 | 361429 | 837 | 1741, 2361, | |
| | | | | | | 2981, 3601, | |
| | | | | | | 4221, 4801, | |
| | | | | | | 5131, 6964- | |
| | | | | | | 7050 | |
| 74 | artemin | 372359 | 223 | 361434 | 838 | 1742, 2362, | |
| | | | | | | 2982, 3602, | |
| | | | | | | 4222, 4802, | |
| | | | | | | 5132 | |
| 75 | artemin | 414809 | 224 | 387435 | 839 | 1743, 2363, | |
| | | | | | | 2983, 3603, | |
| | | | | | | 4223, 4803, | |
| | | | | | | 5133 | |
| 76 | artemin | 471394 | 225 | 435804 | 840 | 1744, 2364, | |
| | | | | | | 2984, 3604, | |
| | | | | | | 4224, 4804, | |
| | | | | | | 5134 | |
| 77 | artemin | 474592 | 226 | 434856 | 841 | 1745, 2365, | |
| | | | | | | 2985, 3605, | |
| | | | | | | 4225, 4805, | |
| | | | | | | 5135 | |
| 78 | artemin | 477048 | 227 | 434784 | 842 | 1746, 2366, | |
| | | | | | | 2986, 3606, | |
| | | | | | | 4226, 4806, | |
| | | | | | | 5136 | |
| 79 | artemin | 491846 | 228 | 436149 | 843 | 1747, 2367, | |
| | | | | | | 2987, 3607, | |
| | | | | | | 4227, 4807, | |
| | | | | | | 5137 | |
| 80 | artemin | 498139 | 229 | 436727 | 844 | 1748, 2368, | |
| | | | | | | 2988, 3608, | |
| | | | | | | 4228, 4808, | |
| | | | | | | 5138 | |
| 81 | arylsulfatase B | 264914 | 230 | 264914 | 845 | 1749, 2369, | 1617 |
| | | | | | | 2989, 3609, | |
| | | | | | | 4229, 4809, | |
| | | | | | | 5139, 7051- | |
| | | | | | | 7137 | |
| 82 | arylsulfatase B | 264914 | 231 | 264914 | 846 | 1750, 2370, | 1617 |
| | | | | | | 2990, 3610, | |
| | | | | | | 4230, 4810, | |
| | | | | | | 5140 | |
| 83 | arylsulfatase B | 396151 | 232 | 379455 | 847 | 1751, 2371, | 1617 |
| | | | | | | 2991, 3611, | |
| | | | | | | 4231, 4811, | |
| | | | | | | 5141 | |
| 84 | arylsulfatase B | 521117 | 233 | 428611 | 848 | 1752, 2372, | 1617 |
| | | | | | | 2992, 3612, | |
| | | | | | | 4232, 4812, | |
| | | | | | | 5142 | |
| 85 | asparaginase | 299234 | 234 | 299234 | 849 | 1753, 2373, | |
| | homolog | | | | | 2993, 3613, | |
| | (S. cerevisiae) | | | | | 4233, 4813, | |
| | | | | | | 5143 | |
| 86 | asparaginase | 455920 | 235 | 389003 | 850 | 1754, 2374, | |
| | homolog | | | | | 2994, 3614, | |
| | (S. cerevisiae) | | | | | 4234, 4814, | |
| | | | | | | 5144 | |
| 87 | asparaginase | 550583 | 236 | 446856 | 851 | 1755, 2375, | |
| | homolog | | | | | 2995, 3615, | |
| | (S. cerevisiae) | | | | | 4235, 4815, | |
| | | | | | | 5145 | |
| 88 | asparaginase | 551177 | 237 | 450040 | 852 | 1756, 2376, | |
| | homolog | | | | | 2996, 3616, | |
| | (S. cerevisiae) | | | | | 4236, 4816, | |
| | | | | | | 5146 | |
| 89 | aspartoacylase | 263080 | 238 | 263080 | 853 | 1757, 2377, | |
| | | | | | | 2997, 3617, | |
| | | | | | | 4237 | |
| 90 | aspartoacylase | 456349 | 239 | 409976 | 854 | 1758, 2378, | |
| | | | | | | 2998, 3618, | |
| | | | | | | 4238, 7138- | |
| | | | | | | 7224 | |
| 91 | ATPase, | 283684 | 240 | 283684 | 855 | 1407, 1759, | |
| | aminophospholipid | | | | | 2379, 2999, | |
| | transporter, class | | | | | 3619, 4239, | |
| | I, type 8B, | | | | | 7225-7398 | |
| | member 1 | | | | | | |
| 92 | ATPase, | 536015 | 241 | 445359 | 856 | 1760, 2380, | |
| | aminophospholipid | | | | | 3000, 3620, | |
| | transporter, class | | | | | 4240 | |
| | I, type 8B, | | | | | | |
| | member 1 | | | | | | |
| 93 | ATPase, Cu++ | 242839 | 242 | 242839 | 857 | 1761, 2381, | 1618 |
| | transporting, beta | | | | | 3001, 3621, | |
| | polypeptide | | | | | 4241, 4817, | |
| | | | | | | 5147, 7399- | |
| | | | | | | 7485 | |
| 94 | ATPase, Cu++ | 344297 | 243 | 342559 | 858 | 1762, 2382, | 1618 |
| | transporting, beta | | | | | 3002, 3622, | |
| | polypeptide | | | | | 4242, 4818, | |
| | | | | | | 5148 | |
| 95 | ATPase, Cu++ | 400366 | 244 | 383217 | 859 | 1763, 2383, | 1618 |
| | transporting, beta | | | | | 3003, 3623, | |
| | polypeptide | | | | | 4243, 4819, | |
| | | | | | | 5149 | |
| 96 | ATPase, Cu++ | 400370 | 245 | 383221 | 860 | 1764, 2384, | 1618 |
| | transporting, beta | | | | | 3004, 3624, | |
| | polypeptide | | | | | 4244, 4820, | |
| | | | | | | 5150 | |
| 97 | ATPase, Cu++ | 417240 | 246 | 390360 | 861 | 1765, 2385, | |
| | transporting, beta | | | | | 3005, 3625, | |
| | polypeptide | | | | | 4245, 4821, | |
| | | | | | | 5151 | |
| 98 | ATPase, Cu++ | 418097 | 247 | 393343 | 862 | 1766, 2386, | 1618 |
| | transporting, beta | | | | | 3006, 3626, | |
| | polypeptide | | | | | 4246, 4822, | |
| | | | | | | 5152 | |
| 99 | ATPase, Cu++ | 448424 | 248 | 416738 | 863 | 1767, 2387, | 1618 |
| | transporting, beta | | | | | 3007, 3627, | |
| | polypeptide | | | | | 4247, 4823, | |
| | | | | | | 5153 | |
| 100 | ATPase, Cu++ | 542656 | 249 | 443128 | 864 | 1768, 2388, | |
| | transporting, beta | | | | | 3008, 3628, | |
| | polypeptide | | | | | 4248, 4824, | |
| | | | | | | 5154 | |
| 101 | ATP-binding | 263817 | 250 | 263817 | 865 | 1408, 1769, | |
| | cassette, sub- | | | | | 2389, 3009, | |
| | family B | | | | | 3629, 4249 | |
| | (MDR/TAP), | | | | | | |
| | member 11 | | | | | | |
| 102 | ATP-binding | 265723 | 251 | 265723 | 866 | 1409, 1770, | |
| | cassette, sub- | | | | | 2390, 3010, | |
| | family B | | | | | 3630, 4250, | |
| | (MDR/TAP), | | | | | 7486-7659 | |
| | member 4 | | | | | | |
| 103 | ATP-binding | 358400 | 252 | 351172 | 867 | 1410, 1771, | |
| | cassette, sub- | | | | | 2391, 3011, | |
| | family B | | | | | 3631, 4251 | |
| | (MDR/TAP), | | | | | | |
| | member 4 | | | | | | |
| 104 | ATP-binding | 359206 | 253 | 352135 | 868 | 1411, 1772, | |
| | cassette, sub- | | | | | 2392, 3012, | |
| | family B | | | | | 3632, 4252 | |
| | (MDR/TAP), | | | | | | |
| | member 4 | | | | | | |
| 105 | ATP-binding | 417608 | 254 | 394511 | 869 | 1412, 1773, | |
| | cassette, sub- | | | | | 2393, 3013, | |
| | family B | | | | | 3633, 4253 | |
| | (MDR/TAP), | | | | | | |
| | member 4 | | | | | | |
| 106 | ATP-binding | 453593 | 255 | 392983 | 870 | 1774, 2394, | |
| | cassette, sub- | | | | | 3014, 3634, | |
| | family B | | | | | 4254 | |
| | (MDR/TAP), | | | | | | |
| | member 4 | | | | | | |
| 107 | ATP-binding | 545634 | 256 | 437465 | 871 | 1775, 2395, | |
| | cassette, sub- | | | | | 3015, 3635, | |
| | family B | | | | | 4255 | |
| | (MDR/TAP), | | | | | | |
| | member 4 | | | | | | |
| 108 | bactericidal/ | 262865 | 257 | 262865 | 872 | 1776, 2396, | |
| | permeability- | | | | | 3016, 3636, | |
| | increasing | | | | | 4256, 7660- | |
| | protein | | | | | 7746 | |
| 109 | basic helix-loop- | 242728 | 258 | 242728 | 873 | 1413, 1777, | |
| | helix family, | | | | | 2397, 3017, | |
| | member e41 | | | | | 3637, 4257, | |
| | | | | | | 7747-7833 | |
| 110 | basic helix-loop- | 540731 | 259 | 437369 | 874 | 1778, 2398, | |
| | helix family, | | | | | 3018, 3638, | |
| | member e41 | | | | | 4258 | |
| 111 | bone | 378827 | 260 | 368104 | 875 | 1414, 1779, | |
| | morphogenetic | | | | | 2399, 3019, | |
| | protein 2 | | | | | 3639, 4259, | |
| | | | | | | 7834-7920 | |
| 112 | bone | 395863 | 261 | 379204 | 876 | 1415, 1780, | |
| | morphogenetic | | | | | 2400, 3020, | |
| | protein 7 | | | | | 3640, 4260, | |
| | | | | | | 4825, 5155, | |
| | | | | | | 7921-8007 | |
| 113 | bone | 395864 | 262 | 379205 | 877 | 1416, 1781, | |
| | morphogenetic | | | | | 2401, 3021, | |
| | protein 7 | | | | | 3641, 4261, | |
| | | | | | | 4826, 5156 | |
| 114 | Cap18 | | | | | | |
| 115 | carbamoyl- | 233072 | 263 | 233072 | 878 | 1417, 1782, | |
| | phosphate | | | | | 2402, 3022, | |
| | synthase 1, | | | | | 3642, 4262 | |
| | mitochondrial | | | | | | |
| 116 | carbamoyl- | 417946 | 264 | 388496 | 879 | 1418, 1783, | |
| | phosphate | | | | | 2403, 3023, | |
| | synthase 1, | | | | | 3643, 4263 | |
| | mitochondrial | | | | | | |
| 117 | carbamoyl- | 430249 | 265 | 402608 | 880 | 1419, 1784, | |
| | phosphate | | | | | 2404, 3024, | |
| | synthase 1, | | | | | 3644, 4264, | |
| | mitochondrial | | | | | 8008-8146 | |
| 118 | carbamoyl- | 451903 | 266 | 406136 | 881 | 1420, 1785, | |
| | phosphate | | | | | 2405, 3025, | |
| | synthase 1, | | | | | 3645, 4265 | |
| | mitochondrial | | | | | | |
| 119 | carbamoyl- | 518043 | 267 | 430697 | 882 | 1786, 2406, | |
| | phosphate | | | | | 3026, 3646, | |
| | synthase 1, | | | | | 4266, | |
| | mitochondrial | | | | | | |
| 120 | carbamoyl- | 536125 | 268 | 445539 | 883 | 1787, 2407, | |
| | phosphate | | | | | 3027, 3647, | |
| | synthase 1, | | | | | 4267 | |
| | mitochondrial | | | | | | |
| 121 | carbamoyl- | 539150 | 269 | 444139 | 884 | 1788, 2408, | |
| | phosphate | | | | | 3028, 3648, | |
| | synthase 1, | | | | | 4268 | |
| | mitochondrial | | | | | | |
| 122 | carbamoyl- | 544169 | 270 | 442790 | 885 | 1789, 2409, | |
| | phosphate | | | | | 3029, 3649, | |
| | synthase 1, | | | | | 4269 | |
| | mitochondrial | | | | | | |
| 123 | cardiotrophin 1 | 279804 | 271 | 279804 | 886 | 1790, 2410, | |
| | | | | | | 3030, 3650, | |
| | | | | | | 4270, 8147- | |
| | | | | | | 8233 | |
| 124 | cardiotrophin 1 | 395019 | 272 | 378465 | 887 | 1791, 2411, | |
| | | | | | | 3031, 3651, | |
| | | | | | | 4271 | |
| 125 | cathelicidin | 296435 | 273 | 296435 | 888 | 1792, 2412, | 1619 |
| | antimicrobial | | | | | 3032, 3652, | |
| | peptide | | | | | 4272, 4827, | |
| | | | | | | 5157, 8234- | |
| | | | | | | 8407 | |
| 126 | cathelicidin | 576243 | 274 | 458149 | 889 | 1793, 2413, | |
| | antimicrobial | | | | | 3033, 3653, | |
| | peptide | | | | | 4273, 4828, | |
| | | | | | | 5158 | |
| 127 | Cbp/p300- | 372638 | 275 | 361721 | 890 | 1421, 1794, | |
| | interacting | | | | | 2414, 3034, | |
| | transactivator, | | | | | 3654, 4274, | |
| | with Glu/Asp-rich | | | | | 8408-8494 | |
| | carboxy-terminal | | | | | | |
| | domain, 4 | | | | | | |
| 128 | ceruloplasmin | 264613 | 276 | 264613 | 891 | 1422, 1795, | 1620 |
| | (ferroxidase) | | | | | 2415, 3035, | |
| | | | | | | 3655, 4275, | |
| | | | | | | 4829, 5159, | |
| | | | | | | 8495-8581 | |
| 129 | Cheetah Program | | | | | | |
| | 2; hyaluronidase | | | | | | |
| | (human); insulin | | | | | | |
| | lispro | | | | | | |
| 130 | ciliary | 361987 | 277 | 355370 | 892 | 1796, 2416, | |
| | neurotrophic | | | | | 3036, 3656, | |
| | factor | | | | | 4276 | |
| 131 | coagulation factor | 311907 | 278 | 308541 | 893 | 1423, 1797, | |
| | II (thrombin) | | | | | 2417, 3037, | |
| | | | | | | 3657, 4277, | |
| | | | | | | 4830, 5160, | |
| | | | | | | 8582-8668 | |
| 132 | coagulation factor | 446804 | 279 | 406403 | 894 | 1798, 2418, | |
| | II (thrombin) | | | | | 3038, 3658, | |
| | | | | | | 4278,4831, | |
| | | | | | | 5161 | |
| 133 | coagulation factor | 530231 | 280 | 433907 | 895 | 1424, 1799, | |
| | II (thrombin) | | | | | 2419, 3039, | |
| | | | | | | 3659, 4279, | |
| | | | | | | 4832, 5162 | |
| 134 | coagulation factor | 334047 | 281 | 334145 | 896 | 1425, 1800, | |
| | III (thromboplastin, | | | | | 2420, 3040, | |
| | tissue factor) | | | | | 3660, 4280, | |
| | | | | | | 8669-8755 | |
| 135 | coagulation factor | 370207 | 282 | 359226 | 897 | 1426, 1801, | |
| | III (thromboplastin, | | | | | 2421, 3041, | |
| | tissue factor) | | | | | 3661, 4281, | |
| | | | | | | 8756-8842 | |
| 136 | coagulation factor | 218099 | 283 | 218099 | 898 | 1427, 1802, | 1621 |
| | IX | | | | | 2422, 3042, | |
| | | | | | | 3662, 4282, | |
| | | | | | | 8843-9016 | |
| 137 | coagulation factor | 394090 | 284 | 377650 | 899 | 1428, 1803, | 1621 |
| | IX | | | | | 2423, 3043, | |
| | | | | | | 3663, 4283, | |
| | | | | | | 4833, 5163 | |
| 138 | coagulation factor | 367796 | 285 | 356770 | 900 | 1429, 1804, | |
| | V (proaccelerin, | | | | | 2424, 3044, | |
| | labile factor) | | | | | 3664, 4284 | |
| 139 | coagulation factor | 367797 | 286 | 356771 | 901 | 1430, 1805, | |
| | V (proaccelerin, | | | | | 2425, 3045, | |
| | labile factor) | | | | | 3665, 4285, | |
| | | | | | | 9017-9155 | |
| 140 | coagulation factor | 546081 | 287 | 439664 | 902 | 1431, 1806, | |
| | V (proaccelerin, | | | | | 2426, 3046, | |
| | labile factor) | | | | | 3666, 4286 | |
| 141 | coagulation factor | 346342 | 288 | 329546 | 903 | 1432, 1807, | 1622 |
| | VII (serum | | | | | 2427, 3047, | |
| | prothrombin | | | | | 3667, 4287, | |
| | conversion | | | | | 4834, 5164 | |
| | accelerator) | | | | | | |
| 142 | coagulation factor | 375581 | 289 | 364731 | 904 | 1433, 1808, | 1622 |
| | VII (serum | | | | | 2428, 3048, | |
| | prothrombin | | | | | 3668, 4288, | |
| | conversion | | | | | 4835, 5165, | |
| | accelerator) | | | | | 9156-9242 | |
| 143 | coagulation factor | 541084 | 290 | 442051 | 905 | 1434, 1809, | 1622 |
| | VII (serum | | | | | 2429, 3049, | |
| | prothrombin | | | | | 3669, 4289, | |
| | conversion | | | | | 4836, 5166 | |
| | accelerator) | | | | | | |
| 144 | coagulation factor | 330287 | 291 | 327895 | 906 | 1810, 2430, | |
| | VIII procoagulant | | | | | 3050, 3670, | |
| | component | | | | | 4290, 4837, | |
| | | | | | | 5167 | |
| 145 | coagulation factor | 360256 | 292 | 353393 | 907 | 1435, 1811, | 1623 |
| | VIII, procoagulant | | | | | 2431, 3051, | |
| | component | | | | | 3671, 4291, | |
| | | | | | | 4838, 5168 | |
| 146 | coagulation factor | 375551 | 293 | 364701 | 908 | 1436, 1812, | |
| | X | | | | | 2432, 3052, | |
| | | | | | | 3672, 4292, | |
| | | | | | | 4839, 5169 | |
| 147 | coagulation factor | 375559 | 294 | 364709 | 909 | 1437, 1813, | |
| | X | | | | | 2433, 3053, | |
| | | | | | | 3673, 4293, | |
| | | | | | | 4840, 5170, | |
| | | | | | | 9243-9381 | |
| 148 | coagulation factor | 409306 | 295 | 387092 | 910 | 1438, 1814, | |
| | X | | | | | 2434, 3054, | |
| | | | | | | 3674, 4294, | |
| | | | | | | 4841, 5171 | |
| 149 | coagulation factor | 264692 | 296 | 264692 | 911 | 1439, 1815, | 1624 |
| | XI | | | | | 2435, 3055, | |
| | | | | | | 3675, 4295, | |
| | | | | | | 4842, 5172 | |
| 150 | coagulation factor | 403665 | 297 | 384957 | 912 | 1440, 1816, | 1624 |
| | XI | | | | | 2436, 3056, | |
| | | | | | | 3676, 4296, | |
| | | | | | | 4843, 5173, | |
| | | | | | | 9382-9468 | |
| 151 | coagulation factor | 452239 | 298 | 397401 | 913 | 1441, 1817, | |
| | XI | | | | | 2437, 3057, | |
| | | | | | | 3677, 4297, | |
| | | | | | | 4844, 5174, | |
| 152 | coagulation factor | 264870 | 299 | 264870 | 914 | 1442, 1818, | |
| | XIII, A1 | | | | | 2438, 3058, | |
| | polypeptide | | | | | 3678, 4298, | |
| | | | | | | 9469-9555 | |
| 153 | coagulation factor | 414279 | 300 | 413334 | 915 | 1443, 1819, | |
| | XIII, A1 | | | | | 2439, 3059, | |
| | polypeptide | | | | | 3679, 4299 | |
| 154 | coagulation factor | 441301 | 301 | 416127 | 916 | 1820, 2440, | |
| | XIII, A1 | | | | | 3060, 3680, | |
| | polypeptide | | | | | 4300 | |
| 155 | collagen, type VII, | 328333 | 302 | 332371 | 917 | 1821, 2441, | 1625 |
| | alpha 1 | | | | | 3061, 3681, | |
| | | | | | | 4301, 4845, | |
| | | | | | | 5175, 9556- | |
| | | | | | | 9642 | |
| 156 | collagen, type VII, | 454817 | 303 | 412569 | 918 | 1822, 2442, | |
| | alpha 1 | | | | | 3062, 3682, | |
| | | | | | | 4302, 4846, | |
| | | | | | | 5176, | |
| 157 | colony stimulating | 296871 | 304 | 296871 | 919 | 1823, 2443, | 1626 |
| | factor 2 | | | | | 3063, 3683, | |
| | (granulocyte- | | | | | 4303, 4847, | |
| | macrophage) | | | | | 5177, 9643- | |
| | | | | | | 9781 | |
| 158 | colony stimulating | 225474 | 305 | 225474 | 920 | 1824, 2444, | 1627 |
| | factor 3 | | | | | 3064, 3684, | |
| | (granulocyte) | | | | | 4304, 9782- | |
| | | | | | | 9868 | |
| 159 | colony stimulating | 331769 | 306 | 327766 | 921 | 1825, 2445, | |
| | factor 3 | | | | | 3065, 3685, | |
| | (granulocyte) | | | | | 4305, 4848, | |
| | | | | | | 5178, 9869- | |
| | | | | | | 9955 | |
| 160 | colony stimulating | 394148 | 307 | 377704 | 922 | 1826, 2446, | 1627 |
| | factor 3 | | | | | 3066, 3686, | |
| | (granulocyte) | | | | | 4306, 4849, | |
| | | | | | | 5179, | |
| 161 | colony stimulating | 394149 | 308 | 377705 | 923 | 1827, 2447, | 1627 |
| | factor 3 | | | | | 3067, 3687, | |
| | (granulocyte) | | | | | 4307, 4850, | |
| | | | | | | 5180, 9956- | |
| | | | | | | 10042 | |
| 162 | complement factor | 367429 | 309 | 356399 | 924 | 1444, 1828, | 1627 |
| | H | | | | | 2448, 3068, | |
| | | | | | | 3688, 4308, | |
| | | | | | | 4851, 5181 | |
| 163 | complement factor | 391986 | 310 | 375846 | 925 | 1829, 2449, | |
| | H | | | | | 3069, 3689, | |
| | | | | | | 4309, 4852, | |
| | | | | | | 5182 | |
| 164 | complement factor | 439155 | 311 | 402656 | 926 | 1445, 1830, | |
| | H | | | | | 2450, 3070, | |
| | | | | | | 3690, 4310, | |
| | | | | | | 4853, 5183 | |
| 165 | copper metabolism | 311832 | 312 | 308236 | 927 | 1446, 1831, | |
| | (Murr1) domain | | | | | 2451, 3071, | |
| | containing 1 | | | | | 3691, 4311, | |
| | | | | | | 10043-10129 | |
| 166 | copper metabolism | 427417 | 313 | 413207 | 928 | 1447, 1832, | |
| | (Murr1) domain | | | | | 2452, 3072, | |
| | containing 1 | | | | | 3692, 4312 | |
| 167 | copper metabolism | 444166 | 314 | 410050 | 929 | 1448, 1833, | |
| | (Murr1) domain | | | | | 2453, 3073, | |
| | containing 1 | | | | | 3693, 4313 | |
| 168 | copper metabolism | 458337 | 315 | 401236 | 930 | 1834, 2454, | |
| | (Murr1) domain | | | | | 3074, 3694, | |
| | containing 1 | | | | | 4314 | |
| 169 | copper metabolism | 538736 | 316 | 438961 | 931 | 1449, 1835, | |
| | (Murr1) domain | | | | | 2455, 3075, | |
| | containing 1 | | | | | 3695, 4315 | |
| 170 | corticotropin | 276571 | 317 | 276571 | 932 | 1836, 2456, | |
| | releasing hormone | | | | | 3076, 3696, | |
| | | | | | | 4316, 4854, | |
| | | | | | | 5184 | |
| 171 | CTLA4-Ig | | | | | | |
| | (Orencia) | | | | | | |
| 172 | cystic fibrosis | 3084 | 318 | 3084 | 933 | 1450, 1837, | 1628 |
| | transmembrane | | | | | 2457, 3077, | |
| | conductance | | | | | 3697, 4317, | |
| | regulator (ATP- | | | | | 4855, 5185, | |
| | binding cassette | | | | | 10130-10216 | |
| | sub-family C, | | | | | | |
| | member 7) | | | | | | |
| 173 | cystic fibrosis | 426809 | 319 | 389119 | 934 | 1451, 1838, | |
| | transmembrane | | | | | 2458, 3078, | |
| | conductance | | | | | 3698, 4318, | |
| | regulator (ATP- | | | | | 4856, 5186 | |
| | binding cassette | | | | | | |
| | sub-family C, | | | | | | |
| | member 7) | | | | | | |
| 174 | cystic fibrosis | 454343 | 320 | 403677 | 935 | 1452, 1839, | 1628 |
| | transmembrane | | | | | 2459, 3079, | |
| | conductance | | | | | 3699, 4319, | |
| | regulator (ATP- | | | | | 4857, 5187 | |
| | binding cassette | | | | | | |
| | sub-family C, | | | | | | |
| | member 7) | | | | | | |
| 175 | cystic fibrosis | 468795 | 321 | 419254 | 936 | 1453, 1840, | |
| | transmembrane | | | | | 2460, 3080, | |
| | conductance | | | | | 3700, 4320, | |
| | regulator (ATP- | | | | | 4858, 5188 | |
| | binding cassette | | | | | | |
| | sub-family C, | | | | | | |
| | member 7) | | | | | | |
| 176 | cystinosin | 381870 | 322 | 371294 | 937 | 1841, 2461, | |
| | lysosomal cystine | | | | | 3081, 3701, | |
| | transporter | | | | | 4321 | |
| 177 | cystinosin, | 46640 | 323 | 46640 | 938 | 1454, 1842, | |
| | lysosomal cystine | | | | | 2462, 3082, | |
| | transporter | | | | | 3702, 4322, | |
| | | | | | | 4859, 5189, | |
| | | | | | | 10217-10355 | |
| 178 | cystinosin, | 414524 | 324 | 395471 | 939 | 1455, 1843, | |
| | lysosomal cystine | | | | | 2463, 3083, | |
| | transporter | | | | | 3703, 4323 | |
| 179 | cystinosin, | 441220 | 325 | 411465 | 940 | 1456, 1844, | |
| | lysosomal cystine | | | | | 2464, 3084, | |
| | transporter | | | | | 3704, 4324 | |
| 180 | cystinosin, | 452111 | 326 | 408652 | 941 | 1457, 1845, | |
| | lysosomal cystine | | | | | 2465, 3085, | |
| | transporter | | | | | 3705, 4325 | |
| 181 | defensin, beta 103A | 314357 | 327 | 320951 | 942 | 1846, 2466, | 1629 |
| | | | | | | 3086, 3706, | |
| | | | | | | 4326, 4860, | |
| | | | | | | 5190 | |
| 182 | defensin, beta 103B | 318124 | 328 | 324633 | 943 | 1847, 2467, | 1630 |
| | | | | | | 3087, 3707, | |
| | | | | | | 4327, 4861, | |
| | | | | | | 5191, 10356- | |
| | | | | | | 10442 | |
| 183 | defensin, beta 4A | 302247 | 329 | 303532 | 944 | 1848, 2468, | 1631 |
| | | | | | | 3088, 3708, | |
| | | | | | | 4328, 4862, | |
| | | | | | | 5192, 10443- | |
| | | | | | | 10529 | |
| 184 | defensin, beta 4B | 318157 | 330 | 424598 | 945 | 1849, 2469, | 1632 |
| | | | | | | 3089, 3709, | |
| | | | | | | 4329, 4863, | |
| | | | | | | 5193 | |
| 185 | DegludecPlus; insulin aspart; insulin | | | | | | |
| | degludec | | | | | | |
| 186 | deoxyribonuclease I | 246949 | 331 | 246949 | 946 | 1850, 2470, | 1633 |
| | | | | | | 3090, 3710, | |
| | | | | | | 4330, 4864, | |
| | | | | | | 5194, 10530- | |
| | | | | | | 10616 | |
| 187 | deoxyribonuclease I | 407479 | 332 | 385905 | 947 | 1851, 2471, | 1633 |
| | | | | | | 3091, 3711, | |
| | | | | | | 4331, 4865, | |
| | | | | | | 5195 | |
| 188 | deoxyribonuclease I | 414110 | 333 | 416699 | 948 | 1852, 2472, | |
| | | | | | | 3092, 3712, | |
| | | | | | | 4332, 4866, | |
| | | | | | | 5196 | |
| 189 | dysferlin, limb | 258104 | 334 | 258104 | 949 | 1458, 1853, | |
| | girdle muscular | | | | | 2473, 3093, | |
| | dystrophy 2B | | | | | 3713, 4333, | |
| | (autosomal | | | | | 4867, 5197 | |
| | recessive) | | | | | | |
| 190 | dysferlin, limb | 394120 | 335 | 377678 | 950 | 1459, 1854, | 1634 |
| | girdle muscular | | | | | 2474, 3094, | |
| | dystrophy 2B | | | | | 3714, 4334, | |
| | (autosomal | | | | | 4868, 5198, | |
| | recessive) | | | | | 10617-10703 | |
| 191 | dysferlin, limb | 409366 | 336 | 386512 | 951 | 1460, 1855, | |
| | girdle muscular | | | | | 2475, 3095, | |
| | dystrophy 2B | | | | | 3715, 4335, | |
| | (autosomal | | | | | 4869, 5199 | |
| | recessive) | | | | | | |
| 192 | dysferlin, limb | 409582 | 337 | 386547 | 952 | 1461, 1856, | |
| | girdle muscular | | | | | 2476, 3096, | |
| | dystrophy 2B | | | | | 3716, 4336, | |
| | (autosomal | | | | | 4870, 5200 | |
| | recessive) | | | | | | |
| 193 | dysferlin, limb | 409651 | 338 | 386683 | 953 | 1462, 1857, | |
| | girdle muscular | | | | | 2477, 3097, | |
| | dystrophy 2B | | | | | 3717, 4337, | |
| | (autosomal | | | | | 4871, 5201 | |
| | recessive) | | | | | | |
| 194 | dysferlin, limb | 409744 | 339 | 386285 | 954 | 1463, 1858, | |
| | girdle muscular | | | | | 2478, 3098, | |
| | dystrophy 2B | | | | | 3718, 4338, | |
| | (autosomal | | | | | 4872, 5202 | |
| | recessive) | | | | | | |
| 195 | dysferlin, limb | 409762 | 340 | 387137 | 955 | 1464, 1859, | |
| | girdle muscular | | | | | 2479, 3099, | |
| | dystrophy 2B | | | | | 3719, 4339, | |
| | (autosomal | | | | | 4873, 5203 | |
| | recessive) | | | | | | |
| 196 | dysferlin, limb | 410020 | 341 | 386881 | 956 | 1465, 1860, | |
| | girdle muscular | | | | | 2480, 3100, | |
| | dystrophy 2B | | | | | 3720, 4340, | |
| | (autosomal | | | | | 4874, 5204 | |
| | recessive) | | | | | | |
| 197 | dysferlin, limb | 410041 | 342 | 386617 | 957 | 1466, 1861, | |
| | girdle muscular | | | | | 2481, 3101, | |
| | dystrophy 2B | | | | | 3721, 4341, | |
| | (autosomal | | | | | 4875, 5205 | |
| | recessive) | | | | | | |
| 198 | dysferlin, limb | 413539 | 343 | 407046 | 958 | 1467, 1862, | |
| | girdle muscular | | | | | 2482, 3102, | |
| | dystrophy 2B | | | | | 3722, 4342, | |
| | (autosomal | | | | | 4876, 5206 | |
| | recessive) | | | | | | |
| 199 | dysferlin, limb | 429174 | 344 | 398305 | 959 | 1468, 1863, | |
| | girdle muscular | | | | | 2483, 3103, | |
| | dystrophy 2B | | | | | 3723, 4343, | |
| | (autosomal | | | | | 4877, 5207 | |
| | recessive) | | | | | | |
| 200 | ectodysplasin A | 338901 | 345 | 340611 | 960 | 1864, 2484, | |
| | | | | | | 3104, 3724, | |
| | | | | | | 4344, 4878, | |
| | | | | | | 5208 | |
| 201 | ectodysplasin A | 374552 | 346 | 363680 | 961 | 1865, 2485, | |
| | | | | | | 3105, 3725, | |
| | | | | | | 4345, 4879, | |
| | | | | | | 5209 | |
| 202 | ectodysplasin A | 374553 | 347 | 363681 | 962 | 1866, 2486, | 1635 |
| | | | | | | 3106, 3726, | |
| | | | | | | 4346, 4880, | |
| | | | | | | 5210, 10704- | |
| | | | | | | 10790 | |
| 203 | ectodysplasin A | 525810 | 348 | 434195 | 963 | 1867, 2487, | |
| | | | | | | 3107, 3727, | |
| | | | | | | 4347, 4881, | |
| | | | | | | 5211 | |
| 204 | ectodysplasin A | 524573 | 349 | 432585 | 964 | 1868, 2488, | |
| | | | | | | 3108, 3728, | |
| | | | | | | 4348, 4882, | |
| | | | | | | 5212 | |
| 205 | ectodysplasin A | 527388 | 350 | 434861 | 965 | 1869, 2489, | |
| | | | | | | 3109, 3729, | |
| | | | | | | 4349, 4883, | |
| | | | | | | 5213 | |
| 206 | enamelin | 396073 | 351 | 379383 | 966 | 1870, 2490, | 1636 |
| | | | | | | 3110, 3730, | |
| | | | | | | 4350, 4884, | |
| | | | | | | 5214 | |
| 207 | erythropoietin | 252723 | 352 | 252723 | 967 | 1871, 2491, | 1637 |
| | | | | | | 3111, 3731, | |
| | | | | | | 4351, 4885, | |
| | | | | | | 5215, 10791- | |
| | | | | | | 11051 | |
| 208 | Exenatide | | | | 968 | 1872, 2492, | |
| | | | | | | 3112, 3732, | |
| | | | | | | 4352, 4886, | |
| | | | | | | 5216 | |
| 209 | family with | 252530 | 353 | 252530 | 969 | 1873, 2493, | |
| | sequence | | | | | 3113, 3733, | |
| | similarity 98, | | | | | 4353 | |
| | member C | | | | | | |
| 210 | family with | 343358 | 354 | 340348 | 970 | 1874, 2494, | |
| | sequence | | | | | 3114, 3734, | |
| | similarity 98, | | | | | 4354 | |
| | member C | | | | | | |
| 211 | fibrinogen alpha | 302053 | 355 | 306361 | 971 | 1469, 1875, | |
| | chain | | | | | 2495, 3115, | |
| | | | | | | 3735, 4355, | |
| | | | | | | 11052-11190 | |
| 212 | fibrinogen alpha | 403106 | 356 | 385981 | 972 | 1470, 1876, | |
| | chain | | | | | 2496, 3116, | |
| | | | | | | 3736, 4356 | |
| 213 | fibrinogen alpha | 457487 | 357 | 407891 | 973 | 1877, 2497, | |
| | chain | | | | | 3117, 3737, | |
| | | | | | | 4357 | |
| 214 | fibrinogen beta | 302068 | 358 | 306099 | 974 | 1471, 1878, | |
| | chain | | | | | 2498, 3118, | |
| | | | | | | 3738, 4358, | |
| | | | | | | 11191-11329 | |
| 215 | fibrinogen beta | 537843 | 359 | 437727 | 975 | 1879, 2499, | |
| | chain | | | | | 3119, 3739, | |
| | | | | | | 4359 | |
| 216 | fibrinogen gamma | 336098 | 360 | 336829 | 976 | 1472, 1880, | |
| | chain | | | | | 2500, 3120, | |
| | | | | | | 3740, 4360, | |
| | | | | | | 11330-11468 | |
| 217 | fibrinogen gamma | 404648 | 361 | 384860 | 977 | 1473, 1881, | |
| | chain | | | | | 2501, 3121, | |
| | | | | | | 3741, 4361 | |
| 218 | fibroblast growth | 222157 | 362 | 222157 | 978 | 1474, 1882, | |
| | factor 21 | | | | | 2502, 3122, | |
| | | | | | | 3742, 4362 | |
| 219 | fibroblast growth | 593756 | 363 | 471477 | 979 | 1883, 2503, | |
| | factor 21 | | | | | 3123, 3743, | |
| | | | | | | 4363, 11469- | |
| | | | | | | 11555 | |
| 220 | fibronectin type III | 373470 | 364 | 362569 | 980 | 1884, 2504, | |
| | domain containing 5 | | | | | 3124, 3744, | |
| | | | | | | 4364, | |
| 221 | fibronectin type III | 373471 | 365 | 362570 | 981 | 1885, 2505, | |
| | domain containing 5 | | | | | 3125, 3745, | |
| | | | | | | 4365, 11556- | |
| | | | | | | 11642 | |
| 222 | follicle stimulating | 254122 | 366 | 254122 | 982 | 1886, 2506, | |
| | hormone, beta | | | | | 3126, 3746, | |
| | polypeptide | | | | | 4366, 4887, | |
| | | | | | | 5217, 11643- | |
| | | | | | | 11729 | |
| 223 | follicle stimulating | 417547 | 367 | 416606 | 983 | 1887, 2507, | |
| | hormone, beta | | | | | 3127, 3747, | |
| | polypeptide | | | | | 4367, 4888, | |
| | | | | | | 5218 | |
| 224 | follicle stimulating | 533718 | 368 | 433424 | 984 | 1888, 2508, | |
| | hormone, beta | | | | | 3128, 3748, | |
| | polypeptide | | | | | 4368, 4889, | |
| | | | | | | 5219 | |
| 225 | fumarylacetoacetate | 261755 | 369 | 261755 | 985 | 1475, 1889, | |
| | hydrolase | | | | | 2509, 3129, | |
| | (fumarylacetoacetase) | | | | | 3749, 4369 | |
| 226 | fumarylacetoacetate | 407106 | 370 | 385080 | 986 | 1890, 2510, | |
| | hydrolase | | | | | 3130, 3750, | |
| | (fumarylacetoacetase) | | | | | 4370, 11730- | |
| | | | | | | 11868 | |
| 227 | fumarylacetoacetate | 561421 | 371 | 453347 | 987 | 1891, 2511, | |
| | hydrolase | | | | | 3131, 3751, | |
| | (fumarylacetoacetase) | | | | | 4371 | |
| 228 | galactokinase 1 | 225614 | 372 | 225614 | 988 | 1892, 2512, | |
| | | | | | | 3132, 3752, | |
| | | | | | | 4372 | |
| 229 | galactokinase 1 | 375188 | 373 | 364334 | 989 | 1893, 2513, | |
| | | | | | | 3133, 3753, | |
| | | | | | | 4373 | |
| 230 | galactokinase 1 | 437911 | 374 | 406305 | 990 | 1894, 2514, | |
| | | | | | | 3134, 3754, | |
| | | | | | | 4374 | |
| 231 | galactokinase 1 | 588479 | 375 | 465930 | 991 | 1895, 2515, | |
| | | | | | | 3135, 3755, | |
| | | | | | | 4375, 11869- | |
| | | | | | | 11955 | |
| 232 | galactosamine (N- | 268695 | 376 | 268695 | 992 | 1476, 1896, | 1638 |
| | acetyl)-6-sulfate | | | | | 2516, 3136, | |
| | sulfatase | | | | | 3756, 4376, | |
| | | | | | | 4890, 5220, | |
| | | | | | | 11956-12042 | |
| 233 | galactosamine (N- | 439266 | 377 | 402127 | 993 | 1897, 2517, | |
| | acetyl)-6-sulfate | | | | | 3137, 3757, | |
| | sulfatase | | | | | 4377, 4891, | |
| | | | | | | 5221 | |
| 234 | galactosamine (N- | 542788 | 378 | 438197 | 994 | 1477, 1898, | |
| | acetyl)-6-sulfate | | | | | 2518, 3138, | |
| | sulfatase | | | | | 3758, 4378, | |
| | | | | | | 4892, 5222 | |
| 235 | galactose-1- | 378842 | 379 | 368119 | 995 | 1899, 2519, | |
| | phosphate | | | | | 3139, 3759, | |
| | uridylyltransferase | | | | | 4379, 12043- | |
| | | | | | | 12181 | |
| 236 | galactose-1- | 450095 | 380 | 401956 | 996 | 1900, 2520, | |
| | phosphate | | | | | 3140, 3760, | |
| | uridylyltransferase | | | | | 4380 | |
| 237 | galactose-1- | 554550 | 381 | 451435 | 997 | 1901, 2521, | |
| | phosphate | | | | | 3141, 3761, | |
| | uridylyltransferase | | | | | 4381 | |
| 238 | galactosidase, | 218516 | 382 | 218516 | 998 | 1902, 2522, | 1639 |
| | alpha | | | | | 3142, 3762, | |
| | | | | | | 4382, 12182- | |
| | | | | | | 12268 | |
| 239 | Galectin 3 | | 383 | | 999 | | 1640 |
| | inhibitor (A9) | | | | | | |
| 240 | Galectin 3 | | 384 | | 1000 | | 1641 |
| | inhibitor (C12) | | | | | | |
| 241 | glial cell derived | 326524 | 385 | 317145 | 1001 | 1903, 2523, | |
| | neurotrophic | | | | | 3143, 3763, | |
| | factor | | | | | 4383, 4893, | |
| | | | | | | 5223 | |
| 242 | glial cell derived | 344622 | 386 | 339703 | 1002 | 1904, 2524, | |
| | neurotrophic | | | | | 3144, 3764, | |
| | factor | | | | | 4384, 4894, | |
| | | | | | | 5224 | |
| 243 | glial cell derived | 427982 | 387 | 409007 | 1003 | 1905, 2525, | 1642 |
| | neurotrophic | | | | | 3145, 3765, | |
| | factor | | | | | 4385, 4895, | |
| | | | | | | 5225, 12269- | |
| | | | | | | 12355 | |
| 244 | glial cell derived | 502572 | 388 | 423557 | 1004 | 1906, 2526, | |
| | neurotrophic | | | | | 3146, 3766, | |
| | factor | | | | | 4386, 4896, | |
| | | | | | | 5226 | |
| 245 | glial cell derived | 510177 | 389 | 424592 | 1005 | 1907, 2527, | |
| | neurotrophic | | | | | 3147, 3767, | |
| | factor | | | | | 4387, 4897, | |
| | | | | | | 5227 | |
| 246 | glial cell derived | 515058 | 390 | 425928 | 1006 | 1908, 2528, | |
| | neurotrophic | | | | | 3148, 3768, | |
| | factor | | | | | 4388, 4898, | |
| | | | | | | 5228 | |
| 247 | glial cell derived | 381826 | 391 | 371248 | 1007 | 1909, 2529, | |
| | neurotrophic | | | | | 3149, 3769, | |
| | factor | | | | | 4389, 4899, | |
| | | | | | | 5229 | |
| 248 | GLP-1 Fc; | | | | | | |
| | dulaglutide | | | | | | |
| 249 | glucagon | 375497 | 392 | 364647 | 1008 | 1910, 2530, | 1643 |
| | | | | | | 3150, 3770, | |
| | | | | | | 4390, 4900, | |
| | | | | | | 5230 | |
| 250 | glucagon | 418842 | 393 | 387662 | 1009 | 1911, 2531, | 1643 |
| | | | | | | 3151, 3771, | |
| | | | | | | 4391, 4901, | |
| | | | | | | 5231, 12356- | |
| | | | | | | 12703 | |
| 251 | glucan (1,4-alpha-), | 264326 | 394 | 264326 | 1010 | 1912, 2532, | |
| | branching | | | | | 3152, 3772, | |
| | enzyme 1 | | | | | 4392 | |
| 252 | glucan (1,4-alpha-), | 429644 | 395 | 410833 | 1011 | 1478, 1913, | |
| | branching | | | | | 2533, 3153, | |
| | enzyme 1 | | | | | 3773, 4393, | |
| | | | | | | 12704-12842 | |
| 253 | glucan (1,4-alpha-), | 536832 | 396 | 445365 | 1012 | 1914, 2534, | |
| | branching | | | | | 3154, 3774, | |
| | enzyme 1 | | | | | 4394 | |
| 254 | glucose-6- | 253801 | 397 | 253801 | 1013 | 1915, 2535, | |
| | phosphatase, | | | | | 3155, 3775, | |
| | catalytic subunit | | | | | 4395, 12843- | |
| | | | | | | 12981 | |
| 255 | glucosidase, alpha; | 302262 | 398 | 305692 | 1014 | 1916, 2536, | 1644 |
| | acid | | | | | 3156, 3776, | |
| | | | | | | 4396, 4902, | |
| | | | | | | 5232, 12982- | |
| | | | | | | 13155 | |
| 256 | glucosidase, alpha; | 390015 | 399 | 374665 | 1015 | 1917, 2537, | 1644 |
| | acid | | | | | 3157, 3777, | |
| | | | | | | 4397, 4903, | |
| | | | | | | 5233 | |
| 257 | glucosidase, beta, | 327247 | 400 | 314508 | 1016 | 1918, 2538, | 1645 |
| | acid | | | | | 3158, 3778, | |
| | | | | | | 4398, 4904, | |
| | | | | | | 5234 | |
| 258 | glucosidase, beta, | 368373 | 401 | 357357 | 1017 | 1919, 2539, | 1645 |
| | acid | | | | | 3159, 3779, | |
| | | | | | | 4399, 4905, | |
| | | | | | | 5235 | |
| 259 | glucosidase, beta, | 402928 | 402 | 385813 | 1018 | 1920, 2540, | 1645 |
| | acid | | | | | 3160, 3780, | |
| | | | | | | 4400, 4906, | |
| | | | | | | 5236 | |
| 260 | glucosidase, beta, | 427500 | 403 | 402577 | 1019 | 1921, 2541, | 1645 |
| | acid | | | | | 3161, 3781, | |
| | | | | | | 4401, 4907, | |
| | | | | | | 5237 | |
| 261 | glucosidase, beta, | 428024 | 404 | 397986 | 1020 | 1922, 2542, | 1645 |
| | acid | | | | | 3162, 3782, | |
| | | | | | | 4402, 4908, | |
| | | | | | | 5238 | |
| 262 | glucosidase, beta, | 536555 | 405 | 446457 | 1021 | 1923, 2543, | 1645 |
| | acid | | | | | 3163, 3783, | |
| | | | | | | 4403, 4909, | |
| | | | | | | 5239 | |
| 263 | glucosidase, beta, | 536770 | 406 | 445560 | 1022 | 1924, 2544, | 1645 |
| | acid | | | | | 3164, 3784, | |
| | | | | | | 4404, 4910, | |
| | | | | | | 5240 | |
| 264 | glycogen synthase | 261195 | 407 | 261195 | 1023 | 1925, 2545, | |
| | 2 (liver) | | | | | 3165, 3785, | |
| | | | | | | 4405, 13156- | |
| | | | | | | 13242 | |
| 265 | glycoprotein | 369582 | 408 | 358595 | 1024 | 1926, 2546, | 1646 |
| | hormones, alpha | | | | | 3166, 3786, | |
| | polypeptide | | | | | 4406, 4911, | |
| | | | | | | 5241, 13243- | |
| | | | | | | 13329 | |
| 266 | GP2013; | | | | | | |
| | rituximab | | | | | | |
| 267 | Granulysin 9 kDa | | | | | 1479 | |
| | (non-secreted) | | | | | | |
| 268 | Granulysin 9 kDa | | | | | 1480 | |
| | (secreted) | | | | | | |
| 269 | growth hormone 1 | 323322 | 409 | 312673 | 1025 | 1927, 2547, | 1647 |
| | | | | | | 3167, 3787, | |
| | | | | | | 4407, 4912, | |
| | | | | | | 5242, 13330- | |
| | | | | | | 13416 | |
| 270 | growth hormone 1 | 342364 | 410 | 339278 | 1026 | 1928, 2548, | 1647 |
| | | | | | | 3168, 3788, | |
| | | | | | | 4408, 4913, | |
| | | | | | | 5243 | |
| 271 | growth hormone 1 | 351388 | 411 | 343791 | 1027 | 1929, 2549, | 1647 |
| | | | | | | 3169, 3789, | |
| | | | | | | 4409, 4914, | |
| | | | | | | 5244 | |
| 272 | growth hormone 1 | 458650 | 412 | 408486 | 1028 | 1930, 2550, | 1647 |
| | | | | | | 3170, 3790, | |
| | | | | | | 4410, 4915, | |
| | | | | | | 5245 | |
| 273 | growth hormone 2 | 332800 | 413 | 333157 | 1029 | 1931, 2551, | |
| | | | | | | 3171, 3791, | |
| | | | | | | 4411, 4916, | |
| | | | | | | 5246 | |
| 274 | growth hormone 2 | 423893 | 414 | 409294 | 1030 | 1932, 2552, | |
| | | | | | | 3172, 3792, | |
| | | | | | | 4412, 4917, | |
| | | | | | | 5247 | |
| 275 | growth hormone 2 | 449787 | 415 | 410618 | 1031 | 1933, 2553, | |
| | | | | | | 3173, 3793, | |
| | | | | | | 4413, 4918, | |
| | | | | | | 5248 | |
| 276 | growth hormone 2 | 456543 | 416 | 394122 | 1032 | 1934, 2554, | |
| | | | | | | 3174, 3794, | |
| | | | | | | 4414, 4919, | |
| | | | | | | 5249 | |
| 277 | GTP | 395514 | 417 | 378890 | 1033 | 1935, 2555, | 1648 |
| | cyclohydrolase 1 | | | | | 3175, 3795, | |
| | | | | | | 4415, 4920, | |
| | | | | | | 5250, 13417- | |
| | | | | | | 13503 | |
| 278 | GTP | 395524 | 418 | 378895 | 1034 | 1936, 2556, | |
| | cyclohydrolase 1 | | | | | 3176, 3796, | |
| | | | | | | 4416, 4921, | |
| | | | | | | 5251 | |
| 279 | GTP | 491895 | 419 | 419045 | 1035 | 1937, 2557, | 1649 |
| | cyclohydrolase 1 | | | | | 3177, 3797, | |
| | | | | | | 4417, 4922, | |
| | | | | | | 5252 | |
| 280 | GTP | 536224 | 420 | 445246 | 1036 | 1938, 2558, | |
| | cyclohydrolase 1 | | | | | 3178, 3798, | |
| | | | | | | 4418, 4923, | |
| | | | | | | 5253 | |
| 281 | GTP | 543643 | 421 | 444011 | 1037 | 1939, 2559, | |
| | cyclohydrolase 1 | | | | | 3179, 3799, | |
| | | | | | | 4419, 4924, | |
| | | | | | | 5254 | |
| 282 | hemochromatosis | 309234 | 422 | 311698 | 1038 | 1940, 2560, | |
| | | | | | | 3180, 3800, | |
| | | | | | | 4420 | |
| 283 | hemochromatosis | 317896 | 423 | 313776 | 1039 | 1941, 2561, | |
| | | | | | | 3181, 3801, | |
| | | | | | | 4421 | |
| 284 | hemochromatosis | 336625 | 424 | 337819 | 1040 | 1942, 2562, | |
| | | | | | | 3182, 3802, | |
| | | | | | | 4422 | |
| 285 | hemochromatosis | 349999 | 425 | 259699 | 1041 | 1943, 2563, | |
| | | | | | | 3183, 3803, | |
| | | | | | | 4423 | |
| 286 | hemochromatosis | 352392 | 426 | 315936 | 1042 | 1944, 2564, | |
| | | | | | | 3184, 3804, | |
| | | | | | | 4424 | |
| 287 | hemochromatosis | 353147 | 427 | 312342 | 1043 | 1945, 2565, | |
| | | | | | | 3185, 3805, | |
| | | | | | | 4425 | |
| 288 | hemochromatosis | 357618 | 428 | 417404 | 1044 | 1946, 2566, | |
| | | | | | | 3186, 3806, | |
| | | | | | | 4426 | |
| 289 | hemochromatosis | 397022 | 429 | 380217 | 1045 | 1947, 2567, | |
| | | | | | | 3187, 3807, | |
| | | | | | | 4427 | |
| 290 | hemochromatosis | 461397 | 430 | 420802 | 1046 | 1948, 2568, | |
| | | | | | | 3188, 3808, | |
| | | | | | | 4428 | |
| 291 | hemochromatosis | 470149 | 431 | 419725 | 1047 | 1949, 2569, | |
| | | | | | | 3189, 3809, | |
| | | | | | | 4429 | |
| 292 | hemochromatosis | 488199 | 432 | 420559 | 1048 | 1950, 2570, | |
| | | | | | | 3190, 3810, | |
| | | | | | | 4430 | |
| 293 | hemochromatosis | 535098 | 433 | 445872 | 1049 | 1951, 2571, | |
| | | | | | | 3191, 3811, | |
| | | | | | | 4431 | |
| 294 | hemochromatosis | 539147 | 434 | 445098 | 1050 | 1952, 2572, | |
| | | | | | | 3192, 3812, | |
| | | | | | | 4432 | |
| 295 | hemochromatosis | 336751 | 435 | 337014 | 1051 | 1481, 1953, | |
| | type 2 (juvenile) | | | | | 2573, 3193, | |
| | | | | | | 3813, 4433, | |
| | | | | | | 4925, 5255, | |
| | | | | | | 13504-13590 | |
| 296 | hemochromatosis | 357836 | 436 | 350495 | 1052 | 1482, 1954, | |
| | type 2 (juvenile) | | | | | 2574, 3194, | |
| | | | | | | 3814, 4434, | |
| | | | | | | 4926, 5256 | |
| 297 | hemochromatosis | 421822 | 437 | 411863 | 1053 | 1483, 1955, | |
| | type 2 (juvenile) | | | | | 2575, 3195, | |
| | | | | | | 3815, 4435, | |
| | | | | | | 4927, 5257 | |
| 298 | hemochromatosis | 475797 | 438 | 425716 | 1054 | 1484, 1956, | |
| | type 2 (juvenile) | | | | | 2576, 3196, | |
| | | | | | | 3816, 4436, | |
| | | | | | | 4928, 5258 | |
| 299 | hemochromatosis | 497365 | 439 | 421820 | 1055 | 1957, 2577, | |
| | type 2 (juvenile) | | | | | 3197, 3817, | |
| | | | | | | 4437, 4929, | |
| | | | | | | 5259 | |
| 300 | hemochromatosis | 577520 | 440 | 463276 | 1056 | 1958, 2578, | |
| | type 2 (juvenile) | | | | | 3198, 3818, | |
| | | | | | | 4438 | |
| 301 | hemochromatosis | 580693 | 441 | 464413 | 1057 | 1959, 2579, | |
| | type 2 (juvenile) | | | | | 3199, 3819, | |
| | | | | | | 4439 | |
| 302 | hepatocyte growth | 222390 | 442 | 222390 | 1058 | 1960, 2580, | |
| | factor (hepapoietin | | | | | 3200, 3820, | |
| | A; scatter factor) | | | | | 4440, 13591- | |
| | | | | | | 13677 | |
| 303 | hepatocyte growth | 354224 | 443 | 346164 | 1059 | 1961, 2581, | |
| | factor (hepapoietin | | | | | 3201, 3821, | |
| | A; scatter factor) | | | | | 4441 | |
| 304 | hepatocyte growth | 394769 | 444 | 378250 | 1060 | 1962, 2582, | |
| | factor (hepapoietin | | | | | 3202, 3822, | |
| | A; scatter factor) | | | | | 4442 | |
| 305 | hepatocyte growth | 412881 | 445 | 396307 | 1061 | 1963, 2583, | |
| | factor (hepapoietin | | | | | 3203, 3823, | |
| | A; scatter factor) | | | | | 4443 | |
| 306 | hepatocyte growth | 421558 | 446 | 388592 | 1062 | 1964, 2584, | |
| | factor (hepapoietin | | | | | 3204, 3824, | |
| | A; scatter factor) | | | | | 4444 | |
| 307 | hepatocyte growth | 423064 | 447 | 413829 | 1063 | 1965, 2585, | |
| | factor (hepapoietin | | | | | 3205, 3825, | |
| | A; scatter factor) | | | | | 4445 | |
| 308 | hepatocyte growth | 444829 | 448 | 389854 | 1064 | 1966, 2586, | |
| | factor (hepapoietin | | | | | 3206, 3826, | |
| | A; scatter factor) | | | | | 4446 | |
| 309 | hepatocyte growth | 453411 | 449 | 408270 | 1065 | 1967, 2587, | |
| | factor (hepapoietin | | | | | 3207, 3827, | |
| | A; scatter factor) | | | | | 4447 | |
| 310 | hepatocyte growth | 457544 | 450 | 391238 | 1066 | 1968, 2588, | |
| | factor (hepapoietin | | | | | 3208, 3828, | |
| | A; scatter factor) | | | | | 4448 | |
| 311 | hepcidin | 222304 | 451 | 222304 | 1067 | 14851969, | |
| | antimicrobial | | | | | 2589, 3209, | |
| | peptide | | | | | 3829, 4449 | |
| 312 | hepcidin | 598398 | 452 | 471894 | 1068 | 1970, 2590, | |
| | antimicrobial | | | | | 3210, 3830, | |
| | peptide | | | | | 4450, 13678- | |
| | | | | | | 13764 | |
| 313 | Herceptin Heavy | | | | 1069 | 1971, 2591, | |
| | Chain | | | | | 3211, 3831, | |
| | | | | | | 4451, 4930, | |
| | | | | | | 5260 | |
| 314 | Herceptin Light | | | | 1070 | 1972, 2592, | |
| | Chain | | | | | 3212, 3832, | |
| | | | | | | 4452, 4931, | |
| | | | | | | 5261 | |
| 315 | hypoxanthine | 298556 | 453 | 298556 | 1071 | 1486, 1973, | 1650 |
| | phosphoribosyl- | | | | | 2593, 3213, | |
| | transferase 1 | | | | | 3833, 4453, | |
| | | | | | | 4932, 5262, | |
| | | | | | | 13765-13851 | |
| 316 | hypoxanthine | 370796 | 454 | 359832 | 1072 | 1974, 2594, | |
| | phosphoribosyl- | | | | | 3214, 3834, | |
| | transferase 1 | | | | | 4454, 4933, | |
| | | | | | | 5263 | |
| 317 | IDegLira; insulin | | | | | | |
| | degludec; | | | | | | |
| | liraglutide | | | | | | |
| 318 | iduronate 2- | 340855 | 455 | 339801 | 1073 | 1975, 2595, | 1651 |
| | sulfatase | | | | | 3215, 3835, | |
| | | | | | | 4455, 4934, | |
| | | | | | | 5264 | |
| 319 | iduronate 2- | 370441 | 456 | 359470 | 1074 | 1976, 2596, | 1651 |
| | sulfatase | | | | | 3216, 3836, | |
| | | | | | | 4456, 4935, | |
| | | | | | | 5265 | |
| 320 | iduronate 2- | 370443 | 457 | 359472 | 1075 | 1977, 2597, | 1651 |
| | sulfatase | | | | | 3217, 3837, | |
| | | | | | | 4457, 4936, | |
| | | | | | | 5266 | |
| 321 | iduronate 2- | 428056 | 458 | 390241 | 1076 | 1978, 2598, | 1651 |
| | sulfatase | | | | | 3218, 3838, | |
| | | | | | | 4458, 4937, | |
| | | | | | | 5267 | |
| 322 | iduronate 2- | 521702 | 459 | 429745 | 1077 | 1979, 2599, | 1651 |
| | sulfatase | | | | | 3219, 3839, | |
| | | | | | | 4459, 4938, | |
| | | | | | | 5268 | |
| 323 | iduronate 2- | 537071 | 460 | 440324 | 1078 | 1980, 2600, | 1651 |
| | sulfatase | | | | | 3220, 3840, | |
| | | | | | | 4460, 4939, | |
| | | | | | | 5269 | |
| 324 | iduronate 2- | 541269 | 461 | 441261 | 1079 | 1981, 2601, | 1651 |
| | sulfatase | | | | | 3221, 3841, | |
| | | | | | | 4461, 4940, | |
| | | | | | | 5270 | |
| 325 | iduronidase, alpha- | 247933 | 462 | 247933 | 1080 | 1982, 2602, | 1652 |
| | L- | | | | | 3222, 3842, | |
| | | | | | | 4462, 4941, | |
| | | | | | | 5271, 13852- | |
| | | | | | | 13938 | |
| 326 | iduronidase, alpha- | 453894 | 463 | 396458 | 1081 | 1983, 2603, | 1652 |
| | L- | | | | | 3223, 3843, | |
| | | | | | | 4463, 4942, | |
| | | | | | | 5272 | |
| 327 | IgM Heavy | | | | | | |
| 328 | IgM Light | | | | | | |
| 329 | INS-IGF2 | 397270 | 464 | 380440 | 1082 | 1984, 2604, | |
| | readthrough | | | | | 3224, 3844, | |
| | | | | | | 4464, 4943, | |
| | | | | | | 5273 | |
| 330 | insulin | 250971 | 465 | 250971 | 1083 | 1985, 2605, | 1653 |
| | | | | | | 3225, 3845, | |
| | | | | | | 4465, 4944, | |
| | | | | | | 5274, 13939- | |
| | | | | | | 14286 | |
| 331 | insulin | 381330 | 466 | 370731 | 1084 | 1986, 2606, | 1653 |
| | | | | | | 3226, 3846, | |
| | | | | | | 4466, 4945, | |
| | | | | | | 5275 | |
| 332 | insulin | 397262 | 467 | 380432 | 1085 | 1987, 2607, | 1653 |
| | | | | | | 3227, 3847, | |
| | | | | | | 4467, 4946, | |
| | | | | | | 5276, 14287- | |
| | | | | | | 14373 | |
| 333 | insulin | 512523 | 468 | 424008 | 1086 | 1988, 2608, | |
| | | | | | | 3228, 3848, | |
| | | | | | | 4468, 4947, | |
| | | | | | | 5277 | |
| 334 | Insulin Aspart | | | | 1087 | 1989, 2609, | |
| | | | | | | 3229, 3849, | |
| | | | | | | 4469, 4948, | |
| | | | | | | 5278 | |
| 335 | Insulin Glargine | | | | 1088 | 1990, 2610, | |
| | | | | | | 3230, 3850, | |
| | | | | | | 4470, 4949, | |
| | | | | | | 5279 | |
| 336 | Insulin Glulisine | | | | 1089 | 1991, 2611, | |
| | | | | | | 3231, 3851, | |
| | | | | | | 4471, 4950, | |
| | | | | | | 5280 | |
| 337 | Insulin Lispro | | | | 1090 | 1992, 2612, | |
| | | | | | | 3232, 3852, | |
| | | | | | | 4472, 4951, | |
| | | | | | | 5281 | |
| 338 | interferon, alpha 10 | 357374 | 469 | 369566 | 1091 | 1993, 2613, | |
| | | | | | | 3233, 3853, | |
| | | | | | | 4473, 4952, | |
| | | | | | | 5282 | |
| 339 | interferon, alpha 13 | 449498 | 470 | 394494 | 1092 | 1994, 2614, | |
| | | | | | | 3234, 3854, | |
| | | | | | | 4474, 4953, | |
| | | | | | | 5283 | |
| 340 | interferon, alpha 14 | 380222 | 471 | 369571 | 1093 | 1995, 2615, | |
| | | | | | | 3235, 3855, | |
| | | | | | | 4475, 4954, | |
| | | | | | | 5284 | |
| 341 | interferon, alpha 16 | 380216 | 472 | 369564 | 1094 | 1996, 2616, | |
| | | | | | | 3236, 3856, | |
| | | | | | | 4476, 4955, | |
| | | | | | | 5285 | |
| 342 | interferon, alpha 17 | 413767 | 473 | 411940 | 1095 | 1997, 2617, | |
| | | | | | | 3237, 3857, | |
| | | | | | | 4477, 4956, | |
| | | | | | | 5286 | |
| 343 | interferon, alpha 2 | 380206 | 474 | 369554 | 1096 | 1998, 2618, | 1654 |
| | | | | | | 3238, 3858, | |
| | | | | | | 4478, 4957, | |
| | | | | | | 5287, 14374- | |
| | | | | | | 14460 | |
| 344 | interferon, alpha 21 | 380225 | 475 | 369574 | 1097 | 1999, 2619, | |
| | | | | | | 3239, 3859, | |
| | | | | | | 4479, 4958, | |
| | | | | | | 5288 | |
| 345 | interferon, alpha 4 | 421715 | 476 | 412897 | 1098 | 2000, 2620, | |
| | | | | | | 3240, 3860, | |
| | | | | | | 4480, 4959, | |
| | | | | | | 5289 | |
| 346 | interferon, alpha 5 | 259555 | 477 | 259555 | 1099 | 2001, 2621, | |
| | | | | | | 3241, 3861, | |
| | | | | | | 4481, 4960, | |
| | | | | | | 5290 | |
| 347 | interferon, alpha 6 | 380210 | 478 | 369558 | 1100 | 2002, 2622, | |
| | | | | | | 3242, 3862, | |
| | | | | | | 4482, 4961, | |
| | | | | | | 5291 | |
| 348 | interferon, alpha 7 | 239347 | 479 | 239347 | 1101 | 2003, 2623, | |
| | | | | | | 3243, 3863, | |
| | | | | | | 4483, 4962, | |
| | | | | | | 5292 | |
| 349 | interferon, alpha 8 | 380205 | 480 | 369553 | 1102 | 2004, 2624, | |
| | | | | | | 3244, 3864, | |
| | | | | | | 4484, 4963, | |
| | | | | | | 5293 | |
| 350 | interferon, beta 1, | 380232 | 481 | 369581 | 1103 | 2005, 2625, | 1655 |
| | fibroblast | | | | | 3245, 3865, | |
| | | | | | | 4485, 4964, | |
| | | | | | | 5294, 14461- | |
| | | | | | | 14547 | |
| 351 | interleukin 10 | 423557 | 482 | 412237 | 1104 | 1487, 2006, | |
| | | | | | | 2626, 3246, | |
| | | | | | | 3866, 4486, | |
| | | | | | | 14548-14634 | |
| 352 | interleukin 21 | 264497 | 483 | 264497 | 1105 | 2007, 2627, | |
| | | | | | | 3247, 3867, | |
| | | | | | | 4487, 14635- | |
| | | | | | | 14721 | |
| 353 | interleukin 7 | 263851 | 484 | 263851 | 1106 | 1488, 2008, | 1656 |
| | | | | | | 2628, 3248, | |
| | | | | | | 3868, 4488, | |
| | | | | | | 4965, 5295, | |
| | | | | | | 14722-14860 | |
| 354 | interleukin 7 | 379113 | 485 | 368408 | 1107 | 1489, 2009, | 1656 |
| | | | | | | 2629, 3249, | |
| | | | | | | 3869, 4489, | |
| | | | | | | 4966, 5296 | |
| 355 | interleukin 7 | 379114 | 486 | 368409 | 1108 | 2010, 2630, | |
| | | | | | | 3250, 3870, | |
| | | | | | | 4490, 4967, | |
| | | | | | | 5297 | |
| 356 | interleukin 7 | 518982 | 487 | 430272 | 1109 | 2011, 2631, | |
| | | | | | | 3251, 3871, | |
| | | | | | | 4491, 4968, | |
| | | | | | | 5298 | |
| 357 | interleukin 7 | 520215 | 488 | 428364 | 1110 | 1490, 2012, | |
| | | | | | | 2632, 3252, | |
| | | | | | | 3872, 4492, | |
| | | | | | | 4969, 5299 | |
| 358 | interleukin 7 | 520269 | 489 | 427750 | 1111 | 1491, 2013, | |
| | | | | | | 2633, 3253, | |
| | | | | | | 3873, 4493, | |
| | | | | | | 4970, 5300 | |
| 359 | interleukin 7 | 520317 | 490 | 427800 | 1112 | 2014, 2634, | |
| | | | | | | 3254, 3874, | |
| | | | | | | 4494, 4971, | |
| | | | | | | 5301 | |
| 360 | interleukin 7 | 541183 | 491 | 438922 | 1113 | 1492, 2015, | |
| | | | | | | 2635, 3255, | |
| | | | | | | 3875, 4495, | |
| | | | | | | 4972, 5302 | |
| 361 | KIT ligand | 228280 | 492 | 228280 | 1114 | 2016, 2636, | |
| | | | | | | 3256, 3876, | |
| | | | | | | 4496, 14861- | |
| | | | | | | 14947 | |
| 362 | KIT ligand | 347404 | 493 | 54216 | 1115 | 2017, 2637, | |
| | | | | | | 3257, 3877, | |
| | | | | | | 4497 | |
| 363 | KIT ligand | 537835 | 494 | 438889 | 1116 | 2018, 2638, | |
| | | | | | | 3258, 3878, | |
| | | | | | | 4498 | |
| 364 | klotho | 380099 | 495 | 369442 | 1117 | 1493, 2019, | |
| | | | | | | 2639, 3259, | |
| | | | | | | 3879, 4499, | |
| | | | | | | 14948-15347 | |
| 365 | klotho | 426690 | 496 | 399513 | 1118 | 14942020, | |
| | | | | | | 2640, 3260, | |
| | | | | | | 3880, 4500 | |
| 366 | Kruppel-like | 374672 | 497 | 363804 | 1119 | 2021, 2641, | |
| | factor 4 (gut) | | | | | 3261, 3881, | |
| | | | | | | 4501 | |
| 367 | Kruppel-like | 411706 | 498 | 399921 | 1120 | 2022, 2642, | |
| | factor 4 (gut) | | | | | 3262, 3882, | |
| | | | | | | 4502 | |
| 368 | Kruppel-like | 420475 | 499 | 404922 | 1121 | 2023, 2643, | |
| | factor 4 (gut) | | | | | 3263, 3883, | |
| | | | | | | 4503 | |
| 369 | Kruppel-like | 439281 | 500 | 396294 | 1122 | 2024, 2644, | |
| | factor 4 (gut) | | | | | 3264, 3884, | |
| | | | | | | 4504 | |
| 370 | lecithin- | 264005 | 501 | 264005 | 1123 | 1495, 2025, | |
| | cholesterol | | | | | 2645, 3265, | |
| | acyltransferase | | | | | 3885, 4505, | |
| | | | | | | 15348-15434 | |
| 371 | lectin, galactoside- | 254301 | 502 | 254301 | 1124 | 2026, 2646, | |
| | binding, soluble, 3 | | | | | 3266, 3886, | |
| | | | | | | 4506, 15435- | |
| | | | | | | 15521 | |
| 372 | lin-28 homolog A | 254231 | 503 | 254231 | 1125 | 2027, 2647, | |
| | (C. elegans) | | | | | 3267, 3887, | |
| | | | | | | 4507 | |
| 373 | lin-28 homolog A | 326279 | 504 | 363314 | 1126 | 2028, 2648, | |
| | (C. elegans) | | | | | 3268, 3888, | |
| | | | | | | 4508, 15522- | |
| | | | | | | 15608 | |
| 374 | lipase A, | 282673 | 505 | 282673 | 1127 | 1496, 2029, | |
| | lysosomal acid, | | | | | 2649, 3269, | |
| | cholesterol | | | | | 3889, 4509, | |
| | esterase | | | | | 4973, 5303 | |
| 375 | lipase A, | 336233 | 506 | 337354 | 1128 | 1497, 2030, | 1657 |
| | lysosomal acid, | | | | | 2650, 3270, | |
| | cholesterol | | | | | 3890, 4510, | |
| | esterase | | | | | 4974, 5304, | |
| | | | | | | 15609-15782 | |
| 376 | lipase A, | 354621 | 507 | 360895 | 1129 | 2031, 2651, | |
| | lysosomal acid, | | | | | 3271, 3891, | |
| | cholesterol | | | | | 4511, 4975, | |
| | esterase | | | | | 5305 | |
| 377 | lipase A, | 371829 | 508 | 360894 | 1130 | 2032, 2652, | 1657 |
| | lysosomal acid, | | | | | 3272, 3892, | |
| | cholesterol | | | | | 4512, 4976, | |
| | esterase | | | | | 5306 | |
| 378 | lipase A, | 371837 | 509 | 360903 | 1131 | 1498, 2033, | |
| | lysosomal acid, | | | | | 2653, 3273, | |
| | cholesterol | | | | | 3893, 4513, | |
| | esterase | | | | | 4977, 5307 | |
| 379 | lipase A, | 425287 | 510 | 392037 | 1132 | 1499, 2034, | |
| | lysosomal acid, | | | | | 2654, 3274, | |
| | cholesterol | | | | | 3894, 4514, | |
| | esterase | | | | | 4978, 5308 | |
| 380 | lipase A, | 428800 | 511 | 388415 | 1133 | 1500, 2035, | 1657 |
| | lysosomal acid, | | | | | 2655, 3275, | |
| | cholesterol | | | | | 3895, 4515, | |
| | esterase | | | | | 4979, 5309 | |
| 381 | lipase A, | 456827 | 512 | 413019 | 1134 | 2036, 2656, | 1657 |
| | lysosomal acid, | | | | | 3276, 3896, | |
| | cholesterol | | | | | 4516, 4980, | |
| | esterase | | | | | 5310 | |
| 382 | lipase A, | 540050 | 513 | 439727 | 1135 | 2037, 2657, | |
| | lysosomal acid, | | | | | 3277, 3897, | |
| | cholesterol | | | | | 4517, 4981, | |
| | esterase | | | | | 5311 | |
| 383 | lipase A, | 541980 | 514 | 438127 | 1136 | 2038, 2658, | 1657 |
| | lysosomal acid, | | | | | 3278, 3898, | |
| | cholesterol | | | | | 4518, 4982, | |
| | esterase | | | | | 5312 | |
| 384 | lipase A, | 542307 | 515 | 437564 | 1137 | 1501, 2039, | 1657 |
| | lysosomal acid, | | | | | 2659, 3279, | |
| | cholesterol | | | | | 3899, 4519, | |
| | esterase | | | | | 4983, 5313 | |
| 385 | lipoprotein lipase | 311322 | 516 | 309757 | 1138 | 1502, 2040, | |
| | | | | | | 2660, 3280, | |
| | | | | | | 3900, 4520, | |
| | | | | | | 4984, 5314, | |
| | | | | | | 15783-15869 | |
| 386 | lipoprotein lipase | 520959 | 517 | 428496 | 1139 | 1503, 2041, | |
| | | | | | | 2661, 3281, | |
| | | | | | | 3901, 4521, | |
| | | | | | | 4985, 5315 | |
| 387 | lipoprotein lipase | 522701 | 518 | 428557 | 1140 | 1504, 2042, | |
| | | | | | | 2662, 3282, | |
| | | | | | | 3902, 4522, | |
| | | | | | | 4986, 5316 | |
| 388 | lipoprotein lipase | 524029 | 519 | 428237 | 1141 | 1505, 2043, | |
| | | | | | | 2663, 3283, | |
| | | | | | | 3903, 4523, | |
| | | | | | | 4987, 5317 | |
| 389 | lipoprotein lipase | 535763 | 520 | 438606 | 1142 | 2044, 2664, | |
| | | | | | | 3284, 3904, | |
| | | | | | | 4524, 4988, | |
| | | | | | | 5318 | |
| 390 | lipoprotein lipase | 538071 | 521 | 439407 | 1143 | 2045, 2665, | |
| | | | | | | 3285, 3905, | |
| | | | | | | 4525, 4989, | |
| | | | | | | 5319 | |
| 391 | liraglutide native | | | | | 1506 | |
| | 7-37 | | | | | | |
| 392 | liraglutide native | | | | | 1507 | |
| | 7-37-A8G | | | | | | |
| 393 | liraglutide native | | | | | 1508 | |
| | 7-37-A8G-10X | | | | | | |
| 394 | liraglutide; GLP1; | | | | | 1509 | |
| | Victoza | | | | | | |
| 395 | LL-37; | | | | 1144 | | 1620 |
| | Cathelicidin anti- | | | | | | |
| | microbial peptide | | | | | | |
| 396 | low density | 455727 | 522 | 397829 | 1145 | 1510, 2046, | |
| | lipoprotein | | | | | 2666, 3286, | |
| | receptor | | | | | 3906, 4526 | |
| 397 | low density | 535915 | 523 | 440520 | 1146 | 1511, 2047, | |
| | lipoprotein | | | | | 2667, 3287, | |
| | receptor | | | | | 3907, 4527 | |
| 398 | low density | 545707 | 524 | 437639 | 1147 | 1512, 2048, | |
| | lipoprotein | | | | | 2668, 3288, | |
| | receptor | | | | | 3908, 4528 | |
| 399 | low density | 558013 | 525 | 453346 | 1148 | 1513, 2049, | |
| | lipoprotein | | | | | 2669, 3289, | |
| | receptor | | | | | 3909, 4529 | |
| 400 | low density | 558518 | 526 | 454071 | 1149 | 1514, 2050, | |
| | lipoprotein | | | | | 2670, 3290, | |
| | receptor | | | | | 3910, 4530, | |
| | | | | | | 15870-16478 | |
| 401 | low density | 561343 | 527 | 454147 | 1150 | 2051, 2671, | |
| | lipoprotein | | | | | 3291, 3911, | |
| | receptor | | | | | 4531 | |
| 402 | low density | 252444 | 528 | 252444 | 1151 | 2052, 2672, | |
| | lipoprotein | | | | | 3292, 3912, | |
| | receptor | | | | | 4532 | |
| 403 | luteinizing | 221421 | 529 | 221421 | 1152 | 2053, 2673, | |
| | hormone beta | | | | | 3293, 3913, | |
| | polypeptide | | | | | 4533 | |
| 404 | luteinizing | 391870 | 530 | 375743 | 1153 | 2054, 2674, | |
| | hormone beta | | | | | 3294, 3914, | |
| | polypeptide | | | | | 4534, 4990, | |
| | | | | | | 5320, | |
| 405 | LY2963016; | | | | | | |
| | insulin glargine | | | | | | |
| 406 | Ly6/neurotoxin 1 | 317543 | 531 | 319846 | 1154 | 2055, 2675, | |
| | | | | | | 3295, 3915, | |
| | | | | | | 4535 | |
| 407 | MabThera SC; | | | | | | |
| | rituximab | | | | | | |
| 408 | mannosidase | 221363 | 532 | 221363 | 1155 | 2056, 2676, | |
| | alpha class 2B | | | | | 3296, 3916, | |
| | member 1 | | | | | 4536 | |
| 409 | mannosidase, | 433513 | 533 | 390583 | 1156 | 1515, 2057, | |
| | alpha, class 2B, | | | | | 2677, 3297, | |
| | member 1 | | | | | 3917, 4537 | |
| 410 | mannosidase, | 456935 | 534 | 395473 | 1157 | 1516, 2058, | |
| | alpha, class 2B, | | | | | 2678, 3298, | |
| | member 1 | | | | | 3918, 4538, | |
| | | | | | | 16479-16565 | |
| 411 | mannosidase, | 536796 | 535 | 438266 | 1158 | 2059, 2679, | |
| | alpha, class 2B, | | | | | 3299, 3919, | |
| | member 1 | | | | | 4539 | |
| 412 | meteorin glial cell | 568223 | 536 | 455068 | 1159 | 2060, 2680, | |
| | differentiation | | | | | 3300, 3920, | |
| | regulator | | | | | 4540, 16566- | |
| | | | | | | 16652 | |
| 413 | meteorin, glial cell | 219542 | 537 | 219542 | 1160 | 2061, 2681, | |
| | differentiation | | | | | 3301, 3921, | |
| | regulator | | | | | 4541 | |
| 414 | methylmalonyl | 274813 | 538 | 274813 | 1161 | 1517, 2062, | 1658 |
| | CoA mutase | | | | | 2682, 3302, | |
| | | | | | | 3922, 4542, | |
| | | | | | | 4991, 5321, | |
| | | | | | | 16653-16739 | |
| 415 | methylmalonyl | 540138 | 539 | 445535 | 1162 | 2063, 2683, | |
| | CoA mutase | | | | | 3303, 3923, | |
| | | | | | | 4543, 4992, | |
| | | | | | | 5322, | |
| 416 | microsomal | 265517 | 540 | 265517 | 1163 | 1518, 2064, | |
| | triglyceride | | | | | 2684, 3304, | |
| | transfer protein | | | | | 3924, 4544, | |
| | | | | | | 16740-16878 | |
| 417 | microsomal | 457717 | 541 | 400821 | 1164 | 2065, 2685, | |
| | triglyceride | | | | | 3305, 3925, | |
| | transfer protein | | | | | 4545 | |
| 418 | microsomal | 506883 | 542 | 426755 | 1165 | 1519, 2066, | |
| | triglyceride | | | | | 2686, 3306, | |
| | transfer protein | | | | | 3926, 4546 | |
| 419 | microsomal | 538053 | 543 | 437358 | 1166 | 2067, 2687, | |
| | triglyceride | | | | | 3307, 3927, | |
| | transfer protein | | | | | 4547 | |
| 420 | N- | 299314 | 544 | 299314 | 1167 | 1520, 2068, | |
| | acetylglucosamine- | | | | | 2688, 3308, | |
| | 1-phosphate | | | | | 3928, 4548, | |
| | transferase, alpha | | | | | 16879-17017 | |
| | and beta subunits | | | | | | |
| 421 | N- | 549940 | 545 | 449150 | 1168 | 1521, 2069, | |
| | acetylglucosamine- | | | | | 2689, 3309, | |
| | 1-phosphate | | | | | 3929, 4549 | |
| | transferase, alpha | | | | | | |
| | and beta subunits | | | | | | |
| 422 | N-acetylglutamate | 293404 | 546 | 293404 | 1169 | 2070, 2690, | |
| | synthase | | | | | 3310, 3930, | |
| | | | | | | 4550, 17018- | |
| | | | | | | 17156 | |
| 423 | N-acetylglutamate | 541745 | 547 | 441262 | 1170 | 2071, 2691, | |
| | synthase | | | | | 3311, 3931, | |
| | | | | | | 4551 | |
| 424 | N-acylsphingosine | 262097 | 548 | 262097 | 1171 | 1522, 2072, | |
| | amidohydrolase | | | | | 2692, 3312, | |
| | (acid ceramidase) 1 | | | | | 3932, | |
| | | | | | | 455217157- | |
| | | | | | | 17295 | |
| 425 | N-acylsphingosine | 314146 | 549 | 326970 | 1172 | 1523, 2073, | |
| | amidohydrolase | | | | | 2693, 3313, | |
| | (acid ceramidase) 1 | | | | | 3933, 4553 | |
| 426 | N-acylsphingosine | 381733 | 550 | 371152 | 1173 | 1524, 2074, | |
| | amidohydrolase | | | | | 2694, 3314, | |
| | (acid ceramidase) 1 | | | | | 3934, 4554 | |
| 427 | N-acylsphingosine | 417108 | 551 | 394125 | 1174 | 1525, 2075, | |
| | amidohydrolase | | | | | 2695, 3315, | |
| | (acid ceramidase) 1 | | | | | 3935, 4555 | |
| 428 | N-acylsphingosine | 520781 | 552 | 427751 | 1175 | 1526, 2076, | |
| | amidohydrolase | | | | | 2696, 3316, | |
| | (acid ceramidase) 1 | | | | | 3936, 4556 | |
| 429 | natriuretic peptide | 376468 | 553 | 365651 | 1176 | 2077, 2697, | |
| | B | | | | | 3317, 3937, | |
| | | | | | | 4557, 4993, | |
| | | | | | | 5323, | |
| 430 | nerve growth | 369512 | 554 | 358525 | 1177 | 2078, 2698, | |
| | factor (beta | | | | | 3318, 3938, | |
| | polypeptide) | | | | | 4558, 4994, | |
| | | | | | | 5324, 17296- | |
| | | | | | | 17382 | |
| 431 | neuregulin 1 | 287840 | 555 | 287840 | 1178 | 2079, 2699, | |
| | | | | | | 3319, 3939, | |
| | | | | | | 4559 | |
| 432 | neuregulin 1 | 287842 | 556 | 287842 | 1179 | 2080, 2700, | |
| | | | | | | 3320, 3940, | |
| | | | | | | 4560, 17383- | |
| | | | | | | 17469 | |
| 433 | neuregulin 1 | 287845 | 557 | 287845 | 1180 | 2081, 2701, | |
| | | | | | | 3321, 3941, | |
| | | | | | | 4561 | |
| 434 | neuregulin 1 | 338921 | 558 | 343395 | 1181 | 2082, 2702, | |
| | | | | | | 3322, 3942, | |
| | | | | | | 4562 | |
| 435 | neuregulin 1 | 341377 | 559 | 340497 | 1182 | 2083, 2703, | |
| | | | | | | 3323, 3943, | |
| | | | | | | 4563 | |
| 436 | neuregulin 1 | 356819 | 560 | 349275 | 1183 | 2084, 2704, | |
| | | | | | | 3324, 3944, | |
| | | | | | | 4564 | |
| 437 | neuregulin 1 | 405005 | 561 | 384620 | 1184 | 2085, 2705, | |
| | | | | | | 3325, 3945, | |
| | | | | | | 4565 | |
| 438 | neuregulin 1 | 519301 | 562 | 429582 | 1185 | 2086, 2706, | |
| | | | | | | 3326, 3946, | |
| | | | | | | 4566 | |
| 439 | neuregulin 1 | 520407 | 563 | 434640 | 1186 | 2087, 2707, | |
| | | | | | | 3327, 3947, | |
| | | | | | | 4567, 17470- | |
| | | | | | | 17556 | |
| 440 | neuregulin 1 | 520502 | 564 | 433289 | 1187 | 2088, 2708, | |
| | | | | | | 3328, 3948, | |
| | | | | | | 4568 | |
| 441 | neuregulin 1 | 521670 | 565 | 428828 | 1188 | 2089, 2709, | |
| | | | | | | 3329, 3949, | |
| | | | | | | 4569 | |
| 442 | neuregulin 1 | 539990 | 566 | 439276 | 1189 | 2090, 2710, | |
| | | | | | | 3330, 3950, | |
| | | | | | | 4570 | |
| 443 | neuregulin 1 | 523079 | 567 | 430120 | 1190 | 2091, 2711, | |
| | | | | | | 3331, 3951, | |
| | | | | | | 4571 | |
| 444 | OMOMYC | | | | 1191 | 1527, 17557- | |
| | | | | | | 17643 | |
| 445 | OMOMYC90 | | | | | 1528, 17644- | |
| | (90AA truncated | | | | | 17784 | |
| | domain) | | | | | | |
| 446 | Orencia S.C.; | | | | | | |
| | abatacept | | | | | | |
| 447 | ornithine | 39007 | 568 | 39007 | 1192 | 1529, 2092, | 1659 |
| | carbamoyltrans- | | | | | 2712, 3332, | |
| | ferase | | | | | 3952, 4572, | |
| | | | | | | 4995, 5325, | |
| | | | | | | 17785-17871 | |
| 448 | parathyroid | 282091 | 569 | 282091 | 1193 | 2093, 2713, | |
| | hormone | | | | | 3333, 3953, | |
| | | | | | | 4573, 4996, | |
| | | | | | | 5326 | |
| 449 | parathyroid | 529816 | 570 | 433208 | 1194 | 2094, 2714, | |
| | hormone | | | | | 3334, 3954, | |
| | | | | | | 4574, 4997, | |
| | | | | | | 5327 | |
| 450 | PBO-326; | | | | | | |
| | rituximab | | | | | | |
| 451 | phenylalanine | 546844 | 571 | 446658 | 1195 | 1530, 2095, | |
| | hydroxylase | | | | | 2715, 3335, | |
| | | | | | | 3955, 4575, | |
| | | | | | | 4998, 5328 | |
| 452 | phenylalanine | 551337 | 572 | 447620 | 1196 | 1531, 2096, | |
| | hydroxylase | | | | | 2716, 3336, | |
| | | | | | | 3956, 4576, | |
| | | | | | | 4999, 5329 | |
| 453 | phenylalanine | 553106 | 573 | 448059 | 1197 | 1532, 2097, | 1660 |
| | hydroxylase | | | | | 2717, 3337, | |
| | | | | | | 3957, 4577, | |
| | | | | | | 5000, 5330, | |
| | | | | | | 17872-17958 | |
| 454 | phosphorylase | 566044 | 574 | 456729 | 1198 | 2098, 2718, | |
| | kinase beta | | | | | 3338, 3958, | |
| | | | | | | 4578 | |
| 455 | phosphorylase | 563588 | 575 | 455607 | 1199 | 2099, 2719, | |
| | kinase gamma 2 | | | | | 3339, 3959, | |
| | (testis) | | | | | 4579, 17959- | |
| | | | | | | 18045 | |
| 456 | phosphorylase | 379942 | 576 | 369274 | 1200 | 2100, 2720, | |
| | kinase, alpha 2 | | | | | 3340, 3960, | |
| | (liver) | | | | | 4580, 18046- | |
| | | | | | | 18132 | |
| 457 | phosphorylase | 299167 | 577 | 299167 | 1201 | 2101, 2721, | |
| | kinase, beta | | | | | 3341, 3961, | |
| | | | | | | 4581 | |
| 458 | phosphorylase | 323584 | 578 | 313504 | 1202 | 2102, 2722, | |
| | kinase, beta | | | | | 3342, 3962, | |
| | | | | | | 4582, 18133- | |
| | | | | | | 18219 | |
| 459 | phosphorylase | 455779 | 579 | 414345 | 1203 | 2103, 2723, | |
| | kinase, beta | | | | | 3343, 3963, | |
| | | | | | | 4583 | |
| 460 | phosphorylase | 328273 | 580 | 329968 | 1204 | 2104, 2724, | |
| | kinase, gamma 2 | | | | | 3344, 3964, | |
| | (testis) | | | | | 4584 | |
| 461 | phosphorylase | 424889 | 581 | 388571 | 1205 | 2105, 2725, | |
| | kinase, gamma 2 | | | | | 3345, 3965, | |
| | (testis) | | | | | 4585 | |
| 462 | phosphorylase, | 216392 | 582 | 216392 | 1206 | 2106, 2726, | |
| | glycogen, liver | | | | | 3346, 3966, | |
| | | | | | | 4586 | |
| 463 | phosphorylase, | 544180 | 583 | 443787 | 1207 | 2107, 2727, | |
| | glycogen, liver | | | | | 3347, 3967, | |
| | | | | | | 4587 | |
| 464 | plasminogen | 308192 | 584 | 308938 | 1208 | 1533, 2108, | |
| | | | | | | 2728, 3348, | |
| | | | | | | 3968, 4588, | |
| | | | | | | 18220-18271 | |
| 465 | plasminogen | 316325 | 585 | 321466 | 1209 | 2109, 2729, | |
| | | | | | | 3349, 3969, | |
| | | | | | | 4589 | |
| 466 | plasminogen | 366924 | 586 | 355891 | 1210 | 1534, 2110, | |
| | | | | | | 2730, 3350, | |
| | | | | | | 3970, 4590 | |
| 467 | plasminogen | 220809 | 587 | 220809 | 1211 | 1535, 2111, | 1661 |
| | activator, tissue | | | | | 2731, 3351, | |
| | | | | | | 3971, 4591, | |
| | | | | | | 18272-18358 | |
| 468 | plasminogen | 270189 | 588 | 270189 | 1212 | 1536, 2112, | 1661 |
| | activator, tissue | | | | | 2732, 3352, | |
| | | | | | | 3972, 4592, | |
| | | | | | | 5001, 5331 | |
| 469 | plasminogen | 352041 | 589 | 270188 | 1213 | 1537, 2113, | 1661 |
| | activator, tissue | | | | | 2733, 3353, | |
| | | | | | | 3973, 4593, | |
| | | | | | | 5002, 5332 | |
| 470 | plasminogen | 429089 | 590 | 392045 | 1214 | 2114, 2734, | 1661 |
| | activator, tissue | | | | | 3354, 3974, | |
| | | | | | | 4594, 5003, | |
| | | | | | | 5333 | |
| 471 | plasminogen | 429710 | 591 | 407861 | 1215 | 1538, 2115, | |
| | activator, tissue | | | | | 2735, 3355, | |
| | | | | | | 3975, 4595, | |
| | | | | | | 5004, 5334 | |
| 472 | plasminogen | 519510 | 592 | 428886 | 1216 | 1539, 2116, | |
| | activator, tissue | | | | | 2736, 3356, | |
| | | | | | | 3976, 4596, | |
| | | | | | | 5005, 5335 | |
| 473 | plasminogen | 520523 | 593 | 428797 | 1217 | 1540, 2117, | 1661 |
| | activator, tissue | | | | | 2737, 3357, | |
| | | | | | | 3977, 4597, | |
| | | | | | | 5006, 5336 | |
| 474 | plasminogen | 521694 | 594 | 429801 | 1218 | 1541, 2118, | 1661 |
| | activator, tissue | | | | | 2738, 3358, | |
| | | | | | | 3978, 4598, | |
| | | | | | | 5007, 5337 | |
| 475 | plasminogen | 524009 | 595 | 429401 | 1219 | 1542, 2119, | |
| | activator, tissue | | | | | 2739, 3359, | |
| | | | | | | 3979, 4599, | |
| | | | | | | 5008, 5338 | |
| 476 | POU class 5 | 259915 | 596 | 259915 | 1220 | 2120, 2740, | |
| | homeobox 1 | | | | | 3360, 3980, | |
| | | | | | | 4600 | |
| 477 | POU class 5 | 376243 | 597 | 365419 | 1221 | 2121, 2741, | |
| | homeobox 1 | | | | | 3361, 3981, | |
| | | | | | | 4601 | |
| 478 | POU class 5 | 383524 | 598 | 373016 | 1222 | 2122, 2742, | |
| | homeobox 1 | | | | | 3362, 3982, | |
| | | | | | | 4602 | |
| 479 | POU class 5 | 412166 | 599 | 387646 | 1223 | 2123, 2743, | |
| | homeobox 1 | | | | | 3363, 3983, | |
| | | | | | | 4603 | |
| 480 | POU class 5 | 419095 | 600 | 413622 | 1224 | 2124, 2744, | |
| | homeobox 1 | | | | | 3364, 3984, | |
| | | | | | | 4604 | |
| 481 | POU class 5 | 429603 | 601 | 392877 | 1225 | 2125, 2745, | |
| | homeobox 1 | | | | | 3365, 3985, | |
| | | | | | | 4605 | |
| 482 | POU class 5 | 433063 | 602 | 405041 | 1226 | 2126, 2746, | |
| | homeobox 1 | | | | | 3366, 3986, | |
| | | | | | | 4606 | |
| 483 | POU class 5 | 433348 | 603 | 412665 | 1227 | 2127, 2747, | |
| | homeobox 1 | | | | | 3367, 3987, | |
| | | | | | | 4607 | |
| 484 | POU class 5 | 434616 | 604 | 388842 | 1228 | 2128, 2748, | |
| | homeobox 1 | | | | | 3368, 3988, | |
| | | | | | | 4608, 18359- | |
| | | | | | | 18445 | |
| 485 | POU class 5 | 448657 | 605 | 416165 | 1229 | 2129, 2749, | |
| | homeobox 1 | | | | | 3369, 3989, | |
| | | | | | | 4609 | |
| 486 | POU class 5 | 451077 | 606 | 391507 | 1230 | 2130, 2750, | |
| | homeobox 1 | | | | | 3370, 3990, | |
| | | | | | | 4610 | |
| 487 | POU class 5 | 454714 | 607 | 400047 | 1231 | 2131, 2751, | |
| | homeobox 1 | | | | | 3371, 3991, | |
| | | | | | | 4611 | |
| 488 | POU class 5 | 546505 | 608 | 448154 | 1232 | 2132, 2752, | |
| | homeobox 1 | | | | | 3372, 3992, | |
| | | | | | | 4612 | |
| 489 | POU class 5 | 547234 | 609 | 449442 | 1233 | 2133, 2753, | |
| | homeobox 1 | | | | | 3373, 3993, | |
| | | | | | | 4613 | |
| 490 | POU class 5 | 547658 | 610 | 446962 | 1234 | 2134, 2754, | |
| | homeobox 1 | | | | | 3374, 3994, | |
| | | | | | | 4614 | |
| 491 | POU class 5 | 548682 | 611 | 446815 | 1235 | 2135, 2755, | |
| | homeobox 1 | | | | | 3375, 3995, | |
| | | | | | | 4615 | |
| 492 | POU class 5 | 550059 | 612 | 447874 | 1236 | 2136, 2756, | |
| | homeobox 1 | | | | | 3376, 3996, | |
| | | | | | | 4616 | |
| 493 | POU class 5 | 550521 | 613 | 447969 | 1237 | 2137, 2757, | |
| | homeobox 1 | | | | | 3377, 3997, | |
| | | | | | | 4617 | |
| 494 | POU class 5 | 550572 | 614 | 448254 | 1238 | 2138, 2758, | |
| | homeobox 1 | | | | | 3378, 3998, | |
| | | | | | | 4618 | |
| 495 | POU class 5 | 553069 | 615 | 448231 | 1239 | 2139, 2759, | |
| | homeobox 1 | | | | | 3379, 3999, | |
| | | | | | | 4619 | |
| 496 | POU class 5 | 553206 | 616 | 446757 | 1240 | 2140, 2760, | |
| | homeobox 1 | | | | | 3380, 4000, | |
| | | | | | | 4620 | |
| 497 | proprotein | 302118 | 617 | 303208 | 1241 | 2141, 2761, | |
| | convertase | | | | | 3381, 4001, | |
| | subtilisin/kexin | | | | | 4621 | |
| | type 9 | | | | | | |
| 498 | proprotein | 452118 | 618 | 401598 | 1242 | 2142, 2762, | |
| | convertase | | | | | 3382, 4002, | |
| | subtilisin/kexin | | | | | 4622 | |
| | type 9 | | | | | | |
| 499 | proprotein | 543384 | 619 | 441859 | 1243 | 2143, 2763, | |
| | convertase | | | | | 3383, 4003, | |
| | subtilisin/kexin | | | | | 4623 | |
| | type 9 | | | | | | |
| 500 | protein C | 234071 | 620 | 234071 | 1244 | 2144, 2764, | |
| | (inactivator of | | | | | 3384, 4004, | |
| | coagulation factors | | | | | 4624 | |
| | Va and VIIIa) | | | | | | |
| 501 | protein C | 409048 | 621 | 386679 | 1245 | 2145, 2765, | |
| | (inactivator of | | | | | 3385, 4005, | |
| | coagulation factors | | | | | 4625, 5009, | |
| | Va and VIIIa) | | | | | 5339 | |
| 502 | protein C | 422777 | 622 | 409543 | 1246 | 2146, 2766, | |
| | (inactivator of | | | | | 3386, 4006, | |
| | coagulation factors | | | | | 4626, 5010, | |
| | Va and VIIIa) | | | | | 5340 | |
| 503 | protein C | 427769 | 623 | 406295 | 1247 | 2147, 2767, | |
| | (inactivator of | | | | | 3387, 4007, | |
| | coagulation factors | | | | | 4627, 5011, | |
| | Va and VIIIa) | | | | | 5341 | |
| 504 | protein C | 429925 | 624 | 412697 | 1248 | 2148, 2768, | |
| | (inactivator of | | | | | 3388, 4008, | |
| | coagulation factors | | | | | 4628, 5012, | |
| | Va and VIIIa) | | | | | 5342 | |
| 505 | protein C | 453608 | 625 | 404030 | 1249 | 2149, 2769, | |
| | (inactivator of | | | | | 3389, 4009, | |
| | coagulation factors | | | | | 4629, 5013, | |
| | Va and VIIIa) | | | | | 5343 | |
| 506 | protein C | 537436 | 626 | 442106 | 1250 | 2150, 2770, | |
| | (inactivator of | | | | | 3390, 4010, | |
| | coagulation factors | | | | | 4630, 5014, | |
| | Va and VIIIa) | | | | | 5344 | |
| 507 | relaxin 2 | 308420 | 627 | 308018 | 1251 | 2151, 2771, | |
| | | | | | | 3391, 4011, | |
| | | | | | | 4631 | |
| 508 | relaxin 2 | 381627 | 628 | 371040 | 1252 | 2152, 2772, | |
| | | | | | | 3392, 4012, | |
| | | | | | | 4632, 18446- | |
| | | | | | | 18532 | |
| 509 | Reverse Caspase 3 | | | | | 1543 | |
| | (cleavable) | | | | | | |
| 510 | Reverse Caspase 3 | | | | | 1544 | |
| | (non-cleavable) | | | | | | |
| 511 | Reverse Caspase 6 | | | | | 1545 | |
| 512 | rhodopsin | 296271 | 629 | 296271 | 1253 | 2153, 2773, | |
| | | | | | | 3393, 4013, | |
| | | | | | | 4633, 5015, | |
| | | | | | | 5345, 18533- | |
| | | | | | | 18619 | |
| 513 | Rituximab; | | | | | | |
| | rituximab | | | | | | |
| 514 | serpin peptidase | 355814 | 630 | 348068 | 1254 | 2154, 2774, | 1662 |
| | inhibitor, clade A | | | | | 3394, 4014, | |
| | (alpha-1 | | | | | 4634, 5016, | |
| | antiproteinase, | | | | | 5346, 18620- | |
| | antitrypsin), | | | | | 18706 | |
| | member 1 | | | | | | |
| 515 | serpin peptidase | 393087 | 631 | 376802 | 1255 | 2155, 2775, | 1662 |
| | inhibitor, clade A | | | | | 3395, 4015, | |
| | (alpha-1 | | | | | 4635, 5017, | |
| | antiproteinase, | | | | | 5347 | |
| | antitrypsin), | | | | | | |
| | member 1 | | | | | | |
| 516 | serpin peptidase | 393088 | 632 | 376803 | 1256 | 2156, 2776, | 1662 |
| | inhibitor, clade A | | | | | 3396, 4016, | |
| | (alpha-1 | | | | | 4636, 5018, | |
| | antiproteinase, | | | | | 5348 | |
| | antitrypsin), | | | | | | |
| | member 1 | | | | | | |
| 517 | serpin peptidase | 402629 | 633 | 386094 | 1257 | 2157, 2777, | |
| | inhibitor, clade A | | | | | 3397, 4017, | |
| | (alpha-1 | | | | | 4637, 5019, | |
| | antiproteinase, | | | | | 5349 | |
| | antitrypsin), | | | | | | |
| | member 1 | | | | | | |
| 518 | serpin peptidase | 404814 | 634 | 385960 | 1258 | 2158, 2778, | 1662 |
| | inhibitor, clade A | | | | | 3398, 4018, | |
| | (alpha-1 | | | | | 4638, 5020, | |
| | antiproteinase, | | | | | 5350 | |
| | antitrypsin), | | | | | | |
| | member 1 | | | | | | |
| 519 | serpin peptidase | 437397 | 635 | 408474 | 1259 | 2159, 2779, | 1662 |
| | inhibitor, clade A | | | | | 3399, 4019, | |
| | (alpha-1 | | | | | 4639, 5021, | |
| | antiproteinase, | | | | | 5351 | |
| | antitrypsin), | | | | | | |
| | member 1 | | | | | | |
| 520 | serpin peptidase | 440909 | 636 | 390299 | 1260 | 2160, 2780, | 1662 |
| | inhibitor, clade A | | | | | 3400, 4020, | |
| | (alpha-1 | | | | | 4640, 5022, | |
| | antiproteinase, | | | | | 5352 | |
| | antitrypsin), | | | | | | |
| | member 1 | | | | | | |
| 521 | serpin peptidase | 448921 | 637 | 416066 | 1261 | 2161, 2781, | 1662 |
| | inhibitor, clade A | | | | | 3401, 4021, | |
| | (alpha-1 | | | | | 4641, 5023, | |
| | antiproteinase, | | | | | 5353 | |
| | antitrypsin), | | | | | | |
| | member 1 | | | | | | |
| 522 | serpin peptidase | 449399 | 638 | 416354 | 1262 | 2162, 2782, | 1662 |
| | inhibitor, clade A | | | | | 3402, 4022, | |
| | (alpha-1 | | | | | 4642, 5024, | |
| | antiproteinase, | | | | | 5354 | |
| | antitrypsin), | | | | | | |
| | member 1 | | | | | | |
| 523 | serpin peptidase | 553327 | 639 | 452480 | 1263 | 2163, 2783, | |
| | inhibitor, clade A | | | | | 3403, 4023, | |
| | (alpha-1 | | | | | 4643, 5025, | |
| | antiproteinase, | | | | | 5355, 18707- | |
| | antitrypsin), | | | | | 18793 | |
| | member 1 | | | | | | |
| 524 | serpin peptidase | 556091 | 640 | 452169 | 1264 | 2164, 2784, | |
| | inhibitor, clade A | | | | | 3404, 4024, | |
| | (alpha-1 | | | | | 4644, 5026, | |
| | antiproteinase, | | | | | 5356 | |
| | antitrypsin), | | | | | | |
| | member 1 | | | | | | |
| 525 | serpin peptidase | 556955 | 641 | 451098 | 1265 | 2165, 2785, | |
| | inhibitor, clade A | | | | | 3405, 4025, | |
| | (alpha-1 | | | | | 4645, 5027, | |
| | antiproteinase, | | | | | 5357 | |
| | antitrypsin), | | | | | | |
| | member 1 | | | | | | |
| 526 | serpin peptidase | 557118 | 642 | 451826 | 1266 | 2166, 2786, | |
| | inhibitor, clade A | | | | | 3406, 4026, | |
| | (alpha-1 | | | | | 4646, 5028, | |
| | antiproteinase, | | | | | 5358 | |
| | antitrypsin), | | | | | | |
| | member 1 | | | | | | |
| 527 | serpin peptidase | 557492 | 643 | 452452 | 1267 | 2167, 2787, | |
| | inhibitor, clade A | | | | | 3407, 4027, | |
| | (alpha 1 | | | | | 4647, 5029, | |
| | antiproteinase, | | | | | 5359 | |
| | antitrypsin), | | | | | | |
| | member 1 | | | | | | |
| 528 | serpin peptidase | 351522 | 644 | 307953 | 1268 | 2168, 2788, | |
| | inhibitor, clade C | | | | | 3408, 4028, | |
| | (antithrombin), | | | | | 4648, 5030, | |
| | member 1 | | | | | 5360 | |
| 529 | serpin peptidase | 367698 | 645 | 356671 | 1269 | 1546, 2169, | |
| | inhibitor, clade C | | | | | 2789, 3409, | |
| | (antithrombin), | | | | | 4029, 4649, | |
| | member 1 | | | | | 5031, 5361, | |
| | | | | | | 18794-18932 | |
| 530 | serpin peptidase | 324015 | 646 | 321853 | 1270 | 1547, 2170, | |
| | inhibitor, clade F | | | | | 2790, 3410, | |
| | (alpha-2 | | | | | 4030, 4650 | |
| | antiplasmin, | | | | | | |
| | pigment | | | | | | |
| | epithelium derived | | | | | | |
| | factor), member 2 | | | | | | |
| 531 | serpin peptidase | 382061 | 647 | 371493 | 1271 | 2171, 2791, | |
| | inhibitor, clade F | | | | | 3411, 4031, | |
| | (alpha-2 | | | | | 4651, 18933- | |
| | antiplasmin, | | | | | 19071 | |
| | pigment | | | | | | |
| | epithelium derived | | | | | | |
| | factor), member 2 | | | | | | |
| 532 | serpin peptidase | 450523 | 648 | 403877 | 1272 | 1548, 2172, | |
| | inhibitor, clade F | | | | | 2792, 3412, | |
| | (alpha-2 | | | | | 4032, 4652 | |
| | antiplasmin, | | | | | | |
| | pigment | | | | | | |
| | epithelium derived | | | | | | |
| | factor), member 2 | | | | | | |
| 533 | serpin peptidase | 453066 | 649 | 402286 | 1273 | 1549, 2173, | |
| | inhibitor, clade F | | | | | 2793, 3413, | |
| | (alpha-2 | | | | | 4033, 4653 | |
| | antiplasmin, | | | | | | |
| | pigment | | | | | | |
| | epithelium derived | | | | | | |
| | factor), member 2 | | | | | | |
| 534 | serpin peptidase | 278407 | 650 | 278407 | 1274 | 1550, 2174, | |
| | inhibitor, clade G | | | | | 2794, 3414, | |
| | (C1 inhibitor), | | | | | 4034, 4654, | |
| | member 1 | | | | | 5032, 5362, | |
| | | | | | | 19072-19210 | |
| 535 | serpin peptidase | 378323 | 651 | 367574 | 1275 | 1551, 2175, | |
| | inhibitor, clade G | | | | | 2795, 3415, | |
| | (C1 inhibitor), | | | | | 4035, 4655, | |
| | member 1 | | | | | 5033, 5363 | |
| 536 | serpin peptidase | 378324 | 652 | 367575 | 1276 | 1552, 2176, | |
| | inhibitor, clade G | | | | | 2796, 3416, | |
| | (C1 inhibitor), | | | | | 4036, 4656, | |
| | member 1 | | | | | 5034, 5364 | |
| 537 | serpin peptidase | 405496 | 653 | 384561 | 1277 | 1553, 2177, | |
| | inhibitor, clade G | | | | | 2797, 3417, | |
| | (C1 inhibitor), | | | | | 4037, 4657, | |
| | member 1 | | | | | 5035, 5365 | |
| 538 | serpin peptidase | 433668 | 654 | 399800 | 1278 | 2178, 2798, | |
| | inhibitor, clade G | | | | | 3418, 4038, | |
| | (C1 inhibitor), | | | | | 4658, 5036, | |
| | member 1 | | | | | 5366 | |
| 539 | sirtuin 1 | 212015 | 655 | 212015 | 1279 | 1554, 2179, | 1663 |
| | | | | | | 2799, 3419, | |
| | | | | | | 4039, 4659, | |
| | | | | | | 19211-19297 | |
| 540 | sirtuin 1 | 403579 | 656 | 384063 | 1280 | 1555, 2180, | |
| | | | | | | 2800, 3420, | |
| | | | | | | 4040, 4660, | |
| | | | | | | 5037, 5367 | |
| 541 | sirtuin 1 | 406900 | 657 | 384508 | 1281 | 2181, 2801, | |
| | | | | | | 3421, 4041, | |
| | | | | | | 4661, 5038, | |
| | | | | | | 5368 | |
| 542 | sirtuin 1 | 432464 | 658 | 409208 | 1282 | 1556, 2182, | 1664 |
| | | | | | | 2802, 3422, | |
| | | | | | | 4042, 4662, | |
| | | | | | | 5039, 5369 | |
| 543 | sirtuin 6 | 305232 | 659 | 305310 | 1283 | 1557, 2183, | |
| | | | | | | 2803, 3423, | |
| | | | | | | 4043, 4663, | |
| | | | | | | 5040, 5370 | |
| 544 | sirtuin 6 | 337491 | 660 | 337332 | 1284 | 1558, 2184, | 1665 |
| | | | | | | 2804, 3424, | |
| | | | | | | 4044, 4664, | |
| | | | | | | 5041, 5371, | |
| | | | | | | 19298-19384 | |
| 545 | sirtuin 6 | 381935 | 661 | 371360 | 1285 | 1559, 2185, | |
| | | | | | | 2805, 3425, | |
| | | | | | | 4045, 4665, | |
| | | | | | | 5042, 5372 | |
| 546 | solute carrier | 314251 | 662 | 323568 | 1286 | 1560, 2186, | |
| | family 2 | | | | | 2806, 3426, | |
| | (facilitated glucose | | | | | 4046, 4666, | |
| | transporter), | | | | | 19385-19523 | |
| | member 2 | | | | | | |
| 547 | solute carrier | 382808 | 663 | 372258 | 1287 | 1561, 2187, | |
| | family 2 | | | | | 2807, 3427, | |
| | (facilitated glucose | | | | | 4047, 4667 | |
| | transporter), | | | | | | |
| | member 2 | | | | | | |
| 548 | solute carrier | 577093 | 664 | 461344 | 1288 | 2188, 2808, | |
| | family 37 | | | | | 3428, 4048, | |
| | (glucose-6- | | | | | 4668,, 19524- | |
| | phosphate | | | | | 19610 | |
| | transporter) | | | | | | |
| | member 4 | | | | | | |
| 549 | solute carrier | 590663 | 665 | 464769 | 1289 | 2189, 2809, | |
| | family 37 | | | | | 3429, 4049, | |
| | (glucose-6- | | | | | 4669 | |
| | phosphate | | | | | | |
| | transporter) | | | | | | |
| | member 4 | | | | | | |
| 550 | solute carrier | 261024 | 666 | 261024 | 1290 | 2190, 2810, | |
| | family 40 (iron- | | | | | 3430, 4050, | |
| | regulated | | | | | 4670 | |
| | transporter), | | | | | | |
| | member 1 | | | | | | |
| 551 | solute carrier | 427241 | 667 | 390005 | 1291 | 2191, 2811, | |
| | family 40 (iron- | | | | | 3431, 4051, | |
| | regulated | | | | | 4671 | |
| | transporter), | | | | | | |
| | member 1 | | | | | | |
| 552 | solute carrier | 427419 | 668 | 392730 | 1292 | 2192, 2812, | |
| | family 40 (iron- | | | | | 3432, 4052, | |
| | regulated | | | | | 4672 | |
| | transporter), | | | | | | |
| | member 1 | | | | | | |
| 553 | solute carrier | 440626 | 669 | 396134 | 1293 | 2193, 2813, | |
| | family 40 (iron- | | | | | 3433, 4053, | |
| | regulated | | | | | 4673 | |
| | transporter), | | | | | | |
| | member 1 | | | | | | |
| 554 | solute carrier | 455320 | 670 | 413549 | 1294 | 2194, 2814, | |
| | family 40 (iron- | | | | | 3434, 4054, | |
| | regulated | | | | | 4674 | |
| | transporter), | | | | | | |
| | member 1 | | | | | | |
| 555 | solute carrier | 481497 | 671 | 446069 | 1295 | 2195, 2815, | |
| | family 40 (iron- | | | | | 3435, 4055, | |
| | regulated | | | | | 4675 | |
| | transporter), | | | | | | |
| | member 1 | | | | | | |
| 556 | solute carrier | 544056 | 672 | 444582 | 1296 | 2196, 2816, | |
| | family 40 (iron- | | | | | 3436, 4056, | |
| | regulated | | | | | 4676 | |
| | transporter), | | | | | | |
| | member 1 | | | | | | |
| 557 | sortilin 1 | 256637 | 673 | 256637 | 1297 | 1562, 2197, | |
| | | | | | | 2817, 3437, | |
| | | | | | | 4057, 4677, | |
| | | | | | | 5043, 5373 | |
| 558 | sortilin 1 | 538502 | 674 | 438597 | 1298 | 1563, 2198, | |
| | | | | | | 2818, 3438, | |
| | | | | | | 4058, 4678, | |
| | | | | | | 5044, 5374, | |
| | | | | | | 19611-19697 | |
| 559 | sperm adhesion | 223028 | 675 | 223028 | 1299 | 2199, 2819, | |
| | molecule 1 (PH-20 | | | | | 3439, 4059, | |
| | hyaluronidase, | | | | | 4679 | |
| | zona pellucida | | | | | | |
| | binding) | | | | | | |
| 560 | sperm adhesion | 340011 | 676 | 345849 | 1300 | 2200, 2820, | |
| | molecule 1 (PH-20 | | | | | 3440, 4060, | |
| | hyaluronidase, | | | | | 4680, 5045, | |
| | zona pellucida | | | | | 5375 | |
| | binding) | | | | | | |
| 561 | sperm adhesion | 402183 | 677 | 386028 | 1301 | 2201, 2821, | |
| | molecule 1 (PH-20 | | | | | 3441, 4061, | |
| | hyaluronidase, | | | | | 4681, 5046, | |
| | zona pellucida | | | | | 5376 | |
| | binding) | | | | | | |
| 562 | sperm adhesion | 413927 | 678 | 391491 | 1302 | 2202, 2822, | |
| | molecule 1 (PH-20 | | | | | 3442, 4062, | |
| | hyaluronidase, | | | | | 4682, 5047, | |
| | zona pellucida | | | | | 5377 | |
| | binding) | | | | | | |
| 563 | sperm adhesion | 439500 | 679 | 402123 | 1303 | 2203, 2823, | |
| | molecule 1 (PH-20 | | | | | 3443, 4063, | |
| | hyaluronidase, | | | | | 4683, 5048, | |
| | zona pellucida | | | | | 5378 | |
| | binding) | | | | | | |
| 564 | sperm adhesion | 460182 | 680 | 417934 | 1304 | 2204, 2824, | |
| | molecule 1 (PH-20 | | | | | 3444, 4064, | |
| | hyaluronidase, | | | | | 4684, 5049, | |
| | zona pellucida | | | | | 5379 | |
| | binding) | | | | | | |
| 565 | sphingomyelin | 299397 | 681 | 299397 | 1305 | 1564, 2205, | |
| | phosphodiesterase | | | | | 2825, 3445, | |
| | 1, acid lysosomal | | | | | 4065, 4685, | |
| | | | | | | 5050, 5380, | |
| 566 | sphingomyelin | 342245 | 682 | 340409 | 1306 | 1565, 2206, | 1666 |
| | phosphodiesterase | | | | | 2826, 3446, | |
| | 1, acid lysosomal | | | | | 4066, 4686, | |
| | | | | | | 5051, 5381, | |
| | | | | | | 19698-19784 | |
| 567 | sphingomyelin | 356761 | 683 | 349203 | 1307 | 1566, 2207, | |
| | phosphodiesterase | | | | | 2827, 3447, | |
| | 1, acid lysosomal | | | | | 4067, 4687, | |
| | | | | | | 5052, 5382 | |
| 568 | sphingomyelin | 527275 | 684 | 435350 | 1308 | 1567, 2208, | |
| | phosphodiesterase | | | | | 2828, 3448, | |
| | 1, acid lysosomal | | | | | 4068, 4688, | |
| | | | | | | 5053, 5383 | |
| 569 | sphingomyelin | 533123 | 685 | 435950 | 1309 | 1568, 2209, | |
| | phosphodiesterase | | | | | 2829, 3449, | |
| | 1, acid lysosomal | | | | | 4069, 4689, | |
| | | | | | | 5054, 5384 | |
| 570 | sphingomyelin | 534405 | 686 | 434353 | 1310 | 1569, 2210, | |
| | phosphodiesterase | | | | | 2830, 3450, | |
| | 1, acid lysosomal | | | | | 4070, 4690, | |
| | | | | | | 5055, 5385 | |
| 571 | SRY (sex | 325404 | 687 | 323588 | 1311 | 2211, 2831, | |
| | determining region | | | | | 3451, 4071, | |
| | Y)-box 2 | | | | | 4691 | |
| 572 | SRY (sex | 431565 | 688 | 439111 | 1312 | 2212, 2832, | |
| | determining region | | | | | 3452, 4072, | |
| | Y)-box 2 | | | | | 4692, 19785- | |
| | | | | | | 19871 | |
| 573 | Subcutaneous | | | | | | |
| | Herceptin; | | | | | | |
| | trastuzumab | | | | | | |
| 574 | surfactant protein | 393822 | 689 | 377409 | 1313 | 2213, 2833, | |
| | B | | | | | 3453, 4073, | |
| | | | | | | 4693 | |
| 575 | surfactant protein | 409383 | 690 | 386346 | 1314 | 2214, 2834, | |
| | B | | | | | 3454, 4074, | |
| | | | | | | 4694 | |
| 576 | surfactant protein | 441838 | 691 | 395757 | 1315 | 2215, 2835, | |
| | B | | | | | 3455, 4075, | |
| | | | | | | 4695 | |
| 577 | surfactant protein | 519937 | 692 | 428719 | 1316 | 2216, 2836, | |
| | B | | | | | 3456, 4076, | |
| | | | | | | 4696 | |
| 578 | Synagis | | | | | | |
| 579 | thrombomodulin | 377103 | 693 | 366307 | 1317 | 1570, 2217, | |
| | | | | | | 2837, 3457, | |
| | | | | | | 4077, 4697, | |
| | | | | | | 19872-19958 | |
| 580 | thrombomodulin | 503590 | 694 | 440119 | 1318 | 2218, 2838, | |
| | | | | | | 3458, 4078, | |
| | | | | | | 4698 | |
| 581 | thrombopoietin | 204615 | 695 | 204615 | 1319 | 1571, 2219, | 1667 |
| | | | | | | 2839, 3459, | |
| | | | | | | 4079, 4699, | |
| | | | | | | 5056, 5386, | |
| | | | | | | 19959-20045 | |
| 582 | thrombopoietin | 353488 | 696 | 341335 | 1320 | 2220, 2840, | |
| | | | | | | 3460, 4080, | |
| | | | | | | 4700, 5057, | |
| | | | | | | 5387 | |
| 583 | thrombopoietin | 421442 | 697 | 411704 | 1321 | 1572, 2221, | |
| | | | | | | 2841, 3461, | |
| | | | | | | 4081, 4701, | |
| | | | | | | 5058, 5388 | |
| 584 | thrombopoietin | 445696 | 698 | 410763 | 1322 | 1573, 2222, | |
| | | | | | | 2842, 3462, | |
| | | | | | | 4082, 4702, | |
| | | | | | | 5059, 5389 | |
| 585 | TL011; rituximab | | | | | | |
| 586 | transferrin | 223051 | 699 | 223051 | 1323 | 2223, 2843, | |
| | receptor 2 | | | | | 3463, 4083, | |
| | | | | | | 4703 | |
| 587 | transferrin | 431692 | 700 | 413905 | 1324 | 2224, 2844, | |
| | receptor 2 | | | | | 3464, 4084, | |
| | | | | | | 4704 | |
| 588 | transferrin | 462107 | 701 | 420525 | 1325 | 2225, 2845, | |
| | receptor 2 | | | | | 3465, 4085, | |
| | | | | | | 4705 | |
| 589 | transferrin | 544242 | 702 | 443656 | 1326 | 2226, 2846, | |
| | receptor 2 | | | | | 3466, 4086, | |
| | | | | | | 4706 | |
| 590 | transforming | 221930 | 703 | 221930 | 1327 | 2227, 2847, | 1668 |
| | growth factor, beta 1 | | | | | 3467, 4087, | |
| | | | | | | 4707, 20046- | |
| | | | | | | 20132 | |
| 591 | transforming | 366929 | 704 | 355896 | 1328 | 2228, 2848, | |
| | growth factor, beta 2 | | | | | 3468, 4088, | |
| | | | | | | 4708 | |
| 592 | transforming | 366930 | 705 | 355897 | 1329 | 2229, 2849, | |
| | growth factor, beta 2 | | | | | 3469, 4089, | |
| | | | | | | 4709 | |
| 593 | transforming | 238682 | 706 | 238682 | 1330 | 2230, 2850, | |
| | growth factor, beta 3 | | | | | 3470, 4090, | |
| | | | | | | 4710, 5060, | |
| | | | | | | 5390, 20133- | |
| | | | | | | 20219 | |
| 594 | transforming | 556285 | 707 | 451110 | 1331 | 2231, 2851, | |
| | growth factor, beta 3 | | | | | 3471, 4091, | |
| | | | | | | 4711, 5061, | |
| | | | | | | 5391 | |
| 595 | transthyretin | 237014 | 708 | 237014 | 1332 | 2232, 2852, | |
| | | | | | | 3472, 4092, | |
| | | | | | | 4712, 20220- | |
| | | | | | | 20358 | |
| 596 | transthyretin | 432547 | 709 | 396762 | 1333 | 2233, 2853, | |
| | | | | | | 3473, 4093, | |
| | | | | | | 4713 | |
| 597 | transthyretin | 541025 | 710 | 442134 | 1334 | 2234, 2854, | |
| | | | | | | 3474, 4094, | |
| | | | | | | 4714 | |
| 598 | tuftelin 1 | 353024 | 711 | 343781 | 1335 | 2235, 2855, | 1669 |
| | | | | | | 3475, 4095, | |
| | | | | | | 4715, 5062, | |
| | | | | | | 5392 | |
| 599 | tuftelin 1 | 368848 | 712 | 357841 | 1336 | 2236, 2856, | 1669 |
| | | | | | | 3476, 4096, | |
| | | | | | | 4716, 5063, | |
| | | | | | | 5393 | |
| 600 | tuftelin 1 | 368849 | 713 | 357842 | 1337 | 2237, 2857, | 1669 |
| | | | | | | 3477, 4097, | |
| | | | | | | 4717, 5064, | |
| | | | | | | 5394, 20359- | |
| | | | | | | 20445 | |
| 601 | tuftelin 1 | 507671 | 714 | 443643 | 1338 | 2238, 2858, | 1669 |
| | | | | | | 3478, 4098, | |
| | | | | | | 4718, 5065, | |
| | | | | | | 5395 | |
| 602 | tuftelin 1 | 538902 | 715 | 437997 | 1339 | 2239, 2859, | |
| | | | | | | 3479, 4099, | |
| | | | | | | 4719, 5066, | |
| | | | | | | 5396 | |
| 603 | tuftelin 1 | 544350 | 716 | 441557 | 1340 | 2240, 2860, | 1669 |
| | | | | | | 3480, 4100, | |
| | | | | | | 4720, 5067, | |
| | | | | | | 5397 | |
| 604 | tumor protein p53 | 269305 | 717 | 269305 | 1341 | 1574, 2241, | 1670 |
| | | | | | | 2861, 3481, | |
| | | | | | | 4101, 4721, | |
| | | | | | | 5068, 5398, | |
| | | | | | | 20446-20532 | |
| 605 | tumor protein p53 | 359597 | 718 | 352610 | 1342 | 1575, 2242, | |
| | | | | | | 2862, 3482, | |
| | | | | | | 4102, 4722, | |
| | | | | | | 5069, 5399 | |
| 606 | tumor protein p53 | 396473 | 719 | 379735 | 1343 | 2243, 2863, | |
| | | | | | | 3483, 4103, | |
| | | | | | | 4723, 5070, | |
| | | | | | | 5400 | |
| 607 | tumor protein p53 | 413465 | 720 | 410739 | 1344 | 1576, 2244, | |
| | | | | | | 2864, 3484, | |
| | | | | | | 4104, 4724, | |
| | | | | | | 5071, 5401 | |
| 608 | tumor protein p53 | 414315 | 721 | 394195 | 1345 | 2245, 2865, | |
| | | | | | | 3485, 4105, | |
| | | | | | | 4725, 5072, | |
| | | | | | | 5402 | |
| 609 | tumor protein p53 | 419024 | 722 | 402130 | 1346 | 2246, 2866, | |
| | | | | | | 3486, 4106, | |
| | | | | | | 4726, 5073, | |
| | | | | | | 5403 | |
| 610 | tumor protein p53 | 420246 | 723 | 391127 | 1347 | 1577, 2247, | |
| | | | | | | 2867, 3487, | |
| | | | | | | 4107, 4727, | |
| | | | | | | 5074, 5404 | |
| 611 | tumor protein p53 | 445888 | 724 | 391478 | 1348 | 2248, 2868, | 1670 |
| | | | | | | 3488, 4108, | |
| | | | | | | 4728, 5075, | |
| | | | | | | 5405 | |
| 612 | tumor protein p53 | 455263 | 725 | 398846 | 1349 | 1578, 2249, | |
| | | | | | | 2869, 3489, | |
| | | | | | | 4109, 4729, | |
| | | | | | | 5076, 5406 | |
| 613 | tumor protein p53 | 503591 | 726 | 426252 | 1350 | 1579, 2250, | |
| | | | | | | 2870, 3490, | |
| | | | | | | 4110, 4730, | |
| | | | | | | 5077, 5407 | |
| 614 | tumor protein p53 | 508793 | 727 | 424104 | 1351 | 1580, 2251, | |
| | | | | | | 2871, 3491, | |
| | | | | | | 4111, 4731, | |
| | | | | | | 5078, 5408 | |
| 615 | tumor protein p53 | 509690 | 728 | 425104 | 1352 | 1581,, 2252, | |
| | | | | | | 2872, 3492, | |
| | | | | | | 4112, 4732, | |
| | | | | | | 5079, 5409 | |
| 616 | tumor protein p53 | 514944 | 729 | 423862 | 1353 | 1582, 2253, | |
| | | | | | | 2873, 3493, | |
| | | | | | | 4113, 4733, | |
| | | | | | | 5080, 5410 | |
| 617 | tumor protein p53 | 545858 | 730 | 437792 | 1354 | 2254, 2874, | |
| | | | | | | 3494, 4114, | |
| | | | | | | 4734, 5081, | |
| | | | | | | 5411 | |
| 618 | tyrosinase | 263321 | 731 | 263321 | 1355 | 2255, 2875, | |
| | (oculocutaneous | | | | | 3495, 4115, | |
| | albinism IA) | | | | | 4735, , , 20533- | |
| | | | | | | 20619 | |
| 619 | tyrosine | 355962 | 732 | 348234 | 1356 | 1583, 2256, | |
| | aminotransferase | | | | | 2876, 3496, | |
| | | | | | | 4116, 4736,,, | |
| | | | | | | 20620-20758 | |
| 620 | UDP | 305208 | 733 | 304845 | 1357 | 1584, 2257, | |
| | glucuronosyltrans- | | | | | 2877, 3497, | |
| | ferase 1 family, | | | | | 4117, 4737, , , | |
| | polypeptide A1 | | | | | 20759-20845 | |
| 621 | UDP | 360418 | 734 | 353593 | 1358 | 1585, 2258, | |
| | glucuronosyltrans- | | | | | 2878, 3498, | |
| | ferase 1 family, | | | | | 4118, 4738 | |
| | polypeptide A1 | | | | | | |
| 622 | UDP | 344644 | 735 | 343838 | 1359 | 2259, 2879, | |
| | glucuronosyltrans- | | | | | 3499, 4119, | |
| | ferase 1 family, | | | | | 4739 | |
| | polypeptide A10 | | | | | | |
| 623 | UDP | 482026 | 736 | 418532 | 1360 | 2260, 2880, | |
| | glucuronosyltrans- | | | | | 3500, 4120, | |
| | ferase 1 family, | | | | | 4740 | |
| | polypeptide A3 | | | | | | |
| 624 | UDP | 513300 | 737 | 427404 | 1361 | 2261, 2881, | |
| | glycosyltransferase | | | | | 3501, 4121, | |
| | 3 family | | | | | 4741, 5082, | |
| | polypeptide A2 | | | | | 5412 | |
| 625 | UDP | 282507 | 738 | 282507 | 1362 | 2262, 2882, | 1671 |
| | glycosyltransferase | | | | | 3502, 4122, | |
| | 3 family, | | | | | 4742, 5083, | |
| | polypeptide A2 | | | | | 5413 | |
| 626 | UDP | 515131 | 739 | 420865 | 1363 | 2263, 2883, | |
| | glycosyltransferase | | | | | 3503, 4123, | |
| | 3 family, | | | | | 4743, 5084, | |
| | polypeptide A2 | | | | | 5414 | |
| 627 | UDP | 545528 | 740 | 445367 | 1364 | 2264, 2884, | |
| | glycosyltransferase | | | | | 3504, 4124, | |
| | 3 family, | | | | | 4744, 5085, | |
| | polypeptide A2 | | | | | 5415 | |
| 628 | vascular | 230480 | 741 | 230480 | 1365 | 1586, 2265, | |
| | endothelial growth | | | | | 2885, 3505, | |
| | factor A | | | | | 4125, 4745 | |
| 629 | vascular | 324450 | 742 | 317598 | 1366 | 1587, 2266, | |
| | endothelial growth | | | | | 2886, 3506, | |
| | factor A | | | | | 4126, 4746, | |
| | | | | | | 5086, 5416 | |
| 630 | vascular | 372055 | 743 | 361125 | 1367 | 1588, 2267, | |
| | endothelial growth | | | | | 2887, 3507, | |
| | factor A | | | | | 4127, 4747, | |
| | | | | | | 5087, 5417 | |
| 631 | vascular | 372064 | 744 | 361134 | 1368 | 1589, 2268, | |
| | endothelial growth | | | | | 2888, 3508, | |
| | factor A | | | | | 4128, 4748, | |
| | | | | | | 5088, 5418 | |
| 632 | vascular | 372067 | 745 | 361137 | 1369 | 1590, 2269, | 1672 |
| | endothelial growth | | | | | 2889, 3509, | |
| | factor A | | | | | 4129, 4749, | |
| | | | | | | 5089, 5419, | |
| | | | | | | 20846-20932 | |
| 633 | vascular | 372077 | 746 | 361148 | 1370 | 1591, 2270, | |
| | endothelial growth | | | | | 2890, 3510, | |
| | factor A | | | | | 4130, 4750, | |
| | | | | | | 5090, 5420 | |
| 634 | vascular | 413642 | 747 | 389864 | 1371 | 1592, 2271, | |
| | endothelial growth | | | | | 2891, 3511, | |
| | factor A | | | | | 4131, 4751, | |
| | | | | | | 5091, 5421 | |
| 635 | vascular | 417285 | 748 | 388663 | 1372 | 1593, 2272, | |
| | endothelial growth | | | | | 2892, 3512, | |
| | factor A | | | | | 4132, 4752, | |
| | | | | | | 5092, 5422 | |
| 636 | vascular | 425836 | 749 | 388465 | 1373 | 1594, 2273, | |
| | endothelial growth | | | | | 2893, 3513, | |
| | factor A | | | | | 4133, 4753, | |
| | | | | | | 5093, 5423 | |
| 637 | vascular | 457104 | 750 | 409911 | 1374 | 1595, 2274, | |
| | endothelial growth | | | | | 2894, 3514, | |
| | factor A | | | | | 4134, 4754, | |
| | | | | | | 5094, 5424 | |
| 638 | vascular | 482630 | 751 | 421561 | 1375 | 1596, 2275, | |
| | endothelial growth | | | | | 2895, 3515, | |
| | factor A | | | | | 4135, 4755, | |
| | | | | | | 5095, 5425 | |
| 639 | vascular | 518689 | 752 | 430829 | 1376 | 1597, 2276, | |
| | endothelial growth | | | | | 2896, 3516, | |
| | factor A | | | | | 4136, 4756, | |
| | | | | | | 5096, 5426 | |
| 640 | vascular | 518824 | 753 | 430002 | 1377 | 1598, 2277, | |
| | endothelial growth | | | | | 2897, 3517, | |
| | factor A | | | | | 4137, 4757, | |
| | | | | | | 5097, 5427 | |
| 641 | vascular | 519767 | 754 | 430594 | 1378 | 1599, 2278, | |
| | endothelial growth | | | | | 2898, 3518, | |
| | factor A | | | | | 4138, 4758, | |
| | | | | | | 5098, 5428 | |
| 642 | vascular | 520948 | 755 | 428321 | 1379 | 1600, 2279, | |
| | endothelial growth | | | | | 2899, 3519, | |
| | factor A | | | | | 4139, 4759, | |
| | | | | | | 5099, 5429 | |
| 643 | vascular | 523125 | 756 | 429008 | 1380 | 1601, 2280, | |
| | endothelial growth | | | | | 2900, 3520, | |
| | factor A | | | | | 4140, 4760, | |
| | | | | | | 5100, 5430 | |
| 644 | vascular | 523873 | 757 | 430479 | 1381 | 1602, 2281, | |
| | endothelial growth | | | | | 2901, 3521, | |
| | factor A | | | | | 4141, 4761, | |
| | | | | | | 5101, 5431 | |
| 645 | vascular | 523950 | 758 | 429643 | 1382 | 1603, 2282, | |
| | endothelial growth | | | | | 2902, 3522, | |
| | factor A | | | | | 4142, 4762, | |
| | | | | | | 5102, 5432 | |
| 646 | vascular | 280193 | 759 | 280193 | 1383 | 1604, 2283, | |
| | endothelial growth | | | | | 2903, 3523, | |
| | factor C | | | | | 4143, 4763, | |
| | | | | | | 20933-21019 | |
| 647 | vasoactive | 367243 | 760 | 356212 | 1384 | 1605, 2284, | |
| | intestinal peptide | | | | | 2904, 3524, | |
| | | | | | | 4144, 4764 | |
| 648 | vasoactive | 367244 | 761 | 356213 | 1385 | 1606, 2285, | |
| | intestinal peptide | | | | | 2905, 3525, | |
| | | | | | | 4145, 4765, | |
| | | | | | | 21020-21106 | |
| 649 | vasoactive | 431366 | 762 | 410356 | 1386 | 1607, 2286, | |
| | intestinal peptide | | | | | 2906, 3526, | |
| | | | | | | 4146, 4766 | |
| 650 | v-myc | 259523 | 763 | 259523 | 1387 | 2287, 2907, | |
| | myelocytomatosis | | | | | 3527, 4147, | |
| | viral oncogene | | | | | 4767 | |
| | homolog (avian) | | | | | | |
| 651 | v-myc | 377970 | 764 | 367207 | 1388 | 2288, 2908, | |
| | myelocytomatosis | | | | | 3528, 4148, | |
| | viral oncogene | | | | | 4768, 21107- | |
| | homolog (avian) | | | | | 21110 | |
| 652 | v-myc | 454617 | 765 | 405312 | 1389 | 2289, 2909, | |
| | myelocytomatosis | | | | | 3529, 4149, | |
| | viral oncogene | | | | | 4769 | |
| | homolog (avian) | | | | | | |
| 653 | v-myc | 524013 | 766 | 430235 | 1390 | 2290, 2910, | |
| | myelocytomatosis | | | | | 3530, 4150, | |
| | viral oncogene | | | | | 4770, 21111- | |
| | homolog (avian) | | | | | 21284 | |
| 654 | von Willebrand | 261405 | 767 | 261405 | 1391 | 1608, 2291, | |
| | factor | | | | | 2911, 3531, | |
| | | | | | | 4151, 4771, | |
| | | | | | | 21285-21423 | |
| 655 | zinc finger, | 403903 | 768 | 384434 | 1392 | 2292, 2912 | |
| | GATA-like | | | | | 3532, 4152, | |
| | protein 1 | | | | | 4772 | |

### Protein Cleavage Signals and Sites

[0288] In one embodiment, the polypeptides of the present invention may include at least one protein cleavage signal containing at least one protein cleavage site. The protein cleavage site may be located at the N-terminus, the C-terminus, at any space between the N- and the C-termini such as, but not limited to, half-way between the N- and C-termini, between the N-terminus and the half way point, between the half way point and the C-terminus, and combinations thereof.

[0289] The polypeptides of the present invention may include, but is not limited to, a proprotein convertase (or prohormone convertase), thrombin or Factor Xa protein cleavage signal. Proprotein convertases are a family of nine proteinases, comprising seven basic amino acid-specific subtilisin-like serine proteinases related to yeast kexin, known as prohormone convertase ⅓ (PC 1/3), PC2, furin, PC4, PC5/6, paired basic amino-acid cleaving enzyme 4 (PACE4) and PC7, and two other subtilases that cleave at non-basic residues, called subtilisin kexin isozyme 1 (SKI-1) and proprotein convertase subtilisin kexin 9 (PCSK9). Non-limiting examples of protein cleavage signal amino acid sequences are listing in Table 7. In Table 7, “X” refers to any amino acid, “n” may be 0, 2, 4 or 6 amino acids and “*” refers to the protein cleavage site. In Table 7, SEQ ID NO: 21426 refers to when n=4 and SEQ ID NO: 21427 refers to when n=6.

TABLE 7
Protein Cleavage Site Sequences

| Protein | Amino Acid | SEQ ID |
|---|---|---|
| Cleavage Signal | Cleavage Sequence | NO |
| Proprotein | R-X-X-R* | 21424 |
| convertase | R-X-K/R-R* | 21425 |
| | K/R-Xn-K/R* | 21426 or |
| | | 21427 |
| Thrombin | L-V-P-R*-G-S | 21428 |
| | L-V-P-R* | 21429 |
| | A/F/G/I/L/T/V/M-A/F/ | 21430 |
| | G/I/L/T/V/W-P-R* | |
| Factor Xa | I-E-G-R* | 21431 |
| | I-D-G-R* | 21432 |
| | A-E-G-R* | 21433 |
| | A/F/G/I/L/T/V/M-D/ | 21434 |
| | E-G-R* | |

[0290] In one embodiment, the primary constructs and the mmRNA of the present invention may be engineered such that the primary construct or mmRNA contains at least one encoded protein cleavage signal. The encoded protein cleavage signal may be located before the start codon, after the start codon, before the coding region, within the coding region such as, but not limited to, half way in the coding region, between the start codon and the half way point, between the half way point and the stop codon, after the coding region, before the stop codon, between two stop codons, after the stop codon and combinations thereof.

[0291] In one embodiment, the primary constructs or mmRNA of the present invention may include at least one encoded protein cleavage signal containing at least one protein cleavage site. The encoded protein cleavage signal may include, but is not limited to, a proprotein convertase (or prohormone convertase), thrombin and/or Factor Xa protein cleavage signal. One of skill in the art may use Table 1 above or other known methods to determine the appropriate encoded protein cleavage signal to include in the primary constructs or mmRNA of the present invention. For example, starting with the signal of Table 7 and considering the codons of Table 1 one can design a signal for the primary construct which can produce a protein signal in the resulting polypeptide.

[0292] In one embodiment, the polypeptides of the present invention include at least one protein cleavage signal and/or site.

[0293] As a non-limiting example, U.S. Pat. No. 7,374,930 and U.S. Pub. No. 20090227660, herein incorporated by reference in their entireties, use a furin cleavage site to cleave the N-terminal methionine of GLP-1 in the expression product from the Golgi apparatus of the cells. In one embodiment, the polypeptides of the present invention include at least one protein cleavage signal and/or site with the proviso that the polypeptide is not GLP-1.

[0294] In one embodiment, the primary constructs or mmRNA of the present invention includes at least one encoded protein cleavage signal and/or site.

[0295] In one embodiment, the primary constructs or mmRNA of the present invention includes at least one encoded protein cleavage signal and/or site with the proviso that the primary construct or mmRNA does not encode GLP-1.

[0296] In one embodiment, the primary constructs or mmRNA of the present invention may include more than one coding region. Where multiple coding regions are present in the primary construct or mmRNA of the present invention, the multiple coding regions may be separated by encoded protein cleavage sites. As a non-limiting example, the primary construct or mmRNA may be signed in an ordered pattern. On such pattern follows AXBY form where A and B are coding regions which may be the same or different coding regions and/or may encode the same or different polypeptides, and X and Y are encoded protein cleavage signals which may encode the same or different protein cleavage signals. A second such pattern follows the form AXYBZ where A and B are coding regions which may be the same or different coding regions and/or may encode the same or different polypeptides, and X, Y and Z are encoded protein cleavage signals which may encode the same or different protein cleavage signals. A third pattern follows the form ABXCY where A, B and C are coding regions which may be the same or different coding regions and/or may encode the same or different polypeptides, and X and Y are encoded protein cleavage signals which may encode the same or different protein cleavage signals.

[0297] In one embodiment, the polypeptides, primary constructs and mmRNA can also contain sequences that encode protein cleavage sites so that the polypeptides, primary constructs and mmRNA can be released from a carrier region or a fusion partner by treatment with a specific protease for said protein cleavage site.

[0298] In one embodiment, the polypeptides, primary constructs and mmRNA of the present invention may include a sequence encoding the 2A peptide. In one embodiment, this sequence may be used to separate the coding region of two or more polypeptides of interest. As a non-limiting example, the sequence encoding the 2A peptide may be between coding region A and coding region B (A-2Apep-B). The presence of the 2A peptide would result in the cleavage of one long protein into protein A, protein B and the 2A peptide. Protein A and protein B may be the same or different polypeptides of interest. In another embodiment, the 2A peptide may be used in the polynucleotides, primary constructs and/or mmRNA of the present invention to produce two, three, four, five, six, seven, eight, nine, ten or more proteins.

### Incorporating Post Transcriptional Control Modulators

[0299] In one embodiment, the polynucleotides, primary constructs and/or mmRNA of the present invention may include at least one post transcriptional control modulator. These post transcriptional control modulators may be, but are not limited to, small molecules, compounds and regulatory sequences. As a non-limiting example, post transcriptional control may be achieved using small molecules identified by PTC Therapeutics Inc. (South Plainfield, NJ) using their GEMS™ (Gene Expression Modulation by Small-Moleclues) screening technology.

[0300] The post transcriptional control modulator may be a gene expression modulator which is screened by the method detailed in or a gene expression modulator described in International Publication No. WO2006022712, herein incorporated by reference in its entirety. Methods identifying RNA regulatory sequences involved in translational control are described in International Publication No. WO2004067728, herein incorporated by reference in its entirety; methods identifying compounds that modulate untranslated region dependent expression of a gene are described in International Publication No. WO2004065561, herein incorporated by reference in its entirety.

[0301] In one embodiment, the polynucleotides, primary constructs and/or mmRNA of the present invention may include at least one post transcriptional control modulator is located in the 5′ and/or the 3′ untranslated region of the polynucleotides, primary constructs and/or mmRNA of the present invention

[0302] In another embodiment, the polynucleotides, primary constructs and/or mmRNA of the present invention may include at least one post transcription control modulator to modulate premature translation termination. The post transcription control modulators may be compounds described in or a compound found by methods outlined in International Publication Nso. WO2004010106, WO2006044456, WO2006044682, WO2006044503 and WO2006044505, each of which is herein incorporated by reference in its entirety. As a non-limiting example, the compound may bind to a region of the 28S ribosomal RNA in order to modulate premature translation termination (See e.g., WO2004010106, herein incorporated by reference in its entirety).

[0303] In one embodiment, polynucleotides, primary constructs and/or mmRNA of the present invention may include at least one post transcription control modulator to alter protein expression. As a non-limiting example, the expression of VEGF may be regulated using the compounds described in or a compound found by the methods described in International Publication Nos. WO2005118857, WO2006065480, WO2006065479 and WO2006058088, each of which is herein incorporated by reference in its entirety.

[0304] The polynucleotides, primary constructs and/or mmRNA of the present invention may include at least one post transcription control modulator to control translation. In one embodiment, the post transcription control modulator may be a RNA regulatory sequence. As a non-limiting example, the RNA regulatory sequence may be identified by the methods described in International Publication No. WO2006071903, herein incorporated by reference in its entirety.

### III. Modifications

[0305] Herein, in a polynucleotide (such as a primary construct or an mRNA molecule), the terms “modification” or, as appropriate, “modified” refer to modification with respect to A, G, U or C ribonucleotides. Generally, herein, these terms are not intended to refer to the ribonucleotide modifications in naturally occurring 5′-terminal mRNA cap moieties. In a polypeptide, the term “modification” refers to a modification as compared to the canonical set of 20 amino acids, moiety)

[0306] The modifications may be various distinct modifications. In some embodiments, the coding region, the flanking regions and/or the terminal regions may contain one, two, or more (optionally different) nucleoside or nucleotide modifications. In some embodiments, a modified polynucleotide, primary construct, or mmRNA introduced to a cell may exhibit reduced degradation in the cell, as compared to an unmodified polynucleotide, primary construct, or mmRNA.

[0307] The polynucleotides, primary constructs, and mmRNA can include any useful modification, such as to the sugar, the nucleobase, or the internucleoside linkage (e.g. to a linking phosphate/to a phosphodiester linkage/to the phosphodiester backbone). One or more atoms of a pyrimidine nucleobase may be replaced or substituted with optionally substituted amino, optionally substituted thiol, optionally substituted alkyl (e.g., methyl or ethyl), or halo (e.g., chloro or fluoro). In certain embodiments, modifications (e.g., one or more modifications) are present in each of the sugar and the internucleoside linkage. Modifications according to the present invention may be modifications of ribonucleic acids (RNAs) to deoxyribonucleic acids (DNAs), threose nucleic acids (TNAs), glycol nucleic acids (GNAs), peptide nucleic acids (PNAs), locked nucleic acids (LNAs) or hybrids thereof). Additional modifications are described herein.

[0308] As described herein, the polynucleotides, primary constructs, and mmRNA of the invention do not substantially induce an innate immune response of a cell into which the mRNA is introduced. Featues of an induced innate immune response include 1) increased expression of pro-inflammatory cytokines, 2) activation of intracellular PRRs (RIG-I, MDA5, etc, and/or 3) termination or reduction in protein translation.

[0309] In certain embodiments, it may desirable to intracellularly degrade a modified nucleic acid molecule introduced into the cell. For example, degradation of a modified nucleic acid molecule may be preferable if precise timing of protein production is desired. Thus, in some embodiments, the invention provides a modified nucleic acid molecule containing a degradation domain, which is capable of being acted on in a directed manner within a cell. In another aspect, the present disclosure provides polynucleotides comprising a nucleoside or nucleotide that can disrupt the binding of a major groove interacting, e.g. binding, partner with the polynucleotide (e.g., where the modified nucleotide has decreased binding affinity to major groove interacting partner, as compared to an unmodified nucleotide).

[0310] The polynucleotides, primary constructs, and mmRNA can optionally include other agents (e.g., RNAi-inducing agents, RNAi agents, siRNAs, shRNAs, miRNAs, antisense RNAs, ribozymes, catalytic DNA, tRNA, RNAs that induce triple helix formation, aptamers, vectors, etc.). In some embodiments, the polynucleotides, primary constructs, or mmRNA may include one or more messenger RNAs (mRNAs) and one or more modified nucleoside or nucleotides (e.g., mmRNA molecules). Details for these polynucleotides, primary constructs, and mmRNA follow.

### Polynucleotides and Primary Constructs

[0311] The polynucleotides, primary constructs, and mmRNA of the invention includes a first region of linked nucleosides encoding a polypeptide of interest, a first flanking region located at the 5′ terminus of the first region, and a second flanking region located at the 3′ terminus of the first region.

[0312] In some embodiments, the polynucleotide, primary construct, or mmRNA (e.g., the first region, first flanking region, or second flanking region) includes n number of linked nucleosides having Formula (Ia) or Formula (Ia-1):

[chemical structure]

or a pharmaceutically acceptable salt or stereoisomer thereof,
[0313] wherein
[0314] U is O, S, N(R^{U})ₙᵤ, or C(R^{U})ₙᵤ, wherein nu is an integer from 0 to 2 and each R^{U} is, independently, H, halo, or optionally substituted alkyl;
[0315] --- is a single bond or absent;
[0316] each of R¹, R²′, R¹″, R²″, R¹, R², R³, R⁴, and R⁵ is, independently, if present, H, halo, hydroxy, thiol, optionally substituted alkyl, optionally substituted alkoxy, optionally substituted alkenyloxy, optionally substituted alkynyloxy, optionally substituted aminoalkoxy, optionally substituted alkoxyalkoxy, optionally substituted hydroxyalkoxy, optionally substituted amino, azido, optionally substituted aryl, optionally substituted aminoalkyl, optionally substituted aminoalkenyl, optionally substituted aminoalkynyl, or absent; wherein the combination of R3 with one or more of R1′, R1″, R2′, R2″, or R5 (e.g., the combination of R1′ and R3, the combination of R1″ and R3, the combination of R2′ and R3, the combination of R2″ and R3, or the combination of R5 and R3) can join together to form optionally substituted alkylene or optionally substituted heteroalkylene and, taken together with the carbons to which they are attached, provide an optionally substituted heterocyclyl (e.g., a bicyclic, tricyclic, or tetracyclic heterocyclyl); wherein the combination of R5 with one or more of R1′, R1″, R2′, or R2″ (e.g., the combination of R1′ and R5, the combination of R1″ and R5, the combination of R2′ and R5, or the combination of R2″ and R5) can join together to form optionally substituted alkylene or optionally substituted heteroalkylene and, taken together with the carbons to which they are attached, provide an optionally substituted heterocyclyl (e.g., a bicyclic, tricyclic, or tetracyclic heterocyclyl); and wherein the combination of R⁴ and one or more of R¹′, R¹″, R²′, R²″, R³, or R⁵ can join together to form optionally substituted alkylene or optionally substituted heteroalkylene and, taken together with the carbons to which they are attached, provide an optionally substituted heterocyclyl (e.g., a bicyclic, tricyclic, or tetracyclic heterocyclyl); each of m′ and m″ is, independently, an integer from 0 to 3 (e.g., from 0 to 2, from 0 to 1, from 1 to 3, or from 1 to 2);
[0317] each of Y¹, Y², and Y³, is, independently, O, S, Se, —NR^{N1}—, optionally substituted alkylene, or optionally substituted heteroalkylene, wherein R^{N1} is H, optionally substituted alkyl, optionally substituted alkenyl, optionally substituted alkynyl, optionally substituted aryl, or absent;
[0318] each Y⁴ is, independently, H, hydroxy, thiol, boranyl, optionally substituted alkyl, optionally substituted alkenyl, optionally substituted alkynyl, optionally substituted alkoxy, optionally substituted alkenyloxy, optionally substituted alkynyloxy, optionally substituted thioalkoxy, optionally substituted alkoxyalkoxy, or optionally substituted amino;
[0319] each Y⁵ is, independently, O, S, Se, optionally substituted alkylene (e.g., methylene), or optionally substituted heteroalkylene;
[0320] n is an integer from 1 to 100,000; and
[0321] B is a nucleobase (e.g., a purine, a pyrimidine, or derivatives thereof), wherein the combination of B and R¹″, the combination of B and R²′, the combination of B and R¹″, or the combination of B and R²″ can, taken together with the carbons to which they are attached, optionally form a bicyclic group (e.g., a bicyclic heterocyclyl) or wherein the combination of B, R¹″, and R³ or the combination of B, R²″, and R³ can optionally form a tricyclic or tetracyclic group (e.g., a tricyclic or tetracyclic heterocyclyl, such as in Formula (IIo)-(IIp) herein). In some embodiments, the polynucleotide, primary construct, or mmRNA includes a modified ribose. In some embodiments, the polynucleotide, primary construct, or mmRNA (e.g., the first region, the first flanking region, or the second flanking region) includes n number of linked nucleosides having Formula (Ia-2)-(Ia-5) or a pharmaceutically acceptable salt or stereoisomer thereof.

[chemical structure]

[0322] In some embodiments, the polynucleotide, primary construct, or mmRNA (e.g., the first region, the first flanking region, or the second flanking region) includes n number of linked nucleosides having Formula (Ib) or Formula (Ib-1):

[chemical structure]

or a pharmaceutically acceptable salt or stereoisomer thereof,
[0323] wherein
[0324] U is O, S, N(R^{U})ₙᵤ, or C(R^{U})ₙᵤ, wherein nu is an integer from 0 to 2 and each
[0325] R^{U} is, independently, H, halo, or optionally substituted alkyl;
[0326] --- is a single bond or absent;
[0327] each of R¹, R³′, R³″, and R⁴ is, independently, H, halo, hydroxy, optionally substituted alkyl, optionally substituted alkoxy, optionally substituted alkenyloxy, optionally substituted alkynyloxy, optionally substituted aminoalkoxy, optionally substituted alkoxyalkoxy, optionally substituted hydroxyalkoxy, optionally substituted amino, azido, optionally substituted aryl, optionally substituted aminoalkyl, optionally substituted aminoalkenyl, optionally substituted aminoalkynyl, or absent; and wherein the combination of R¹ and R³′ or the combination of R¹ and R³″ can be taken together to form optionally substituted alkylene or optionally substituted heteroalkylene (e.g., to produce a locked nucleic acid);
[0328] each R⁵ is, independently, H, halo, hydroxy, optionally substituted alkyl, optionally substituted alkoxy, optionally substituted alkenyloxy, optionally substituted alkynyloxy, optionally substituted aminoalkoxy, optionally substituted alkoxyalkoxy, or absent;
[0329] each of Y¹, Y², and Y³ is, independently, O, S, Se, —NR^{N1}—, optionally substituted alkylene, or optionally substituted heteroalkylene, wherein R^{N1} is H, optionally substituted alkyl, optionally substituted alkenyl, optionally substituted alkynyl, or optionally substituted aryl;
[0330] each Y⁴ is, independently, H, hydroxy, thiol, boranyl, optionally substituted alkyl, optionally substituted alkenyl, optionally substituted alkynyl, optionally substituted alkoxy, optionally substituted alkenyloxy, optionally substituted alkynyloxy, optionally substituted alkoxyalkoxy, or optionally substituted amino;
[0331] n is an integer from 1 to 100,000; and
[0332] B is a nucleobase.

[0333] In some embodiments, the polynucleotide, primary construct, or mmRNA (e.g., the first region, first flanking region, or second flanking region) includes n number of linked nucleosides having Formula (Ic):

[chemical structure]

or a pharmaceutically acceptable salt or stereoisomer thereof,
[0334] wherein
[0335] U is O, S, N(R^{U})ₙᵤ, or C(R^{U})ₙᵤ, wherein nu is an integer from 0 to 2 and each R^{U} is, independently, H, halo, or optionally substituted alkyl;
[0336] --- is a single bond or absent;
[0337] each of B¹, B², and B³ is, independently, a nucleobase (e.g., a purine, a pyrimidine, or derivatives thereof, as described herein), H, halo, hydroxy, thiol, optionally substituted alkyl, optionally substituted alkoxy, optionally substituted alkenyloxy, optionally substituted alkynyloxy, optionally substituted aminoalkoxy, optionally substituted alkoxyalkoxy, optionally substituted hydroxyalkoxy, optionally substituted amino, azido, optionally substituted aryl, optionally substituted aminoalkyl, optionally substituted aminoalkenyl, or optionally substituted aminoalkynyl, wherein one and only one of B¹, B², and B³ is a nucleobase;
[0338] each of R^{b1}, R^{b2}, R^{b3}, R³, and R⁵ is, independently, H, halo, hydroxy, thiol, optionally substituted alkyl, optionally substituted alkoxy, optionally substituted alkenyloxy, optionally substituted alkynyloxy, optionally substituted aminoalkoxy, optionally substituted alkoxyalkoxy, optionally substituted hydroxyalkoxy, optionally substituted amino, azido, optionally substituted aryl, optionally substituted aminoalkyl, optionally substituted aminoalkenyl or optionally substituted aminoalkynyl;
[0339] each of Y¹, Y², and Y³, is, independently, O, S, Se, —NR^{N1}—, optionally substituted alkylene, or optionally substituted heteroalkylene, wherein R^{N1} is H, optionally substituted alkyl, optionally substituted alkenyl, optionally substituted alkynyl, or optionally substituted aryl;
[0340] each Y⁴ is, independently, H, hydroxy, thiol, boranyl, optionally substituted alkyl, optionally substituted alkenyl, optionally substituted alkynyl, optionally substituted alkoxy, optionally substituted alkenyloxy, optionally substituted alkynyloxy, optionally substituted thioalkoxy, optionally substituted alkoxyalkoxy, or optionally substituted amino;
[0341] each Y⁵ is, independently, O, S, Se, optionally substituted alkylene (e.g., methylene), or optionally substituted heteroalkylene;
[0342] n is an integer from 1 to 100,000; and
[0343] wherein the ring including U can include one or more double bonds.

[0344] In particular embodiments, the ring including U does not have a double bond between U-CB³R^{b3} or between CB³R^{b3}—C^{B2}R^{b2}.

[0345] In some embodiments, the polynucleotide, primary construct, or mmRNA (e.g., the first region, first flanking region, or second flanking region) includes n number of linked nucleosides having Formula (Id):

[chemical structure]

or a pharmaceutically acceptable salt or stereoisomer thereof,
[0346] wherein
[0347] U is O, S, N(R^{U})ₙᵤ, or C(R^{U})ₙᵤ, wherein nu is an integer from 0 to 2 and each R^{U} is, independently, H, halo, or optionally substituted alkyl;
[0348] each R³ is, independently, H, halo, hydroxy, thiol, optionally substituted alkyl, optionally substituted alkoxy, optionally substituted alkenyloxy, optionally substituted alkynyloxy, optionally substituted aminoalkoxy, optionally substituted alkoxyalkoxy, optionally substituted hydroxyalkoxy, optionally substituted amino, azido, optionally substituted aryl, optionally substituted aminoalkyl, optionally substituted aminoalkenyl, or optionally substituted aminoalkynyl;
[0349] each of Y¹, Y², and Y³, is, independently, O, S, Se, —NR^{N1}—, optionally substituted alkylene, or optionally substituted heteroalkylene, wherein R^{N1} is H, optionally substituted alkyl, optionally substituted alkenyl, optionally substituted alkynyl, or optionally substituted aryl;
[0350] each Y⁴ is, independently, H, hydroxy, thiol, boranyl, optionally substituted alkyl, optionally substituted alkenyl, optionally substituted alkynyl, optionally substituted alkoxy, optionally substituted alkenyloxy, optionally substituted alkynyloxy, optionally substituted thioalkoxy, optionally substituted alkoxyalkoxy, or optionally substituted amino;
[0351] each Y⁵ is, independently, O, S, optionally substituted alkylene (e.g., methylene), or optionally substituted heteroalkylene;
[0352] n is an integer from 1 to 100,000; and
[0353] B is a nucleobase (e.g., a purine, a pyrimidine, or derivatives thereof).

[0354] In some embodiments, the polynucleotide, primary construct, or mmRNA (e.g., the first region, first flanking region, or second flanking region) includes n number of linked nucleosides having Formula (Ie):

[chemical structure]

or a pharmaceutically acceptable salt or stereoisomer thereof,
[0355] wherein
[0356] each of U′ and U″ is, independently, O, S, N(R^{U})ₙᵤ, or C(R^{U})ₙᵤ, wherein nu is an integer from 0 to 2 and each R^{U} is, independently, H, halo, or optionally substituted alkyl;
[0357] each R⁶ is, independently, H, halo, hydroxy, thiol, optionally substituted alkyl, optionally substituted alkoxy, optionally substituted alkenyloxy, optionally substituted alkynyloxy, optionally substituted aminoalkoxy, optionally substituted alkoxyalkoxy, optionally substituted hydroxyalkoxy, optionally substituted amino, azido, optionally substituted aryl, optionally substituted aminoalkyl, optionally substituted aminoalkenyl, or optionally substituted aminoalkynyl;
[0358] each Y⁵′ is, independently, O, S, optionally substituted alkylene (e.g., methylene or ethylene), or optionally substituted heteroalkylene;
[0359] n is an integer from 1 to 100,000; and
[0360] B is a nucleobase (e.g., a purine, a pyrimidine, or derivatives thereof).

[0361] In some embodiments, the polynucleotide, primary construct, or mmRNA (e.g., the first region, first flanking region, or second flanking region) includes n number of linked nucleosides having Formula (If) or (If-1).

[chemical structure]

or a pharmaceutically acceptable salt or stereoisomer thereof,
[0362] wherein
[0363] each of U′ and U″ is, independently, O, S, N, N(R^{U})ₙᵤ, or C(R^{U})ₙᵤ, wherein nu is an integer from 0 to 2 and each R^{U} is, independently, H, halo, or optionally substituted alkyl (e.g., U′ is O and U″ is N);
[0364] --- is a single bond or absent;
[0365] each of R¹, R²′, R¹″, R²″, R³, and R⁴ is, independently, H, halo, hydroxy, thiol, optionally substituted alkyl, optionally substituted alkoxy, optionally substituted alkenyloxy, optionally substituted alkynyloxy, optionally substituted aminoalkoxy, optionally substituted alkoxyalkoxy, optionally substituted hydroxyalkoxy, optionally substituted amino, azido, optionally substituted aryl, optionally substituted aminoalkyl, optionally substituted aminoalkenyl, optionally substituted aminoalkynyl, or absent; and wherein the combination of R¹′ and R³, the combination of R¹″ and R³, the combination of R²′ and R³, or the combination of R²″ and R³ can be taken together to form optionally substituted alkylene or optionally substituted heteroalkylene (e.g., to produce a locked nucleic acid); each of m′ and m″ is, independently, an integer from 0 to 3 (e.g., from 0 to 2, from 0 to 1, from 1 to 3, or from 1 to 2);
[0366] each of Y¹, Y², and Y³, is, independently, O, S, Se, —NR^{N1}—, optionally substituted alkylene, or optionally substituted heteroalkylene, wherein R^{N1} is H, optionally substituted alkyl, optionally substituted alkenyl, optionally substituted alkynyl, optionally substituted aryl, or absent;
[0367] each Y⁴ is, independently, H, hydroxy, thiol, boranyl, optionally substituted alkyl, optionally substituted alkenyl, optionally substituted alkynyl, optionally substituted alkoxy, optionally substituted alkenyloxy, optionally substituted alkynyloxy, optionally substituted thioalkoxy, optionally substituted alkoxyalkoxy, or optionally substituted amino;
[0368] each Y⁵ is, independently, O, S, Se, optionally substituted alkylene (e.g., methylene), or optionally substituted heteroalkylene;
[0369] n is an integer from 1 to 100,000; and
[0370] B is a nucleobase (e.g., a purine, a pyrimidine, or derivatives thereof).

[0371] In some embodiments of the polynucleotides, primary constructs, or mmRNA (e.g., Formulas (Ia), (Ia-1)-(Ia-3), (Ib)-(If), and (IIa)-(IIp)), the ring including U has one or two double bonds.

[0372] In some embodiments of the polynucleotides, primary constructs, or mmRNA (e.g., Formulas (Ia)-(Ia-5), (Ib)-(If-1), (IIa)-(IIp), (IIb-1), (IIb-2), (IIc-1)-(IIc-2), (IIn-1), (IIn-2), (IVa)-(IVl), and (IXa)-(IXr)), each of R¹, R¹″, and R¹″, if present, is H. In further embodiments, each of R², R²′, and R²″, if present, is, independently, H, halo (e.g., fluoro), hydroxy, optionally substituted alkoxy (e.g., methoxy or ethoxy), or optionally substituted alkoxyalkoxy. In particular embodiments, alkoxyalkoxy is —(CH₂)ₛ₂(OCH₂CH₂)ₛ₁(CH₂)ₛ₃OR′, wherein s1 is an integer from 1 to 10 (e.g., from 1 to 6 or from 1 to 4), each of s2 and s3, independently, is an integer from 0 to 10 (e.g., from 0 to 4, from 0 to 6, from 1 to 4, from 1 to 6, or from 1 to 10), and R′ is H or C₁₋₂₀ alkyl). In some embodiments, s2 is 0, s1 is 1 or 2, s3 is 0 or 1, and R′ is C₁₋₆ alkyl.

[0373] In some embodiments of the polynucleotides, primary constructs, or mmRNA (e.g., Formulas (Ia)-(Ia-5), (Ib)-(If-1), (IIa)-(IIp), (IIb-1), (IIb-2), (IIc-1)-(IIc-2), (IIn-1), (IIn-2), (IVa)-(IVl), and (IXa)-(IXr)), each of R², R²′, and R²″, if present, is H. In further embodiments, each of R¹, R¹′, and R¹″, if present, is, independently, H, halo (e.g., fluoro), hydroxy, optionally substituted alkoxy (e.g., methoxy or ethoxy), or optionally substituted alkoxyalkoxy. In particular embodiments, alkoxyalkoxy is —(CH₂)ₛ₂(OCH₂CH₂)ₛ₁(CH₂)ₛ₃OR′, wherein s1 is an integer from 1 to 10 (e.g., from 1 to 6 or from 1 to 4), each of s2 and s3, independently, is an integer from 0 to 10 (e.g., from 0 to 4, from 0 to 6, from 1 to 4, from 1 to 6, or from 1 to 10), and R′ is H or C₁₋₂₀ alkyl). In some embodiments, s2 is 0, s1 is 1 or 2, s3 is 0 or 1, and R′ is C₁₋₆ alkyl.

[0374] In some embodiments of the polynucleotides, primary constructs, or mmRNA (e.g., Formulas (Ia)-(Ia-5), (Ib)-(If-1), (IIa)-(IIp), (IIb-1), (IIb-2), (IIc-1)-(IIc-2), (IIn-1), (IIn-2), (IVa)-(IVl), and (IXa)-(IXr)), each of R³, R⁴, and R⁵ is, independently, H, halo (e.g., fluoro), hydroxy, optionally substituted alkyl, optionally substituted alkoxy (e.g., methoxy or ethoxy), or optionally substituted alkoxyalkoxy. In particular embodiments, R³ is H, R⁴ is H, R⁵ is H, or R³, R⁴, and R⁵ are all H. In particular embodiments, R³ is C₁₋₆ alkyl, R⁴ is C₁₋₆ alkyl, R⁵ is C₁₋₆ alkyl, or R³, R⁴, and R⁵ are all C₁₋₆ alkyl. In particular embodiments, R³ and R⁴ are both H, and R⁵ is C₁₋₆ alkyl.

[0375] In some embodiments of the polynucleotides, primary constructs, or mmRNA (e.g., Formulas (Ia)-(Ia-5), (Ib)-(If-1), (IIa)-(IIp), (IIb-1), (IIb-2), (IIc-1)-(IIc-2), (IIn-1), (IIn-2), (IVa)-(IVl), and (IXa)-(IXr)), R³ and R⁵ join together to form optionally substituted alkylene or optionally substituted heteroalkylene and, taken together with the carbons to which they are attached, provide an optionally substituted heterocyclyl (e.g., a bicyclic, tricyclic, or tetracyclic heterocyclyl, such as trans-3′,4′ analogs, wherein R³ and R⁵ join together to form heteroalkylene (e.g., —(CH₂)_{b1}O(CH₂)_{b2}O(CH₂)_{b3}—, wherein each of b1, b2, and b3 are, independently, an integer from 0 to 3).

[0376] In some embodiments of the polynucleotides, primary constructs, or mmRNA (e.g., Formulas (Ia)-(Ia-5), (Ib)-(If-1), (IIa)-(IIp), (IIb-1), (IIb-2), (IIc-1)-(IIc-2), (IIn-1), (IIn-2), (IVa)-(IVl), and (IXa)-(IXr)), R³ and one or more of R¹′, R¹″, R²′, R²″, or R⁵ join together to form optionally substituted alkylene or optionally substituted heteroalkylene and, taken together with the carbons to which they are attached, provide an optionally substituted heterocyclyl (e.g., a bicyclic, tricyclic, or tetracyclic heterocyclyl, R³ and one or more of R¹′, R¹″, R²′, R²″, or R⁵ join together to form heteroalkylene (e.g., —(CH₂)_{b1}O(CH₂)_{b2}O(CH₂)_{b3}—, wherein each of b1, b2, and b3 are, independently, an integer from 0 to 3).

[0377] In some embodiments of the polynucleotides, primary constructs, or mmRNA (e.g., Formulas (Ia)-(Ia-5), (Ib)-(If-1), (IIa)-(IIp), (IIb-1), (IIb-2), (IIc-1)-(IIc-2), (IIn-1), (IIn-2), (IVa)-(IVl), and (IXa)-(IXr)), R⁵ and one or more of R¹′, R¹″, R²′, or R²″ join together to form optionally substituted alkylene or optionally substituted heteroalkylene and, taken together with the carbons to which they are attached, provide an optionally substituted heterocyclyl (e.g., a bicyclic, tricyclic, or tetracyclic heterocyclyl, R⁵ and one or more of R¹′, R¹″, R²′, or R²″ join together to form heteroalkylene (e.g., —(CH₂)_{b1}O(CH₂)_{b2}O(CH₂)_{b3}—, wherein each of b1, b2, and b3 are, independently, an integer from 0 to 3).

[0378] In some embodiments of the polynucleotides, primary constructs, or mmRNA (e.g., Formulas (Ia)-(Ia-5), (Ib)-(If-1), (IIa)-(IIp), (IIb-1), (IIb-2), (IIc-1)-(IIc-2), (IIn-1), (IIn-2), (IVa)-(IVl), and (IXa)-(IXr)), each Y² is, independently, O, S, or —NR^{N1}—, wherein R^{N1} is H, optionally substituted alkyl, optionally substituted alkenyl, optionally substituted alkynyl, or optionally substituted aryl. In particular embodiments, Y² is NR^{N1}— wherein R^{N1} is H or optionally substituted alkyl (e.g., C₁₋₆ alkyl, such as methyl, ethyl, isopropyl, or n-propyl).

[0379] In some embodiments of the polynucleotides, primary constructs, or mmRNA (e.g., Formulas (Ia)-(Ia-5), (Ib)-(If-1), (IIa)-(IIp), (IIb-1), (IIb-2), (IIc-1)-(IIc-2), (IIn-1), (IIn-2), (IVa)-(IVl), and (IXa)-(IXr)), each Y³ is, independently, O or S.

[0380] In some embodiments of the polynucleotides, primary constructs, or mmRNA (e.g., Formulas (Ia)-(Ia-5), (Ib)-(If-1), (IIa)-(IIp), (IIb-1), (IIb-2), (IIc-1)-(IIc-2), (IIn-1), (IIn-2), (IVa)-(IVl), and (IXa)-(IXr)), R¹ is H; each R² is, independently, H, halo (e.g., fluoro), hydroxy, optionally substituted alkoxy (e.g., methoxy or ethoxy), or optionally substituted alkoxyalkoxy (e.g., —(CH₂)ₛ₂(OCH₂CH₂)ₛ₁(CH₂)ₛ₃OR′, wherein s1 is an integer from 1 to 10 (e.g., from 1 to 6 or from 1 to 4), each of s2 and s3, independently, is an integer from 0 to 10 (e.g., from 0 to 4, from 0 to 6, from 1 to 4, from 1 to 6, or from 1 to 10), and R′ is H or C₁₋₂₀ alkyl, such as wherein s2 is 0, s1 is 1 or 2, s3 is 0 or 1, and R′ is C₁₋₆ alkyl); each Y² is, independently, O or —NR^{N1}—, wherein R^{N1} is H, optionally substituted alkyl, optionally substituted alkenyl, optionally substituted alkynyl, or optionally substituted aryl (e.g., wherein R^{N1} is H or optionally substituted alkyl (e.g., C₁₋₆ alkyl, such as methyl, ethyl, isopropyl, or n-propyl)); and each Y³ is, independently, O or S (e.g., S). In further embodiments, R³ is H, halo (e.g., fluoro), hydroxy, optionally substituted alkyl, optionally substituted alkoxy (e.g., methoxy or ethoxy), or optionally substituted alkoxyalkoxy. In yet further embodiments, each Y¹ is, independently, O or —NR^{N1}—, wherein R^{N1} is H, optionally substituted alkyl, optionally substituted alkenyl, optionally substituted alkynyl, or optionally substituted aryl (e.g., wherein R^{N1} is H or optionally substituted alkyl (e.g., C₁₋₆ alkyl, such as methyl, ethyl, isopropyl, or n-propyl)); and each Y⁴ is, independently, H, hydroxy, thiol, optionally substituted alkyl, optionally substituted alkoxy, optionally substituted thioalkoxy, optionally substituted alkoxyalkoxy, or optionally substituted amino.

[0381] In some embodiments of the polynucleotides, primary constructs, or mmRNA (e.g., Formulas (Ia)-(Ia-5), (Ib)-(If-1), (IIa)-(IIp), (IIb-1), (IIb-2), (IIc-1)-(IIc-2), (IIn-1), (IIn-2), (IVa)-(IVl), and (IXa)-(IXr)), each R¹ is, independently, H, halo (e.g., fluoro), hydroxy, optionally substituted alkoxy (e.g., methoxy or ethoxy), or optionally substituted alkoxyalkoxy (e.g., —(CH₂)ₛ₂(OCH₂CH₂)ₛ₁(CH₂)ₛ₃OR′, wherein s1 is an integer from 1 to 10 (e.g., from 1 to 6 or from 1 to 4), each of s2 and s3, independently, is an integer from 0 to 10 (e.g., from 0 to 4, from 0 to 6, from 1 to 4, from 1 to 6, or from 1 to 10), and R′ is H or C₁₋₂₀ alkyl, such as wherein s2 is 0, s1 is 1 or 2, s3 is 0 or 1, and R′ is C₁₋₆ alkyl); R² is H; each Y² is, independently, O or —NR^{N1}—, wherein R^{N1} is H, optionally substituted alkyl, optionally substituted alkenyl, optionally substituted alkynyl, or optionally substituted aryl (e.g., wherein R^{N1} is H or optionally substituted alkyl (e.g., C₁₋₆ alkyl, such as methyl, ethyl, isopropyl, or n-propyl)); and each Y³ is, independently, O or S (e.g., S). In further embodiments, R³ is H, halo (e.g., fluoro), hydroxy, optionally substituted alkyl, optionally substituted alkoxy (e.g., methoxy or ethoxy), or optionally substituted alkoxyalkoxy. In yet further embodiments, each Y¹ is, independently, O or —NR^{N1}—, wherein R^{N1} is H, optionally substituted alkyl, optionally substituted alkenyl, optionally substituted alkynyl, or optionally substituted aryl (e.g., wherein R^{N1} is H or optionally substituted alkyl (e.g., C₁₋₆ alkyl, such as methyl, ethyl, isopropyl, or n-propyl)); and each Y⁴ is, independently, H, hydroxy, thiol, optionally substituted alkyl, optionally substituted alkoxy, optionally substituted thioalkoxy, optionally substituted alkoxyalkoxy, or optionally substituted amino.

[0382] In some embodiments of the polynucleotides, primary constructs, or mmRNA (e.g., Formulas (Ia)-(Ia-5), (Ib)-(If-1), (IIa)-(IIp), (IIb-1), (IIb-2), (IIc-1)-(IIc-2), (IIn-1), (IIn-2), (IVa)-(IVl), and (IXa)-(IXr)), the ring including U is in the β-D (e.g., β-D-ribo) configuration.

[0383] In some embodiments of the polynucleotides, primary constructs, or mmRNA (e.g., Formulas (Ia)-(Ia-5), (Ib)-(If-1), (IIa)-(IIp), (IIb-1), (IIb-2), (IIc-1)-(IIc-2), (IIn-1), (IIn-2), (IVa)-(IVl), and (IXa)-(IXr)), the ring including U is in the α-L (e.g., α-L-ribo) configuration.

[0384] In some embodiments of the polynucleotides, primary constructs, or mmRNA (e.g., Formulas (Ia)-(Ia-5), (Ib)-(If-1), (IIa)-(IIp), (IIb-1), (IIb-2), (IIc-1)-(IIc-2), (IIn-1), (IIn-2), (IVa)-(IVl), and (IXa)-(IXr)), one or more B is not pseudouridine (ψ) or 5-methyl-cytidine (m⁵C). In some embodiments, about 10% to about 100% of n number of B nucleobases is not W or m⁵C (e.g., from 10% to 20%, from 10% to 35%, from 10% to 50%, from 10% to 60%, from 10% to 75%, from 10% to 90%, from 10% to 95%, from 10% to 98%, from 10% to 99%, from 20% to 35%, from 20% to 50%, from 20% to 60%, from 20% to 75%, from 20% to 90%, from 20% to 95%, from 20% to 98%, from 20% to 99%, from 20% to 100%, from 50% to 60%, from 50% to 75%, from 50% to 90%, from 50% to 95%, from 50% to 98%, from 50% to 99%, from 50% to 100%, from 75% to 90%, from 75% to 95%, from 75% to 98%, from 75% to 99%, and from 75% to 100% of n number of B is not W or m⁵C). In some embodiments, B is not ψ or m⁵C.

[0385] In some embodiments of the polynucleotides, primary constructs, or mmRNA (e.g., Formulas (Ia)-(Ia-5), (Ib)-(If-1), (IIa)-(IIp), (IIb-1), (IIb-2), (IIc-1)-(IIc-2), (IIn-1), (IIn-2), (IVa)-(IVl), and (IXa)-(IXr)), when B is an unmodified nucleobase selected from cytosine, guanine, uracil and adenine, then at least one of Y¹, Y², or Y³ is not O.

[0386] In some embodiments, the polynucleotide, primary construct, or mmRNA includes a modified ribose. In some embodiments, the polynucleotide, primary construct, or mmRNA (e.g., the first region, the first flanking region, or the second flanking region) includes n number of linked nucleosides having Formula (IIa)-(IIc):

[chemical structure]

or a pharmaceutically acceptable salt or stereoisomer thereof. In particular embodiments, U is O or C(R^{U})ₙᵤ, wherein nu is an integer from 0 to 2 and each R^{U} is, independently, H, halo, or optionally substituted alkyl (e.g., U is —CH₂— or —CH—). In other embodiments, each of R¹, R², R³, R⁴, and R⁵ is, independently, H, halo, hydroxy, thiol, optionally substituted alkyl, optionally substituted alkoxy, optionally substituted alkenyloxy, optionally substituted alkynyloxy, optionally substituted aminoalkoxy, optionally substituted alkoxyalkoxy, optionally substituted hydroxyalkoxy, optionally substituted amino, azido, optionally substituted aryl, optionally substituted aminoalkyl, optionally substituted aminoalkenyl, optionally substituted aminoalkynyl, or absent (e.g., each R¹ and R² is, independently, H, halo, hydroxy, optionally substituted alkyl, or optionally substituted alkoxy; each R³ and R⁴ is, independently, H or optionally substituted alkyl; and R⁵ is H or hydroxy), and [symbol] is a single bond or double bond.

[0387] In particular embodiments, the polynucleotidesor mmRNA includes n number of linked nucleosides having Formula (IIb-1)-(IIb-2):

[chemical structure]

or a pharmaceutically acceptable salt or stereoisomer thereof. In some embodiments, U is O or C(R^{U})ₙᵤ, wherein nu is an integer from 0 to 2 and each R^{U} is, independently, H, halo, or optionally substituted alkyl (e.g., U is —CH₂— or —CH—). In other embodiments, each of R¹ and R² is, independently, H, halo, hydroxy, thiol, optionally substituted alkyl, optionally substituted alkoxy, optionally substituted alkenyloxy, optionally substituted alkynyloxy, optionally substituted aminoalkoxy, optionally substituted alkoxyalkoxy, optionally substituted hydroxyalkoxy, optionally substituted amino, azido, optionally substituted aryl, optionally substituted aminoalkyl, optionally substituted aminoalkenyl, optionally substituted aminoalkynyl, or absent (e.g., each R¹ and R² is, independently, H, halo, hydroxy, optionally substituted alkyl, or optionally substituted alkoxy, e.g., H, halo, hydroxy, alkyl, or alkoxy). In particular embodiments, R² is hydroxy or optionally substituted alkoxy (e.g., methoxy, ethoxy, or any described herein).

[0388] In particular embodiments, the polynucleotide, primary construct, or mmRNA includes n number of linked nucleosides having Formula (IIc-1)-(IIc-4):

[chemical structure]

or a pharmaceutically acceptable salt or stereoisomer thereof. In some embodiments, U is O or C(R^{U})ₙᵤ, wherein nu is an integer from 0 to 2 and each R^{U} is, independently, H, halo, or optionally substituted alkyl (e.g., U is —CH₂— or —CH—). In some embodiments, each of R¹, R², and R³ is, independently, H, halo, hydroxy, thiol, optionally substituted alkyl, optionally substituted alkoxy, optionally substituted alkenyloxy, optionally substituted alkynyloxy, optionally substituted aminoalkoxy, optionally substituted alkoxyalkoxy, optionally substituted hydroxyalkoxy, optionally substituted amino, azido, optionally substituted aryl, optionally substituted aminoalkyl, optionally substituted aminoalkenyl, optionally substituted aminoalkynyl, or absent (e.g., each R¹ and R² is, independently, H, halo, hydroxy, optionally substituted alkyl, or optionally substituted alkoxy, e.g., H, halo, hydroxy, alkyl, or alkoxy; and each R³ is, independently, H or optionally substituted alkyl)). In particular embodiments, R² is optionally substituted alkoxy (e.g., methoxy or ethoxy, or any described herein). In particular embodiments, R¹ is optionally substituted alkyl, and R² is hydroxy. In other embodiments, R¹ is hydroxy, and R² is optionally substituted alkyl. In further embodiments, R³ is optionally substituted alkyl.

[0389] In some embodiments, the polynucleotide, primary construct, or mmRNA includes an acyclic modified ribose. In some embodiments, the polynucleotide, primary construct, or mmRNA (e.g., the first region, the first flanking region, or the second flanking region) includes n number of linked nucleosides having Formula (IId)-(IIf):

[chemical structure]

or a pharmaceutically acceptable salt or stereoisomer thereof.

[0390] In some embodiments, the polynucleotide, primary construct, or mmRNA includes an acyclic modified hexitol. In some embodiments, the polynucleotide, primary construct, or mmRNA (e.g., the first region, the first flanking region, or the second flanking region) includes n number of linked nucleosides Formula (IIg)-(IIj):

[chemical structure]

or a pharmaceutically acceptable salt or stereoisomer thereof.

[0391] In some embodiments, the polynucleotide, primary construct, or mmRNA includes a sugar moiety having a contracted or an expanded ribose ring. In some embodiments, the polynucleotide, primary construct, or mmRNA (e.g., the first region, the first flanking region, or the second flanking region) includes n number of linked nucleosides having Formula

### (IIk)-(IIm):

[chemical structure]

or a pharmaceutically acceptable salt or stereoisomer thereof, wherein each of R¹′, R¹″, R²′, and R²″ is, independently, H, halo, hydroxy, optionally substituted alkyl, optionally substituted alkoxy, optionally substituted alkenyloxy, optionally substituted alkynyloxy, optionally substituted aminoalkoxy, optionally substituted alkoxyalkoxy, or absent; and wherein the combination of R²′ and R³ or the combination of R²″ and R³ can be taken together to form optionally substituted alkylene or optionally substituted heteroalkylene.

[0392] In some embodiments, the polynucleotide, primary construct, or mmRNA includes a locked modified ribose. In some embodiments, the polynucleotide, primary construct, or mmRNA (e.g., the first region, the first flanking region, or the second flanking region) includes n number of linked nucleosides having Formula (IIn):

[chemical structure]

or a pharmaceutically acceptable salt or stereoisomer thereof, wherein R³′ is 0, S, or —NR^{N1}—, wherein R^{N1} is H, optionally substituted alkyl, optionally substituted alkenyl, optionally substituted alkynyl, or optionally substituted aryl and R³″ is optionally substituted alkylene (e.g., —CH₂—, —CH₂CH₂—, or —CH₂CH₂CH₂—) or optionally substituted heteroalkylene (e.g., —CH₂NH—, —CH₂CH₂NH—, —CH₂OCH₂—, or —CH₂CH₂OCH₂—)(e.g., R³′ is O and R³″ is optionally substituted alkylene (e.g., —CH₂—, —CH₂CH₂—, or —CH₂CH₂CH₂—)).

[0393] In some embodiments, the polynucleotide, primary construct, or mmRNA includes n number of linked nucleosides having Formula (IIn-1)-(II-n2):

[chemical structure]

or a pharmaceutically acceptable salt or stereoisomer thereof, wherein R³ is 0, S, or —NR^{N1}—, wherein R^{N1} is H, optionally substituted alkyl, optionally substituted alkenyl, optionally substituted alkynyl, or optionally substituted aryl and R³″ is optionally substituted alkylene (e.g., —CH₂—, —CH₂CH₂—, or —CH₂CH₂CH₂—) or optionally substituted heteroalkylene (e.g., —CH₂NH—, —CH₂CH₂NH—, —CH₂OCH₂—, or —CH₂CH₂OCH₂—) (e.g., R³′ is O and R³″ is optionally substituted alkylene (e.g., —CH₂—, —CH₂CH₂—, or —CH₂CH₂CH₂—)).

[0394] In some embodiments, the polynucleotide, primary construct, or mmRNA includes a locked modified ribose that forms a tetracyclic heterocyclyl. In some embodiments, the polynucleotide, primary construct, or mmRNA (e.g., the first region, the first flanking region, or the second flanking region) includes n number of linked nucleosides having Formula (IIo):

[chemical structure]

or a pharmaceutically acceptable salt or stereoisomer thereof, wherein R^{12a}, R^{12c}, T¹′, T¹″, T²′ T²″, V¹, and V³ are as described herein.

[0395] Any of the formulas for the polynucleotides, primary constructs, or mmRNA can include one or more nucleobases described herein (e.g., Formulas (b1)-(b43)).

[0396] In one embodiment, the present invention provides methods of preparing a polynucleotide, primary construct, or mmRNA, wherein the polynucleotide comprises n number of nucleosides having Formula (Ia), as defined herein:

[chemical structure]

the method comprising reacting a compound of Formula (IIIa), as defined herein:

[chemical structure]

with an RNA polymerase, and a cDNA template.

[0397] In a further embodiment, the present invention provides methods of amplifying a polynucleotide, primary construct, or mmRNA comprising at least one nucleotide (e.g., mmRNA molecule), the method comprising: reacting a compound of Formula (IIIa), as defined herein, with a primer, a cDNA template, and an RNA polymerase.

[0398] In one embodiment, the present invention provides methods of preparing a polynucleotide, primary construct, or mmRNA comprising at least one nucleotide (e.g., mmRNA molecule), wherein the polynucleotide comprises n number of nucleosides having Formula (Ia), as defined herein:

[chemical structure]

the method comprising reacting a compound of Formula (IIIa-1), as defined herein:

[chemical structure]

with an RNA polymerase, and a cDNA template.

[0399] In a further embodiment, the present invention provides methods of amplifying a polynucleotide, primary construct, or mmRNA comprising at least one nucleotide (e.g., mmRNA molecule), the method comprising:
[0400] reacting a compound of Formula (IIIa-1), as defined herein, with a primer, a cDNA template, and an RNA polymerase.

[0401] In one embodiment, the present invention provides methods of preparing a modified mRNA comprising at least one nucleotide (e.g., mmRNA molecule), wherein the polynucleotide comprises n number of nucleosides having Formula (Ia-2), as defined herein:

[chemical structure]

the method comprising reacting a compound of Formula (IIIa-2), as defined herein:

[chemical structure]

with an RNA polymerase, and a cDNA template.

[0402] In a further embodiment, the present invention provides methods of amplifying a modified mRNA comprising at least one nucleotide (e.g., mmRNA molecule), the method comprising:
[0403] reacting a compound of Formula (IIIa-2), as defined herein, with a primer, a cDNA template, and an RNA polymerase.

[0404] In some embodiments, the reaction may be repeated from 1 to about 7,000 times. In any of the embodiments herein, B may be a nucleobase of Formula (b1)-(b43).

[0405] The polynucleotides, primary constructs, and mmRNA can optionally include 5′ and/or 3′ flanking regions, which are described herein.

Modified RNA (mmRNA) Molecules

[0406] The present invention also includes building blocks, e.g., modified ribonucleosides, modified ribonucleotides, of modified RNA (mmRNA) molecules. For example, these building blocks can be useful for preparing the polynucleotides, primary constructs, or mmRNA of the invention.

[0407] In some embodiments, the building block molecule has Formula (IIIa) or (IIIa-1):

[chemical structure]

or a pharmaceutically acceptable salt or stereoisomer thereof, wherein the substituents are as described herein (e.g., for Formula (Ia) and (Ia-1)), and wherein when B is an unmodified nucleobase selected from cytosine, guanine, uracil and adenine, then at least one of Y¹, Y², or Y³ is not O.

[0408] In some embodiments, the building block molecule, which may be incorporated into a polynucleotide, primary construct, or mmRNA, has Formula (IVa)-(IVb):

[chemical structure]

or a pharmaceutically acceptable salt or stereoisomer thereof, wherein B is as described herein (e.g., any one of (b1)-(b43)). In particular embodiments, Formula (IVa) or (IVb) is combined with a modified uracil (e.g., any one of formulas (b1)-(b9), (b21)-(b23), and (b28)-(b31), such as formula (b1), (b8), (b28), (b29), or (b30)). In particular embodiments, Formula (IVa) or (IVb) is combined with a modified cytosine (e.g., any one of formulas (b10)-(b14), (b24), (b25), and (b32)-(b36), such as formula (b10) or (b32)). In particular embodiments, Formula (IVa) or (IVb) is combined with a modified guanine (e.g., any one of formulas (b15)-(b17) and (b37)-(b40)). In particular embodiments, Formula (IVa) or (IVb) is combined with a modified adenine (e.g., any one of formulas (b18)-(b20) and (b41)-(b43)).

[0409] In some embodiments, the building block molecule, which may be incorporated into a polynucleotide, primary construct, or mmRNA, has Formula (IVc)-(IVk):

[chemical structure]

[chemical structure]

or a pharmaceutically acceptable salt or stereoisomer thereof, wherein B is as described herein (e.g., any one of (b1)-(b43)). In particular embodiments, one of Formulas (IVc)-(IVk) is combined with a modified uracil (e.g., any one of formulas (b1)-(b9), (b21)-(b23), and (b28)-(b31), such as formula (b1), (b8), (b28), (b29), or (b30)). In particular embodiments, one of Formulas (IVc)-(IVk) is combined with a modified cytosine (e.g., any one of formulas (b10)-(b14), (b24), (b25), and (b32)-(b36), such as formula (b10) or (b32)). In particular embodiments, one of Formulas (IVc)-(IVk) is combined with a modified guanine (e.g., any one of formulas (b15)-(b17) and (b37)-(b40)). In particular embodiments, one of Formulas (IVc)-(IVk) is combined with a modified adenine (e.g., any one of formulas (b18)-(b20) and (b41)-(b43)).

[0410] In other embodiments, the building block molecule, which may be incorporated into a polynucleotide, primary construct, or mmRNA, has Formula (Va) or (Vb):

[chemical structure]

or a pharmaceutically acceptable salt or stereoisomer thereof, wherein B is as described herein (e.g., any one of (b1)-(b43)).

[0411] In other embodiments, the building block molecule, which may be incorporated into a polynucleotide, primary construct, or mmRNA, has Formula (IXa)-(IXd):

[chemical structure]

or a pharmaceutically acceptable salt or stereoisomer thereof, wherein B is as described herein (e.g., any one of (b1)-(b43)). In particular embodiments, one of Formulas (IXa)-(IXd) is combined with a modified uracil (e.g., any one of formulas (b1)-(b9), (b21)-(b23), and (b28)-(b31), such as formula (b1), (b8), (b28), (b29), or (b30)). In particular embodiments, one of Formulas (IXa)-(IXd) is combined with a modified cytosine (e.g., any one of formulas (b10)-(b14), (b24), (b25), and (b32)-(b36), such as formula (b10) or (b32)). In particular embodiments, one of Formulas (IXa)-(IXd) is combined with a modified guanine (e.g., any one of formulas (b15)-(b17) and (b37)-(b40)). In particular embodiments, one of Formulas (IXa)-(IXd) is combined with a modified adenine (e.g., any one of formulas (b18)-(b20) and (b41)-(b43)).

[0412] In other embodiments, the building block molecule, which may be incorporated into a polynucleotide, primary construct, or mmRNA, has Formula (IXe)—(IXg).

[chemical structure]

or a pharmaceutically acceptable salt or stereoisomer thereof, wherein B is as described herein (e.g., any one of (b1)-(b43)). In particular embodiments, one of Formulas (IXe)—(IXg) is combined with a modified uracil (e.g., any one of formulas (b1)-(b9), (b21)-(b23), and (b28)-(b31), such as formula (b1), (b8), (b28), (b29), or (b30)). In particular embodiments, one of Formulas (IXe)—(IXg) is combined with a modified cytosine (e.g., any one of formulas (b10)-(b14), (b24), (b25), and (b32)-(b36), such as formula (b10) or (b32)). In particular embodiments, one of Formulas (IXe)—(IXg) is combined with a modified guanine (e.g., any one of formulas (b15)-(b17) and (b37)-(b40)). In particular embodiments, one of Formulas (IXe)—(IXg) is combined with a modified adenine (e.g., any one of formulas (b18)-(b20) and (b41)-(b43)).

[0413] In other embodiments, the building block molecule, which may be incorporated into a polynucleotide, primary construct, or mmRNA, has Formula (IXh)-(IXk):

[chemical structure]

or a pharmaceutically acceptable salt or stereoisomer thereof, wherein B is as described herein (e.g., any one of (b1)-(b43)). In particular embodiments, one of Formulas (IXh)-(IXk) is combined with a modified uracil (e.g., any one of formulas (b1)-(b9), (b21)-(b23), and (b28)-(b31), such as formula (b1), (b8), (b28), (b29), or (b30)). In particular embodiments, one of Formulas (IXh)-(IXk) is combined with a modified cytosine (e.g., any one of formulas (b10)-(b14), (b24), (b25), and (b32)-(b36), such as formula (b10) or (b32)). In particular embodiments, one of Formulas (IXh)-(IXk) is combined with a modified guanine (e.g., any one of formulas (b15)-(b17) and (b37)-(b40)). In particular embodiments, one of Formulas (IXh)-(IXk) is combined with a modified adenine (e.g., any one of formulas (b18)-(b20) and (b41)-(b43)).

[0414] In other embodiments, the building block molecule, which may be incorporated into a polynucleotide, primary construct, or mmRNA, has Formula (IXl)-(IXr).

[chemical structure]

or a pharmaceutically acceptable salt or stereoisomer thereof, wherein each r1 and r2 is, independently, an integer from 0 to 5 (e.g., from 0 to 3, from 1 to 3, or from 1 to 5) and B is as described herein (e.g., any one of (b1)-(b43)). In particular embodiments, one of Formulas (IXl)-(IXr) is combined with a modified uracil (e.g., any one of formulas (b1)-(b9), (b21)-(b23), and (b28)-(b31), such as formula (b1), (b8), (b28), (b29), or (b30)). In particular embodiments, one of Formulas (IXl)-(IXr) is combined with a modified cytosine (e.g., any one of formulas (b10)-(b14), (b24), (b25), and (b32)-(b36), such as formula (b10) or (b32)). In particular embodiments, one of Formulas (IXl)-(IXr) is combined with a modified guanine (e.g., any one of formulas (b15)-(b17) and (b37)-(b40)). In particular embodiments, one of Formulas (IXl)-(IXr) is combined with a modified adenine (e.g., any one of formulas (b18)-(b20) and (b41)-(b43)).

[0415] In some embodiments, the building block molecule, which may be incorporated into a polynucleotide, primary construct, or mmRNA, can be selected from the group consisting of:

[chemical structure]

[chemical structure]

or a pharmaceutically acceptable salt or stereoisomer thereof, wherein each r is, independently, an integer from 0 to 5 (e.g., from 0 to 3, from 1 to 3, or from 1 to 5).

[0416] In some embodiments, the building block molecule, which may be incorporated into a polynucleotide, primary construct, or mmRNA, can be selected from the group consisting of:

[chemical structure]

[chemical structure]

or a pharmaceutically acceptable salt or stereoisomer thereof, wherein each r is, independently, an integer from 0 to 5 (e.g., from 0 to 3, from 1 to 3, or from 1 to 5) and s1 is as described herein.

[0417] In some embodiments, the building block molecule, which may be incorporated into a nucleic acid (e.g., RNA, mRNA, polynucleotide, primary construct, or mmRNA), is a modified uridine (e.g., selected from the group consisting of:

[chemical structure]

[chemical structure]

[chemical structure]

[chemical structure]

[chemical structure]

[chemical structure]

[chemical structure]

[chemical structure]

[chemical structure]

[chemical structure]

[chemical structure]

[chemical structure]

[chemical structure]

[chemical structure]

[chemical structure]

[chemical structure]

[chemical structure]

[chemical structure]

[chemical structure]

[chemical structure]

[chemical structure]

or a pharmaceutically acceptable salt or stereoisomer thereof, wherein Y¹, Y³, Y⁴, Y⁶, and r are as described herein (e.g., each r is, independently, an integer from 0 to 5, such as from 0 to 3, from 1 to 3, or from 1 to 5)).

[0418] In some embodiments, the building block molecule, which may be incorporated into a polynucleotide, primary construct, or mmRNA, is a modified cytidine (e.g., selected from the group consisting of:

[chemical structure]

[chemical structure]

[chemical structure]

[chemical structure]

[chemical structure]

[chemical structure]

[chemical structure]

[chemical structure]

[chemical structure]

or a pharmaceutically acceptable salt or stereoisomer thereof, wherein Y¹, Y³, Y⁴, Y⁶, and r are as described herein (e.g., each r is, independently, an integer from 0 to 5, such as from 0 to 3, from 1 to 3, or from 1 to 5)). For example, the building block molecule, which may be incorporated into a polynucleotide, primary construct, or mmRNA, can be:

[chemical structure]

or a pharmaceutically acceptable salt or stereoisomer thereof, wherein each r is, independently, an integer from 0 to 5 (e.g., from 0 to 3, from 1 to 3, or from 1 to 5).

[0419] In some embodiments, the building block molecule, which may be incorporated into a polynucleotide, primary construct, or mmRNA, is a modified adenosine (e.g., selected from the group consisting of:

[chemical structure]

[chemical structure]

[chemical structure]

[chemical structure]

[chemical structure]

[chemical structure]

[chemical structure]

[chemical structure]

[chemical structure]

[chemical structure]

[chemical structure]

or a pharmaceutically acceptable salt or stereoisomer thereof, wherein Y¹, Y³, Y⁴, Y⁶, and r are as described herein (e.g., each r is, independently, an integer from 0 to 5, such as from 0 to 3, from 1 to 3, or from 1 to 5)).

[0420] In some embodiments, the building block molecule, which may be incorporated into a polynucleotide, primary construct, or mmRNA, is a modified guanosine (e.g., selected from the group consisting of:

[chemical structure]

[chemical structure]

[chemical structure]

[chemical structure]

[chemical structure]

[chemical structure]

[chemical structure]

[chemical structure]

[chemical structure]

or a pharmaceutically acceptable salt or stereoisomer thereof, wherein Y¹, Y³, Y⁴, Y⁶, and r are as described herein (e.g., each r is, independently, an integer from 0 to 5, such as from 0 to 3, from 1 to 3, or from 1 to 5)).

[0421] In some embodiments, the chemical modification can include replacement of C group at C-5 of the ring (e.g., for a pyrimidine nucleoside, such as cytosine or uracil) with N (e.g., replacement of the >CH group at C-5 with >NR^{N1} group, wherein R^{N1} is H or optionally substituted alkyl). For example, the building block molecule, which may be incorporated into a polynucleotide, primary construct, or mmRNA, can be:

[chemical structure]

or a pharmaceutically acceptable salt or stereoisomer thereof, wherein each r is, independently, an integer from 0 to 5 (e.g., from 0 to 3, from 1 to 3, or from 1 to 5).

[0422] In another embodiment, the chemical modification can include replacement of the hydrogen at C-5 of cytosine with halo (e.g., Br, Cl, F, or I) or optionally substituted alkyl (e.g., methyl). For example, the building block molecule, which may be incorporated into a polynucleotide, primary construct, or mmRNA, can be:

[chemical structure]

or a pharmaceutically acceptable salt or stereoisomer thereof, wherein each r is, independently, an integer from 0 to 5 (e.g., from 0 to 3, from 1 to 3, or from 1 to 5).

[0423] In yet a further embodiment, the chemical modification can include a fused ring that is formed by the NH₂ at the C-4 position and the carbon atom at the C-5 position. For example, the building block molecule, which may be incorporated into a polynucleotide, primary construct, or mmRNA, can be:

[chemical structure]

or a pharmaceutically acceptable salt or stereoisomer thereof, wherein each r is, independently, an integer from 0 to 5 (e.g., from 0 to 3, from 1 to 3, or from 1 to 5).

### Modifications on the Sugar

[0424] The modified nucleosides and nucleotides (e.g., building block molecules), which may be incorporated into a polynucleotide, primary construct, or mmRNA (e.g., RNA or mRNA, as described herein), can be modified on the sugar of the ribonucleic acid. For example, the 2′ hydroxyl group (OH) can be modified or replaced with a number of different substituents. Exemplary substitutions at the 2′-position include, but are not limited to, H, halo, optionally substituted C₁₋₆ alkyl; optionally substituted C₁₋₆ alkoxy; optionally substituted C₆₋₁₀ aryloxy; optionally substituted C₃₋₈ cycloalkyl; optionally substituted C₃₋₈ cycloalkoxy; optionally substituted C₆₋₁₀ aryloxy; optionally substituted C₆₋₁₀ aryl-C₁₋₆ alkoxy, optionally substituted C₁₋₁₂ (heterocyclyl)oxy; a sugar (e.g., ribose, pentose, or any described herein); a polyethyleneglycol (PEG), —O(CH₂CH₂O)ₙCH₂CH₂OR, where R is H or optionally substituted alkyl, and n is an integer from 0 to 20 (e.g., from 0 to 4, from 0 to 8, from 0 to 10, from 0 to 16, from 1 to 4, from 1 to 8, from 1 to 10, from 1 to 16, from 1 to 20, from 2 to 4, from 2 to 8, from 2 to 10, from 2 to 16, from 2 to 20, from 4 to 8, from 4 to 10, from 4 to 16, and from 4 to 20); “locked” nucleic acids (LNA) in which the 2′-hydroxyl is connected by a C₁₋₆ alkylene or C₁₋₆ heteroalkylene bridge to the 4′-carbon of the same ribose sugar, where exemplary bridges included methylene, propylene, ether, or amino bridges; aminoalkyl, as defined herein; aminoalkoxy, as defined herein; amino as defined herein; and amino acid, as defined herein

[0425] Generally, RNA includes the sugar group ribose, which is a 5-membered ring having an oxygen. Exemplary, non-limiting modified nucleotides include replacement of the oxygen in ribose (e.g., with S, Se, or alkylene, such as methylene or ethylene); addition of a double bond (e.g., to replace ribose with cyclopentenyl or cyclohexenyl); ring contraction of ribose (e.g., to form a 4-membered ring of cyclobutane or oxetane); ring expansion of ribose (e.g., to form a 6- or 7-membered ring having an additional carbon or heteroatom, such as for anhydrohexitol, altritol, mannitol, cyclohexanyl, cyclohexenyl, and morpholino that also has a phosphoramidate backbone); multicyclic forms (e.g., tricyclo; and “unlocked” forms, such as glycol nucleic acid (GNA) (e.g., R-GNA or S-GNA, where ribose is replaced by glycol units attached to phosphodiester bonds), threose nucleic acid (TNA, where ribose is replace with α-L-threofuranosyl-(3′→2′)), and peptide nucleic acid (PNA, where 2-amino-ethyl-glycine linkages replace the ribose and phosphodiester backbone). The sugar group can also contain one or more carbons that possess the opposite stereochemical configuration than that of the corresponding carbon in ribose. Thus, a polynucleotide, primary construct, or mmRNA molecule can include nucleotides containing, e.g., arabinose, as the sugar.

### Modifications on the Nucleobase

[0426] The present disclosure provides for modified nucleosides and nucleotides. As described herein “nucleoside” is defined as a compound containing a sugar molecule (e.g., a pentose or ribose) or a derivative thereof in combination with an organic base (e.g., a purine or pyrimidine) or a derivative thereof (also referred to herein as “nucleobase”). As described herein, “nucleotide” is defined as a nucleoside including a phosphate group. The modified nucleotides may by synthesized by any useful method, as described herein (e.g., chemically, enzymatically, or recombinantly to include one or more modified or non-natural nucleosides).

[0427] The modified nucleotide base pairing encompasses not only the standard adenosine-thymine, adenosine-uracil, or guanosine-cytosine base pairs, but also base pairs formed between nucleotides and/or modified nucleotides comprising non-standard or modified bases, wherein the arrangement of hydrogen bond donors and hydrogen bond acceptors permits hydrogen bonding between a non-standard base and a standard base or between two complementary non-standard base structures. One example of such non-standard base pairing is the base pairing between the modified nucleotide inosine and adenine, cytosine or uracil.

[0428] The modified nucleosides and nucleotides can include a modified nucleobase. Examples of nucleobases found in RNA include, but are not limited to, adenine, guanine, cytosine, and uracil. Examples of nucleobase found in DNA include, but are not limited to, adenine, guanine, cytosine, and thymine. These nucleobases can be modified or wholly replaced to provide polynucleotides, primary constructs, or mmRNA molecules having enhanced properties, e.g., resistance to nucleases through disruption of the binding of a major groove binding partner. Table 8 below identifies the chemical faces of each canonical nucleotide. Circles identify the atoms comprising the respective chemical regions.

TABLE 8

| | | |
|---|---|---|
| | | Watson-Crick |
| | | Base-pairing |
| Major Groove Face | Minor Groove Face | Face |

Pyrimidines

| | | | |
|---|---|---|---|
| Cytidine: | [chemical structure] | [chemical structure] | [chemical structure] |
| Uridine: | [chemical structure] | [chemical structure] | [chemical structure] |

Purines

| | | | |
|---|---|---|---|
| Adenosine: | [chemical structure] | [chemical structure] | [chemical structure] |
| Guanosine: | [chemical structure] | [chemical structure] | [chemical structure] |

[0429] In some embodiments, B is a modified uracil. Exemplary modified uracils include those having Formula (b1)-(b5):

[chemical structure]

or a pharmaceutically acceptable salt or stereoisomer thereof,
[0430] wherein
[0431] [symbol] is a single or double bond;
[0432] each of T¹′, T¹″, T²′, and T²″ is, independently, H, optionally substituted alkyl, optionally substituted alkoxy, or optionally substituted thioalkoxy, or the combination of T¹′ and T¹″ or the combination of T²′ and T²″ join together (e.g., as in T²) to form O (oxo), S (thio), or Se (seleno);
[0433] each of V¹ and V² is, independently, O, S, N(R^{Vb})ₙᵥ, or C(R^{Vb})ₙᵥ, wherein nv is an integer from 0 to 2 and each R^{Vb} is, independently, H, halo, optionally substituted amino acid, optionally substituted alkyl, optionally substituted haloalkyl, optionally substituted alkenyl, optionally substituted alkynyl, optionally substituted alkoxy, optionally substituted alkenyloxy, optionally substituted alkynyloxy, optionally substituted hydroxyalkyl, optionally substituted hydroxyalkenyl, optionally substituted hydroxyalkynyl, optionally substituted aminoalkyl (e.g., substituted with an N-protecting group, such as any described herein, e.g., trifluoroacetyl), optionally substituted aminoalkenyl, optionally substituted aminoalkynyl, optionally substituted acylaminoalkyl (e.g., substituted with an N-protecting group, such as any described herein, e.g., trifluoroacetyl), optionally substituted alkoxycarbonylalkyl, optionally substituted alkoxycarbonylalkenyl, optionally substituted alkoxycarbonylalkynyl, or optionally substituted alkynyloxy (e.g., optionally substituted with any substituent described herein, such as those selected from (1)-(21) for alkyl);
[0434] R¹⁰ is H, halo, optionally substituted amino acid, hydroxy, optionally substituted alkyl, optionally substituted alkenyl, optionally substituted alkynyl, optionally substituted aminoalkyl, optionally substituted hydroxyalkyl, optionally substituted hydroxyalkenyl, optionally substituted hydroxyalkynyl, optionally substituted aminoalkenyl, optionally substituted aminoalkynyl, optionally substituted alkoxy, optionally substituted alkoxycarbonylalkyl, optionally substituted alkoxycarbonylalkenyl, optionally substituted alkoxycarbonylalkynyl, optionally substituted alkoxycarbonylalkoxy, optionally substituted carboxyalkoxy, optionally substituted carboxyalkyl, or optionally substituted carbamoylalkyl;
[0435] R¹¹ is H or optionally substituted alkyl;
[0436] R^{12a} is H, optionally substituted alkyl, optionally substituted hydroxyalkyl, optionally substituted hydroxyalkenyl, optionally substituted hydroxyalkynyl, optionally substituted aminoalkyl, optionally substituted aminoalkenyl, or optionally substituted aminoalkynyl, optionally substituted carboxyalkyl (e.g., optionally substituted with hydroxy), optionally substituted carboxyalkoxy, optionally substituted carboxyaminoalkyl, or optionally substituted carbamoylalkyl; and
[0437] R^{12c} is H, halo, optionally substituted alkyl, optionally substituted alkoxy, optionally substituted thioalkoxy, optionally substituted amino, optionally substituted hydroxyalkyl, optionally substituted hydroxyalkenyl, optionally substituted hydroxyalkynyl, optionally substituted aminoalkyl, optionally substituted aminoalkenyl, or optionally substituted aminoalkynyl.

[0438] Other exemplary modified uracils include those having Formula (b6)-(b9):

[chemical structure]

or a pharmaceutically acceptable salt or stereoisomer thereof,
[0439] wherein
[0440] [symbol] is a single or double bond;
[0441] each of T¹′, T¹″, T²′, and T²″ is, independently, H, optionally substituted alkyl, optionally substituted alkoxy, or optionally substituted thioalkoxy, or the combination of T¹′ and T¹″ join together (e.g., as in T¹) or the combination of T²′ and T²″ join together (e.g., as in T²) to form O (oxo), S (thio), or Se (seleno), or each T¹ and T² is, independently, O (oxo), S (thio), or Se (seleno);
[0442] each of W¹ and W² is, independently, N(R^{Wa})_{nw} or C(R^{Wa})_{nw}, wherein nw is an integer from 0 to 2 and each R^{Wa} is, independently, H, optionally substituted alkyl, or optionally substituted alkoxy;
[0443] each V³ is, independently, O, S, N(R^{Va})ₙᵥ, or C(R^{Va})ₙᵥ, wherein nv is an integer from 0 to 2 and each R^{Va} is, independently, H, halo, optionally substituted amino acid, optionally substituted alkyl, optionally substituted hydroxyalkyl, optionally substituted hydroxyalkenyl, optionally substituted hydroxyalkynyl, optionally substituted alkenyl, optionally substituted alkynyl, optionally substituted heterocyclyl, optionally substituted alkheterocyclyl, optionally substituted alkoxy, optionally substituted alkenyloxy, or optionally substituted alkynyloxy, optionally substituted aminoalkyl (e.g., substituted with an N-protecting group, such as any described herein, e.g., trifluoroacetyl, or sulfoalkyl), optionally substituted aminoalkenyl, optionally substituted aminoalkynyl, optionally substituted acylaminoalkyl (e.g., substituted with an N-protecting group, such as any described herein, e.g., trifluoroacetyl), optionally substituted alkoxycarbonylalkyl, optionally substituted alkoxycarbonylalkenyl, optionally substituted alkoxycarbonylalkynyl, optionally substituted alkoxycarbonylacyl, optionally substituted alkoxycarbonylalkoxy, optionally substituted carboxyalkyl (e.g., optionally substituted with hydroxy and/or an O-protecting group), optionally substituted carboxyalkoxy, optionally substituted carboxyaminoalkyl, or optionally substituted carbamoylalkyl (e.g., optionally substituted with any substituent described herein, such as those selected from (1)-(21) for alkyl), and wherein R^{Va} and R^{12c} taken together with the carbon atoms to which they are attached can form optionally substituted cycloalkyl, optionally substituted aryl, or optionally substituted heterocyclyl (e.g., a 5- or 6-membered ring);
[0444] R^{12a} is H, optionally substituted alkyl, optionally substituted hydroxyalkyl, optionally substituted hydroxyalkenyl, optionally substituted hydroxyalkynyl, optionally substituted aminoalkyl, optionally substituted aminoalkenyl, optionally substituted aminoalkynyl, optionally substituted carboxyalkyl (e.g., optionally substituted with hydroxy and/or an O-protecting group), optionally substituted carboxyalkoxy, optionally substituted carboxyaminoalkyl, optionally substituted carbamoylalkyl, or absent;
[0445] R^{12b} is H, optionally substituted alkyl, optionally substituted alkenyl, optionally substituted alkynyl, optionally substituted hydroxyalkyl, optionally substituted hydroxyalkenyl, optionally substituted hydroxyalkynyl, optionally substituted aminoalkyl, optionally substituted aminoalkenyl, optionally substituted aminoalkynyl, optionally substituted alkaryl, optionally substituted heterocyclyl, optionally substituted alkheterocyclyl, optionally substituted amino acid, optionally substituted alkoxycarbonylacyl, optionally substituted alkoxycarbonylalkoxy, optionally substituted alkoxycarbonylalkyl, optionally substituted alkoxycarbonylalkenyl, optionally substituted alkoxycarbonylalkynyl, optionally substituted alkoxycarbonylalkoxy, optionally substituted carboxyalkyl (e.g., optionally substituted with hydroxy and/or an O-protecting group), optionally substituted carboxyalkoxy, optionally substituted carboxyaminoalkyl, or optionally substituted carbamoylalkyl,
[0446] wherein the combination of R^{12b} and T¹′ or the combination of R^{12b} and R^{12c} can join together to form optionally substituted heterocyclyl; and
[0447] R^{12c} is H, halo, optionally substituted alkyl, optionally substituted alkoxy, optionally substituted thioalkoxy, optionally substituted amino, optionally substituted aminoalkyl, optionally substituted aminoalkenyl, or optionally substituted aminoalkynyl.

[0448] Further exemplary modified uracils include those having Formula (b28)-(b31):

[chemical structure]

or a pharmaceutically acceptable salt or stereoisomer thereof,
[0449] wherein
[0450] each of T¹ and T² is, independently, O (oxo), S (thio), or Se (seleno);
[0451] each R^{Vb}′ and R^{Vb}″ is, independently, H, halo, optionally substituted amino acid, optionally substituted alkyl, optionally substituted haloalkyl, optionally substituted hydroxyalkyl, optionally substituted hydroxyalkenyl, optionally substituted hydroxyalkynyl, optionally substituted alkenyl, optionally substituted alkynyl, optionally substituted alkoxy, optionally substituted alkenyloxy, optionally substituted alkynyloxy, optionally substituted aminoalkyl (e.g., substituted with an N-protecting group, such as any described herein, e.g., trifluoroacetyl, or sulfoalkyl), optionally substituted aminoalkenyl, optionally substituted aminoalkynyl, optionally substituted acylaminoalkyl (e.g., substituted with an N-protecting group, such as any described herein, e.g., trifluoroacetyl), optionally substituted alkoxycarbonylalkyl, optionally substituted alkoxycarbonylalkenyl, optionally substituted alkoxycarbonylalkynyl, optionally substituted alkoxycarbonylacyl, optionally substituted alkoxycarbonylalkoxy, optionally substituted carboxyalkyl (e.g., optionally substituted with hydroxy and/or an O-protecting group), optionally substituted carboxyalkoxy, optionally substituted carboxyaminoalkyl, or optionally substituted carbamoylalkyl (e.g., optionally substituted with any substituent described herein, such as those selected from (1)-(21) for alkyl) (e.g., R^{Vb}′ is optionally substituted alkyl, optionally substituted alkenyl, or optionally substituted aminoalkyl, e.g., substituted with an N-protecting group, such as any described herein, e.g., trifluoroacetyl, or sulfoalkyl);
[0452] R^{12a} is H, optionally substituted alkyl, optionally substituted carboxyaminoalkyl, optionally substituted aminoalkyl (e.g., e.g., substituted with an N-protecting group, such as any described herein, e.g., trifluoroacetyl, or sulfoalkyl), optionally substituted aminoalkenyl, or optionally substituted aminoalkynyl; and
[0453] R^{12b} is H, optionally substituted alkyl, optionally substituted alkenyl, optionally substituted alkynyl, optionally substituted hydroxyalkyl, optionally substituted hydroxyalkenyl, optionally substituted hydroxyalkynyl, optionally substituted aminoalkyl, optionally substituted aminoalkenyl, optionally substituted aminoalkynyl (e.g., e.g., substituted with an N-protecting group, such as any described herein, e.g., trifluoroacetyl, or sulfoalkyl),
[0454] optionally substituted alkoxycarbonylacyl, optionally substituted alkoxycarbonylalkoxy, optionally substituted alkoxycarbonylalkyl, optionally substituted alkoxycarbonylalkenyl, optionally substituted alkoxycarbonylalkynyl, optionally substituted alkoxycarbonylalkoxy, optionally substituted carboxyalkoxy, optionally substituted carboxyalkyl, or optionally substituted carbamoylalkyl.

[0455] In particular embodiments, T¹ is O (oxo), and T² is S (thio) or Se (seleno). In other embodiments, T¹ is S (thio), and T² is O (oxo) or Se (seleno). In some embodiments, R^{Vb}′ is H, optionally substituted alkyl, or optionally substituted alkoxy.

[0456] In other embodiments, each R^{12a} and R^{12b} is, independently, H, optionally substituted alkyl, optionally substituted alkenyl, optionally substituted alkynyl, or optionally substituted hydroxyalkyl. In particular embodiments, R^{12a} is H. In other embodiments, both R^{12a} and R^{12b} are H.

[0457] In some embodiments, each R^{Vb}′ of R^{12b} is, independently, optionally substituted aminoalkyl (e.g., substituted with an N-protecting group, such as any described herein, e.g., trifluoroacetyl, or sulfoalkyl), optionally substituted aminoalkenyl, optionally substituted aminoalkynyl, or optionally substituted acylaminoalkyl (e.g., substituted with an N-protecting group, such as any described herein, e.g., trifluoroacetyl). In some embodiments, the amino and/or alkyl of the optionally substituted aminoalkyl is substituted with one or more of optionally substituted alkyl, optionally substituted alkenyl, optionally substituted sulfoalkyl, optionally substituted carboxy (e.g., substituted with an O-protecting group), optionally substituted hydroxy (e.g., substituted with an O-protecting group), optionally substituted carboxyalkyl (e.g., substituted with an O-protecting group), optionally substituted alkoxycarbonylalkyl (e.g., substituted with an O-protecting group), or N-protecting group. In some embodiments, optionally substituted aminoalkyl is substituted with an optionally substituted sulfoalkyl or optionally substituted alkenyl. In particular embodiments, R^{12a} and R^{Vb}″ are both H. In particular embodiments, T¹ is O (oxo), and T² is S (thio) or Se (seleno).

[0458] In some embodiments, R^{Vb}′ is optionally substituted alkoxycarbonylalkyl or optionally substituted carbamoylalkyl.

[0459] In particular embodiments, the optional substituent for R^{12a}, R^{12b}, R^{12c}, or R^{Va} is a polyethylene glycol group (e.g., —(CH₂)ₛ₂(OCH₂CH₂)ₛ₁(CH₂)ₛ₃OR′, wherein s1 is an integer from 1 to 10 (e.g., from 1 to 6 or from 1 to 4), each of s2 and s3, independently, is an integer from 0 to 10 (e.g., from 0 to 4, from 0 to 6, from 1 to 4, from 1 to 6, or from 1 to 10), and R′ is H or C₁₋₂₀ alkyl); or an amino-polyethylene glycol group (e.g., —NR^{N1}(CH₂)ₛ₂(CH₂CH₂O)ₛ₁(CH₂)ₛ₃NR^{N1}, wherein s1 is an integer from 1 to 10 (e.g., from 1 to 6 or from 1 to 4), each of s2 and s3, independently, is an integer from 0 to 10 (e.g., from 0 to 4, from 0 to 6, from 1 to 4, from 1 to 6, or from 1 to 10), and each R^{N1} is, independently, hydrogen or optionally substituted C₁₋₆ alkyl).

[0460] In some embodiments, B is a modified cytosine. Exemplary modified cytosines include compounds of Formula (b10)-(b14):

[chemical structure]

or a pharmaceutically acceptable salt or stereoisomer thereof,
[0461] wherein
[0462] each of T³′ and T³″ is, independently, H, optionally substituted alkyl, optionally substituted alkoxy, or optionally substituted thioalkoxy, or the combination of T³′ and T³″ join together (e.g., as in T³) to form O (oxo), S (thio), or Se (seleno);
[0463] each V⁴ is, independently, O, S, N(R^{Vc})ₙᵥ, or C(R^{Vc})ₙᵥ, wherein nv is an integer from 0 to 2 and each R^{Vc} is, independently, H, halo, optionally substituted amino acid, optionally substituted alkyl, optionally substituted alkenyl, optionally substituted alkynyl, optionally substituted alkoxy, optionally substituted alkenyloxy, optionally substituted heterocyclyl, optionally substituted alkheterocyclyl, or optionally substituted alkynyloxy (e.g., optionally substituted with any substituent described herein, such as those selected from (1)-(21) for alkyl), wherein the combination of R^{13b} and R^{Vc} can be taken together to form optionally substituted heterocyclyl;
[0464] each V⁵ is, independently, N(R^{Vd})ₙᵥ, or C(R^{Vd})ₙᵥ, wherein nv is an integer from 0 to 2 and each R^{Vd} is, independently, H, halo, optionally substituted amino acid, optionally substituted alkyl, optionally substituted alkenyl, optionally substituted alkynyl, optionally substituted alkoxy, optionally substituted alkenyloxy, optionally substituted heterocyclyl, optionally substituted alkheterocyclyl, or optionally substituted alkynyloxy (e.g., optionally substituted with any substituent described herein, such as those selected from (1)-(21) for alkyl) (e.g., V⁵ is —CH or N);
[0465] each of R^{13a} and R^{13b} is, independently, H, optionally substituted acyl, optionally substituted acyloxyalkyl, optionally substituted alkyl, or optionally substituted alkoxy, wherein the combination of R^{13b} and R¹⁴ can be taken together to form optionally substituted heterocyclyl;
[0466] each R¹⁴ is, independently, H, halo, hydroxy, thiol, optionally substituted acyl, optionally substituted amino acid, optionally substituted alkyl, optionally substituted haloalkyl, optionally substituted alkenyl, optionally substituted alkynyl, optionally substituted hydroxyalkyl (e.g., substituted with an O-protecting group), optionally substituted hydroxyalkenyl, optionally substituted hydroxyalkynyl, optionally substituted alkoxy, optionally substituted alkenyloxy, optionally substituted alkynyloxy, optionally substituted aminoalkoxy, optionally substituted alkoxyalkoxy, optionally substituted acyloxyalkyl, optionally substituted amino (e.g., —NHR, wherein R is H, alkyl, aryl, or phosphoryl), azido, optionally substituted aryl, optionally substituted heterocyclyl, optionally substituted alkheterocyclyl, optionally substituted aminoalkyl, optionally substituted aminoalkenyl, or optionally substituted aminoalkyl; and
[0467] each of R¹⁵ and R¹⁶ is, independently, H, optionally substituted alkyl, optionally substituted alkenyl, or optionally substituted alkynyl.

[0468] Further exemplary modified cytosines include those having Formula (b32)-(b35):

[chemical structure]

or a pharmaceutically acceptable salt or stereoisomer thereof,
[0469] wherein
[0470] each of T¹ and T³ is, independently, O (oxo), S (thio), or Se (seleno);
[0471] each of R^{13a} and R^{13b} is, independently, H, optionally substituted acyl, optionally substituted acyloxyalkyl, optionally substituted alkyl, or optionally substituted alkoxy, wherein the combination of R^{13b} and R¹⁴ can be taken together to form optionally substituted heterocyclyl;
[0472] each R¹⁴ is, independently, H, halo, hydroxy, thiol, optionally substituted acyl, optionally substituted amino acid, optionally substituted alkyl, optionally substituted haloalkyl, optionally substituted alkenyl, optionally substituted alkynyl, optionally substituted hydroxyalkyl (e.g., substituted with an O-protecting group), optionally substituted hydroxyalkenyl, optionally substituted hydroxyalkynyl, optionally substituted alkoxy, optionally substituted alkenyloxy, optionally substituted alkynyloxy, optionally substituted aminoalkoxy, optionally substituted alkoxyalkoxy, optionally substituted acyloxyalkyl, optionally substituted amino (e.g., —NHR, wherein R is H, alkyl, aryl, or phosphoryl), azido, optionally substituted aryl, optionally substituted heterocyclyl, optionally substituted alkheterocyclyl, optionally substituted aminoalkyl (e.g., hydroxyalkyl, alkyl, alkenyl, or alkynyl), optionally substituted aminoalkenyl, or optionally substituted aminoalkynyl; and
[0473] each of R¹⁵ and R¹⁶ is, independently, H, optionally substituted alkyl, optionally substituted alkenyl, or optionally substituted alkynyl (e.g., R¹⁵ is H, and R¹⁶ is H or optionally substituted alkyl).

[0474] In some embodiments, R¹⁵ is H, and R¹⁶ is H or optionally substituted alkyl. In particular embodiments, R¹⁴ is H, acyl, or hydroxyalkyl. In some embodiments, R¹⁴ is halo. In some embodiments, both R¹⁴ and R¹⁵ are H. In some embodiments, both R¹⁵ and R¹⁶ are H. In some embodiments, each of R¹⁴ and R¹⁵ and R¹⁶ is H. In further embodiments, each of R^{13a} and R^{13b} is independently, H or optionally substituted alkyl.

[0475] Further non-limiting examples of modified cytosines include compounds of Formula (b36):

[chemical structure]

or a pharmaceutically acceptable salt or stereoisomer thereof,
[0476] wherein
[0477] each R^{13b} is, independently, H, optionally substituted acyl, optionally substituted acyloxyalkyl, optionally substituted alkyl, or optionally substituted alkoxy, wherein the combination of R^{13b} and R^{4b} can be taken together to form optionally substituted heterocyclyl;
[0478] each R^{14a} and R^{14b} is, independently, H, halo, hydroxy, thiol, optionally substituted acyl, optionally substituted amino acid, optionally substituted alkyl, optionally substituted haloalkyl, optionally substituted alkenyl, optionally substituted alkynyl, optionally substituted hydroxyalkyl (e.g., substituted with an O-protecting group), optionally substituted hydroxyalkenyl, optionally substituted alkoxy, optionally substituted alkenyloxy, optionally substituted alkynyloxy, optionally substituted aminoalkoxy, optionally substituted alkoxyalkoxy, optionally substituted acyloxyalkyl, optionally substituted amino (e.g., —NHR, wherein R is H, alkyl, aryl, phosphoryl, optionally substituted aminoalkyl, or optionally substituted carboxyaminoalkyl), azido, optionally substituted aryl, optionally substituted heterocyclyl, optionally substituted alkheterocyclyl, optionally substituted aminoalkyl, optionally substituted aminoalkenyl, or optionally substituted aminoalkynyl; and
[0479] each of R¹⁵ is, independently, H, optionally substituted alkyl, optionally substituted alkenyl, or optionally substituted alkynyl.

[0480] In particular embodiments, R^{14b} is an optionally substituted amino acid (e.g., optionally substituted lysine). In some embodiments, R^{14a} is H.

[0481] In some embodiments, B is a modified guanine. Exemplary modified guanines include compounds of Formula (b15)-(b17):

[chemical structure]

or a pharmaceutically acceptable salt or stereoisomer thereof,
[0482] wherein
[0483] each of T⁴′, T⁴″, T⁵′, T⁵″, T⁶′, and T⁶″ is, independently, H, optionally substituted alkyl, or optionally substituted alkoxy, and wherein the combination of T⁴′ and T⁴″ (e.g., as in T⁴) or the combination of T⁵′ and T⁵″ (e.g., as in T⁵) or the combination of T⁶′ and T⁶″ (e.g., as in T⁶) join together form O (oxo), S (thio), or Se (seleno);
[0484] each of V⁵ and V⁶ is, independently, O, S, N(R^{Vd})ₙᵥ, or C(R^{Vd})ₙᵥ, wherein nv is an integer from 0 to 2 and each R^{Vd} is, independently, H, halo, thiol, optionally substituted amino acid, cyano, amidine, optionally substituted aminoalkyl, optionally substituted aminoalkenyl, optionally substituted aminoalkynyl, optionally substituted alkyl, optionally substituted alkenyl, optionally substituted alkynyl, optionally substituted alkoxy, optionally substituted alkenyloxy, or optionally substituted alkynyloxy (e.g., optionally substituted with any substituent described herein, such as those selected from (1)-(21) for alkyl), optionally substituted thioalkoxy, or optionally substituted amino; and
[0485] each of R¹⁷, R¹⁸, R^{19a}, R^{19b}, R²¹, R²², R²³, and R²⁴ is, independently, H, halo, thiol, optionally substituted alkyl, optionally substituted alkenyl, optionally substituted alkynyl, optionally substituted thioalkoxy, optionally substituted amino, or optionally substituted amino acid.

[0486] Exemplary modified guanosines include compounds of Formula (b37)-(b40):

[chemical structure]

or a pharmaceutically acceptable salt or stereoisomer thereof,
[0487] wherein
[0488] each of T⁴′ is, independently, H, optionally substituted alkyl, or optionally substituted alkoxy, and each T⁴ is, independently, O (oxo), S (thio), or Se (seleno);
[0489] each of R¹⁸, R^{19a}, R^{19b} and R²¹ is, independently, H, halo, thiol, optionally substituted alkyl, optionally substituted alkenyl, optionally substituted alkynyl, optionally substituted thioalkoxy, optionally substituted amino, or optionally substituted amino acid.

[0490] In some embodiments, R¹⁸ is H or optionally substituted alkyl. In further embodiments, T⁴ is oxo. In some embodiments, each of R^{19a} and R^{19b} is, independently, H or optionally substituted alkyl.

[0491] In some embodiments, B is a modified adenine. Exemplary modified adenines include compounds of Formula (b18)-(b20):

[chemical structure]

or a pharmaceutically acceptable salt or stereoisomer thereof,
[0492] wherein
[0493] each V⁷ is, independently, O, S, N(R^{Ve})ₙᵥ, or C(R^{Ve})ₙᵥ, wherein nv is an integer from 0 to 2 and each R^{Ve} is, independently, H, halo, optionally substituted amino acid, optionally substituted alkyl, optionally substituted alkenyl, optionally substituted alkynyl, optionally substituted alkoxy, optionally substituted alkenyloxy, or optionally substituted alkynyloxy (e.g., optionally substituted with any substituent described herein, such as those selected from (1)-(21) for alkyl);
[0494] each R²⁵ is, independently, H, halo, thiol, optionally substituted alkyl, optionally substituted alkenyl, optionally substituted alkynyl, optionally substituted thioalkoxy, or optionally substituted amino;
[0495] each of R^{26a} and R^{26b} is, independently, H, optionally substituted acyl, optionally substituted amino acid, optionally substituted carbamoylalkyl, optionally substituted alkyl, optionally substituted alkenyl, optionally substituted alkynyl, optionally substituted hydroxyalkyl, optionally substituted hydroxyalkenyl, optionally substituted hydroxyalkynyl, optionally substituted alkoxy, or polyethylene glycol group (e.g., —(CH₂)ₛ₂(OCH₂CH₂)ₛ₁(CH₂)ₛ₃OR′, wherein s1 is an integer from 1 to 10 (e.g., from 1 to 6 or from 1 to 4), each of s2 and s3, independently, is an integer from 0 to 10 (e.g., from 0 to 4, from 0 to 6, from 1 to 4, from 1 to 6, or from 1 to 10), and R′ is H or C₁₋₂₀ alkyl); or an amino-polyethylene glycol group (e.g., —NR^{N1}(CH₂)ₛ₂(CH₂CH₂O)ₛ₁(CH₂)ₛ₃NR^{N1} wherein s1 is an integer from 1 to 10 (e.g., from 1 to 6 or from 1 to 4), each of s2 and s3, independently, is an integer from 0 to 10 (e.g., from 0 to 4, from 0 to 6, from 1 to 4, from 1 to 6, or from 1 to 10), and each R^{N1} is, independently, hydrogen or optionally substituted C₁₋₆ alkyl);
[0496] each R²⁷ is, independently, H, optionally substituted alkyl, optionally substituted alkenyl, optionally substituted alkynyl, optionally substituted alkoxy, optionally substituted thioalkoxy or optionally substituted amino;
[0497] each R²⁸ is, independently, H, optionally substituted alkyl, optionally substituted alkenyl, or optionally substituted alkynyl; and
[0498] each R²⁹ is, independently, H, optionally substituted acyl, optionally substituted amino acid, optionally substituted carbamoylalkyl, optionally substituted alkyl, optionally substituted alkenyl, optionally substituted alkynyl, optionally substituted hydroxyalkyl, optionally substituted hydroxyalkenyl, optionally substituted alkoxy, or optionally substituted amino.

[0499] Exemplary modified adenines include compounds of Formula (b41)-(b43

[chemical structure]

or a pharmaceutically acceptable salt or stereoisomer thereof,
[0500] wherein
[0501] each R²⁵ is, independently, H, halo, thiol, optionally substituted alkyl, optionally substituted alkenyl, optionally substituted alkynyl, optionally substituted thioalkoxy, or optionally substituted amino;
[0502] each of R^{26a} and R^{26b} is, independently, H, optionally substituted acyl, optionally substituted amino acid, optionally substituted carbamoylalkyl, optionally substituted alkyl, optionally substituted alkenyl, optionally substituted alkynyl, optionally substituted hydroxyalkyl, optionally substituted hydroxyalkenyl, optionally substituted hydroxyalkynyl, optionally substituted alkoxy, or polyethylene glycol group (e.g., —(CH₂)ₛ₂(OCH₂CH₂)ₛ₁(CH₂)ₛ₃OR′, wherein s1 is an integer from 1 to 10 (e.g., from 1 to 6 or from 1 to 4), each of s2 and s3, independently, is an integer from 0 to 10 (e.g., from 0 to 4, from 0 to 6, from 1 to 4, from 1 to 6, or from 1 to 10), and R′ is H or C₁₋₂₀ alkyl); or an amino-polyethylene glycol group (e.g., —NR^{N1}(CH₂)ₛ₂(CH₂CH₂O)ₛ₁(CH₂)ₛ₃NR^{N1} wherein s1 is an integer from 1 to 10 (e.g., from 1 to 6 or from 1 to 4), each of s2 and s3, independently, is an integer from 0 to 10 (e.g., from 0 to 4, from 0 to 6, from 1 to 4, from 1 to 6, or from 1 to 10), and each R^{N1} is, independently, hydrogen or optionally substituted C₁₋₆ alkyl); and
[0503] each R²⁷ is, independently, H, optionally substituted alkyl, optionally substituted alkenyl, optionally substituted alkynyl, optionally substituted alkoxy, optionally substituted thioalkoxy, or optionally substituted amino.

[0504] In some embodiments, R^{26a} is H, and R^{26b} is optionally substituted alkyl. In some embodiments, each of R^{26a} and R^{26b} is, independently, optionally substituted alkyl. In particular embodiments, R²⁷ is optionally substituted alkyl, optionally substituted alkoxy, or optionally substituted thioalkoxy. In other embodiments, R²⁵ is optionally substituted alkyl, optionally substituted alkoxy, or optionally substituted thioalkoxy.

[0505] In particular embodiments, the optional substituent for R^{26a}, R^{26b} or R²⁹ is a polyethylene glycol group (e.g., —(CH₂)ₛ₂(OCH₂CH₂)ₛ₁(CH₂)ₛ₃OR′, wherein s1 is an integer from 1 to 10 (e.g., from 1 to 6 or from 1 to 4), each of s2 and s3, independently, is an integer from 0 to 10 (e.g., from 0 to 4, from 0 to 6, from 1 to 4, from 1 to 6, or from 1 to 10), and R′ is H or C₁₋₂₀ alkyl); or an amino-polyethylene glycol group (e.g., —NR^{N1}(CH₂)ₛ₂(CH₂CH₂O)ₛ₁(CH₂)ₛ₃NR^{N1}, wherein s1 is an integer from 1 to 10 (e.g., from 1 to 6 or from 1 to 4), each of s2 and s3, independently, is an integer from 0 to 10 (e.g., from 0 to 4, from 0 to 6, from 1 to 4, from 1 to 6, or from 1 to 10), and each R^{N1} is, independently, hydrogen or optionally substituted C₁₋₆ alkyl).

[0506] In some embodiments, B may have Formula (b21):

[chemical structure]

wherein X¹² is, independently, O, S, optionally substituted alkylene (e.g., methylene), or optionally substituted heteroalkylene, xa is an integer from 0 to 3, and R^{12a} and T² are as described herein.

[0507] In some embodiments, B may have Formula (b22):

[chemical structure]

wherein R¹⁰′ is, independently, optionally substituted alkyl, optionally substituted alkenyl, optionally substituted alkynyl, optionally substituted aryl, optionally substituted heterocyclyl, optionally substituted aminoalkyl, optionally substituted aminoalkenyl, optionally substituted aminoalkynyl, optionally substituted alkoxy, optionally substituted alkoxycarbonylalkyl, optionally substituted alkoxycarbonylalkenyl, optionally substituted alkoxycarbonylalkynyl, optionally substituted alkoxycarbonylalkoxy, optionally substituted carboxyalkoxy, optionally substituted carboxyalkyl, or optionally substituted carbamoylalkyl, and R¹¹, R^{12a}, T¹, and T2 are as described herein.

[0508] In some embodiments, B may have Formula (b23):

[chemical structure]

wherein R¹⁰ is optionally substituted heterocyclyl (e.g., optionally substituted furyl, optionally substitued thienyl, or optionally substitued pyrrolyl), optionally substituted aryl (e.g., optionally substituted phenyl or optionally substituted naphthyl), or any substituent described herein (e.g., for R¹⁰); and wherein R¹¹ (e.g., H or any substituent described herein), R^{12a} (e.g., H or any substituent described herein), T¹ (e.g., oxo or any substituent described herein), and T² (e.g., oxo or any substituent described herein) are as described herein.

[0509] In some embodiments, B may have Formula (b24):

[chemical structure]

wherein R¹⁴′ is, independently, optionally substituted alkyl, optionally substituted alkenyl, optionally substituted alkynyl, optionally substituted aryl, optionally substituted heterocyclyl, optionally substituted alkaryl, optionally substituted alkheterocyclyl, optionally substituted aminoalkyl, optionally substituted aminoalkenyl, optionally substituted aminoalkynyl, optionally substituted alkoxy, optionally substituted alkoxycarbonylalkenyl, optionally substituted alkoxycarbonylalkynyl, optionally substituted alkoxycarbonylalkyl, optionally substituted alkoxycarbonylalkoxy, optionally substituted carboxyalkoxy, optionally substituted carboxyalkyl, or optionally substituted carbamoylalkyl, and R^{13a}, R^{13b}, R¹⁵, and T3 are as described herein.

[0510] In some embodiments, B may have Formula (b25):

[chemical structure]

wherein R¹⁴′ is optionally substituted heterocyclyl (e.g., optionally substituted furyl, optionally substitued thienyl, or optionally substitued pyrrolyl), optionally substituted aryl (e.g., optionally substituted phenyl or optionally substituted naphthyl), or any substituent described herein (e.g., for R¹⁴ or R¹⁴′); and wherein R^{13a} (e.g., H or any substituent described herein), R^{13b} (e.g., H or any substituent described herein), R¹⁵ (e.g., H or any substituent described herein), and T³ (e.g., oxo or any substituent described herein) are as described herein.

[0511] In some embodiments, B is a nucleobase selected from the group consisting of cytosine, guanine, adenine, and uracil. In some embodiments, B may be:

[chemical structure]

[0512] In some embodiments, the modified nucleobase is a modified uracil. Exemplary nucleobases and nucleosides having a modified uracil include pseudouridine (ψ), pyridin-4-one ribonucleoside, 5-aza-uridine, 6-aza-uridine, 2-thio-5-aza-uridine, 2-thio-uridine (s²U), 4-thio-uridine (s⁴U), 4-thio-pseudouridine, 2-thio-pseudouridine, 5-hydroxy-uridine (ho⁵U), 5-aminoallyl-uridine, 5-halo-uridine (e.g., 5-iodo-uridine or 5-bromo-uridine), 3-methyl-uridine (m³U), 5-methoxy-uridine (mo⁵U), uridine 5-oxyacetic acid (cmo⁵U), uridine 5-oxyacetic acid methyl ester (mcmo⁵U), 5-carboxymethyl-uridine (cm⁵U), 1-carboxymethyl-pseudouridine, 5-carboxyhydroxymethyl-uridine (chm⁵U), 5-carboxyhydroxymethyl-uridine methyl ester (mchm⁵U), 5-methoxycarbonylmethyl-uridine (mcm⁵U), 5-methoxycarbonylmethyl-2-thio-uridine (mcm⁵s²U), 5-aminomethyl-2-thio-uridine (nm⁵s²U), 5-methylaminomethyl-uridine (mnm⁵U), 5-methylaminomethyl-2-thio-uridine (mnm⁵s²U), 5-methylaminomethyl-2-seleno-uridine (mnm⁵se²U), 5-carbamoylmethyl-uridine (ncm⁵U), 5-carboxymethylaminomethyl-uridine (cmnm⁵U), 5-carboxymethylaminomethyl-2-thio-uridine (cmnm⁵s2U), 5-propynyl-uridine, 1-propynyl-pseudouridine, 5-taurinomethyl-uridine (rm⁵U), 1-taurinomethyl-pseudouridine, 5-taurinomethyl-2-thio-uridine(τm⁵s²U), 1-taurinomethyl-4-thio-pseudouridine, 5-methyl-uridine (m⁵U, i.e., having the nucleobase deoxythymine), 1-methylpseudouridine (m¹ψ), 5-methyl-2-thio-uridine (m⁵s²U), 1-methyl-4-thio-pseudouridine (m¹s⁴ψ), 4-thio-1-methyl-pseudouridine, 3-methyl-pseudouridine (m¹ψ), 2-thio-1-methyl-pseudouridine, 1-methyl-1-deaza-pseudouridine, 2-thio-1-methyl-1-deaza-pseudouridine, dihydrouridine (D), dihydropseudouridine, 5,6-dihydrouridine, 5-methyl-dihydrouridine (m⁵D), 2-thio-dihydrouridine, 2-thio-dihydropseudouridine, 2-methoxy-uridine, 2-methoxy-4-thio-uridine, 4-methoxy-pseudouridine, 4-methoxy-2-thio-pseudouridine, N1-methyl-pseudouridine (also known as 1-methylpseudouridine (m¹ψ)), 3-(3-amino-3-carboxypropyl)uridine (acp³U), 1-methyl-3-(3-amino-3-carboxypropyl)pseudouridine (acp³ψ), 5-(isopentenylaminomethyl)uridine (inm⁵U), 5-(isopentenylaminomethyl)-2-thio-uridine (inm⁵s²U), α-thio-uridine, 2′-O-methyl-uridine (Um), 5,2′-O-dimethyl-uridine (m⁵Um), 2′-O-methyl-pseudouridine (ψm), 2-thio-2′-O-methyl-uridine (s²Um), 5-methoxycarbonylmethyl-2′-O-methyl-uridine (mcm⁵Um), 5-carbamoylmethyl-2′-O-methyl-uridine (ncm⁵Um), 5-carboxymethylaminomethyl-2′-O-methyl-uridine (cmnm⁵Um), 3,2′-O-dimethyl-uridine (m³Um), 5-(isopentenylaminomethyl)-2′-O-methyl-uridine (inm⁵Um), 1-thio-uridine, deoxythymidine, 2′-F-ara-uridine, 2′-F-uridine, 2′-OH-ara-uridine, 5-(2-carbomethoxyvinyl) uridine, and 5-[3-(1-E-propenylamino)uridine.

[0513] In some embodiments, the modified nucleobase is a modified cytosine. Exemplary nucleobases and nucleosides having a modified cytosine include 5-aza-cytidine, 6-aza-cytidine, pseudoisocytidine, 3-methyl-cytidine (m³C), N4-acetylcytidine (ac⁴C), 5-formyl-cytidine (f⁵C), N4-methyl-cytidine (m⁴C), 5-methyl-cytidine (m⁵C), 5-halo-cytidine (e.g., 5-iodo-cytidine), 5-hydroxymethyl-cytidine (hm⁵C), 1-methyl-pseudoisocytidine, pyrrolo-cytidine, pyrrolo-pseudoisocytidine, 2-thio-cytidine (s²C), 2-thio-5-methyl-cytidine, 4-thio-pseudoisocytidine, 4-thio-1-methyl-pseudoisocytidine, 4-thio-1-methyl-1-deaza-pseudoisocytidine, 1-methyl-1-deaza-pseudoisocytidine, zebularine, 5-aza-zebularine, 5-methyl-zebularine, 5-aza-2-thio-zebularine, 2-thio-zebularine, 2-methoxy-cytidine, 2-methoxy-5-methyl-cytidine, 4-methoxy-pseudoisocytidine, 4-methoxy-1-methyl-pseudoisocytidine, lysidine (k₂C), α-thio-cytidine, 2′-O-methyl-cytidine (Cm), 5,2′-O-dimethyl-cytidine (m⁵Cm), N4-acetyl-2′-O-methyl-cytidine (ac⁴Cm), N4,2′-O-dimethyl-cytidine (m⁴Cm), 5-formyl-2′-O-methyl-cytidine (f⁵Cm), N4,N4,2′-O-trimethyl-cytidine (m⁴²Cm), 1-thio-cytidine, 2′-F-aracytidine, 2′-F-cytidine, and 2′-OH-aracytidine.

[0514] In some embodiments, the modified nucleobase is a modified adenine. Exemplary nucleobases and nucleosides having a modified adenine include 2-amino-purine, 2,6-diaminopurine, 2-amino-6-halo-purine (e.g., 2-amino-6-chloro-purine), 6-halo-purine (e.g., 6-chloro-purine), 2-amino-6-methyl-purine, 8-azido-adenosine, 7-deaza-adenine, 7-deaza-8-aza-adenine, 7-deaza-2-amino-purine, 7-deaza-8-aza-2-amino-purine, 7-deaza-2,6-diaminopurine, 7-deaza-8-aza-2,6-diaminopurine, 1-methyl-adenosine (m¹A), 2-methyl-adenine (m²A), N6-methyl-adenosine (m⁶A), 2-methylthio-N6-methyl-adenosine (ms²m6A), N6-isopentenyl-adenosine (i⁶A), 2-methylthio-N6-isopentenyl-adenosine (ms²i⁶A), N6-(cis-hydroxyisopentenyl)adenosine (io⁶A), 2-methylthio-N6-(cis-hydroxyisopentenyl)adenosine (ms²io⁶A), N6-glycinylcarbamoyl-adenosine (g⁶A), N6-threonylcarbamoyl-adenosine (t⁶A), N6-methyl-N6-threonylcarbamoyl-adenosine (m⁶t⁶A), 2-methylthio-N6-threonylcarbamoyl-adenosine (ms²g⁶A), N6,N6-dimethyl-adenosine (m⁶₂A), N6-hydroxynorvalylcarbamoyl-adenosine (hn⁶A), 2-methylthio-N6-hydroxynorvalylcarbamoyl-adenosine (ms²hn⁶A), N6-acetyl-adenosine (ac⁶A), 7-methyl-adenine, 2-methylthio-adenine, 2-methoxy-adenine, α-thio-adenosine, 2′-O-methyl-adenosine (Am), N6,2′-O-dimethyl-adenosine (m⁶Am), N6,N6,2′-O-trimethyl-adenosine (m⁶₂Am), 1,2′-O-dimethyl-adenosine (m¹Am), 2′-O-ribosyladenosine (phosphate) (Ar(p)), 2-amino-N6-methyl-purine, 1-thio-adenosine, 8-azido-adenosine, 2′-F-ara-adenosine, 2′-F-adenosine, 2′-OH-ara-adenosine, and N6-(19-amino-pentaoxanonadecyl)-adenosine.

[0515] In some embodiments, the modified nucleobase is a modified guanine. Exemplary nucleobases and nucleosides having a modified guanine include inosine (I), 1-methyl-inosine (m¹I), wyosine (imG), methylwyosine (mimG), 4-demethyl-wyosine (imG-14), isowyosine (imG2), wybutosine (yW), peroxywybutosine (o₂yW), hydroxywybutosine (OHyW), undermodified hydroxywybutosine (OHyW*), 7-deaza-guanosine, queuosine (Q), epoxyqueuosine (oQ), galactosyl-queuosine (galQ), mannosyl-queuosine (manQ), 7-cyano-7-deaza-guanosine (preQ₀), 7-aminomethyl-7-deaza-guanosine (preQ₁), archaeosine (G⁺), 7-deaza-8-aza-guanosine, 6-thio-guanosine, 6-thio-7-deaza-guanosine, 6-thio-7-deaza-8-aza-guanosine, 7-methyl-guanosine (m⁷G), 6-thio-7-methyl-guanosine, 7-methyl-inosine, 6-methoxy-guanosine, 1-methyl-guanosine (m¹G), N2-methyl-guanosine (m²G), N2,N2-dimethyl-guanosine (m²₂G), N2,7-dimethyl-guanosine (m^{2,7}G), N2, N2,7-dimethyl-guanosine (m^{2,2,7}G), 8-oxo-guanosine, 7-methyl-8-oxo-guanosine, 1-methyl-6-thio-guanosine, N2-methyl-6-thio-guanosine, N2,N2-dimethyl-6-thio-guanosine, α-thio-guanosine, 2′-O-methyl-guanosine (Gm), N2-methyl-2′-O-methyl-guanosine (m²Gm), N2,N2-dimethyl-2′-O-methyl-guanosine (m²₂Gm), 1-methyl-2′-O-methyl-guanosine (m¹Gm), N2,7-dimethyl-2′-O-methyl-guanosine (m^{2,7}Gm), 2′-O-methyl-inosine (Im), 1,2′-O-dimethyl-inosine (m¹Im), and 2′-O-ribosylguanosine (phosphate) (Gr(p)).

[0516] The nucleobase of the nucleotide can be independently selected from a purine, a pyrimidine, a purine or pyrimidine analog. For example, the nucleobase can each be independently selected from adenine, cytosine, guanine, uracil, or hypoxanthine. In another embodiment, the nucleobase can also include, for example, naturally-occurring and synthetic derivatives of a base, including pyrazolo[3,4-d]pyrimidines, 5-methylcytosine (5-me-C), 5-hydroxymethyl cytosine, xanthine, hypoxanthine, 2-aminoadenine, 6-methyl and other alkyl derivatives of adenine and guanine, 2-propyl and other alkyl derivatives of adenine and guanine, 2-thiouracil, 2-thiothymine and 2-thiocytosine, 5-propynyl uracil and cytosine, 6-azo uracil, cytosine and thymine, 5-uracil (pseudouracil), 4-thiouracil, 8-halo (e.g., 8-bromo), 8-amino, 8-thiol, 8-thioalkyl, 8-hydroxyl and other 8-substituted adenines and guanines, 5-halo particularly 5-bromo, 5-trifluoromethyl and other 5-substituted uracils and cytosines, 7-methylguanine and 7-methyladenine, 8-azaguanine and 8-azaadenine, deazaguanine, 7-deazaguanine, 3-deazaguanine, deazaadenine, 7-deazaadenine, 3-deazaadenine, pyrazolo[3,4-d]pyrimidine, imidazo[1,5-a]1,3,5 triazinones, 9-deazapurines, imidazo[4,5-d]pyrazines, thiazolo[4,5-d]pyrimidines, pyrazin-2-ones, 1,2,4-triazine, pyridazine; and 1,3,5 triazine. When the nucleotides are depicted using the shorthand A, G, C, T or U, each letter refers to the representative base and/or derivatives thereof, e.g., A includes adenine or adenine analogs, e.g., 7-deaza adenine).

### Modifications on the Internucleoside Linkage

[0517] The modified nucleotides, which may be incorporated into a polynucleotide, primary construct, or mmRNA molecule, can be modified on the internucleoside linkage (e.g., phosphate backbone). Herein, in the context of the polynucleotide backbone, the phrases “phosphate” and “phosphodiester” are used interchangeably. Backbone phosphate groups can be modified by replacing one or more of the oxygen atoms with a different substituent. Further, the modified nucleosides and nucleotides can include the wholesale replacement of an unmodified phosphate moiety with another internucleoside linkage as described herein. Examples of modified phosphate groups include, but are not limited to, phosphorothioate, phosphoroselenates, boranophosphates, boranophosphate esters, hydrogen phosphonates, phosphoramidates, phosphorodiamidates, alkyl or aryl phosphonates, and phosphotriesters. Phosphorodithioates have both non-linking oxygens replaced by sulfur. The phosphate linker can also be modified by the replacement of a linking oxygen with nitrogen (bridged phosphoramidates), sulfur (bridged phosphorothioates), and carbon (bridged methylene-phosphonates).

[0518] The α-thio substituted phosphate moiety is provided to confer stability to RNA and DNA polymers through the unnatural phosphorothioate backbone linkages. Phosphorothioate DNA and RNA have increased nuclease resistance and subsequently a longer half-life in a cellular environment. Phosphorothioate linked polynucleotides, primary constructs, or mmRNA molecules are expected to also reduce the innate immune response through weaker binding/activation of cellular innate immune molecules.

[0519] In specific embodiments, a modified nucleoside includes an alpha-thio-nucleoside (e.g., 5′-O-(1-thiophosphate)-adenosine, 5′-O-(1-thiophosphate)-cytidine (α-thio-cytidine), 5′-O-(1-thiophosphate)-guanosine, 5′-O-(1-thiophosphate)-uridine, or 5′-O-(1-thiophosphate)-pseudouridine).

[0520] Other internucleoside linkages that may be employed according to the present invention, including internucleoside linkages which do not contain a phosphorous atom, are described herein below.

### Combinations of Modified Sugars, Nucleobases, and Internucleoside Linkages

[0521] The polynucleotides, primary constructs, and mmRNA of the invention can include a combination of modifications to the sugar, the nucleobase, and/or the internucleoside linkage. These combinations can include any one or more modifications described herein. For examples, any of the nucleotides described herein in Formulas (Ia), (Ia-1)-(Ia-3), (Ib)-(If), (IIa)-(IIp), (IIb-1), (IIb-2), (IIc-1)-(IIc-2), (IIn-1), (IIn-2), (IVa)-(IVl), and (IXa)-(IXr) can be combined with any of the nucleobases described herein (e.g., in Formulas (b1)-(b43) or any other described herein).

Synthesis of Polypeptides, Primary Constructs, and mmRNA Molecules

[0522] The polypeptides, primary constructs, and mmRNA molecules for use in accordance with the invention may be prepared according to any useful technique, as described herein. The modified nucleosides and nucleotides used in the synthesis of polynucleotides, primary constructs, and mmRNA molecules disclosed herein can be prepared from readily available starting materials using the following general methods and procedures. Where typical or preferred process conditions (e.g., reaction temperatures, times, mole ratios of reactants, solvents, pressures, etc.) are provided, a skilled artisan would be able to optimize and develop additional process conditions. Optimum reaction conditions may vary with the particular reactants or solvent used, but such conditions can be determined by one skilled in the art by routine optimization procedures.

[0523] The processes described herein can be monitored according to any suitable method known in the art. For example, product formation can be monitored by spectroscopic means, such as nuclear magnetic resonance spectroscopy (e.g., ¹H or ¹³C) infrared spectroscopy, spectrophotometry (e.g., UV-visible), or mass spectrometry, or by chromatography such as high performance liquid chromatography (HPLC) or thin layer chromatography.

[0524] Preparation of polypeptides, primary constructs, and mmRNA molecules of the present invention can involve the protection and deprotection of various chemical groups. The need for protection and deprotection, and the selection of appropriate protecting groups can be readily determined by one skilled in the art. The chemistry of protecting groups can be found, for example, in Greene, et al., Protective Groups in Organic Synthesis, 2d. Ed., Wiley & Sons, 1991, which is incorporated herein by reference in its entirety.

[0525] The reactions of the processes described herein can be carried out in suitable solvents, which can be readily selected by one of skill in the art of organic synthesis. Suitable solvents can be substantially nonreactive with the starting materials (reactants), the intermediates, or products at the temperatures at which the reactions are carried out, i.e., temperatures which can range from the solvent's freezing temperature to the solvent's boiling temperature. A given reaction can be carried out in one solvent or a mixture of more than one solvent. Depending on the particular reaction step, suitable solvents for a particular reaction step can be selected.

[0526] Resolution of racemic mixtures of modified nucleosides and nucleotides can be carried out by any of numerous methods known in the art. An example method includes fractional recrystallization using a “chiral resolving acid” which is an optically active, salt-forming organic acid. Suitable resolving agents for fractional recrystallization methods are, for example, optically active acids, such as the D and L forms of tartaric acid, diacetyltartaric acid, dibenzoyltartaric acid, mandelic acid, malic acid, lactic acid or the various optically active camphorsulfonic acids. Resolution of racemic mixtures can also be carried out by elution on a column packed with an optically active resolving agent (e.g., dinitrobenzoylphenylglycine). Suitable elution solvent composition can be determined by one skilled in the art.

[0527] Modified nucleosides and nucleotides (e.g., building block molecules) can be prepared according to the synthetic methods described in Ogata et al., J. Org. Chem. 74:2585-2588 (2009); Purmal et al., Nucl. Acids Res. 22(1): 72-78, (1994); Fukuhara et al., Biochemistry, 1(4): 563-568 (1962); and Xu et al., Tetrahedron, 48(9): 1729-1740 (1992), each of which are incorporated by reference in their entirety.

[0528] The polypeptides, primary constructs, and mmRNA of the invention may or may not be uniformly modified along the entire length of the molecule. For example, one or more or all types of nucleotide (e.g., purine or pyrimidine, or any one or more or all of A, G, U, C) may or may not be uniformly modified in a polynucleotide of the invention, or in a given predetermined sequence region thereof (e.g. one or more of the sequence regions represented in FIG. 1). In some embodiments, all nucleotides X in a polynucleotide of the invention (or in a given sequence region thereof) are modified, wherein X may any one of nucleotides A, G, U, C, or any one of the combinations A+G, A+U, A+C, G+U, G+C, U+C, A+G+U, A+G+C, G+U+C or A+G+C.

[0529] Different sugar modifications, nucleotide modifications, and/or internucleoside linkages (e.g., backbone structures) may exist at various positions in the polynucleotide, primary construct, or mmRNA. One of ordinary skill in the art will appreciate that the nucleotide analogs or other modification(s) may be located at any position(s) of a polynucleotide, primary construct, or mmRNA such that the function of the polynucleotide, primary construct, or mmRNA is not substantially decreased. A modification may also be a 5′ or 3′ terminal modification. The polynucleotide, primary construct, or mmRNA may contain from about 1% to about 100% modified nucleotides (either in relation to overall nucleotide content, or in relation to one or more types of nucleotide, i.e. any one or more of A, G, U or C) or any intervening percentage (e.g., from 1% to 20%, from 1% to 25%, from 1% to 50%, from 1% to 60%, from 1% to 70%, from 1% to 80%, from 1% to 90%, from 1% to 95%, from 10% to 20%, from 10% to 25%, from 10% to 50%, from 10% to 60%, from 10% to 70%, from 10% to 80%, from 10% to 90%, from 10% to 95%, from 10% to 100%, from 20% to 25%, from 20% to 50%, from 20% to 60%, from 20% to 70%, from 20% to 80%, from 20% to 90%, from 20% to 95%, from 20% to 100%, from 50% to 60%, from 50% to 70%, from 50% to 80%, from 50% to 90%, from 50% to 95%, from 50% to 100%, from 70% to 80%, from 70% to 90%, from 70% to 95%, from 70% to 100%, from 80% to 90%, from 80% to 95%, from 80% to 100%, from 90% to 95%, from 90% to 100%, and from 95% to 100%).

[0530] In some embodiments, the polynucleotide, primary construct, or mmRNA includes a modified pyrimidine (e.g., a modified uracil/uridine/U or modified cytosine/cytidine/C). In some embodiments, the uracil or uridine (generally: U) in the polynucleotide, primary construct, or mmRNA molecule may be replaced with from about 1% to about 100% of a modified uracil or modified uridine (e.g., from 1% to 20%, from 1% to 25%, from 1% to 50%, from 1% to 60%, from 1% to 70%, from 1% to 80%, from 1% to 90%, from 1% to 95%, from 10% to 20%, from 10% to 25%, from 10% to 50%, from 10% to 60%, from 10% to 70%, from 10% to 80%, from 10% to 90%, from 10% to 95%, from 10% to 100%, from 20% to 25%, from 20% to 50%, from 20% to 60%, from 20% to 70%, from 20% to 80%, from 20% to 90%, from 20% to 95%, from 20% to 100%, from 50% to 60%, from 50% to 70%, from 50% to 80%, from 50% to 90%, from 50% to 95%, from 50% to 100%, from 70% to 80%, from 70% to 90%, from 70% to 95%, from 70% to 100%, from 80% to 90%, from 80% to 95%, from 80% to 100%, from 90% to 95%, from 90% to 100%, and from 95% to 100% of a modified uracil or modified uridine). The modified uracil or uridine can be replaced by a compound having a single unique structure or by a plurality of compounds having different structures (e.g., 2, 3, 4 or more unique structures, as described herein). In some embodiments, the cytosine or cytidine (generally: C) in the polynucleotide, primary construct, or mmRNA molecule may be replaced with from about 1% to about 100% of a modified cytosine or modified cytidine (e.g., from 1% to 20%, from 1% to 25%, from 1% to 50%, from 1% to 60%, from 1% to 70%, from 1% to 80%, from 1% to 90%, from 1% to 95%, from 10% to 20%, from 10% to 25%, from 10% to 50%, from 10% to 60%, from 10% to 70%, from 10% to 80%, from 10% to 90%, from 10% to 95%, from 10% to 100%, from 20% to 25%, from 20% to 50%, from 20% to 60%, from 20% to 70%, from 20% to 80%, from 20% to 90%, from 20% to 95%, from 20% to 100%, from 50% to 60%, from 50% to 70%, from 50% to 80%, from 50% to 90%, from 50% to 95%, from 50% to 100%, from 70% to 80%, from 70% to 90%, from 70% to 95%, from 70% to 100%, from 80% to 90%, from 80% to 95%, from 80% to 100%, from 90% to 95%, from 90% to 100%, and from 95% to 100% of a modified cytosine or modified cytidine). The modified cytosine or cytidine can be replaced by a compound having a single unique structure or by a plurality of compounds having different structures (e.g., 2, 3, 4 or more unique structures, as described herein).

[0531] In some embodiments, the present disclosure provides methods of synthesizing a polynucleotide, primary construct, or mmRNA (e.g., the first region, first flanking region, or second flanking region) including n number of linked nucleosides having Formula (Ia-1):

[chemical structure]

comprising:
[0532] a) reacting a nucleotide of Formula (IV-1):

[chemical structure]

[0533] with a phosphoramidite compound of Formula (V-1):

[chemical structure]

[0534] wherein Y⁹ is H, hydroxy, phosphoryl, pyrophosphate, sulfate, amino, thiol, optionally substituted amino acid, or a peptide (e.g., including from 2 to 12 amino acids); and each P¹, P², and P³ is, independently, a suitable protecting group; and

[chemical structure]

denotes a solid support;
[0535] to provide a polynucleotide, primary construct, or mmRNA of Formula (VI-1):

[chemical structure]

and
[0536] b) oxidizing or sulfurizing the polynucleotide, primary construct, or mmRNA of Formula (V) to yield a polynucleotide, primary construct, or mmRNA of Formula (VII-1):

[chemical structure]

[0537] c) removing the protecting groups to yield the polynucleotide, primary construct, or mmRNA of Formula (Ia).

[0538] In some embodiments, steps a) and b) are repeated from 1 to about 10,000 times. In some embodiments, the methods further comprise a nucleotide (e.g., mmRNA molecule) selected from the group consisting of A, C, G and U adenosine, cytosine, guanosine, and uracil. In some embodiments, the nucleobase may be a pyrimidine or derivative thereof. In some embodiments, the polynucleotide, primary construct, or mmRNA is translatable.

[0539] Other components of polynucleotides, primary constructs, and mmRNA are optional, and are beneficial in some embodiments. For example, a 5′ untranslated region (UTR) and/or a 3′UTR are provided, wherein either or both may independently contain one or more different nucleotide modifications. In such embodiments, nucleotide modifications may also be present in the translatable region. Also provided are polynucleotides, primary constructs, and mmRNA containing a Kozak sequence.

[0540] Exemplary syntheses of modified nucleotides, which are incorporated into a modified nucleic acid or mmRNA, e.g., RNA or mRNA, are provided below in Scheme 1 through Scheme 11. Scheme 1 provides a general method for phosphorylation of nucleosides, including modified nucleosides.

[chemical structure]

[0541] Various protecting groups may be used to control the reaction. For example, Scheme 2 provides the use of multiple protecting and deprotecting steps to promote phosphorylation at the 5′ position of the sugar, rather than the 2′ and 3′ hydroxyl groups.

[chemical structure]

[0542] Modified nucleotides can be synthesized in any useful manner. Schemes 3, 4, and 7 provide exemplary methods for synthesizing modified nucleotides having a modified purine nucleobase; and Schemes 5 and 6 provide exemplary methods for synthesizing modified nucleotides having a modified pseudouridine or pseudoisocytidine, respectively.

[chemical structure]

[chemical structure]

[chemical structure]

[chemical structure]

[chemical structure]

[0543] Schemes 8 and 9 provide exemplary syntheses of modified nucleotides. Scheme 10 provides a non-limiting biocatalytic method for producing nucleotides.

[chemical structure]

[chemical structure]

[chemical structure]

[0544] Scheme 11 provides an exemplary synthesis of a modified uracil, where the N1 position is modified with R^{12b}, as provided elsewhere, and the 5′-position of ribose is phosphorylated. T¹, T², R^{12a}, R^{12b}, and r are as provided herein. This synthesis, as well as optimized versions thereof, can be used to modify other pyrimidine nucleobases and purine nucleobases (see e.g., Formulas (b1)-(b43)) and/or to install one or more phosphate groups (e.g., at the 5′ position of the sugar). This alkylating reaction can also be used to include one or more optionally substituted alkyl group at any reactive group (e.g., amino group) in any nucleobase described herein (e.g., the amino groups in the Watson-Crick base-pairing face for cytosine, uracil, adenine, and guanine).

[chemical structure]

Combinations of Nucleotides in mmRNA

[0545] Further examples of modified nucleotides and modified nucleotide combinations are provided below in Table 9. These combinations of modified nucleotides can be used to form the polypeptides, primary constructs, or mmRNA of the invention. Unless otherwise noted, the modified nucleotides may be completely substituted for the natural nucleotides of the modified nucleic acids or mmRNA of the invention. As a non-limiting example, the natural nucleotide uridine may be substituted with a modified nucleoside described herein. In another non-limiting example, the natural nucleotide uridine may be partially substituted (e.g., about 0.1%, 1%, 5%, 10%, 15%, 20%, 25%, 30%, 35%, 40%, 45%, 50%, 55%, 60%, 65%, 70%, 75%, 80%, 85%, 90%, 95% or 99.9%) with at least one of the modified nucleoside disclosed herein.

TABLE 9

| Modified | |
|---|---|
| Nucleotide | Modified Nucleotide Combination |
| α-thio-cytidine | α-thio-cytidine/5-iodo-uridine |
| | α-thio-cytidine/N1-methyl-pseudouridine |
| | α-thio-cytidine/α-thio-uridine |
| | α-thio-cytidine/5-methyl-uridine |
| | α-thio-cytidine/pseudo-uridine |
| | about 50% of the cytosines are α-thio-cytidine |
| pseudoiso- | pseudoisocytidine/5-iodo-uridine |
| cytidine | pseudoisocytidine/N1-methyl-pseudouridine |
| | pseudoisocytidine/α-thio-uridine |
| | pseudoisocytidine/5-methyl-uridine |
| | pseudoisocytidine/pseudouridine |
| | about 25% of cytosines are pseudoisocytidine |
| | pseudoisocytidine/about 50% of uridines are N1-methyl- |
| | pseudouridine and about 50% of uridines are pseudo- |
| | uridine |
| | pseudoisocytidine/about 25% of uridines are N1-methyl- |
| | pseudouridine and about 25% of uridines are pseudo- |
| | uridine |
| pyrrolo- | pyrrolo-cytidine/5-iodo-uridine |
| cytidine | pyrrolo-cytidine/N1-methyl-pseudouridine |
| | pyrrolo-cytidine/α-thio-uridine |
| | pyrrolo-cytidine/5-methyl-uridine |
| | pyrrolo-cytidine/pseudouridine |
| | about 50% of the cytosines are pyrrolo-cytidine |
| 5-methyl- | 5-methyl-cytidine/5-iodo-uridine |
| cytidine | 5-methyl-cytidine/N1-methyl-pseudouridine |
| | 5-methyl-cytidine/α-thio-uridine |
| | 5-methyl-cytidine/5-methyl-uridine |
| | 5-methyl-cytidine/pseudouridine |
| | about 25% of cytosines are 5-methyl-cytidine |
| | about 50% of cytosines are 5-methyl-cytidine |
| | 5-methyl-cytidine/5-methoxy-uridine |
| | 5-methyl-cytidine/5-bromo-uridine |
| | 5-methyl-cytidine/2-thio-uridine |
| | 5-methyl-cytidine/about 50% of uridines are 2-thio- |
| | uridine |
| | about 50% of uridines are 5-methyl-cytidine/about 50% |
| | of uridines are 2-thio-uridine |
| N4-acetyl- | N4-acetyl-cytidine/5-iodo-uridine |
| cytidine | N4-acetyl-cytidine/N1-methyl-pseudouridine |
| | N4-acetyl-cytidine/α-thio-uridine |
| | N4-acetyl-cytidine/5-methyl-uridine |
| | N4-acetyl-cytidine/pseudouridine |
| | about 50% of cytosines are N4-acetyl-cytidine |
| | about 25% of cytosines are N4-acetyl-cytidine |
| | N4-acetyl-cytidine/5-methoxy-uridine |
| | N4-acetyl-cytidine/5-bromo-uridine |
| | N4-acetyl-cytidine/2-thio-uridine |
| | about 50% of cytosines are N4-acetyl-cytidine/about |
| | 50% of uridines are 2-thio-uridine |

[0546] Further examples of modified nucleotide combinations are provided below in Table 10. These combinations of modified nucleotides can be used to form the polypeptides, primary constructs, or mmRNA of the invention.

TABLE 10

| Modified | |
|---|---|
| Nucleotide | Modified Nucleotide Combination |
| modified cytidine | modified cytidine with (b10)/pseudouridine |
| having one or | modified cytidine with (b10)/N1-methyl-pseudouridine |
| more nucleobases | modified cytidine with (b10)/5-methoxy-uridine |
| of Formula (b10) | modified cytidine with (b10)/5-methyl-uridine |
| | modified cytidine with (b10)/5-bromo-uridine |
| | modified cytidine with (b10)/2-thio-uridine |
| | about 50% of cytidine substituted with modified |
| | cytidine (b10)/about 50% of uridines are 2-thio- |
| | uridine |
| modified cytidine | modified cytidine with (b32)/pseudouridine |
| having one or | modified cytidine with (b32)/N1-methyl-pseudouridine |
| more nucleobases | modified cytidine with (b32)/5-methoxy-uridine |
| of Formula (b32) | modified cytidine with (b32)/5-methyl-uridine |
| | modified cytidine with (b32)/5-bromo-uridine |
| | modified cytidine with (b32)/2-thio-uridine |
| | about 50% of cytidine substituted with modified |
| | cytidine (b32)/about 50% of uridines are 2-thio- |
| | uridine |
| modified uridine | modified uridine with (b1)/N4-acetyl-cytidine |
| having one or | modified uridine with (b1)/5-methyl-cytidine |
| more nucleobases | |
| of Formula (b1) | |
| modified uridine | modified uridine with (b8)/N4-acetyl-cytidine |
| having one or | modified uridine with (b8)/5-methyl-cytidine |
| more nucleobases | |
| of Formula (b8) | |
| modified uridine | modified uridine with (b28)/N4-acetyl-cytidine |
| having one or | modified uridine with (b28)/5-methyl-cytidine |
| more nucleobases | |
| of Formula (b28) | |
| modified uridine | modified uridine with (b29)/N4-acetyl-cytidine |
| having one or | modified uridine with (b29)/5-methyl-cytidine |
| more nucleobases | |
| of Formula (b29) | |
| modified uridine | modified uridine with (b30)/N4-acetyl-cytidine |
| having one or | modified uridine with (b30)/5-methyl-cytidine |
| more nucleobases | |
| of Formula (b30) | |

[0547] In some embodiments, at least 25% of the cytosines are replaced by a compound of Formula (b10)-(b14) (e.g., at least about 300%, at least about 35%, at least about 4000, at least about 4500, at least about 50%, at least about 55%, at least about 60%, at least about 65%, at least about 70%, at least about 7500 at least about 80%, at least about 85%, at least about 900%, at least about 95%, or about 100%).

[0548] In some embodiments, at least 25% of the uracils are replaced by a compound of Formula (b11)-(b9) (e.g., at least about 300%, at least about 35%, at least about 400%, at least about 4500 at least about 50%, at least about 5500 at least about 60%, at least about 65%, at least about 70%, at least about 7500 at least about 80%, at least about 85%, at least about 900%, at least about 95%, or about 100%).

[0549] In some embodiments, at least 25% of the cytosines are replaced by a compound of Formula (b10)-(b14), and at least 25% of the uracils are replaced by a compound of Formula (b1)-(b9) (e.g., at least about 30%, at least about 35%, at least about 40%, at least about 45%, at least about 50%, at least about 55%, at least about 60%, at least about 65%, at least about 70%, at least about 75%, at least about 80%, at least about 85%, at least about 90%, at least about 95%, or about 100%).

### IV. Pharmaceutical Compositions

### Formulation, Administration, Delivery and Dosing

[0550] The present invention provides polynucleotides, primary constructs and mmRNA compositions and complexes in combination with one or more pharmaceutically acceptable excipients. Pharmaceutical compositions may optionally comprise one or more additional active substances, e.g. therapeutically and/or prophylactically active substances. General considerations in the formulation and/or manufacture of pharmaceutical agents may be found, for example, in Remington: The Science and Practice of Pharmacy 21^{st} ed., Lippincott Williams & Wilkins, 2005 (incorporated herein by reference).

[0551] In some embodiments, compositions are administered to humans, human patients or subjects. For the purposes of the present disclosure, the phrase “active ingredient” generally refers to polynucleotides, primary constructs and mmRNA to be delivered as described herein.

[0552] Although the descriptions of pharmaceutical compositions provided herein are principally directed to pharmaceutical compositions which are suitable for administration to humans, it will be understood by the skilled artisan that such compositions are generally suitable for administration to any other animal, e.g., to non-human animals, e.g. non-human mammals. Modification of pharmaceutical compositions suitable for administration to humans in order to render the compositions suitable for administration to various animals is well understood, and the ordinarily skilled veterinary pharmacologist can design and/or perform such modification with merely ordinary, if any, experimentation. Subjects to which administration of the pharmaceutical compositions is contemplated include, but are not limited to, humans and/or other primates; mammals, including commercially relevant mammals such as cattle, pigs, horses, sheep, cats, dogs, mice, and/or rats; and/or birds, including commercially relevant birds such as poultry, chickens, ducks, geese, and/or turkeys.

[0553] Formulations of the pharmaceutical compositions described herein may be prepared by any method known or hereafter developed in the art of pharmacology. In general, such preparatory methods include the step of bringing the active ingredient into association with an excipient and/or one or more other accessory ingredients, and then, if necessary and/or desirable, dividing, shaping and/or packaging the product into a desired single- or multi-dose unit.

[0554] A pharmaceutical composition in accordance with the invention may be prepared, packaged, and/or sold in bulk, as a single unit dose, and/or as a plurality of single unit doses. As used herein, a “unit dose” is discrete amount of the pharmaceutical composition comprising a predetermined amount of the active ingredient. The amount of the active ingredient is generally equal to the dosage of the active ingredient which would be administered to a subject and/or a convenient fraction of such a dosage such as, for example, one-half or one-third of such a dosage.

[0555] Relative amounts of the active ingredient, the pharmaceutically acceptable excipient, and/or any additional ingredients in a pharmaceutical composition in accordance with the invention will vary, depending upon the identity, size, and/or condition of the subject treated and further depending upon the route by which the composition is to be administered. By way of example, the composition may comprise between 0.1% and 100%, e.g., between 0.5 and 50%, between 1-30%, between 5-80%, at least 80% (w/w) active ingredient.

### Formulations

[0556] The polynucleotide, primary construct, and mmRNA of the invention can be formulated using one or more excipients to: (1) increase stability; (2) increase cell transfection; (3) permit the sustained or delayed release (e.g., from a depot formulation of the polynucleotide, primary construct, or mmRNA); (4) alter the biodistribution (e.g., target the polynucleotide, primary construct, or mmRNA to specific tissues or cell types); (5) increase the translation of encoded protein in vivo; and/or (6) alter the release profile of encoded protein in vivo. In addition to traditional excipients such as any and all solvents, dispersion media, diluents, or other liquid vehicles, dispersion or suspension aids, surface active agents, isotonic agents, thickening or emulsifying agents, preservatives, excipients of the present invention can include, without limitation, lipidoids, liposomes, lipid nanoparticles, polymers, lipoplexes, core-shell nanoparticles, peptides, proteins, cells transfected with polynucleotide, primary construct, or mmRNA (e.g., for transplantation into a subject), hyaluronidase, nanoparticle mimics and combinations thereof. Accordingly, the formulations of the invention can include one or more excipients, each in an amount that together increases the stability of the polynucleotide, primary construct, or mmRNA, increases cell transfection by the polynucleotide, primary construct, or mmRNA, increases the expression of polynucleotide, primary construct, or mmRNA encoded protein, and/or alters the release profile of polynucleotide, primary construct, or mmRNA encoded proteins. Further, the primary construct and mmRNA of the present invention may be formulated using self-assembled nucleic acid nanoparticles.

[0557] Formulations of the pharmaceutical compositions described herein may be prepared by any method known or hereafter developed in the art of pharmacology. In general, such preparatory methods include the step of associating the active ingredient with an excipient and/or one or more other accessory ingredients.

[0558] A pharmaceutical composition in accordance with the present disclosure may be prepared, packaged, and/or sold in bulk, as a single unit dose, and/or as a plurality of single unit doses. As used herein, a “unit dose” refers to a discrete amount of the pharmaceutical composition comprising a predetermined amount of the active ingredient. The amount of the active ingredient may generally be equal to the dosage of the active ingredient which would be administered to a subject and/or a convenient fraction of such a dosage including, but not limited to, one-half or one-third of such a dosage.

[0559] Relative amounts of the active ingredient, the pharmaceutically acceptable excipient, and/or any additional ingredients in a pharmaceutical composition in accordance with the present disclosure may vary, depending upon the identity, size, and/or condition of the subject being treated and further depending upon the route by which the composition is to be administered. For example, the composition may comprise between 0.1% and 99% (w/w) of the active ingredient.

[0560] In some embodiments, the formulations described herein may contain at least one mmRNA. As a non-limiting example, the formulations may contain 1, 2, 3, 4 or 5 mmRNA. In one embodiment the formulation may contain modified mRNA encoding proteins selected from categories such as, but not limited to, human proteins, veterinary proteins, bacterial proteins, biological proteins, antibodies, immunogenic proteins, therapeutic peptides and proteins, secreted proteins, plasma membrane proteins, cytoplasmic and cytoskeletal proteins, intrancellular membrane bound proteins, nuclear proteins, proteins associated with human disease and/or proteins associated with non-human diseases. In one embodiment, the formulation contains at least three modified mRNA encoding proteins. In one embodiment, the formulation contains at least five modified mRNA encoding proteins.

[0561] Pharmaceutical formulations may additionally comprise a pharmaceutically acceptable excipient, which, as used herein, includes, but is not limited to, any and all solvents, dispersion media, diluents, or other liquid vehicles, dispersion or suspension aids, surface active agents, isotonic agents, thickening or emulsifying agents, preservatives, and the like, as suited to the particular dosage form desired. Various excipients for formulating pharmaceutical compositions and techniques for preparing the composition are known in the art (see Remington: The Science and Practice of Pharmacy, 21^{st} Edition, A. R. Gennaro, Lippincott, Williams & Wilkins, Baltimore, MD, 2006; incorporated herein by reference in its entirety). The use of a conventional excipient medium may be contemplated within the scope of the present disclosure, except insofar as any conventional excipient medium may be incompatible with a substance or its derivatives, such as by producing any undesirable biological effect or otherwise interacting in a deleterious manner with any other component(s) of the pharmaceutical composition.

[0562] In some embodiments, the particle size of the lipid nanoparticle may be increased and/or decreased. The change in particle size may be able to help counter biological reaction such as, but not limited to, inflammation or may increase the biological effect of the modified mRNA delivered to mammals.

[0563] Pharmaceutically acceptable excipients used in the manufacture of pharmaceutical compositions include, but are not limited to, inert diluents, surface active agents and/or emulsifiers, preservatives, buffering agents, lubricating agents, and/or oils. Such excipients may optionally be included in the pharmaceutical formulations of the invention.

### Lipidoids

[0564] The synthesis of lipidoids has been extensively described and formulations containing these compounds are particularly suited for delivery of polynucleotides, primary constructs or mmRNA (see Mahon et al., Bioconjug Chem. 2010 21:1448-1454; Schroeder et al., J Intern Med. 2010 267:9-21; Akinc et al., Nat Biotechnol. 2008 26:561-569; Love et al., Proc Natl Acad Sci USA. 2010 107:1864-1869; Siegwart et al., Proc Natl Acad Sci USA. 2011 108:12996-3001; all of which are incorporated herein in their entireties).

[0565] While these lipidoids have been used to effectively deliver double stranded small interfering RNA molecules in rodents and non-human primates (see Akinc et al., Nat Biotechnol. 2008 26:561-569; Frank-Kamenetsky et al., Proc Natl Acad Sci USA. 2008 105:11915-11920; Akinc et al., Mol Ther. 2009 17:872-879; Love et al., Proc Natl Acad Sci USA. 2010 107:1864-1869; Leuschner et al., Nat Biotechnol. 2011 29:1005-1010; all of which is incorporated herein in their entirety), the present disclosure describes their formulation and use in delivering single stranded polynucleotides, primary constructs, or mmRNA. Complexes, micelles, liposomes or particles can be prepared containing these lipidoids and therefore, can result in an effective delivery of the polynucleotide, primary construct, or mmRNA, as judged by the production of an encoded protein, following the injection of a lipidoid formulation via localized and/or systemic routes of administration. Lipidoid complexes of polynucleotides, primary constructs, or mmRNA can be administered by various means including, but not limited to, intravenous, intramuscular, or subcutaneous routes.

[0566] In vivo delivery of nucleic acids may be affected by many parameters, including, but not limited to, the formulation composition, nature of particle PEGylation, degree of loading, oligonucleotide to lipid ratio, and biophysical parameters such as, but not limited to, particle size (Akinc et al., Mol Ther. 2009 17:872-879; herein incorporated by reference in its entirety). As an example, small changes in the anchor chain length of poly(ethylene glycol) (PEG) lipids may result in significant effects on in vivo efficacy. Formulations with the different lipidoids, including, but not limited to penta[3-(1-laurylaminopropionyl)]-triethylenetetramine hydrochloride (TETA-5LAP; aka 98N12-5, see Murugaiah et al., Analytical Biochemistry, 401:61 (2010); herein incorporated by reference in its entirety), C12-200 (including derivatives and variants), and MD1, can be tested for in vivo activity.

[0567] The lipidoid referred to herein as “98N12-5” is disclosed by Akinc et al., Mol Ther. 2009 17:872-879 and is incorporated by reference in its entirety. (See FIG. 2)

[0568] The lipidoid referred to herein as “C12-200” is disclosed by Love et al., Proc Natl Acad Sci USA. 2010 107:1864-1869 (see FIG. 2) and Liu and Huang, Molecular Therapy. 2010 669-670 (see FIG. 2); both of which are herein incorporated by reference in their entirety. The lipidoid formulations can include particles comprising either 3 or 4 or more components in addition to polynucleotide, primary construct, or mmRNA. As an example, formulations with certain lipidoids, include, but are not limited to, 98N12-5 and may contain 42% lipidoid, 48% cholesterol and 10% PEG (C14 alkyl chain length). As another example, formulations with certain lipidoids, include, but are not limited to, C12-200 and may contain 50% lipidoid, 10% disteroylphosphatidyl choline, 38.5% cholesterol, and 1.5% PEG-DMG.

[0569] In one embodiment, a polynucleotide, primary construct, or mmRNA formulated with a lipidoid for systemic intravenous administration can target the liver. For example, a final optimized intravenous formulation using polynucleotide, primary construct, or mmRNA, and comprising a lipid molar composition of 42% 98N12-5, 48% cholesterol, and 10% PEG-lipid with a final weight ratio of about 7.5 to 1 total lipid to polynucleotide, primary construct, or mmRNA, and a C14 alkyl chain length on the PEG lipid, with a mean particle size of roughly 50-60 nm, can result in the distribution of the formulation to be greater than 90% to the liver. (see, Akinc et al., Mol Ther. 2009 17:872-879; herein incorporated by reference in its entirety). In another example, an intravenous formulation using a C12-200 (see U.S. provisional application 61/175,770 and published international application WO2010129709, each of which is herein incorporated by reference in their entirety) lipidoid may have a molar ratio of 50/10/38.5/1.5 of C12-200/disteroylphosphatidyl choline/cholesterol/PEG-DMG, with a weight ratio of 7 to 1 total lipid to polynucleotide, primary construct, or mmRNA, and a mean particle size of 80 nm may be effective to deliver polynucleotide, primary construct, or mmRNA to hepatocytes (see, Love et al., Proc Natl Acad Sci USA. 2010 107:1864-1869 herein incorporated by reference in its entirety). In another embodiment, an MD1 lipidoid-containing formulation may be used to effectively deliver polynucleotide, primary construct, or mmRNA to hepatocytes in vivo. The characteristics of optimized lipidoid formulations for intramuscular or subcutaneous routes may vary significantly depending on the target cell type and the ability of formulations to diffuse through the extracellular matrix into the blood stream. While a particle size of less than 150 nm may be desired for effective hepatocyte delivery due to the size of the endothelial fenestrae (see, Akinc et al., Mol Ther. 2009 17:872-879 herein incorporated by reference in its entirety), use of a lipidoid-formulated polynucleotide, primary construct, or mmRNA to deliver the formulation to other cells types including, but not limited to, endothelial cells, myeloid cells, and muscle cells may not be similarly size-limited. Use of lipidoid formulations to deliver siRNA in vivo to other non-hepatocyte cells such as myeloid cells and endothelium has been reported (see Akinc et al., Nat Biotechnol. 2008 26:561-569; Leuschner et al., Nat Biotechnol. 2011 29:1005-1010; Cho et al. Adv. Funct. Mater. 2009 19:3112-3118; 8^{th} International Judah Folkman Conference, Cambridge, MA Oct. 8-9, 2010; each of which is herein incorporated by reference in its entirety). Effective delivery to myeloid cells, such as monocytes, lipidoid formulations may have a similar component molar ratio. Different ratios of lipidoids and other components including, but not limited to, disteroylphosphatidyl choline, cholesterol and PEG-DMG, may be used to optimize the formulation of the polynucleotide, primary construct, or mmRNA for delivery to different cell types including, but not limited to, hepatocytes, myeloid cells, muscle cells, etc. For example, the component molar ratio may include, but is not limited to, 50% C12-200, 10% disteroylphosphatidyl choline, 38.5% cholesterol, and %1.5 PEG-DMG (see Leuschner et al., Nat Biotechnol 2011 29:1005-1010; herein incorporated by reference in its entirety). The use of lipidoid formulations for the localized delivery of nucleic acids to cells (such as, but not limited to, adipose cells and muscle cells) via either subcutaneous or intramuscular delivery, may not require all of the formulation components desired for systemic delivery, and as such may comprise only the lipidoid and the polynucleotide, primary construct, or mmRNA.

[0570] Combinations of different lipidoids may be used to improve the efficacy of polynucleotide, primary construct, or mmRNA directed protein production as the lipidoids may be able to increase cell transfection by the polynucleotide, primary construct, or mmRNA; and/or increase the translation of encoded protein (see Whitehead et al., Mol. Ther. 2011, 19:1688-1694, herein incorporated by reference in its entirety).

### Liposomes, Lipoplexes, and Lipid Nanoparticles

[0571] The polynucleotide, primary construct, and mmRNA of the invention can be formulated using one or more liposomes, lipoplexes, or lipid nanoparticles. In one embodiment, pharmaceutical compositions of polynucleotide, primary construct, or mmRNA include liposomes. Liposomes are artificially-prepared vesicles which may primarily be composed of a lipid bilayer and may be used as a delivery vehicle for the administration of nutrients and pharmaceutical formulations. Liposomes can be of different sizes such as, but not limited to, a multilamellar vesicle (MLV) which may be hundreds of nanometers in diameter and may contain a series of concentric bilayers separated by narrow aqueous compartments, a small unicellular vesicle (SUV) which may be smaller than 50 nm in diameter, and a large unilamellar vesicle (LUV) which may be between 50 and 500 nm in diameter. Liposome design may include, but is not limited to, opsonins or ligands in order to improve the attachment of liposomes to unhealthy tissue or to activate events such as, but not limited to, endocytosis. Liposomes may contain a low or a high pH in order to improve the delivery of the pharmaceutical formulations.

[0572] The formation of liposomes may depend on the physicochemical characteristics such as, but not limited to, the pharmaceutical formulation entrapped and the liposomal ingredients, the nature of the medium in which the lipid vesicles are dispersed, the effective concentration of the entrapped substance and its potential toxicity, any additional processes involved during the application and/or delivery of the vesicles, the optimization size, polydispersity and the shelf-life of the vesicles for the intended application, and the batch-to-batch reproducibility and possibility of large-scale production of safe and efficient liposomal products.

[0573] In one embodiment, pharmaceutical compositions described herein may include, without limitation, liposomes such as those formed from 1,2-dioleyloxy-N,N-dimethylaminopropane (DODMA) liposomes, DiLa2 liposomes from Marina Biotech (Bothell, WA), 1,2-dilinoleyloxy-3-dimethylaminopropane (DLin-DMA), 2,2-dilinoleyl-4-(2-dimethylaminoethyl)-[1,3]-dioxolane (DLin-KC2-DMA), and MC3 (US20100324120; herein incorporated by reference in its entirety) and liposomes which may deliver small molecule drugs such as, but not limited to, DOXIL® from Janssen Biotech, Inc. (Horsham, PA).

[0574] In one embodiment, pharmaceutical compositions described herein may include, without limitation, liposomes such as those formed from the synthesis of stabilized plasmid-lipid particles (SPLP) or stabilized nucleic acid lipid particle (SNALP) that have been previously described and shown to be suitable for oligonucleotide delivery in vitro and in vivo (see Wheeler et al. Gene Therapy. 1999 6:271-281; Zhang et al. Gene Therapy. 1999 6:1438-1447; Jeffs et al. Pharm Res. 2005 22:362-372; Morrissey et al., Nat Biotechnol. 2005 2:1002-1007; Zimmermann et al., Nature. 2006 441:111-114; Heyes et al. J Contr Rel. 2005 107:276-287; Semple et al. Nature Biotech. 2010 28:172-176; Judge et al. J Clin Invest. 2009 119:661-673; deFougerolles Hum Gene Ther. 2008 19:125-132; all of which are incorporated herein in their entireties). The original manufacture method by Wheeler et al. was a detergent dialysis method, which was later improved by Jeffs et al. and is referred to as the spontaneous vesicle formation method. The liposome formulations are composed of 3 to 4 lipid components in addition to the polynucleotide, primary construct, or mmRNA. As an example a liposome can contain, but is not limited to, 55% cholesterol, 20% disteroylphosphatidyl choline (DSPC), 10% PEG-S-DSG, and 15% 1,2-dioleyloxy-N,N-dimethylaminopropane (DODMA), as described by Jeffs et al. As another example, certain liposome formulations may contain, but are not limited to, 48% cholesterol, 20% DSPC, 2% PEG-c-DMA, and 30% cationic lipid, where the cationic lipid can be 1,2-distearloxy-N,N-dimethylaminopropane (DSDMA), DODMA, DLin-DMA, or 1,2-dilinolenyloxy-3-dimethylaminopropane (DLenDMA), as described by Heyes et al.

[0575] In one embodiment, pharmaceutical compositions may include liposomes which may be formed to deliver mmRNA which may encode at least one immunogen. The mmRNA may be encapsulated by the liposome and/or it may be contained in an aqueous core which may then be encapsulated by the liposome (see International Pub. Nos. WO2012031046, WO2012031043, WO2012030901 and WO2012006378; each of which is herein incorporated by reference in their entirety). In another embodiment, the mmRNA which may encode an immunogen may be formulated in a cationic oil-in-water emulsion where the emulsion particle comprises an oil core and a cationic lipid which can interact with the mmRNA anchoring the molecule to the emulsion particle (see International Pub. No. WO2012006380; herein incorporated by reference in its entirety). In yet another embodiment, the lipid formulation may include at least cationic lipid, a lipid which may enhance transfection and a least one lipid which contains a hydrophilic head group linked to a lipid moiety (International Pub. No. WO2011076807 and U.S. Pub. No. 20110200582; each of which is herein incorporated by reference in their entirety). In another embodiment, the polynucleotides, primary constructs and/or mmRNA encoding an immunogen may be formulated in a lipid vesicle which may have crosslinks between functionalized lipid bilayers (see U.S. Pub. No. 20120177724, herein incorporated by reference in its entirety).

[0576] In one embodiment, the polynucleotides, primary constructs and/or mmRNA may be formulated in a lipid vesicle which may have crosslinks between functionalized lipid bilayers.

[0577] In one embodiment, the polynucleotides, primary constructs and/or mmRNA may be formulated in a liposome comprising a cationic lipid. The liposome may have a molar ratio of nitrogen atoms in the cationic lipid to the phophates in the RNA (N:P ratio) of between 1:1 and 20:1 as described in International Publication No. WO2013006825, herein incorporated by reference in its entirety. In another embodiment, the liposome may have a N:P ratio of greater than 20:1 or less than 1:1.

[0578] In one embodiment, the polynucleotides, primary constructs and/or mmRNA may be formulated in a lipid-polycation complex. The formation of the lipid-polycation complex may be accomplished by methods known in the art and/or as described in U.S. Pub. No. 20120178702, herein incorporated by reference in its entirety. As a non-limiting example, the polycation may include a cationic peptide or a polypeptide such as, but not limited to, polylysine, polyornithine and/or polyarginine and the cationic peptides described in International Pub. No. WO2012013326; herein incorporated by reference in its entirety. In another embodiment, the polynucleotides, primary constructs and/or mmRNA may be formulated in a lipid-polycation complex which may further include a neutral lipid such as, but not limited to, cholesterol or dioleoyl phosphatidylethanolamine (DOPE).

[0579] The liposome formulation may be influenced by, but not limited to, the selection of the cationic lipid component, the degree of cationic lipid saturation, the nature of the PEGylation, ratio of all components and biophysical parameters such as size. In one example by Semple et al. (Semple et al. Nature Biotech. 2010 28:172-176; herein incorporated by reference in its entirety), the liposome formulation was composed of 57.1% cationic lipid, 7.1% dipalmitoylphosphatidylcholine, 34.3% cholesterol, and 1.4% PEG-c-DMA. As another example, changing the composition of the cationic lipid could more effectively deliver siRNA to various antigen presenting cells (Basha et al. Mol Ther. 2011 19:2186-2200; herein incorporated by reference in its entirety).

[0580] In some embodiments, the ratio of PEG in the lipid nanoparticle (LNP) formulations may be increased or decreased and/or the carbon chain length of the PEG lipid may be modified from C14 to C18 to alter the pharmacokinetics and/or biodistribution of the LNP formulations. As a non-limiting example, LNP formulations may contain 1-5% of the lipid molar ratio of PEG-c-DOMG as compared to the cationic lipid, DSPC and cholesterol. In another embodiment the PEG-c-DOMG may be replaced with a PEG lipid such as, but not limited to, PEG-DSG (1,2-Distearoyl-sn-glycerol, methoxypolyethylene glycol) or PEG-DPG (1,2-Dipalmitoyl-sn-glycerol, methoxypolyethylene glycol). The cationic lipid may be selected from any lipid known in the art such as, but not limited to, DLin-MC3-DMA, DLin-DMA, C12-200 and DLin-KC2-DMA.

[0581] In one embodiment, the polynucleotides, primary constructs or mmRNA may be formulated in a lipid nanoparticle such as those described in International Publication No. WO2012170930, herein incorporated by reference in its entirety.

[0582] In one embodiment, the cationic lipid may be selected from, but not limited to, a cationic lipid described in International Publication Nos. WO2012040184, WO2011153120, WO2011149733, WO2011090965, WO2011043913, WO2011022460, WO2012061259, WO2012054365, WO2012044638, WO2010080724, WO201021865 and WO2008103276, U.S. Pat. Nos. 7,893,302, 7,404,969 and 8,283,333 and US Patent Publication No. US20100036115 and US20120202871; each of which is herein incorporated by reference in their entirety. In another embodiment, the cationic lipid may be selected from, but not limited to, formula A described in International Publication Nos. WO2012040184, WO2011153120, WO2011149733, WO2011090965, WO2011043913, WO2011022460, WO2012061259, WO2012054365 and WO2012044638; each of which is herein incorporated by reference in their entirety. In yet another embodiment, the cationic lipid may be selected from, but not limited to, formula CLI-CLXXIX of International Publication No. WO2008103276, formula CLI-CLXXIX of U.S. Pat. No. 7,893,302, formula CLI-CLXXXXII of U.S. Pat. No. 7,404,969 and formula I-VI of US Patent Publication No. US20100036115; each of which is herein incorporated by reference in their entirety. As a non-limiting example, the cationic lipid may be selected from (20Z,23Z)—N,N-dimethylnonacosa-20,23-dien-10-amine, (17Z,20Z)—N,N-dimemylhexacosa-17,20-dien-9-amine, (1Z,19Z)—N5N-dimethylpentacosa-16,19-dien-8-amine, (13Z,16Z)—N,N-dimethyldocosa-13,16-dien-5-amine, (12Z,15Z)—N,N-dimethylhenicosa-12,15-dien-4-amine, (14Z,17Z)—N,N-dimethyltricosa-14,17-dien-6-amine, (15Z,18Z)—N,N-dimethyltetracosa-15,18-dien-7-amine, (18Z,21Z)—N,N-dimethylheptacosa-18,21-dien-10-amine, (15Z,18Z)—N,N-dimethyltetracosa-15,18-dien-5-amine, (14Z,17Z)—N,N-dimethyltricosa-14,17-dien-4-amine, (19Z,22Z)—N,N-dimeihyloctacosa-19,22-dien-9-amine, (18Z,21Z)—N,N-dimethylheptacosa-18,21-dien-8-amine, (17Z,20Z)—N,N-dimethylhexacosa-17,20-dien-7-amine, (16Z,19Z)—N,N-dimethylpentacosa-16,19-dien-6-amine, (22Z,25Z)—N,N-dimethylhentriaconta-22,25-dien-10-amine, (21Z,24Z)—N,N-dimethyltriaconta-21,24-dien-9-amine, (18Z)—N,N-dimetylheptacos-18-en-10-amine, (17Z)—N,N-dimethylhexacos-17-en-9-amine, (19Z,22Z)—N,N-dimethyloctacosa-19,22-dien-7-amine, N,N-dimethylheptacosan-10-amine, (20Z,23Z)—N-ethyl-N-methylnonacosa-20,23-dien-10-amine, 1-[(11Z,14Z)-1-nonylicosa-11,14-dien-1-yl]pyrrolidine, (20Z)—N,N-dimethylheptacos-20-en-10-amine, (15Z)—N,N-dimethyl eptacos-15-en-10-amine, (14Z)—N,N-dimethylnonacos-14-en-10-amine, (17Z)—N,N-dimethylnonacos-17-en-10-amine, (24Z)—N,N-dimethyltritriacont-24-en-10-amine, (20Z)—N,N-dimethylnonacos-20-en-10-amine, (22Z)—N,N-dimethylhentriacont-22-en-10-amine, (16Z)—N,N-dimethylpentacos-16-en-8-amine, (12Z,15Z)—N,N-dimethyl-2-nonylhenicosa-12,15-dien-1-amine, (13Z,16Z)—N,N-dimethyl-3-nonyldocosa-13,16-dien-1-amine, N,N-dimethyl-1-[(1S,2R)-2-octylcyclopropyl]eptadecan-8-amine, 1-[(1S,2R)-2-hexylcyclopropyl]-N,N-dimethylnonadecan-10-amine, N,N-dimethyl-1-[(1S,2R)-2-octylcyclopropyl]nonadecan-10-amine, N,N-dimethyl-21-[(1S,2R)-2-octylcyclopropyl]henicosan-10-amine,N,N-dimethyl-1-[(1S,2S)-2-{[(1R,2R)-2-pentylcycIopropyl]methyl}cyclopropyl]nonadecan-10-amine,N,N-dimethyl-1-[(1S,2R)-2-octylcyclopropyl]hexadecan-8-amine, N,N-dimethyl-[(1R,2S)-2-undecyIcyclopropyl]tetradecan-5-amine, N,N-dimethyl-3-{7-[(1S,2R)-2-octylcyclopropyl]heptyl} dodecan-1-amine, 1-[(1R,2S)-2-hepty lcyclopropyl]-N,N-dimethyloctadecan-9-amine, 1-[(1S,2R)-2-decylcyclopropyl]-N,N-dimethylpentadecan-6-amine, N,N-dimethyl-1-[(1S,2R)-2-octylcyclopropyl]pentadecan-8-amine, R—N,N-dimethyl-1-[(9Z,12Z)-octadeca-9,12-dien-1-yloxy]-3-(octyloxy)propan-2-amine, S—N,N-dimethyl-1-[(9Z,12Z)-octadeca-9,12-dien-1-yloxy]-3-(octyloxy)propan-2-amine, 1-{2-[(9Z,12Z)-octadeca-9,12-dien-1-yloxy]-1-[(octyloxy)methyl]ethyl}pyrrolidine, (2S)—N,N-dimethyl-1-[(9Z,12Z)-octadeca-9,12-dien-1-yloxy]-3-[(5Z)-oct-5-en-1-yloxy]propan-2-amine, 1-{2-[(9Z,12Z)-octadeca-9,12-dien-1-yloxy]-1-[(octyloxy)methyl]ethyl}azetidine, (2S)-1-(hexyloxy)-N,N-dimethyl-3-[(9Z,12Z)-octadeca-9,12-dien-1-yloxy]propan-2-amine, (2S)-1-(heptyloxy)-N,N-dimethyl-3-[(9Z,12Z)-octadeca-9,12-dien-1-yloxy]propan-2-amine, N,N-dimethyl-1-(nonyloxy)-3-[(9Z,12Z)-octadeca-9,12-dien-1-yloxy]propan-2-amine, N,N-dimethyl-1-[(9Z)-octadec-9-en-1-yloxy]-3-(octyloxy)propan-2-amine; (2S)—N,N-dimethyl-1-[(6Z,9Z,12Z)-octadeca-6,9,12-trien-1-yloxy]-3-(octyloxy)propan-2-amine, (2S)-1-[(11Z,14Z)-icosa-11,14-dien-1-yloxy]-N,N-dimethyl-3-(pentyloxy)propan-2-amine, (2S)-1-(hexyloxy)-3-[(11Z,14Z)-icosa-11,14-dien-1-yloxy]-N,N-dimethylpropan-2-amine, 1-[(11Z,14Z)-icosa-11,14-dien-1-yloxy]-N,N-dimethyl-3-(octyloxy)propan-2-amine, 1-[(13Z,16Z)-docosa-13,16-dien-1-yloxy]-N,N-dimethyl-3-(octyloxy)propan-2-amine, (2S)-1-[(13Z,16Z)-docosa-13,16-dien-1-yloxy]-3-(hexyloxy)-N,N-dimethylpropan-2-amine, (2S)-1-[(13Z)-docos-13-en-1-yloxy]-3-(hexyloxy)-N,N-dimethylpropan-2-amine, 1-[(13Z)-docos-13-en-1-yloxy]-N,N-dimethyl-3-(octyloxy)propan-2-amine, 1-[(9Z)-hexadec-9-en-1-yloxy]-N,N-dimethyl-3-(octyloxy)propan-2-amine, (2R)—N,N-dimethyl-H(1-metoylo ctyl)oxy]-3-[(9Z,12Z)-octadeca-9,12-dien-1-yloxy]propan-2-amine, (2R)-1-[(3,7-dimethyloctyl)oxy]-N,N-dimethyl-3-[(9Z,12Z)-octadeca-9,12-dien-1-yloxy]propan-2-amine, N,N-dimethyl-1-(octyloxy)-3-({8-[(1S,2S)-2-{[(1R,2R)-2-pentylcyclopropyl]methyl}cyclopropyl]octyl}oxy)propan-2-amine, N,N-dimethyl-1-{[8-(2-oclylcyclopropyl)octyl]oxy}-3-(octyloxy)propan-2-amine and (11E,20Z,23Z)—N,N-dimethylnonacosa-11,20,2-trien-10-amine or a pharmaceutically acceptable salt or stereoisomer thereof.

[0583] In one embodiment, the lipid may be a cleavable lipid such as those described in International Publication No. WO2012170889, herein incorporated by reference in its entirety.

[0584] In one embodiment, the cationic lipid may be synthesized by methods known in the art and/or as described in International Publication Nos. WO2012040184, WO2011153120, WO2011149733, WO2011090965, WO2011043913, WO2011022460, WO2012061259, WO2012054365, WO2012044638, WO2010080724 and WO201021865; each of which is herein incorporated by reference in their entirety.

[0585] In one embodiment, the LNP formulations of the polynucleotides, primary constructs and/or mmRNA may contain PEG-c-DOMG at 3% lipid molar ratio. In another embodiment, the LNP formulations polynucleotides, primary constructs and/or mmRNA may contain PEG-c-DOMG at 1.5% lipid molar ratio.

[0586] In one embodiment, the pharmaceutical compositions of the polynucleotides, primary constructs and/or mmRNA may include at least one of the PEGylated lipids described in International Publication No. 2012099755, herein incorporated by reference.

[0587] In one embodiment, the LNP formulation may contain PEG-DMG 2000 (1,2-dimyristoyl-sn-glycero-3-phophoethanolamine-N-[methoxy(polyethylene glycol)-2000). In one embodiment, the LNP formulation may contain PEG-DMG 2000, a cationic lipid known in the art and at least one other component. In another embodiment, the LNP formulation may contain PEG-DMG 2000, a cationic lipid known in the art, DSPC and cholesterol. As a non-limiting example, the LNP formulation may contain PEG-DMG 2000, DLin-DMA, DSPC and cholesterol. As another non-limiting example the LNP formulation may contain PEG-DMG 2000, DLin-DMA, DSPC and cholesterol in a molar ratio of 2:40:10:48 (see e.g., Geall et al., Nonviral delivery of self-amplifying RNA vaccines, PNAS 2012; PMID: 22908294; herein incorporated by reference in its entirety). As another non-limiting example, modified RNA described herein may be formulated in a nanoparticle to be delivered by a parenteral route as described in U.S. Pub. No. 20120207845; herein incorporated by reference in its entirety.

[0588] In one embodiment, the LNP formulation may be formulated by the methods described in International Publication Nos. WO2011127255 or WO2008103276, each of which is herein incorporated by reference in their entirety. As a non-limiting example, modified RNA described herein may be encapsulated in LNP formulations as described in WO2011127255 and/or WO2008103276; each of which is herein incorporated by reference in their entirety.

[0589] In one embodiment, LNP formulations described herein may comprise a polycationic composition. As a non-limiting example, the polycationic composition may be selected from formula 1-60 of US Patent Publication No. US20050222064; herein incorporated by reference in its entirety. In another embodiment, the LNP formulations comprising a polycationic composition may be used for the delivery of the modified RNA described herein in vivo and/or in vitro.

[0590] In one embodiment, the LNP formulations described herein may additionally comprise a permeability enhancer molecule. Non-limiting permeability enhancer molecules are described in US Patent Publication No. US20050222064; herein incorporated by reference in its entirety.

[0591] In one embodiment, the pharmaceutical compositions may be formulated in liposomes such as, but not limited to, DiLa2 liposomes (Marina Biotech, Bothell, WA), SMARTICLES® (Marina Biotech, Bothell, WA), neutral DOPC (1,2-dioleoyl-sn-glycero-3-phosphocholine) based liposomes (e.g., siRNA delivery for ovarian cancer (Landen et al. Cancer Biology & Therapy 2006 5(12)1708-1713); herein incorporated by reference in its entirety) and hyaluronan-coated liposomes (Quiet Therapeutics, Israel).

[0592] The nanoparticle formulations may be a carbohydrate nanoparticle comprising a carbohydrate carrier and a modified nucleic acid molecule (e.g., mmRNA). As a non-limiting example, the carbohydrate carrier may include, but is not limited to, an anhydride-modified phytoglycogen or glycogen-type material, phtoglycogen octenyl succinate, phytoglycogen beta-dextrin, anhydride-modified phytoglycogen beta-dextrin. (See e.g., International Publication No. WO2012109121; herein incorporated by reference in its entirety).

[0593] Lipid nanoparticle formulations may be improved by replacing the cationic lipid with a biodegradable cationic lipid which is known as a rapidly eliminated lipid nanoparticle (reLNP). Ionizable cationic lipids, such as, but not limited to, DLinDMA, DLin-KC2-DMA, and DLin-MC3-DMA, have been shown to accumulate in plasma and tissues over time and may be a potential source of toxicity. The rapid metabolism of the rapidly eliminated lipids can improve the tolerability and therapeutic index of the lipid nanoparticles by an order of magnitude from a 1 mg/kg dose to a 10 mg/kg dose in rat. Inclusion of an enzymatically degraded ester linkage can improve the degradation and metabolism profile of the cationic component, while still maintaining the activity of the reLNP formulation. The ester linkage can be internally located within the lipid chain or it may be terminally located at the terminal end of the lipid chain. The internal ester linkage may replace any carbon in the lipid chain.

[0594] In one embodiment, the internal ester linkage may be located on either side of the saturated carbon. Non-limiting examples of reLNPs include,

[chemical structure]

[0595] In one embodiment, an immune response may be elicited by delivering a lipid nanoparticle which may include a nanospecies, a polymer and an immunogen. (U.S. Publication No. 20120189700 and International Publication No. WO2012099805; each of which is herein incorporated by reference in their entirety). The polymer may encapsulate the nanospecies or partially encapsulate the nanospecies. The immunogen may be a recombinant protein, a modified RNA and/or a primary construct described herein. In one embodiment, the lipid nanoparticle may be formulated for use in a vaccine such as, but not limited to, against a pathogen.

[0596] Lipid nanoparticles may be engineered to alter the surface properties of particles so the lipid nanoparticles may penetrate the mucosal barrier. Mucus is located on mucosal tissue such as, but not limted to, oral (e.g., the buccal and esophageal membranes and tonsil tissue), ophthalmic, gastrointestinal (e.g., stomach, small intestine, large intestine, colon, rectum), nasal, respiratory (e.g., nasal, pharyngeal, tracheal and bronchial membranes), genital (e.g., vaginal, cervical and urethral membranes). Nanoparticles larger than 10-200 nm which are preferred for higher drug encapsulation efficiency and the ability to provide the sustained delivery of a wide array of drugs have been thought to be too large to rapidly diffuse through mucosal barriers. Mucus is continuously secreted, shed, discarded or digested and recycled so most of the trapped particles may be removed from the mucosla tissue within seconds or within a few hours. Large polymeric nanoparticles (200 nm-500 nm in diameter) which have been coated densely with a low molecular weight polyethylene glycol (PEG) diffused through mucus only 4 to 6-fold lower than the same particles diffusing in water (Lai et al. PNAS 2007 104(5):1482-487; Lai et al. Adv Drug Deliv Rev. 2009 61(2): 158-171; each of which is herein incorporated by reference in their entirety). The transport of nanoparticles may be determined using rates of permeation and/or fluorescent microscopy techniques including, but not limited to, fluorescence recovery after photobleaching (FRAP) and high resolution multiple particle tracking (MPT). As a non-limiting example, compositions which can penetrate a mucosal barrier may be made as described in U.S. Pat. No. 8,241,670, herein incorporated by reference in its entirety.

[0597] The lipid nanoparticle engineered to penetrate mucus may comprise a polymeric material (i.e. a polymeric core) and/or a polymer-vitamin conjugate and/or a tri-block co-polymer. The polymeric material may include, but is not limited to, polyamines, polyethers, polyamides, polyesters, polycarbamates, polyureas, polycarbonates, poly(styrenes), polyimides, polysulfones, polyurethanes, polyacetylenes, polyethylenes, polyethyeneimines, polyisocyanates, polyacrylates, polymethacrylates, polyacrylonitriles, and polyarylates. The polymeric material may be biodegradable and/or biocompatible. The polymeric material may additionally be irradiated. As a non-limiting example, the polymeric material may be gamma irradiated (See e.g., International App. No. WO201282165, herein incorporated by reference in its entirety). Non-limiting examples of specific polymers include poly(caprolactone) (PCL), ethylene vinyl acetate polymer (EVA), poly(lactic acid) (PLA), poly(L-lactic acid) (PLLA), poly(glycolic acid) (PGA), poly(lactic acid-co-glycolic acid) (PLGA), poly(L-lactic acid-co-glycolic acid) (PLLGA), poly(D,L-lactide) (PDLA), poly(L-lactide) (PLLA), poly(D,L-lactide-co-caprolactone), poly(D,L-lactide-co-caprolactone-co-glycolide), poly(D,L-lactide-co-PEO-co-D,L-lactide), poly(D,L-lactide-co-PPO-co-D,L-lactide), polyalkyl cyanoacralate, polyurethane, poly-L-lysine (PLL), hydroxypropyl methacrylate (HPMA), polyethyleneglycol, poly-L-glutamic acid, poly(hydroxy acids), polyanhydrides, polyorthoesters, poly(ester amides), polyamides, poly(ester ethers), polycarbonates, polyalkylenes such as polyethylene and polypropylene, polyalkylene glycols such as poly(ethylene glycol) (PEG), polyalkylene oxides (PEO), polyalkylene terephthalates such as poly(ethylene terephthalate), polyvinyl alcohols (PVA), polyvinyl ethers, polyvinyl esters such as poly(vinyl acetate), polyvinyl halides such as poly(vinyl chloride) (PVC), polyvinylpyrrolidone, polysiloxanes, polystyrene (PS), polyurethanes, derivatized celluloses such as alkyl celluloses, hydroxyalkyl celluloses, cellulose ethers, cellulose esters, nitro celluloses, hydroxypropylcellulose, carboxymethylcellulose, polymers of acrylic acids, such as poly(methyl(meth)acrylate) (PMMA), poly(ethyl(meth)acrylate), poly(butyl(meth)acrylate), poly(isobutyl(meth)acrylate), poly(hexyl(meth)acrylate), poly(isodecyl(meth)acrylate), poly(lauryl(meth)acrylate), poly(phenyl(meth)acrylate), poly(methyl acrylate), poly(isopropyl acrylate), poly(isobutyl acrylate), poly(octadecyl acrylate) and copolymers and mixtures thereof, polydioxanone and its copolymers, polyhydroxyalkanoates, polypropylene fumarate, polyoxymethylene, poloxamers, poly(ortho)esters, poly(butyric acid), poly(valeric acid), poly(lactide-co-caprolactone), and trimethylene carbonate, polyvinylpyrrolidone. The lipid nanoparticle may be coated or associated with a co-polymer such as, but not limited to, a block co-polymer (such as a branched polyether-polyamide block copolymer described in International Publication No. WO2013012476, herein incorporated by reference in its entirety), and (poly(ethylene glycol))-(poly(propylene oxide))-(poly(ethylene glycol)) triblock copolymer (see e.g., US Publication 20120121718 and US Publication 20100003337 and U.S. Pat. No. 8,263,665; each of which is herein incorporated by reference in their entirety). The co-polymer may be a polymer that is generally regarded as safe (GRAS) and the formation of the lipid nanoparticle may be in such a way that no new chemical entities are created. For example, the lipid nanoparticle may comprise poloxamers coating PLGA nanoparticles without forming new chemical entities which are still able to rapidly penetrate human mucus (Yang et al. Angew. Chem. Int. Ed. 2011 50:2597-2600; herein incorporated by reference in its entirety).

[0598] The vitamin of the polymer-vitamin conjugate may be vitamin E. The vitamin portion of the conjugate may be substituted with other suitable components such as, but not limited to, vitamin A, vitamin E, other vitamins, cholesterol, a hydrophobic moiety, or a hydrophobic component of other surfactants (e.g., sterol chains, fatty acids, hydrocarbon chains and alkylene oxide chains).

[0599] The lipid nanoparticle engineered to penetrate mucus may include surface altering agents such as, but not limited to, mmRNA, anionic proteins (e.g., bovine serum albumin), surfactants (e.g., cationic surfactants such as for example dimethyldioctadecylammonium bromide), sugars or sugar derivatives (e.g., cyclodextrin), nucleic acids, polymers (e.g., heparin, polyethylene glycol and poloxamer), mucolytic agents (e.g., N-acetylcysteine, mugwort, bromelain, papain, clerodendrum, acetylcysteine, bromhexine, carbocisteine, eprazinone, mesna, ambroxol, sobrerol, domiodol, letosteine, stepronin, tiopronin, gelsolin, thymosin 34 dornase alfa, neltenexine, erdosteine) and various DNases including rhDNase. The surface altering agent may be embedded or enmeshed in the particle's surface or disposed (e.g., by coating, adsorption, covalent linkage, or other process) on the surface of the lipid nanoparticle. (see e.g., US Publication 20100215580 and US Publication 20080166414; each of which is herein incorporated by reference in their entirety).

[0600] The mucus penetrating lipid nanoparticles may comprise at least one mmRNA described herein. The mmRNA may be encapsulated in the lipid nanoparticle and/or disposed on the surface of the paricle. The mmRNA may be covalently coupled to the lipid nanoparticle. Formulations of mucus penetrating lipid nanoparticles may comprise a plurality of nanoparticles. Further, the formulations may contain particles which may interact with the mucus and alter the structural and/or adhesive properties of the surrounding mucus to decrease mucoadhesion which may increase the delivery of the mucus penetrating lipid nanoparticles to the mucosal tissue.

[0601] In one embodiment, the polynucleotide, primary construct, or mmRNA is formulated as a lipoplex, such as, without limitation, the ATUPLEX™ system, the DACC system, the DBTC system and other siRNA-lipoplex technology from Silence Therapeutics (London, United Kingdom), STEMFECT™ from STEMGENT® (Cambridge, MA), and polyethylenimine (PEI) or protamine-based targeted and non-targeted delivery of nucleic acids acids (Aleku et al. Cancer Res. 2008 68:9788-9798; Strumberg et al. Int J Clin Pharmacol Ther 2012 50:76-78; Santel et al., Gene Ther 2006 13:1222-1234; Santel et al., Gene Ther 2006 13:1360-1370; Gutbier et al., Pulm Pharmacol. Ther. 2010 23:334-344; Kaufmann et al. Microvasc Res 2010 80:286-293 Weide et al. J Immunother. 2009 32:498-507; Weide et al. J Immunother. 2008 31:180-188; Pascolo Expert Opin. Biol. Ther. 4:1285-1294; Fotin-Mleczek et al., 2011 J. Immunother. 34:1-15; Song et al., Nature Biotechnol. 2005, 23:709-717; Peer et al., Proc Natl Acad Sci USA. 2007 6; 104:4095-4100; deFougerolles Hum Gene Ther. 2008 19:125-132; all of which are incorporated herein by reference in its entirety).

[0602] In one embodiment such formulations may also be constructed or compositions altered such that they passively or actively are directed to different cell types in vivo, including but not limited to hepatocytes, immune cells, tumor cells, endothelial cells, antigen presenting cells, and leukocytes (Akinc et al. Mol Ther. 2010 18:1357-1364; Song et al., Nat Biotechnol. 2005 23:709-717; Judge et al., J Clin Invest. 2009 119:661-673; Kaufmann et al., Microvasc Res 2010 80:286-293; Santel et al., Gene Ther 2006 13:1222-1234; Santel et al., Gene Ther 2006 13:1360-1370; Gutbier et al., Pulm Pharmacol. Ther. 2010 23:334-344; Basha et al., Mol. Ther. 2011 19:2186-2200; Fenske and Cullis, Expert Opin Drug Deliv. 2008 5:25-44; Peer et al., Science. 2008 319:627-630; Peer and Lieberman, Gene Ther. 2011 18:1127-1133; all of which are incorporated herein by reference in its entirety). One example of passive targeting of formulations to liver cells includes the DLin-DMA, DLin-KC2-DMA and DLin-MC3-DMA-based lipid nanoparticle formulations which have been shown to bind to apolipoprotein E and promote binding and uptake of these formulations into hepatocytes in vivo (Akinc et al. Mol Ther. 2010 18:1357-1364; herein incorporated by reference in its entirety). Formulations can also be selectively targeted through expression of different ligands on their surface as exemplified by, but not limited by, folate, transferrin, N-acetylgalactosamine (GalNAc), and antibody targeted approaches (Kolhatkar et al., Curr Drug Discov Technol. 2011 8:197-206; Musacchio and Torchilin, Front Biosci. 2011 16:1388-1412; Yu et al., Mol Membr Biol. 2010 27:286-298; Patil et al., Crit Rev Ther Drug Carrier Syst. 2008 25:1-61; Benoit et al., Biomacromolecules. 2011 12:2708-2714; Zhao et al., Expert Opin Drug Deliv. 2008 5:309-319; Akinc et al., Mol Ther. 2010 18:1357-1364; Srinivasan et al., Methods Mol Biol. 2012 820:105-116; Ben-Arie et al., Methods Mol Biol. 2012 757:497-507; Peer 2010 J Control Release. 20:63-68; Peer et al., Proc Natl Acad Sci USA. 2007 104:4095-4100; Kim et al., Methods Mol Biol. 2011 721:339-353; Subramanya et al., Mol Ther. 2010 18:2028-2037; Song et al., Nat Biotechnol. 2005 23:709-717; Peer et al., Science. 2008 319:627-630; Peer and Lieberman, Gene Ther. 2011 18:1127-1133; all of which are incorporated herein by reference in its entirety).

[0603] In one embodiment, the polynucleotide, primary construct, or mmRNA is formulated as a solid lipid nanoparticle. A solid lipid nanoparticle (SLN) may be spherical with an average diameter between 10 to 1000 nm. SLN possess a solid lipid core matrix that can solubilize lipophilic molecules and may be stabilized with surfactants and/or emulsifiers. In a further embodiment, the lipid nanoparticle may be a self-assembly lipid-polymer nanoparticle (see Zhang et al., ACS Nano, 2008, 2 (8), pp 1696-1702; herein incorporated by reference in its entirety).

[0604] Liposomes, lipoplexes, or lipid nanoparticles may be used to improve the efficacy of polynucleotide, primary construct, or mmRNA directed protein production as these formulations may be able to increase cell transfection by the polynucleotide, primary construct, or mmRNA; and/or increase the translation of encoded protein. One such example involves the use of lipid encapsulation to enable the effective systemic delivery of polyplex plasmid DNA (Heyes et al., Mol Ther. 2007 15:713-720; herein incorporated by reference in its entirety). The liposomes, lipoplexes, or lipid nanoparticles may also be used to increase the stability of the polynucleotide, primary construct, or mmRNA.

[0605] In one embodiment, the the polynucleotides, primary constructs, and/or the mmRNA of the present invention can be formulated for controlled release and/or targeted delivery. As used herein, “controlled release” refers to a pharmaceutical composition or compound release profile that conforms to a particular pattern of release to effect a therapeutic outcome. In one embodiment, the polynucleotides, primary constructs or the mmRNA may be encapsulated into a delivery agent described herein and/or known in the art for controlled release and/or targeted delivery. As used herein, the term “encapsulate” means to enclose, surround or encase. As it relates to the formulation of the compounds of the invention, encapsulation may be substantial, complete or partial. The term “substitantially encapsulated” means that at least greater than 50, 60, 70, 80, 85, 90, 95, 96, 97, 98, 99, 99.9, 99.9 or greater than 99.999% of the pharmaceutical composition or compound of the invention may be enclosed, surrounded or encased within the delivery agent. “Partially encapsulation” means that less than 10, 10, 20, 30, 40 50 or less of the pharmaceutical composition or compound of the invention may be enclosed, surrounded or encased within the delivery agent. Advantageously, encapsulation may be determined by measuring the escape or the activity of the pharmaceutical composition or compound of the invention using fluorescence and/or electron micrograph. For example, at least 1, 5, 10, 20, 30, 40, 50, 60, 70, 80, 85, 90, 95, 96, 97, 98, 99, 99.9, 99.99 or greater than 99.99% of the pharmaceutical composition or compound of the invention are encapsulated in the delivery agent.

[0606] In one embodiment, the controlled release formulation may include, but is not limited to, tri-block co-polymers. As a non-limiting example, the formulation may include two different types of tri-block co-polymers (International Pub. No. WO2012131104 and WO2012131106; each of which is herein incorporated by reference in its entirety).

[0607] In another embodiment, the the polynucleotides, primary constructs, or the mmRNA may be encapsulated into a lipid nanoparticle or a rapidly eliminated lipid nanoparticle and the lipid nanoparticles or a rapidly eliminated lipid nanoparticle may then be encapsulated into a polymer, hydrogel and/or surgical sealant described herein and/or known in the art. As a non-limiting example, the polymer, hydrogel or surgical sealant may be PLGA, ethylene vinyl acetate (EVAc), poloxamer, GELSITE® (Nanotherapeutics, Inc. Alachua, FL), HYLENEX® (Halozyme Therapeutics, San Diego CA), surgical sealants such as fibrinogen polymers (Ethicon Inc. Cornelia, GA), TISSELL® (Baxter International, Inc Deerfield, IL), PEG-based sealants, and COSEAL® (Baxter International, Inc Deerfield, IL).

[0608] In another embodiment, the lipid nanoparticle may be encapsulated into any polymer known in the art which may form a gel when injected into a subject. As another non-limiting example, the lipid nanoparticle may be encapsulated into a polymer matrix which may be biodegradable.

[0609] In one embodiment, the the polynucleotide, primary construct, or mmRNA formulation for controlled release and/or targeted delivery may also include at least one controlled release coating. Controlled release coatings include, but are not limited to, OPADRY®, polyvinylpyrrolidone/vinyl acetate copolymer, polyvinylpyrrolidone, hydroxypropyl methylcellulose, hydroxypropyl cellulose, hydroxyethyl cellulose, EUDRAGIT RL®, EUDRAGIT RS® and cellulose derivatives such as ethylcellulose aqueous dispersions (AQUACOAT® and SURELEASE®).

[0610] In one embodiment, the controlled release and/or targeted delivery formulation may comprise at least one degradable polyester which may contain polycationic side chains. Degradeable polyesters include, but are not limited to, poly(serine ester), poly(L-lactide-co-L-lysine), poly(4-hydroxy-L-proline ester), and combinations thereof. In another embodiment, the degradable polyesters may include a PEG conjugation to form a PEGylated polymer.

[0611] In one embodiment, the the polynucleotides, primary constructs, and/or the mmRNA of the present invention may be encapsulated in a therapeutic nanoparticle. Therapeutic nanoparticles may be formulated by methods described herein and known in the art such as, but not limited to, International Pub Nos. WO2010005740, WO2010030763, WO2010005721, WO2010005723, WO2012054923, US Pub. Nos. US20110262491, US20100104645, US20100087337, US20100068285, US20110274759, US20100068286 and US20120288541 and U.S. Pat. Nos. 8,206,747, 8,293,276, 8,318,208 and 8,318,211 each of which is herein incorporated by reference in their entirety. In another embodiment, therapeutic polymer nanoparticles may be identified by the methods described in US Pub No. US20120140790, herein incorporated by reference in its entirety.

[0612] In one embodiment, the therapeutic nanoparticle may be formulated for sustained release. As used herein, “sustained release” refers to a pharmaceutical composition or compound that conforms to a release rate over a specific period of time. The period of time may include, but is not limited to, hours, days, weeks, months and years. As a non-limiting example, the sustained release nanoparticle may comprise a polymer and a therapeutic agent such as, but not limited to, the the polynucleotides, primary constructs, and mmRNA of the present invention (see International Pub No. 2010075072 and US Pub No. US20100216804, US20110217377 and US20120201859, each of which is herein incorporated by reference in their entirety).

[0613] In one embodiment, the therapeutic nanoparticles may be formulated to be target specific. As a non-limiting example, the thereapeutic nanoparticles may include a corticosteroid (see International Pub. No. WO2011084518; herein incorporated by reference in its entirety). In one embodiment, the therapeutic nanoparticles may be formulated to be cancer specific. As a non-limiting example, the therapeutic nanoparticles may be formulated in nanoparticles described in International Pub No. WO2008121949, WO2010005726, WO2010005725, WO2011084521 and US Pub No. US20100069426, US20120004293 and US20100104655, each of which is herein incorporated by reference in their entirety.

[0614] In one embodiment, the nanoparticles of the present invention may comprise a polymeric matrix. As a non-limiting example, the nanoparticle may comprise two or more polymers such as, but not limited to, polyethylenes, polycarbonates, polyanhydrides, polyhydroxyacids, polypropylfumerates, polycaprolactones, polyamides, polyacetals, polyethers, polyesters, poly(orthoesters), polycyanoacrylates, polyvinyl alcohols, polyurethanes, polyphosphazenes, polyacrylates, polymethacrylates, polycyanoacrylates, polyureas, polystyrenes, polyamines, polylysine, poly(ethylene imine), poly(serine ester), poly(L-lactide-co-L-lysine), poly(4-hydroxy-L-proline ester) or combinations thereof.

[0615] In one embodiment, the therapeutic nanoparticle comprises a diblock copolymer. In one embodiment, the diblock copolymer may include PEG in combination with a polymer such as, but not limited to, polyethylenes, polycarbonates, polyanhydrides, polyhydroxyacids, polypropylfumerates, polycaprolactones, polyamides, polyacetals, polyethers, polyesters, poly(orthoesters), polycyanoacrylates, polyvinyl alcohols, polyurethanes, polyphosphazenes, polyacrylates, polymethacrylates, polycyanoacrylates, polyureas, polystyrenes, polyamines, polylysine, poly(ethylene imine), poly(serine ester), poly(L-lactide-co-L-lysine), poly(4-hydroxy-L-proline ester) or combinations thereof.

[0616] As a non-limiting example the therapeutic nanoparticle comprises a PLGA-PEG block copolymer (see US Pub. No. US20120004293 and U.S. Pat. No. 8,236,330, each of which is herein incorporated by reference in their entirety). In another non-limiting example, the therapeutic nanoparticle is a stealth nanoparticle comprising a diblock copolymer of PEG and PLA or PEG and PLGA (see U.S. Pat. No. 8,246,968 and International Publication No. WO2012166923, each of which is herein incorporated by reference in its entirety).

[0617] In one embodiment, the therapeutic nanoparticle may comprise a multiblock copolymer (See e.g., U.S. Pat. Nos. 8,263,665 and 8,287,910; each of which is herein incorporated by reference in its entirety).

[0618] In one embodiment, the block copolymers described herein may be included in a polyion complex comprising a non-polymeric micelle and the block copolymer. (See e.g., U.S. Pub. No. 20120076836; herein incorporated by reference in its entirety).

[0619] In one embodiment, the therapeutic nanoparticle may comprise at least one acrylic polymer. Acrylic polymers include but are not limited to, acrylic acid, methacrylic acid, acrylic acid and methacrylic acid copolymers, methyl methacrylate copolymers, ethoxyethyl methacrylates, cyanoethyl methacrylate, amino alkyl methacrylate copolymer, poly(acrylic acid), poly(methacrylic acid), polycyanoacrylates and combinations thereof.

[0620] In one embodiment, the therapeutic nanoparticles may comprise at least one cationic polymer described herein and/or known in the art.

[0621] In one embodiment, the therapeutic nanoparticles may comprise at least one amine-containing polymer such as, but not limited to polylysine, polyethylene imine, poly(amidoamine) dendrimers, poly(beta-amino esters) (See e.g., U.S. Pat. No. 8,287,849; herein incorporated by reference in its entirety) and combinations thereof.

[0622] In one embodiment, the therapeutic nanoparticles may comprise at least one degradable polyester which may contain polycationic side chains. Degradeable polyesters include, but are not limited to, poly(serine ester), poly(L-lactide-co-L-lysine), poly(4-hydroxy-L-proline ester), and combinations thereof. In another embodiment, the degradable polyesters may include a PEG conjugation to form a PEGylated polymer.

[0623] In another embodiment, the therapeutic nanoparticle may include a conjugation of at least one targeting ligand. The targeting ligand may be any ligand known in the art such as, but not limited to, a monoclonal antibody. (Kirpotin et al, Cancer Res. 2006 66:6732-6740; herein incorporated by reference in its entirety).

[0624] In one embodiment, the therapeutic nanoparticle may be formulated in an aqueous solution which may be used to target cancer (see International Pub No. WO2011084513 and US Pub No. US20110294717, each of which is herein incorporated by reference in their entirety).

[0625] In one embodiment, the polynucleotides, primary constructs, or mmRNA may be encapsulated in, linked to and/or associated with synthetic nanocarriers. Synthetic nanocarriers include, but are not limited to, those described in International Pub. Nos. WO2010005740, WO2010030763, WO201213501, WO2012149252, WO2012149255, WO2012149259, WO2012149265, WO2012149268, WO2012149282, WO2012149301, WO2012149393, WO2012149405, WO2012149411, WO2012149454 and WO2013019669, and US Pub. Nos. US20110262491, US20100104645, US20100087337 and US20120244222, each of which is herein incorporated by reference in their entirety. The synthetic nanocarriers may be formulated using methods known in the art and/or described herein. As a non-limiting example, the synthetic nanocarriers may be formulated by the methods described in International Pub Nos. WO2010005740, WO2010030763 and WO201213501 and US Pub. Nos. US20110262491, US20100104645, US20100087337 and US2012024422, each of which is herein incorporated by reference in their entirety. In another embodiment, the synthetic nanocarrier formulations may be lyophilized by methods described in International Pub. No. WO2011072218 and U.S. Pat. No. 8,211,473; each of which is herein incorporated by reference in their entirety.

[0626] In one embodiment, the synthetic nanocarriers may contain reactive groups to release the polynucleotides, primary constructs and/or mmRNA described herein (see International Pub. No. WO20120952552 and US Pub No. US20120171229, each of which is herein incorporated by reference in their entirety).

[0627] In one embodiment, the synthetic nanocarriers may contain an immunostimulatory agent to enhance the immune response from delivery of the synthetic nanocarrier. As a non-limiting example, the synthetic nanocarrier may comprise a Th1 immunostimulatory agent which may enhance a Th1-based response of the immune system (see International Pub No. WO2010123569 and US Pub. No. US20110223201, each of which is herein incorporated by reference in its entirety).

[0628] In one embodiment, the synthetic nanocarriers may be formulated for targeted release. In one embodiment, the synthetic nanocarrier is formulated to release the polynucleotides, primary constructs and/or mmRNA at a specified pH and/or after a desired time interval. As a non-limiting example, the synthetic nanoparticle may be formulated to release the polynucleotides, primary constructs and/or mmRNA after 24 hours and/or at a pH of 4.5 (see International Pub. Nos. WO2010138193 and WO2010138194 and US Pub Nos. US20110020388 and US20110027217, each of which is herein incorporated by reference in their entireties).

[0629] In one embodiment, the synthetic nanocarriers may be formulated for controlled and/or sustained release of the polynucleotides, primary constructs and/or mmRNA described herein. As a non-limiting example, the synthetic nanocarriers for sustained release may be formulated by methods known in the art, described herein and/or as described in International Pub No. WO2010138192 and US Pub No. 20100303850, each of which is herein incorporated by reference in their entirety.

[0630] In one embodiment, the synthetic nanocarrier may be formulated for use as a vaccine. In one embodiment, the synthetic nanocarrier may encapsulate at least one polynucleotide, primary construct and/or mmRNA which encode at least one antigen. As a non-limiting example, the synthetic nanocarrier may include at least one antigen and an excipient for a vaccine dosage form (see International Pub No. WO2011150264 and US Pub No. US20110293723, each of which is herein incorporated by reference in their entirety). As another non-limiting example, a vaccine dosage form may include at least two synthetic nanocarriers with the same or different antigens and an excipient (see International Pub No. WO2011150249 and US Pub No. US20110293701, each of which is herein incorporated by reference in their entirety). The vaccine dosage form may be selected by methods described herein, known in the art and/or described in International Pub No. WO2011150258 and US Pub No. US20120027806, each of which is herein incorporated by reference in their entirety).

[0631] In one embodiment, the synthetic nanocarrier may comprise at least one polynucleotide, primary construct and/or mmRNA which encodes at least one adjuvant. As non-limiting example, the adjuvant may comprise dimethyldioctadecylammonium-bromide, dimethyldioctadecylammonium-chloride, dimethyldioctadecylammonium-phosphate or dimethyldioctadecylammonium-acetate (DDA) and an apolar fraction or part of said apolar fraction of a total lipid extract of a mycobacterium (See e.g, U.S. Pat. No. 8,241,610; herein incorporated by reference in its entirety). In another embodiment, the synthetic nanocarrier may comprise at least one polynucleotide, primary construct and/or mmRNA and an adjuvant. As a non-limiting example, the synthetic nanocarrier comprising and adjuvant may be formulated by the methods described in International Pub No. WO2011150240 and US Pub No. US20110293700, each of which is herein incorporated by reference in its entirety.

[0632] In one embodiment, the synthetic nanocarrier may encapsulate at least one polynucleotide, primary construct and/or mmRNA which encodes a peptide, fragment or region from a virus. As a non-limiting example, the synthetic nanocarrier may include, but is not limited to, the nanocarriers described in International Pub No. WO2012024621, WO201202629, WO2012024632 and US Pub No. US20120064110, US20120058153 and US20120058154, each of which is herein incorporated by reference in their entirety.

[0633] In one embodiment, the synthetic nanocarrier may be coupled to a polynucleotide, primary construct or mmRNA which may be able to trigger a humoral and/or cytotoxic T lymphocyte (CTL) response (See e.g., International Publication No. WO2013019669, herein incorporated by reference in its entirety).

[0634] In one embodiment, the nanoparticle may be optimized for oral administration. The nanoparticle may comprise at least one cationic biopolymer such as, but not limited to, chitosan or a derivative thereof. As a non-limiting example, the nanoparticle may be formulated by the methods described in U.S. Pub. No. 20120282343; herein incorporated by reference in its entirety.

### Polymers, Biodegradable Nanoparticles, and Core-Shell Nanoparticles

[0635] The polynucleotide, primary construct, and mmRNA of the invention can be formulated using natural and/or synthetic polymers. Non-limiting examples of polymers which may be used for delivery include, but are not limited to, DYNAMIC POLYCONJUGATE® (Arrowhead Reasearch Corp., Pasadena, CA) formulations from MIRUS® Bio (Madison, WI) and Roche Madison (Madison, WI), PHASERX™ polymer formulations such as, without limitation, SMARTT POLYMER TECHNOLOGY™ (PHASERX®, Seattle, WA), DMRI/DOPE, poloxamer, VAXFECTIN® adjuvant from Vical (San Diego, CA), chitosan, cyclodextrin from Calando Pharmaceuticals (Pasadena, CA), dendrimers and poly(lactic-co-glycolic acid) (PLGA) polymers. RONDEL™ (RNAi/Oligonucleotide Nanoparticle Delivery) polymers (Arrowhead Research Corporation, Pasadena, CA) and pH responsive co-block polymers such as, but not limited to, PHASERX® (Seattle, WA).

[0636] A non-limiting example of chitosan formulation includes a core of positively charged chitosan and an outer portion of negatively charged substrate (U.S. Pub. No. 20120258176; herein incorporated by reference in its entirety). Chitosan includes, but is not limited to N-trimethyl chitosan, mono-N-carboxymethyl chitosan (MCC), N-palmitoyl chitosan (NPCS), EDTA-chitosan, low molecular weight chitosan, chitosan derivatives, or combinations thereof.

[0637] In one embodiment, the polymers used in the present invention have undergone processing to reduce and/or inhibit the attachement of unwanted substances such as, but not limited to, bacteria, to the surface of the polymer. The polymer may be processed by methods known and/or described in the art and/or described in International Pub. No. WO2012150467, herein incorporated by reference in its entirety.

[0638] A non-limiting example of PLGA formulations include, but are not limited to, PLGA injectable depots (e.g., ELIGARD® which is formed by dissolving PLGA in 66% N-methyl-2-pyrrolidone (NMP) and the remainder being aqueous solvent and leuprolide. Once injected, the PLGA and leuprolide peptide precipitates into the subcutaneous space).

[0639] Many of these polymer approaches have demonstrated efficacy in delivering oligonucleotides in vivo into the cell cytoplasm (reviewed in deFougerolles Hum Gene Ther. 2008 19:125-132; herein incorporated by reference in its entirety). Two polymer approaches that have yielded robust in vivo delivery of nucleic acids, in this case with small interfering RNA (siRNA), are dynamic polyconjugates and cyclodextrin-based nanoparticles. The first of these delivery approaches uses dynamic polyconjugates and has been shown in vivo in mice to effectively deliver siRNA and silence endogenous target mRNA in hepatocytes (Rozema et al., Proc Natl Acad Sci USA. 2007 104:12982-12887; herein incorporated by reference in its entirety). This particular approach is a multicomponent polymer system whose key features include a membrane-active polymer to which nucleic acid, in this case siRNA, is covalently coupled via a disulfide bond and where both PEG (for charge masking) and N-acetylgalactosamine (for hepatocyte targeting) groups are linked via pH-sensitive bonds (Rozema et al., Proc Natl Acad Sci USA. 2007 104:12982-12887; herein incorporated by reference in its entirety). On binding to the hepatocyte and entry into the endosome, the polymer complex disassembles in the low-pH environment, with the polymer exposing its positive charge, leading to endosomal escape and cytoplasmic release of the siRNA from the polymer. Through replacement of the N-acetylgalactosamine group with a mannose group, it was shown one could alter targeting from asialoglycoprotein receptor-expressing hepatocytes to sinusoidal endothelium and Kupffer cells. Another polymer approach involves using transferrin-targeted cyclodextrin-containing polycation nanoparticles. These nanoparticles have demonstrated targeted silencing of the EWS-FLI1 gene product in transferrin receptor-expressing Ewing's sarcoma tumor cells (Hu-Lieskovan et al., Cancer Res. 2005 65: 8984-8982; herein incorporated by reference in its entirety) and siRNA formulated in these nanoparticles was well tolerated in non-human primates (Heidel et al., Proc Natl Acad Sci USA 2007 104:5715-21; herein incorporated by reference in its entirety). Both of these delivery strategies incorporate rational approaches using both targeted delivery and endosomal escape mechanisms.

[0640] The polymer formulation can permit the sustained or delayed release of polynucleotide, primary construct, or mmRNA (e.g., following intramuscular or subcutaneous injection). The altered release profile for the polynucleotide, primary construct, or mmRNA can result in, for example, translation of an encoded protein over an extended period of time. The polymer formulation may also be used to increase the stability of the polynucleotide, primary construct, or mmRNA. Biodegradable polymers have been previously used to protect nucleic acids other than mmRNA from degradation and been shown to result in sustained release of payloads in vivo (Rozema et al., Proc Natl Acad Sci USA. 2007 104:12982-12887; Sullivan et al., Expert Opin Drug Deliv. 2010 7:1433-1446; Convertine et al., Biomacromolecules. 2010 Oct. 1; Chu et al., Acc Chem Res. 2012 Jan. 13; Manganiello et al., Biomaterials. 2012 33:2301-2309; Benoit et al., Biomacromolecules. 2011 12:2708-2714; Singha et al., Nucleic Acid Ther. 2011 2:133-147; deFougerolles Hum Gene Ther. 2008 19:125-132; Schaffert and Wagner, Gene Ther. 2008 16:1131-1138; Chaturvedi et al., Expert Opin Drug Deliv. 2011 8:1455-1468; Davis, Mol Pharm. 2009 6:659-668; Davis, Nature 2010 464:1067-1070; each of which is herein incorporated by reference in its entirety).

[0641] In one embodiment, the pharmaceutical compositions may be sustained release formulations. In a further embodiment, the sustained release formulations may be for subcutaneous delivery. Sustained release formulations may include, but are not limited to, PLGA microspheres, ethylene vinyl acetate (EVAc), poloxamer, GELSITE® (Nanotherapeutics, Inc. Alachua, FL), HYLENEX® (Halozyme Therapeutics, San Diego CA), surgical sealants such as fibrinogen polymers (Ethicon Inc. Cornelia, GA), TISSELL® (Baxter International, Inc Deerfield, IL), PEG-based sealants, and COSEAL® (Baxter International, Inc Deerfield, IL).

[0642] As a non-limiting example modified mRNA may be formulated in PLGA microspheres by preparing the PLGA microspheres with tunable release rates (e.g., days and weeks) and encapsulating the modified mRNA in the PLGA microspheres while maintaining the integrity of the modified mRNA during the encapsulation process. EVAc are non-biodegradeable, biocompatible polymers which are used extensively in pre-clinical sustained release implant applications (e.g., extended release products Ocusert a pilocarpine ophthalmic insert for glaucoma or progestasert a sustained release progesterone intrauterine deivce; transdermal delivery systems Testoderm, Duragesic and Selegiline; catheters). Poloxamer F-407 NF is a hydrophilic, non-ionic surfactant triblock copolymer of polyoxyethylene-polyoxypropylene-polyoxyethylene having a low viscosity at temperatures less than 5° C. and forms a solid gel at temperatures greater than 15° C. PEG-based surgical sealants comprise two synthetic PEG components mixed in a delivery device which can be prepared in one minute, seals in 3 minutes and is reabsorbed within 30 days. GELSITE® and natural polymers are capable of in-situ gelation at the site of administration. They have been shown to interact with protein and peptide therapeutic candidates through ionic ineraction to provide a stabilizing effect.

[0643] Polymer formulations can also be selectively targeted through expression of different ligands as exemplified by, but not limited by, folate, transferrin, and N-acetylgalactosamine (GalNAc) (Benoit et al., Biomacromolecules. 2011 12:2708-2714; Rozema et al., Proc Natl Acad Sci USA. 2007 104:12982-12887; Davis, Mol Pharm. 2009 6:659-668; Davis, Nature 2010 464:1067-1070; each of which is herein incorporated by reference in its entirety).

[0644] The modified nucleic acid, and mmRNA of the invention may be formulated with or in a polymeric compound. The polymer may include at least one polymer such as, but not limited to, polyethenes, polyethylene glycol (PEG), poly(l-lysine)(PLL), PEG grafted to PLL, cationic lipopolymer, biodegradable cationic lipopolymer, polyethyleneimine (PEI), cross-linked branched poly(alkylene imines), a polyamine derivative, a modified poloxamer, a biodegradable polymer, elastic biodegradable polymer, biodegradable block copolymer, biodegradable random copolymer, biodegradable polyester copolymer, biodegradable polyester block copolymer, biodegradable polyester block random copolymer, multiblock copolymers, linear biodegradable copolymer, poly[α-(4-aminobutyl)-L-glycolic acid) (PAGA), biodegradable cross-linked cationic multi-block copolymers, polycarbonates, polyanhydrides, polyhydroxyacids, polypropylfumerates, polycaprolactones, polyamides, polyacetals, polyethers, polyesters, poly(orthoesters), polycyanoacrylates, polyvinyl alcohols, polyurethanes, polyphosphazenes, polyacrylates, polymethacrylates, polycyanoacrylates, polyureas, polystyrenes, polyamines, polylysine, poly(ethylene imine), poly(serine ester), poly(L-lactide-co-L-lysine), poly(4-hydroxy-L-proline ester), acrylic polymers, amine-containing polymers, dextran polymers, dextran polymer derivatives or or combinations thereof.

[0645] As a non-limiting example, the modified nucleic acid or mmRNA of the invention may be formulated with the polymeric compound of PEG grafted with PLL as described in U.S. Pat. No. 6,177,274; herein incorporated by reference in its entirety. The formulation may be used for transfecting cells in vitro or for in vivo delivery of the modified nucleic acid and mmRNA. In another example, the modified nucleic acid and mmRNA may be suspended in a solution or medium with a cationic polymer, in a dry pharmaceutical composition or in a solution that is capable of being dried as described in U.S. Pub. Nos. 20090042829 and 20090042825; each of which are herein incorporated by reference in their entireties.

[0646] As another non-limiting example the polynucleotides, primary constructs or mmRNA of the invention may be formulated with a PLGA-PEG block copolymer (see US Pub. No. US20120004293 and U.S. Pat. No. 8,236,330, herein incorporated by reference in their entireties) or PLGA-PEG-PLGA block copolymers (See U.S. Pat. No. 6,004,573, herein incorporated by reference in its entirety). As a non-limiting example, the polynucleotides, primary constructs or mmRNA of the invention may be formulated with a diblock copolymer of PEG and PLA or PEG and PLGA (see U.S. Pat. No. 8,246,968, herein incorporated by reference in its entirety).

[0647] A polyamine derivative may be used to deliver nucleic acids or to treat and/or prevent a disease or to be included in an implantable or injectable device (U.S. Pub. No. 20100260817 herein incorporated by reference in its entirety). As a non-limiting example, a pharmaceutical composition may include the modified nucleic acids and mmRNA and the polyamine derivative described in U.S. Pub. No. 20100260817 (the contents of which are incorporated herein by reference in its entirety. As a non-limiting example the polynucleotides, primary constructs and mmRNA of the present invention may be delivered using a polyaminde polymer such as, but not limited to, a polymer comprising a 1,3-dipolar addition polymer prepared by combining a carbohydrate diazide monomer with a dilkyne unite comprising oligoamines (U.S. Pat. No. 8,236,280; herein incorporated by reference in its entirety).

[0648] In one embodiment, the polynucleotides, primary constructs or mmRNA of the present invention may be formulated with at least one polymer and/or derivatives thereof described in International Publication Nos. WO2011115862, WO2012082574 and WO2012068187 and U.S. Pub. No. 20120283427, each of which are herein incorporated by reference in their entireties. In another embodiment, the modified nucleic acid or mmRNA of the present invention may be formulated with a polymer of formula Z as described in WO2011115862, herein incorporated by reference in its entirety. In yet another embodiment, the modified nucleic acid or mmRNA may be formulated with a polymer of formula Z, Z′ or Z″ as described in International Pub. Nos. WO2012082574 or WO2012068187 and U.S. Pub. No. 2012028342, each of which are herein incorporated by reference in their entireties. The polymers formulated with the modified RNA of the present invention may be synthesized by the methods described in International Pub. Nos. WO2012082574 or WO2012068187, each of which are herein incorporated by reference in their entireties.

[0649] The polynucleotides, primary constructs or mmRNA of the invention may be formulated with at least one acrylic polymer. Acrylic polymers include but are not limited to, acrylic acid, methacrylic acid, acrylic acid and methacrylic acid copolymers, methyl methacrylate copolymers, ethoxyethyl methacrylates, cyanoethyl methacrylate, amino alkyl methacrylate copolymer, poly(acrylic acid), poly(methacrylic acid), polycyanoacrylates and combinations thereof.

[0650] Formulations of polynucleotides, primary constructs or mmRNA of the invention may include at least one amine-containing polymer such as, but not limited to polylysine, polyethylene imine, poly(amidoamine) dendrimers or combinations thereof.

[0651] For example, the modified nucleic acid or mmRNA of the invention may be formulated in a pharmaceutical compound including a poly(alkylene imine), a biodegradable cationic lipopolymer, a biodegradable block copolymer, a biodegradable polymer, or a biodegradable random copolymer, a biodegradable polyester block copolymer, a biodegradable polyester polymer, a biodegradable polyester random copolymer, a linear biodegradable copolymer, PAGA, a biodegradable cross-linked cationic multi-block copolymer or combinations thereof. The biodegradable cationic lipopolymer may be made by methods known in the art and/or described in U.S. Pat. No. 6,696,038, U.S. App. Nos. 20030073619 and 20040142474 each of which is herein incorporated by reference in their entireties. The poly(alkylene imine) may be made using methods known in the art and/or as described in U.S. Pub. No. 20100004315, herein incorporated by reference in its entirety. The biodegradabale polymer, biodegradable block copolymer, the biodegradable random copolymer, biodegradable polyester block copolymer, biodegradable polyester polymer, or biodegradable polyester random copolymer may be made using methods known in the art and/or as described in U.S. Pat. Nos. 6,517,869 and 6,267,987, the contents of which are each incorporated herein by reference in their entirety. The linear biodegradable copolymer may be made using methods known in the art and/or as described in U.S. Pat. No. 6,652,886. The PAGA polymer may be made using methods known in the art and/or as described in U.S. Pat. No. 6,217,912 herein incorporated by reference in its entirety. The PAGA polymer may be copolymerized to form a copolymer or block copolymer with polymers such as but not limited to, poly-L-lysine, polyargine, polyornithine, histones, avidin, protamines, polylactides and poly(lactide-co-glycolides). The biodegradable cross-linked cationic multi-block copolymers may be made my methods known in the art and/or as described in U.S. Pat. No. 8,057,821 or U.S. Pub. No. 2012009145 each of which are herein incorporated by reference in their entireties. For example, the multi-block copolymers may be synthesized using linear polyethyleneimine (LPEI) blocks which have distinct patterns as compared to branched polyethyleneimines. Further, the composition or pharmaceutical composition may be made by the methods known in the art, described herein, or as described in U.S. Pub. No. 20100004315 or U.S. Pat. Nos. 6,267,987 and 6,217,912 each of which are herein incorporated by reference in their entireties.

[0652] The polynucleotides, primary constructs, and mmRNA of the invention may be formulated with at least one degradable polyester which may contain polycationic side chains. Degradeable polyesters include, but are not limited to, poly(serine ester), poly(L-lactide-co-L-lysine), poly(4-hydroxy-L-proline ester), and combinations thereof. In another embodiment, the degradable polyesters may include a PEG conjugation to form a PEGylated polymer.

[0653] The polynucleotides, primary construct, mmRNA of the invention may be formulated with at least one crosslinkable polyester. Crosslinkable polyesters include those known in the art and described in US Pub. No. 20120269761, herein incorporated by reference in its entirety.

[0654] In one embodiment, the polymers described herein may be conjugated to a lipid-terminating PEG. As a non-limiting example, PLGA may be conjugated to a lipid-terminating PEG forming PLGA-DSPE-PEG. As another non-limiting example, PEG conjugates for use with the present invention are described in International Publication No. WO2008103276, herein incorporated by reference in its entirety. The polymers may be conjugated using a ligand conjugate such as, but not limited to, the conjugates described in U.S. Pat. No. 8,273,363, herein incorporated by reference in its entirety.

[0655] In one embodiment, the modified RNA described herein may be conjugated with another compound. Non-limiting examples of conjugates are described in U.S. Pat. Nos. 7,964,578 and 7,833,992, each of which are herein incorporated by reference in their entireties. In another embodiment, modified RNA of the present invention may be conjugated with conjugates of formula 1-122 as described in U.S. Pat. Nos. 7,964,578 and 7,833,992, each of which are herein incorporated by reference in their entireties. The polynucleotides, primary constructs and/or mmRNA described herein may be conjugated with a metal such as, but not limited to, gold. (See e.g., Giljohann et al. Journ. Amer. Chem. Soc. 2009 131(6): 2072-2073; herein incorporated by reference in its entirety). In another embodiment, the polynucleotides, primary constructs and/or mmRNA described herein may be conjugated and/or encapsulated in gold-nanoparticles. (Interantional Pub. No. WO201216269 and U.S. Pub. No. 20120302940; each of which is herein incorporated by reference in its entirety).

[0656] As described in U.S. Pub. No. 20100004313, herein incorporated by reference in its entirety, a gene delivery composition may include a nucleotide sequence and a poloxamer. For example, the modified nucleic acid and mmRNA of the present inveition may be used in a gene delivery composition with the poloxamer described in U.S. Pub. No. 20100004313.

[0657] In one embodiment, the polymer formulation of the present invention may be stabilized by contacting the polymer formulation, which may include a cationic carrier, with a cationic lipopolymer which may be covalently linked to cholesterol and polyethylene glycol groups. The polymer formulation may be contacted with a cationic lipopolymer using the methods described in U.S. Pub. No. 20090042829 herein incorporated by reference in its entirety. The cationic carrier may include, but is not limited to, polyethylenimine, poly(trimethylenimine), poly(tetramethylenimine), polypropylenimine, aminoglycoside-polyamine, dideoxy-diamino-b-cyclodextrin, spermine, spermidine, poly(2-dimethylamino)ethyl methacrylate, poly(lysine), poly(histidine), poly(arginine), cationized gelatin, dendrimers, chitosan, 1,2-Dioleoyl-3-Trimethylammonium-Propane(DOTAP), N-[1-(2,3-dioleoyloxy)propyl]-N,N,N-trimethylammonium chloride (DOTMA), 1-[2-(oleoyloxy)ethyl]-2-oleyl-3-(2-hydroxyethyl)imidazolinium chloride (DOTIM), 2,3-dioleyloxy-N-[2(sperminecarboxamido)ethyl]-N,N-dimethyl-1-propanaminium trifluoroacetate (DOSPA), 3B—[N—(N′,N′-Dimethylaminoethane)-carbamoyl]Cholesterol Hydrochloride (DC-Cholesterol HCl) diheptadecylamidoglycyl spermidine (DOGS), N,N-distearyl-N,N-dimethylammonium bromide (DDAB), N-(1,2-dimyristyloxyprop-3-yl)-N,N-dimethyl-N-hydroxyethyl ammonium bromide (DMRIE), N,N-dioleyl-N,N-dimethylammonium chloride DODAC) and combinations thereof.

[0658] The polynucleotides, primary constructs and/or mmRNA of the invention may be formulated in a polyplex of one or more polymers (U.S. Pub. No. 20120237565 and 20120270927; each of which is herein incorporated by reference in its entirety). In one embodiment, the polyplex comprises two or more cationic polymers. The catioinic polymer may comprise a poly(ethylene imine) (PEI) such as linear PEI.

[0659] The polynucleotide, primary construct, and mmRNA of the invention can also be formulated as a nanoparticle using a combination of polymers, lipids, and/or other biodegradable agents, such as, but not limited to, calcium phosphate. Components may be combined in a core-shell, hybrid, and/or layer-by-layer architecture, to allow for fine-tuning of the nanoparticle so to delivery of the polynucleotide, primary construct and mmRNA may be enhanced (Wang et al., Nat Mater. 2006 5:791-796; Fuller et al., Biomaterials. 2008 29:1526-1532; DeKoker et al., Adv Drug Deliv Rev. 2011 63:748-761; Endres et al., Biomaterials. 2011 32:7721-7731; Su et al., Mol Pharm. 2011 Jun. 6; 8(3):774-87; herein incorporated by reference in its entirety). As a non-limiting example, the nanoparticle may comprise a plurality of polymers such as, but not limited to hydrophilic-hydrophobic polymers (e.g., PEG-PLGA), hydrophobic polymers (e.g., PEG) and/or hydrophilic polymers (International Pub. No. WO20120225129; herein incorporated by reference in its entirety).

[0660] Biodegradable calcium phosphate nanoparticles in combination with lipids and/or polymers have been shown to deliver polynucleotides, primary constructs and mmRNA in vivo. In one embodiment, a lipid coated calcium phosphate nanoparticle, which may also contain a targeting ligand such as anisamide, may be used to deliver the polynucleotide, primary construct and mmRNA of the present invention. For example, to effectively deliver siRNA in a mouse metastatic lung model a lipid coated calcium phosphate nanoparticle was used (Li et al., J Contr Rel. 2010 142: 416-421; Li et al., J Contr Rel. 2012 158:108-114; Yang et al., Mol Ther. 2012 20:609-615; herein incorporated by reference in its entirety). This delivery system combines both a targeted nanoparticle and a component to enhance the endosomal escape, calcium phosphate, in order to improve delivery of the siRNA.

[0661] In one embodiment, calcium phosphate with a PEG-polyanion block copolymer may be used to delivery polynucleotides, primary constructs and mmRNA (Kazikawa et al., J Contr Rel. 2004 97:345-356; Kazikawa et al., J Contr Rel. 2006 111:368-370; herein incorporated by reference in its entirety).

[0662] In one embodiment, a PEG-charge-conversional polymer (Pitella et al., Biomaterials. 2011 32:3106-3114) may be used to form a nanoparticle to deliver the polynucleotides, primary constructs and mmRNA of the present invention. The PEG-charge-conversional polymer may improve upon the PEG-polyanion block copolymers by being cleaved into a polycation at acidic pH, thus enhancing endosomal escape.

[0663] The use of core-shell nanoparticles has additionally focused on a high-throughput approach to synthesize cationic cross-linked nanogel cores and various shells (Siegwart et al., Proc Natl Acad Sci USA. 2011 108:12996-13001). The complexation, delivery, and internalization of the polymeric nanoparticles can be precisely controlled by altering the chemical composition in both the core and shell components of the nanoparticle. For example, the core-shell nanoparticles may efficiently deliver siRNA to mouse hepatocytes after they covalently attach cholesterol to the nanoparticle.

[0664] In one embodiment, a hollow lipid core comprising a middle PLGA layer and an outer neutral lipid layer containg PEG may be used to delivery of the polynucleotide, primary construct and mmRNA of the present invention. As a non-limiting example, in mice bearing a luciferease-expressing tumor, it was determined that the lipid-polymer-lipid hybrid nanoparticle significantly suppressed luciferase expression, as compared to a conventional lipoplex (Shi et al, Angew Chem Int Ed. 2011 50:7027-7031; herein incorporated by reference in its entirety).

[0665] In one embodiment, the lipid nanoparticles may comprise a core of the modified nucleic acid molecules disclosed herein and a polymer shell. The polymer shell may be any of the polymers described herein and are known in the art. In an additional embodiment, the polymer shell may be used to protect the modified nucleic acids in the core.

[0666] Core-shell nanoparticles for use with the modified nucleic acid molecules of the present invention are described and may be formed by the methods described in U.S. Pat. No. 8,313,777 herein incorporated by reference in its entirety.

[0667] In one embodiment, the core-shell nanoparticles may comprise a core of the modified nucleic acid molecules disclosed herein and a polymer shell. The polymer shell may be any of the polymers described herein and are known in the art. In an additional embodiment, the polymer shell may be used to protect the modified nucleic acid molecules in the core. As a non-limiting example, the core-shell nanoparticle may be used to treat an eye disease or disorder (See e.g. US Publication No. 20120321719, herein incorporated by reference in its entirety).

[0668] In one embodiment, the polymer used with the formulations described herein may be a modified polymer (such as, but not limited to, a modified polyacetal) as described in International Publication No. WO2011120053, herein incorporated by reference in its entirety.

### Peptides and Proteins

[0669] The polynucleotide, primary construct, and mmRNA of the invention can be formulated with peptides and/or proteins in order to increase transfection of cells by the polynucleotide, primary construct, or mmRNA. In one embodiment, peptides such as, but not limited to, cell penetrating peptides and proteins and peptides that enable intracellular delivery may be used to deliver pharmaceutical formulations. A non-limiting example of a cell penetrating peptide which may be used with the pharmaceutical formulations of the present invention includes a cell-penetrating peptide sequence attached to polycations that facilitates delivery to the intracellular space, e.g., HIV-derived TAT peptide, penetratins, transportans, or hCT derived cell-penetrating peptides (see, e.g., Caron et al., Mol. Ther. 3(3):310-8 (2001); Langel, Cell-Penetrating Peptides: Processes and Applications (CRC Press, Boca Raton FL, 2002); El-Andaloussi et al., Curr. Pharm. Des. 11(28):3597-611 (2003); and Deshayes et al., Cell. Mol. Life Sci. 62(16):1839-49 (2005), all of which are incorporated herein by reference in their entirety). The compositions can also be formulated to include a cell penetrating agent, e.g., liposomes, which enhance delivery of the compositions to the intracellular space. Polynucleotides, primary constructs, and mmRNA of the invention may be complexed to peptides and/or proteins such as, but not limited to, peptides and/or proteins from Aileron Therapeutics (Cambridge, MA) and Permeon Biologics (Cambridge, MA) in order to enable intracellular delivery (Cronican et al., ACS Chem. Biol. 2010 5:747-752; McNaughton et al., Proc. Natl. Acad. Sci. USA 2009 106:6111-6116; Sawyer, Chem Biol Drug Des. 2009 73:3-6; Verdine and Hilinski, Methods Enzymol. 2012; 503:3-33; all of which are herein incorporated by reference in its entirety).

[0670] In one embodiment, the cell-penetrating polypeptide may comprise a first domain and a second domain. The first domain may comprise a supercharged polypeptide. The second domain may comprise a protein-binding partner. As used herein, “protein-binding partner” includes, but are not limited to, antibodies and functional fragments thereof, scaffold proteins, or peptides. The cell-penetrating polypeptide may further comprise an intracellular binding partner for the protein-binding partner. The cell-penetrating polypeptide may be capable of being secreted from a cell where the polynucleotide, primary construct, or mmRNA may be introduced.

[0671] Formulations of the including peptides or proteins may be used to increase cell transfection by the polynucleotide, primary construct, or mmRNA, alter the biodistribution of the polynucleotide, primary construct, or mmRNA (e.g., by targeting specific tissues or cell types), and/or increase the translation of encoded protein. (See e.g., International Pub. No. WO2012110636; herein incorporated by reference in its entirety).

### Cells

[0672] The polynucleotide, primary construct, and mmRNA of the invention can be transfected ex vivo into cells, which are subsequently transplanted into a subject. As non-limiting examples, the pharmaceutical compositions may include red blood cells to deliver modified RNA to liver and myeloid cells, virosomes to deliver modified RNA in virus-like particles (VLPs), and electroporated cells such as, but not limited to, from MAXCYTE® (Gaithersburg, MD) and from ERYTECH® (Lyon, France) to deliver modified RNA. Examples of use of red blood cells, viral particles and electroporated cells to deliver payloads other than mmRNA have been documented (Godfrin et al., Expert Opin Biol Ther. 2012 12:127-133; Fang et al., Expert Opin Biol Ther. 2012 12:385-389; Hu et al., Proc Natl Acad Sci USA. 2011 108:10980-10985; Lund et al., Pharm Res. 2010 27:400-420; Huckriede et al., J Liposome Res. 2007; 17:39-47; Cusi, Hum Vaccin. 2006 2:1-7; de Jonge et al., Gene Ther. 2006 13:400-411; all of which are herein incorporated by reference in its entirety).

[0673] The polynucleotides, primary constructs and mmRNA may be delivered in synthetic VLPs synthesized by the methods described in International Pub No. WO2011085231 and US Pub No. 20110171248, each of which are herein incorporated by reference in their entireties.

[0674] Cell-based formulations of the polynucleotide, primary construct, and mmRNA of the invention may be used to ensure cell transfection (e.g., in the cellular carrier), alter the biodistribution of the polynucleotide, primary construct, or mmRNA (e.g., by targeting the cell carrier to specific tissues or cell types), and/or increase the translation of encoded protein.

[0675] A variety of methods are known in the art and suitable for introduction of nucleic acid into a cell, including viral and non-viral mediated techniques. Examples of typical non-viral mediated techniques include, but are not limited to, electroporation, calcium phosphate mediated transfer, nucleofection, sonoporation, heat shock, magnetofection, liposome mediated transfer, microinjection, microprojectile mediated transfer (nanoparticles), cationic polymer mediated transfer (DEAE-dextran, polyethylenimine, polyethylene glycol (PEG) and the like) or cell fusion.

[0676] The technique of sonoporation, or cellular sonication, is the use of sound (e.g., ultrasonic frequencies) for modifying the permeability of the cell plasma membrane. Sonoporation methods are known to those in the art and are used to deliver nucleic acids in vivo (Yoon and Park, Expert Opin Drug Deliv. 2010 7:321-330; Postema and Gilja, Curr Pharm Biotechnol. 2007 8:355-361; Newman and Bettinger, Gene Ther. 2007 14:465-475; all herein incorporated by reference in their entirety). Sonoporation methods are known in the art and are also taught for example as it relates to bacteria in US Patent Publication 20100196983 and as it relates to other cell types in, for example, US Patent Publication 20100009424, each of which are incorporated herein by reference in their entirety.

[0677] Electroporation techniques are also well known in the art and are used to deliver nucleic acids in vivo and clinically (Andre et al., Curr Gene Ther. 2010 10:267-280; Chiarella et al., Curr Gene Ther. 2010 10:281-286; Hojman, Curr Gene Ther. 2010 10:128-138; all herein incorporated by reference in their entirety). In one embodiment, polynucleotides, primary constructs or mmRNA may be delivered by electroporation as described in Example 8.

### Hyaluronidase

[0678] The intramuscular or subcutaneous localized injection of polynucleotide, primary construct, or mmRNA of the invention can include hyaluronidase, which catalyzes the hydrolysis of hyaluronan. By catalyzing the hydrolysis of hyaluronan, a constituent of the interstitial barrier, hyaluronidase lowers the viscosity of hyaluronan, thereby increasing tissue permeability (Frost, Expert Opin. Drug Deliv. (2007) 4:427-440; herein incorporated by reference in its entirety). It is useful to speed their dispersion and systemic distribution of encoded proteins produced by transfected cells. Alternatively, the hyaluronidase can be used to increase the number of cells exposed to a polynucleotide, primary construct, or mmRNA of the invention administered intramuscularly or subcutaneously.

### Nanoparticle Mimics

[0679] The polynucleotide, primary construct or mmRNA of the invention may be encapsulated within and/or absorbed to a nanoparticle mimic. A nanoparticle mimic can mimic the delivery function organisms or particles such as, but not limited to, pathogens, viruses, bacteria, fungus, parasites, prions and cells. As a non-limiting example the polynucleotide, primary construct or mmRNA of the invention may be encapsulated in a non-viron particle which can mimic the delivery function of a virus (see International Pub. No. WO2012006376 herein incorporated by reference in its entirety).

### Nanotubes

[0680] The polynucleotides, primary constructs or mmRNA of the invention can be attached or otherwise bound to at least one nanotube such as, but not limited to, rosette nanotubes, rosette nanotubes having twin bases with a linker, carbon nanotubes and/or single-walled carbon nanotubes, The polynucleotides, primary constructs or mmRNA may be bound to the nanotubes through forces such as, but not limited to, steric, ionic, covalent and/or other forces.

[0681] In one embodiment, the nanotube can release one or more polynucleotides, primary constructs or mmRNA into cells. The size and/or the surface structure of at least one nanotube may be altered so as to govern the interaction of the nanotubes within the body and/or to attach or bind to the polynucleotides, primary constructs or mmRNA disclosed herein. In one embodiment, the building block and/or the functional groups attached to the building block of the at least one nanotube may be altered to adjust the dimensions and/or properties of the nanotube. As a non-limiting example, the length of the nanotubes may be altered to hinder the nanotubes from passing through the holes in the walls of normal blood vessels but still small enough to pass through the larger holes in the blood vessels of tumor tissue.

[0682] In one embodiment, at least one nanotube may also be coated with delivery enhancing compounds including polymers, such as, but not limited to, polyethylene glycol. In another embodiment, at least one nanotube and/or the polynucleotides, primary constructs or mmRNA may be mixed with pharmaceutically acceptable excipients and/or delivery vehicles.

[0683] In one embodiment, the polynucleotides, primary constructs or mmRNA are attached and/or otherwise bound to at least one rosette nanotube. The rosette nanotubes may be formed by a process known in the art and/or by the process described in International Publication No. WO2012094304, herein incorporated by reference in its entirety. At least one polynucleotide, primary construct and/or mmRNA may be attached and/or otherwise bound to at least one rosette nanotube by a process as described in International Publication No. WO2012094304, herein incorporated by reference in its entirety, where rosette nanotubes or modules forming rosette nanotubes are mixed in aqueous media with at least one polynucleotide, primary construct and/or mmRNA under conditions which may cause at least one polynucleotide, primary construct or mmRNA to attach or otherwise bind to the rosette nanotubes.

[0684] In one embodiment, the polynucleotides, primary constructs or mmRNA may be attached to and/or otherwise bound to at least one carbon nanotube. As a non-limiting example, the polynucleotides, primary constructs or mmRNA may be bound to a linking agent and the linked agent may be bound to the carbon nanotube (See e.g., U.S. Pat. No. 8,246,995; herein incorporated by reference in its entirety). The carbon nanotube may be a single-walled nanotube (See e.g., U.S. Pat. No. 8,246,995; herein incorporated by reference in its entirety).

### Conjugates

[0685] The polynucleotides, primary constructs, and mmRNA of the invention include conjugates, such as a polynucleotide, primary construct, or mmRNA covalently linked to a carrier or targeting group, or including two encoding regions that together produce a fusion protein (e.g., bearing a targeting group and therapeutic protein or peptide).

[0686] The conjugates of the invention include a naturally occurring substance, such as a protein (e.g., human serum albumin (HSA), low-density lipoprotein (LDL), high-density lipoprotein (HDL), or globulin); an carbohydrate (e.g., a dextran, pullulan, chitin, chitosan, inulin, cyclodextrin or hyaluronic acid); or a lipid. The ligand may also be a recombinant or synthetic molecule, such as a synthetic polymer, e.g., a synthetic polyamino acid, an oligonucleotide (e.g. an aptamer). Examples of polyamino acids include polyamino acid is a polylysine (PLL), poly L-aspartic acid, poly L-glutamic acid, styrene-maleic acid anhydride copolymer, poly(L-lactide-co-glycolied) copolymer, divinyl ether-maleic anhydride copolymer, N-(2-hydroxypropyl)methacrylamide copolymer (HMPA), polyethylene glycol (PEG), polyvinyl alcohol (PVA), polyurethane, poly(2-ethylacryllic acid), N-isopropylacrylamide polymers, or polyphosphazine. Example of polyamines include: polyethylenimine, polylysine (PLL), spermine, spermidine, polyamine, pseudopeptide-polyamine, peptidomimetic polyamine, dendrimer polyamine, arginine, amidine, protamine, cationic lipid, cationic porphyrin, quaternary salt of a polyamine, or an alpha helical peptide.

[0687] Representative U.S. patents that teach the preparation of polynucleotide conjugates, particularly to RNA, include, but are not limited to, U.S. Pat. Nos. 4,828,979; 4,948,882; 5,218,105; 5,525,465; 5,541,313; 5,545,730; 5,552,538; 5,578,717, 5,580,731; 5,591,584; 5,109,124; 5,118,802; 5,138,045; 5,414,077; 5,486,603; 5,512,439; 5,578,718; 5,608,046; 4,587,044; 4,605,735; 4,667,025; 4,762,779; 4,789,737; 4,824,941; 4,835,263; 4,876,335; 4,904,582; 4,958,013; 5,082,830; 5,112,963; 5,214,136; 5,082,830; 5,112,963; 5,214,136; 5,245,022; 5,254,469; 5,258,506; 5,262,536; 5,272,250; 5,292,873; 5,317,098; 5,371,241, 5,391,723; 5,416,203, 5,451,463; 5,510,475; 5,512,667; 5,514,785; 5,565,552; 5,567,810; 5,574,142; 5,585,481; 5,587,371; 5,595,726; 5,597,696; 5,599,923; 5,599,928 and 5,688,941; 6,294,664; 6,320,017; 6,576,752; 6,783,931; 6,900,297; 7,037,646; each of which is herein incorporated by reference in their entireties.

[0688] In one embodiment, the conjugate of the present invention may function as a carrier for the modified nucleic acids and mmRNA of the present invention. The conjugate may comprise a cationic polymer such as, but not limited to, polyamine, polylysine, polyalkylenimine, and polyethylenimine which may be grafted to with poly(ethylene glycol). As a non-limiting example, the conjugate may be similar to the polymeric conjugate and the method of synthesizing the polymeric conjugate described in U.S. Pat. No. 6,586,524 herein incorporated by reference in its entirety.

[0689] The conjugates can also include targeting groups, e.g., a cell or tissue targeting agent, e.g., a lectin, glycoprotein, lipid or protein, e.g., an antibody, that binds to a specified cell type such as a kidney cell. A targeting group can be a thyrotropin, melanotropin, lectin, glycoprotein, surfactant protein A, Mucin carbohydrate, multivalent lactose, multivalent galactose, N-acetyl-galactosamine, N-acetyl-gulucosamine multivalent mannose, multivalent fucose, glycosylated polyaminoacids, multivalent galactose, transferrin, bisphosphonate, polyglutamate, polyaspartate, a lipid, cholesterol, a steroid, bile acid, folate, vitamin B12, biotin, an RGD peptide, an RGD peptide mimetic or an aptamer.

[0690] Targeting groups can be proteins, e.g., glycoproteins, or peptides, e.g., molecules having a specific affinity for a co-ligand, or antibodies e.g., an antibody, that binds to a specified cell type such as a cancer cell, endothelial cell, or bone cell. Targeting groups may also include hormones and hormone receptors. They can also include non-peptidic species, such as lipids, lectins, carbohydrates, vitamins, cofactors, multivalent lactose, multivalent galactose, N-acetyl-galactosamine, N-acetyl-gulucosamine multivalent mannose, multivalent fucose, or aptamers. The ligand can be, for example, a lipopolysaccharide, or an activator of p38 MAP kinase.

[0691] The targeting group can be any ligand that is capable of targeting a specific receptor. Examples include, without limitation, folate, GalNAc, galactose, mannose, mannose-6P, apatamers, integrin receptor ligands, chemokine receptor ligands, transferrin, biotin, serotonin receptor ligands, PSMA, endothelin, GCPII, somatostatin, LDL, and HDL ligands. In particular embodiments, the targeting group is an aptamer. The aptamer can be unmodified or have any combination of modifications disclosed herein.

[0692] In one embodiment, pharmaceutical compositions of the present invention may include chemical modifications such as, but not limited to, modifications similar to locked nucleic acids.

[0693] Representative U.S. Patents that teach the preparation of locked nucleic acid (LNA) such as those from Santaris, include, but are not limited to, the following: U.S. Pat. Nos. 6,268,490; 6,670,461; 6,794,499; 6,998,484; 7,053,207; 7,084,125; and 7,399,845, each of which is herein incorporated by reference in its entirety.

[0694] Representative U.S. patents that teach the preparation of PNA compounds include, but are not limited to, U.S. Pat. Nos. 5,539,082; 5,714,331; and 5,719,262, each of which is herein incorporated by reference. Further teaching of PNA compounds can be found, for example, in Nielsen et al., Science, 1991, 254, 1497-1500.

[0695] Some embodiments featured in the invention include polynucleotides, primary constructs or mmRNA with phosphorothioate backbones and oligonucleosides with other modified backbones, and in particular —CH₂—NH—CH₂—, —CH₂—N(CH₃)—O—CH₂— [known as a methylene (methylimino) or MMI backbone], —CH₂—O—N(CH₃)—CH₂—, —CH₂—N(CH₃)—N(CH₃)—CH₂— and —N(CH₃)—CH₂—CH₂— [wherein the native phosphodiester backbone is represented as —O—P(O)₂—O—CH₂—] of the above-referenced U.S. Pat. No. 5,489,677, and the amide backbones of the above-referenced U.S. Pat. No. 5,602,240. In some embodiments, the polynucletotides featured herein have morpholino backbone structures of the above-referenced U.S. Pat. No. 5,034,506.

[0696] Modifications at the 2′ position may also aid in delivery. Preferably, modifications at the 2′ position are not located in a polypeptide-coding sequence, i.e., not in a translatable region. Modifications at the 2′ position may be located in a 5′UTR, a 3′UTR and/or a tailing region. Modifications at the 2′ position can include one of the following at the 2′ position: H (i.e., 2′-deoxy); F; O—, S—, or N-alkyl; O—, S—, or N-alkenyl; O—, S- or N-alkynyl; or O-alkyl-O-alkyl, wherein the alkyl, alkenyl and alkynyl may be substituted or unsubstituted C₁ to C₁₀ alkyl or C₂ to C₁₀ alkenyl and alkynyl. Exemplary suitable modifications include O[(CH₂)ₙO]ₘCH₃, O(CH₂)_{·n}OCH₃, O(CH₂)ₙNH₂, O(CH₂)ₙCH₃, O(CH₂)ₙONH₂, and O(CH₂)ₙON[(CH₂)ₙ CH₃)]₂, where n and m are from 1 to about 10. In other embodiments, the polynucleotides, primary constructs or mmRNA include one of the following at the 2′ position: C₁ to C₁₀ lower alkyl, substituted lower alkyl, alkaryl, aralkyl, O-alkaryl or O-aralkyl, SH, SCH₃, OCN, Cl, Br, CN, CF₃, OCF₃, SOCH₃, SO₂CH₃, ONO₂, NO₂, N₃, NH₂, heterocycloalkyl, heterocycloalkaryl, aminoalkylamino, polyalkylamino, substituted silyl, an RNA cleaving group, a reporter group, an intercalator, a group for improving the pharmacokinetic properties, or a group for improving the pharmacodynamic properties, and other substituents having similar properties. In some embodiments, the modification includes a 2′-methoxyethoxy (2′-O—CH₂CH₂OCH₃, also known as 2′-O-(2-methoxyethyl) or 2′-MOE) (Martin et al., Helv. Chim. Acta, 1995, 78:486-504) i.e., an alkoxy-alkoxy group. Another exemplary modification is 2′-dimethylaminooxyethoxy, i.e., a O(CH₂)₂ON(CH₃)₂ group, also known as 2′-DMAOE, as described in examples herein below, and 2′-dimethylaminoethoxyethoxy (also known in the art as 2′-O-dimethylaminoethoxyethyl or 2′-DMAEOE), i.e., 2′-O—CH₂—O—CH₂—N(CH₂)₂, also described in examples herein below. Other modifications include 2′-methoxy (2′-OCH₃), 2′-aminopropoxy (2′-OCH₂CH₂CH₂NH₂) and 2′-fluoro (2′-F). Similar modifications may also be made at other positions, particularly the 3′ position of the sugar on the 3′ terminal nucleotide or in 2′-5′ linked dsRNAs and the 5′ position of 5′ terminal nucleotide. Polynucleotides of the invention may also have sugar mimetics such as cyclobutyl moieties in place of the pentofuranosyl sugar. Representative U.S. patents that teach the preparation of such modified sugar structures include, but are not limited to, U.S. Pat. Nos. 4,981,957; 5,118,800; 5,319,080; 5,359,044; 5,393,878; 5,446,137; 5,466,786; 5,514,785; 5,519,134; 5,567,811; 5,576,427; 5,591,722; 5,597,909; 5,610,300; 5,627,053; 5,639,873; 5,646,265; 5,658,873; 5,670,633; and 5,700,920 and each of which is herein incorporated by reference.

[0697] In still other embodiments, the polynucleotide, primary construct, or mmRNA is covalently conjugated to a cell penetrating polypeptide. The cell-penetrating peptide may also include a signal sequence. The conjugates of the invention can be designed to have increased stability; increased cell transfection; and/or altered the biodistribution (e.g., targeted to specific tissues or cell types).

[0698] In one embodiment, the polynucleotides, primary constructs or mmRNA may be conjugated to an agent to enhance delivery. As a non-limiting example, the agent may be a monomer or polymer such as a targeting monomer or a polymer having targeting blocks as described in International Publication No. WO2011062965, herein incorporated by reference in its entirety. In another non-limiting example, the agent may be a transport agent covalently coupled to the polynucleotides, primary constructs or mmRNA of the present invention (See e.g., U.S. Pat. Nos. 6,835.393 and 7,374,778, each of which is herein incorporated by reference in its entirety). In yet another non-limiting example, the agent may be a membrane barrier transport enhancing agent such as those described in U.S. Pat. Nos. 7,737,108 and 8,003,129, each of which is herein incorporated by reference in its entirety.

[0699] In another embodiment, polynucleotides, primary constructs or mmRNA may be conjugated to SMARTT POLYMER TECHNOLOGY® (PHASERX®, Inc. Seattle, WA).

### Self-Assembled Nanoparticles

### Nucleic Acid Self-Assembled Nanoparticles

[0700] Self-assembled nanoparticles have a well-defined size which may be precisely controlled as the nucleic acid strands may be easily reprogrammable. For example, the optimal particle size for a cancer-targeting nanodelivery carrier is 20-100 nm as a diameter greater than 20 nm avoids renal clearance and enhances delivery to certain tumors through enhanced permeability and retention effect. Using self-assembled nucleic acid nanoparticles a single uniform population in size and shape having a precisely controlled spatial orientation and density of cancer-targeting ligands for enhanced delivery. As a non-limiting example, oligonucleotide nanoparticles were prepared using programmable self-assembly of short DNA fragments and therapeutic siRNAs. These nanoparticles are molecularly identical with controllable particle size and target ligand location and density. The DNA fragments and siRNAs self-assembled into a one-step reaction to generate DNA/siRNA tetrahedral nanoparticles for targeted in vivo delivery. (Lee et al., Nature Nanotechnology 2012 7:389-393; herein incorporated by reference in its entirety).

[0701] In one embodiment, the polynucleotides, primary constructs and/or mmRNA disclosed herein may be formulated as self-assembled nanoparticles. As a non-limiting example, nucleic acids may be used to make nanoparticles which may be used in a delivery system for the polynucleotides, primary constructs and/or mmRNA of the present invention (See e.g., International Pub. No. WO2012125987; herein incorporated by reference in its entirety).

[0702] In one embodiment, the nucleic acid self-assembled nanoparticles may comprise a core of the polynucleotides, primary constructs or mmRNA disclosed herein and a polymer shell. The polymer shell may be any of the polymers described herein and are known in the art. In an additional embodiment, the polymer shell may be used to protect the polynucleotides, primary contructs and mmRNA in the core.

### Polymer-Based Self-Assembled Nanoparticles

[0703] Polymers may be used to form sheets which self-assembled into nanoparticles. These nanoparticles may be used to deliver the polynucleotides, primary constructs and mmRNA of the present invention. In one embodiment, these self-assembled nanoparticles may be microsponges formed of long polymers of RNA hairpins which form into crystalline ‘pleated’ sheets before self-assembling into microsponges. These microsponges are densely-packed sponge like microparticles which may function as an efficient carrier and may be able to deliver cargo to a cell. The microsponges may be from 1 um to 300 nm in diameter. The microsponges may be complexed with other agents known in the art to form larger microsponges. As a non-limiting example, the microsponge may be complexed with an agent to form an outer layer to promote cellular uptake such as polycation polyethyleneime (PEI). This complex can form a 250-nm diameter particle that can remain stable at high temperatures (150° C.) (Grabow and Jaegar, Nature Materials 2012, 11:269-269; herein incorporated by reference in its entirety). Additionally these microsponges may be able to exhibit an extraordinary degree of protection from degradation by ribonucleases.

[0704] In another embodiment, the polymer-based self-assembled nanoparticles such as, but not limited to, microsponges, may be fully programmable nanoparticles. The geometry, size and stoichiometry of the nanoparticle may be precisely controlled to create the optimal nanoparticle for delivery of cargo such as, but not limited to, polynucleotides, primary constructs and/or mmRNA.

[0705] In one embodiment, the polymer based nanoparticles may comprise a core of the polynucleotides, primary constructs and/or mmRNA disclosed herein and a polymer shell. The polymer shell may be any of the polymers described herein and are known in the art. In an additional embodiment, the polymer shell may be used to protect the polynucleotides, primary construct and/or mmRNA in the core.

[0706] In yet another embodiment, the polymer based nanoparticle may comprise a non-nucleic acid polymer comprising a plurality of heterogenous monomers such as those described in Interantional Publication No. WO2013009736, herein incorporated by reference in its entirety.

### Inorganic Nanoparticles

[0707] The polynucleotides, primary constructs and/or mmRNAs of the present invention may be formulated in inorganic nanoparticles (U.S. Pat. No. 8,257,745, herein incorporated by reference in its entirety). The inorganic nanoparticles may include, but are not limited to, clay substances that are water swellable. As a non-limiting example, the inorganic nanoparticle may include synthetic smectite clays which are made from simple silicates (See e.g., U.S. Pat. Nos. 5,585,108 and 8,257,745 each of which are herein incorporated by reference in their entirety).

[0708] In one embodiment, the inorganic nanoparticles may comprise a core of the modified nucleic acids disclosed herein and a polymer shell. The polymer shell may be any of the polymers described herein and are known in the art. In an additional embodiment, the polymer shell may be used to protect the modified nucleic acids in the core.

### Semi-Conductive and Metallic Nanoparticles

[0709] The polynucleotides, primary constructs and/or mmRNAs of the present invention may be formulated in water-dispersible nanoparticle comprising a semiconductive or metallic material (U.S. Pub. No. 20120228565; herein incorporated by reference in its entirety) or formed in a magnetic nanoparticle (U.S. Pub. No. 20120265001 and 20120283503; each of which is herein incorporated by reference in its entirety). The water-dispersible nanoparticles may be hydrophobic nanoparticles or hydrophilic nanoparticles.

[0710] In one embodiment, the semi-conductive and/or metallic nanoparticles may comprise a core of the polynucleotides, primary constructs and/or mmRNA disclosed herein and a polymer shell. The polymer shell may be any of the polymers described herein and are known in the art. In an additional embodiment, the polymer shell may be used to protect the polynucleotides, primary constructs and/or mmRNA in the core.

### Gels and Hydrogels

[0711] In one embodiment, the polynucleotides, primary constructs and/or mmRNA disclosed herein may be encapsulated into any hydrogel known in the art which may form a gel when injected into a subject. Hydrogels are a network of polymer chains that are hydrophilic, and are sometimes found as a colloidal gel in which water is the dispersion medium. Hydrogels are highly absorbent (they can contain over 99% water) natural or synthetic polymers. Hydrogels also possess a degree of flexibility very similar to natural tissue, due to their significant water content. The hydrogel described herein may used to encapsulate lipid nanoparticles which are biocompatible, biodegradable and/or porous.

[0712] As a non-limiting example, the hydrogel may be an aptamer-functionalized hydrogel. The aptamer-functionalized hydrogel may be programmed to release one or more polynucleotides, primary constructs and/or mmRNA using nucleic acid hybridization. (Battig et al., J. Am. Chem. Society. 2012 134:12410-12413; herein incorporated by reference in its entirety).

[0713] As another non-limiting example, the hydrogel may be a shaped as an inverted opal.

[0714] The opal hydrogels exhibit higher swelling ratios and the swelling kinetics is an order of magnitude faster as well. Methods of producing opal hydrogels and description of opal hydrogels are described in International Pub. No. WO2012148684, herein incorporated by reference in its entirety.

[0715] In yet another non-limiting example, the hydrogel may be an antibacterial hydrogel. The antibacterial hydrogel may comprise a pharmaceutical acceptable salt or organic material such as, but not limited to pharmaceutical grade and/or medical grade silver salt and aloe vera gel or extract. (International Pub. No. WO2012151438, herein incorporated by reference in its entirety).

[0716] In one embodiment, the modified mRNA may be encapsulated in a lipid nanoparticle and then the lipid nanoparticle may be encapsulated into a hyrdogel.

[0717] In one embodiment, the polynucleotides, primary constructs and/or mmRNA disclosed herein may be encapsulated into any gel known in the art. As a non-limiting example the gel may be a fluorouracil injectable gel or a fluorouracil injectable gel containing a chemical compound and/or drug known in the art. As another example, the polynucleotides, primary constructs and/or mmRNA may be encapsulated in a fluorouracil gel containing epinephrine (See e.g., Smith et al. Cancer Chemotherapty and Pharmacology, 1999 44(4):267-274; herein incorporated by reference in its entirety).

[0718] In one embodiment, the polynucleotides, primary constructs and/or mmRNA disclosed herein may be encapsulated into a fibrin gel, fibrin hydrogel or fibrin glue. In another embodiment, the polynucleotides, primary constructs and/or mmRNA may be formulated in a lipid nanoparticle or a rapidly eliminated lipid nanoparticle prior to being encapsulated into a fibrin gel, fibrin hydrogel or a fibrin glue. In yet another embodiment, the polynucleotides, primary constructs and/or mmRNA may be formulated as a lipoplex prior to being encapsulated into a fibrin gel, hydrogel or a fibrin glue. Fibrin gels, hydrogels and glues comprise two components, a fibrinogen solution and a thrombin solution which is rich in calcium (See e.g., Spicer and Mikos, Journal of Controlled Release 2010. 148: 49-55; Kidd et al. Journal of Controlled Release 2012. 157:80-85; each of which is herein incorporated by reference in its entirety). The concentration of the components of the fibrin gel, hydrogel and/or glue can be altered to change the characteristics, the network mesh size, and/or the degradation characteristics of the gel, hydrogel and/or glue such as, but not limited to changing the release characteristics of the fibrin gel, hydrogel and/or glue. (See e.g., Spicer and Mikos, Journal of Controlled Release 2010. 148: 49-55; Kidd et al. Journal of Controlled Release 2012. 157:80-85; Catelas et al. Tissue Engineering 2008. 14:119-128; each of which is herein incorporated by reference in its entirety). This feature may be advantageous when used to deliver the modified mRNA disclosed herein. (See e.g., Kidd et al. Journal of Controlled Release 2012. 157:80-85; Catelas et al. Tissue Engineering 2008. 14:119-128; each of which is herein incorporated by reference in its entirety).

### Cations and Anions

[0719] Formulations of polynucleotides, primary constructs and/or mmRNA disclosed herein may include cations or anions. In one embodiment, the formulations include metal cations such as, but not limited to, Zn2+, Ca2+, Cu2+, Mg+ and combinations thereof. As a non-limiting example, formulations may include polymers and a polynucleotides, primary constructs and/or mmRNA complexed with a metal cation (See e.g., U.S. Pat. Nos. 6,265,389 and 6,555,525, each of which is herein incorporated by reference in its entirety).

### Molded Nanoparticles and Microparticles

[0720] The polynucleotides, primary constructs and/or mmRNA disclosed herein may be formulated in nanoparticles and/or microparticles. These nanoparticles and/or microparticles may be molded into any size shape and chemistry. As an example, the nanoparticles and/or microparticles may be made using the PRINT® technology by LIQUIDA TECHNOLOGIES® (Morrisville, NC) (See e.g., International Pub. No. WO2007024323; herein incorporated by reference in its entirety).

[0721] In one embodiment, the molded nanoparticles may comprise a core of the polynucleotides, primary constructs and/or mmRNA disclosed herein and a polymer shell. The polymer shell may be any of the polymers described herein and are known in the art. In an additional embodiment, the polymer shell may be used to protect the polynucleotides, primary construct and/or mmRNA in the core.

### NanoJackets and NanoLiposomes

[0722] The polynucleotides, primary constructs and/or mmRNA disclosed herein may be formulated in NanoJackets and NanoLiposomes by Keystone Nano (State College, PA). NanoJackets are made of compounds that are naturally found in the body including calcium, phosphate and may also include a small amount of silicates. Nanojackets may range in size from 5 to 50 nm and may be used to deliver hydrophilic and hydrophobic compounds such as, but not limited to, polynucleotides, primary constructs and/or mmRNA.

[0723] NanoLiposomes are made of lipids such as, but not limited to, lipids which naturally occur in the body. NanoLiposomes may range in size from 60-80 nm and may be used to deliver hydrophilic and hydrophobic compounds such as, but not limited to, polynucleotides, primary constructs and/or mmRNA. In one aspect, the polynucleotides, primary constructs and/or mmRNA disclosed herein are formulated in a NanoLiposome such as, but not limited to, Ceramide NanoLiposomes.

### Excipients

[0724] Pharmaceutical formulations may additionally comprise a pharmaceutically acceptable excipient, which, as used herein, includes any and all solvents, dispersion media, diluents, or other liquid vehicles, dispersion or suspension aids, surface active agents, isotonic agents, thickening or emulsifying agents, preservatives, solid binders, lubricants and the like, as suited to the particular dosage form desired. Remington's The Science and Practice of Pharmacy, 21^{st} Edition, A. R. Gennaro (Lippincott, Williams & Wilkins, Baltimore, MD, 2006; incorporated herein by reference in its entirety) discloses various excipients used in formulating pharmaceutical compositions and known techniques for the preparation thereof. Except insofar as any conventional excipient medium is incompatible with a substance or its derivatives, such as by producing any undesirable biological effect or otherwise interacting in a deleterious manner with any other component(s) of the pharmaceutical composition, its use is contemplated to be within the scope of this invention.

[0725] In some embodiments, a pharmaceutically acceptable excipient is at least 95%, at least 96%, at least 97%, at least 98%, at least 99%, or 100% pure. In some embodiments, an excipient is approved for use in humans and for veterinary use. In some embodiments, an excipient is approved by United States Food and Drug Administration. In some embodiments, an excipient is pharmaceutical grade. In some embodiments, an excipient meets the standards of the United States Pharmacopoeia (USP), the European Pharmacopoeia (EP), the British Pharmacopoeia, and/or the International Pharmacopoeia.

[0726] Pharmaceutically acceptable excipients used in the manufacture of pharmaceutical compositions include, but are not limited to, inert diluents, dispersing and/or granulating agents, surface active agents and/or emulsifiers, disintegrating agents, binding agents, preservatives, buffering agents, lubricating agents, and/or oils. Such excipients may optionally be included in pharmaceutical compositions.

[0727] Exemplary diluents include, but are not limited to, calcium carbonate, sodium carbonate, calcium phosphate, dicalcium phosphate, calcium sulfate, calcium hydrogen phosphate, sodium phosphate lactose, sucrose, cellulose, microcrystalline cellulose, kaolin, mannitol, sorbitol, inositol, sodium chloride, dry starch, cornstarch, powdered sugar, etc., and/or combinations thereof.

[0728] Exemplary granulating and/or dispersing agents include, but are not limited to, potato starch, corn starch, tapioca starch, sodium starch glycolate, clays, alginic acid, guar gum, citrus pulp, agar, bentonite, cellulose and wood products, natural sponge, cation-exchange resins, calcium carbonate, silicates, sodium carbonate, cross-linked poly(vinyl-pyrrolidone) (crospovidone), sodium carboxymethyl starch (sodium starch glycolate), carboxymethyl cellulose, cross-linked sodium carboxymethyl cellulose (croscarmellose), methylcellulose, pregelatinized starch (starch 1500), microcrystalline starch, water insoluble starch, calcium carboxymethyl cellulose, magnesium aluminum silicate (VEEGUM®), sodium lauryl sulfate, quaternary ammonium compounds, etc., and/or combinations thereof.

[0729] Exemplary surface active agents and/or emulsifiers include, but are not limited to, natural emulsifiers (e.g. acacia, agar, alginic acid, sodium alginate, tragacanth, chondrux, cholesterol, xanthan, pectin, gelatin, egg yolk, casein, wool fat, cholesterol, wax, and lecithin), colloidal clays (e.g. bentonite [aluminum silicate] and VEEGUM® [magnesium aluminum silicate]), long chain amino acid derivatives, high molecular weight alcohols (e.g. stearyl alcohol, cetyl alcohol, oleyl alcohol, triacetin monostearate, ethylene glycol distearate, glyceryl monostearate, and propylene glycol monostearate, polyvinyl alcohol), carbomers (e.g. carboxy polymethylene, polyacrylic acid, acrylic acid polymer, and carboxyvinyl polymer), carrageenan, cellulosic derivatives (e.g. carboxymethylcellulose sodium, powdered cellulose, hydroxymethyl cellulose, hydroxypropyl cellulose, hydroxypropyl methylcellulose, methylcellulose), sorbitan fatty acid esters (e.g. polyoxyethylene sorbitan monolaurate [TWEEN®20], polyoxyethylene sorbitan [TWEENn®60], polyoxyethylene sorbitan monooleate [TWEEN®80], sorbitan monopalmitate [SPAN®40], sorbitan monostearate [SPAN®60], sorbitan tristearate [SPAN®65], glyceryl monooleate, sorbitan monooleate [SPAN®80]), polyoxyethylene esters (e.g. polyoxyethylene monostearate [MYRJ®45], polyoxyethylene hydrogenated castor oil, polyethoxylated castor oil, polyoxymethylene stearate, and SOLUTOL®), sucrose fatty acid esters, polyethylene glycol fatty acid esters (e.g. CREMOPHOR®), polyoxyethylene ethers, (e.g. polyoxyethylene lauryl ether [BRIJ®30]), poly(vinyl-pyrrolidone), diethylene glycol monolaurate, triethanolamine oleate, sodium oleate, potassium oleate, ethyl oleate, oleic acid, ethyl laurate, sodium lauryl sulfate, PLUORINC®F 68, POLOXAMER®188, cetrimonium bromide, cetylpyridinium chloride, benzalkonium chloride, docusate sodium, etc. and/or combinations thereof.

[0730] Exemplary binding agents include, but are not limited to, starch (e.g. cornstarch and starch paste); gelatin; sugars (e.g. sucrose, glucose, dextrose, dextrin, molasses, lactose, lactitol, mannitol); natural and synthetic gums (e.g. acacia, sodium alginate, extract of Irish moss, panwar gum, ghatti gum, mucilage of isapol husks, carboxymethylcellulose, methylcellulose, ethylcellulose, hydroxyethylcellulose, hydroxypropyl cellulose, hydroxypropyl methylcellulose, microcrystalline cellulose, cellulose acetate, poly(vinyl-pyrrolidone), magnesium aluminum silicate (Veegum®), and larch arabogalactan); alginates; polyethylene oxide; polyethylene glycol; inorganic calcium salts; silicic acid; polymethacrylates; waxes; water; alcohol; etc.; and combinations thereof.

[0731] Exemplary preservatives may include, but are not limited to, antioxidants, chelating agents, antimicrobial preservatives, antifungal preservatives, alcohol preservatives, acidic preservatives, and/or other preservatives. Exemplary antioxidants include, but are not limited to, alpha tocopherol, ascorbic acid, acorbyl palmitate, butylated hydroxyanisole, butylated hydroxytoluene, monothioglycerol, potassium metabisulfite, propionic acid, propyl gallate, sodium ascorbate, sodium bisulfite, sodium metabisulfite, and/or sodium sulfite. Exemplary chelating agents include ethylenediaminetetraacetic acid (EDTA), citric acid monohydrate, disodium edetate, dipotassium edetate, edetic acid, fumaric acid, malic acid, phosphoric acid, sodium edetate, tartaric acid, and/or trisodium edetate. Exemplary antimicrobial preservatives include, but are not limited to, benzalkonium chloride, benzethonium chloride, benzyl alcohol, bronopol, cetrimide, cetylpyridinium chloride, chlorhexidine, chlorobutanol, chlorocresol, chloroxylenol, cresol, ethyl alcohol, glycerin, hexetidine, imidurea, phenol, phenoxyethanol, phenylethyl alcohol, phenylmercuric nitrate, propylene glycol, and/or thimerosal. Exemplary antifungal preservatives include, but are not limited to, butyl paraben, methyl paraben, ethyl paraben, propyl paraben, benzoic acid, hydroxybenzoic acid, potassium benzoate, potassium sorbate, sodium benzoate, sodium propionate, and/or sorbic acid. Exemplary alcohol preservatives include, but are not limited to, ethanol, polyethylene glycol, phenol, phenolic compounds, bisphenol, chlorobutanol, hydroxybenzoate, and/or phenylethyl alcohol. Exemplary acidic preservatives include, but are not limited to, vitamin A, vitamin C, vitamin E, beta-carotene, citric acid, acetic acid, dehydroacetic acid, ascorbic acid, sorbic acid, and/or phytic acid. Other preservatives include, but are not limited to, tocopherol, tocopherol acetate, deteroxime mesylate, cetrimide, butylated hydroxyanisol (BHA), butylated hydroxytoluened (BHT), ethylenediamine, sodium lauryl sulfate (SLS), sodium lauryl ether sulfate (SLES), sodium bisulfite, sodium metabisulfite, potassium sulfite, potassium metabisulfite, GLYDANT PLUS®, PHENONIP®, methylparaben, GERMALL®115, GERMABEN®II, NEOLONE™, KATHON™, and/or EUXYL®.

[0732] Exemplary buffering agents include, but are not limited to, citrate buffer solutions, acetate buffer solutions, phosphate buffer solutions, ammonium chloride, calcium carbonate, calcium chloride, calcium citrate, calcium glubionate, calcium gluceptate, calcium gluconate, D-gluconic acid, calcium glycerophosphate, calcium lactate, propanoic acid, calcium levulinate, pentanoic acid, dibasic calcium phosphate, phosphoric acid, tribasic calcium phosphate, calcium hydroxide phosphate, potassium acetate, potassium chloride, potassium gluconate, potassium mixtures, dibasic potassium phosphate, monobasic potassium phosphate, potassium phosphate mixtures, sodium acetate, sodium bicarbonate, sodium chloride, sodium citrate, sodium lactate, dibasic sodium phosphate, monobasic sodium phosphate, sodium phosphate mixtures, tromethamine, magnesium hydroxide, aluminum hydroxide, alginic acid, pyrogen-free water, isotonic saline, Ringer's solution, ethyl alcohol, etc., and/or combinations thereof.

[0733] Exemplary lubricating agents include, but are not limited to, magnesium stearate, calcium stearate, stearic acid, silica, talc, malt, glyceryl behanate, hydrogenated vegetable oils, polyethylene glycol, sodium benzoate, sodium acetate, sodium chloride, leucine, magnesium lauryl sulfate, sodium lauryl sulfate, etc., and combinations thereof.

[0734] Exemplary oils include, but are not limited to, almond, apricot kernel, avocado, babassu, bergamot, black current seed, borage, cade, camomile, canola, caraway, carnauba, castor, cinnamon, cocoa butter, coconut, cod liver, coffee, corn, cotton seed, emu, eucalyptus, evening primrose, fish, flaxseed, geraniol, gourd, grape seed, hazel nut, hyssop, isopropyl myristate, jojoba, kukui nut, lavandin, lavender, lemon, litsea cubeba, macademia nut, mallow, mango seed, meadowfoam seed, mink, nutmeg, olive, orange, orange roughy, palm, palm kernel, peach kernel, peanut, poppy seed, pumpkin seed, rapeseed, rice bran, rosemary, safflower, sandalwood, sasquana, savoury, sea buckthorn, sesame, shea butter, silicone, soybean, sunflower, tea tree, thistle, tsubaki, vetiver, walnut, and wheat germ oils. Exemplary oils include, but are not limited to, butyl stearate, caprylic triglyceride, capric triglyceride, cyclomethicone, diethyl sebacate, dimethicone 360, isopropyl myristate, mineral oil, octyldodecanol, oleyl alcohol, silicone oil, and/or combinations thereof.

[0735] Excipients such as cocoa butter and suppository waxes, coloring agents, coating agents, sweetening, flavoring, and/or perfuming agents can be present in the composition, according to the judgment of the formulator.

### Delivery

[0736] The present disclosure encompasses the delivery of polynucleotides, primary constructs or mmRNA for any of therapeutic, pharmaceutical, diagnostic or imaging by any appropriate route taking into consideration likely advances in the sciences of drug delivery. Delivery may be naked or formulated.

### Naked Delivery

[0737] The polynucleotides, primary constructs or mmRNA of the present invention may be delivered to a cell naked. As used herein in, “naked” refers to delivering polynucleotides, primary constructs or mmRNA free from agents which promote transfection. For example, the polynucleotides, primary constructs or mmRNA delivered to the cell may contain no modifications. The naked polynucleotides, primary constructs or mmRNA may be delivered to the cell using routes of administration known in the art and described herein.

### Formulated Delivery

[0738] The polynucleotides, primary constructs or mmRNA of the present invention may be formulated, using the methods described herein. The formulations may contain polynucleotides, primary constructs or mmRNA which may be modified and/or unmodified. The formulations may further include, but are not limited to, cell penetration agents, a pharmaceutically acceptable carrier, a delivery agent, a bioerodible or biocompatible polymer, a solvent, and a sustained-release delivery depot. The formulated polynucleotides, primary constructs or mmRNA may be delivered to the cell using routes of administration known in the art and described herein.

[0739] The compositions may also be formulated for direct delivery to an organ or tissue in any of several ways in the art including, but not limited to, direct soaking or bathing, via a catheter, by gels, powder, ointments, creams, gels, lotions, and/or drops, by using substrates such as fabric or biodegradable materials coated or impregnated with the compositions, and the like.

### Administration

[0740] The polynucleotides, primary constructs or mmRNA of the present invention may be administered by any route which results in a therapeutically effective outcome. These include, but are not limited to enteral, gastroenteral, epidural, oral, transdermal, epidural (peridural), intracerebral (into the cerebrum), intracerebroventricular (into the cerebral ventricles), epicutaneous (application onto the skin), intradermal, (into the skin itself), subcutaneous (under the skin), nasal administration (through the nose), intravenous (into a vein), intraarterial (into an artery), intramuscular (into a muscle), intracardiac (into the heart), intraosseous infusion (into the bone marrow), intrathecal (into the spinal canal), intraperitoneal, (infusion or injection into the peritoneum), intravesical infusion, intravitreal, (through the eye), intracavernous injection, (into the base of the penis), intravaginal administration, intrauterine, extra-amniotic administration, transdermal (diffusion through the intact skin for systemic distribution), transmucosal (diffusion through a mucous membrane), insufflation (snorting), sublingual, sublabial, enema, eye drops (onto the conjunctiva), or in ear drops. In specific embodiments, compositions may be administered in a way which allows them cross the blood-brain barrier, vascular barrier, or other epithelial barrier. Non-limiting routes of administration for the polynucleotides, primary constructs or mmRNA of the present invention are described below.

### Parenteral and Injectible Administration

[0741] Liquid dosage forms for parenteral administration include, but are not limited to, pharmaceutically acceptable emulsions, microemulsions, solutions, suspensions, syrups, and/or elixirs. In addition to active ingredients, liquid dosage forms may comprise inert diluents commonly used in the art such as, for example, water or other solvents, solubilizing agents and emulsifiers such as ethyl alcohol, isopropyl alcohol, ethyl carbonate, ethyl acetate, benzyl alcohol, benzyl benzoate, propylene glycol, 1,3-butylene glycol, dimethylformamide, oils (in particular, cottonseed, groundnut, corn, germ, olive, castor, and sesame oils), glycerol, tetrahydrofurfuryl alcohol, polyethylene glycols and fatty acid esters of sorbitan, and mixtures thereof. Besides inert diluents, oral compositions can include adjuvants such as wetting agents, emulsifying and suspending agents, sweetening, flavoring, and/or perfuming agents. In certain embodiments for parenteral administration, compositions are mixed with solubilizing agents such as CREMOPHOR®, alcohols, oils, modified oils, glycols, polysorbates, cyclodextrins, polymers, and/or combinations thereof.

[0742] Injectable preparations, for example, sterile injectable aqueous or oleaginous suspensions may be formulated according to the known art using suitable dispersing agents, wetting agents, and/or suspending agents. Sterile injectable preparations may be sterile injectable solutions, suspensions, and/or emulsions in nontoxic parenterally acceptable diluents and/or solvents, for example, as a solution in 1,3-butanediol. Among the acceptable vehicles and solvents that may be employed are water, Ringer's solution, U.S.P., and isotonic sodium chloride solution. Sterile, fixed oils are conventionally employed as a solvent or suspending medium. For this purpose any bland fixed oil can be employed including synthetic mono- or diglycerides. Fatty acids such as oleic acid can be used in the preparation of injectables.

[0743] Injectable formulations can be sterilized, for example, by filtration through a bacterial-retaining filter, and/or by incorporating sterilizing agents in the form of sterile solid compositions which can be dissolved or dispersed in sterile water or other sterile injectable medium prior to use.

[0744] In order to prolong the effect of an active ingredient, it is often desirable to slow the absorption of the active ingredient from subcutaneous or intramuscular injection. This may be accomplished by the use of a liquid suspension of crystalline or amorphous material with poor water solubility. The rate of absorption of the drug then depends upon its rate of dissolution which, in turn, may depend upon crystal size and crystalline form. Alternatively, delayed absorption of a parenterally administered drug form is accomplished by dissolving or suspending the drug in an oil vehicle. Injectable depot forms are made by forming microencapsule matrices of the drug in biodegradable polymers such as polylactide-polyglycolide. Depending upon the ratio of drug to polymer and the nature of the particular polymer employed, the rate of drug release can be controlled. Examples of other biodegradable polymers include poly(orthoesters) and poly(anhydrides). Depot injectable formulations are prepared by entrapping the drug in liposomes or microemulsions which are compatible with body tissues.

### Rectal and Vaginal Administration

[0745] Compositions for rectal or vaginal administration are typically suppositories which can be prepared by mixing compositions with suitable non-irritating excipients such as cocoa butter, polyethylene glycol or a suppository wax which are solid at ambient temperature but liquid at body temperature and therefore melt in the rectum or vaginal cavity and release the active ingredient.

### Oral Administration

[0746] Liquid dosage forms for oral administration include, but are not limited to, pharmaceutically acceptable emulsions, microemulsions, solutions, suspensions, syrups, and/or elixirs. In addition to active ingredients, liquid dosage forms may comprise inert diluents commonly used in the art such as, for example, water or other solvents, solubilizing agents and emulsifiers such as ethyl alcohol, isopropyl alcohol, ethyl carbonate, ethyl acetate, benzyl alcohol, benzyl benzoate, propylene glycol, 1,3-butylene glycol, dimethylformamide, oils (in particular, cottonseed, groundnut, corn, germ, olive, castor, and sesame oils), glycerol, tetrahydrofurfuryl alcohol, polyethylene glycols and fatty acid esters of sorbitan, and mixtures thereof. Besides inert diluents, oral compositions can include adjuvants such as wetting agents, emulsifying and suspending agents, sweetening, flavoring, and/or perfuming agents. In certain embodiments for parenteral administration, compositions are mixed with solubilizing agents such as CREMOPHOR®, alcohols, oils, modified oils, glycols, polysorbates, cyclodextrins, polymers, and/or combinations thereof.

[0747] Solid dosage forms for oral administration include capsules, tablets, pills, powders, and granules. In such solid dosage forms, an active ingredient is mixed with at least one inert, pharmaceutically acceptable excipient such as sodium citrate or dicalcium phosphate and/or fillers or extenders (e.g. starches, lactose, sucrose, glucose, mannitol, and silicic acid), binders (e.g. carboxymethylcellulose, alginates, gelatin, polyvinylpyrrolidinone, sucrose, and acacia), humectants (e.g. glycerol), disintegrating agents (e.g. agar, calcium carbonate, potato or tapioca starch, alginic acid, certain silicates, and sodium carbonate), solution retarding agents (e.g. paraffin), absorption accelerators (e.g. quaternary ammonium compounds), wetting agents (e.g. cetyl alcohol and glycerol monostearate), absorbents (e.g. kaolin and bentonite clay), and lubricants (e.g. talc, calcium stearate, magnesium stearate, solid polyethylene glycols, sodium lauryl sulfate), and mixtures thereof. In the case of capsules, tablets and pills, the dosage form may comprise buffering agents.

### Topical or Transdermal Administration

[0748] As described herein, compositions containing the polynucleotides, primary constructs or mmRNA of the invention may be formulated for administration topically. The skin may be an ideal target site for delivery as it is readily accessible. Gene expression may be restricted not only to the skin, potentially avoiding nonspecific toxicity, but also to specific layers and cell types within the skin.

[0749] The site of cutaneous expression of the delivered compositions will depend on the route of nucleic acid delivery. Three routes are commonly considered to deliver polynucleotides, primary constructs or mmRNA to the skin: (i) topical application (e.g. for local/regional treatment and/or cosmetic applications); (ii) intradermal injection (e.g. for local/regional treatment and/or cosmetic applications); and (iii) systemic delivery (e.g. for treatment of dermatologic diseases that affect both cutaneous and extracutaneous regions). Polynucleotides, primary constructs or mmRNA can be delivered to the skin by several different approaches known in the art. Most topical delivery approaches have been shown to work for delivery of DNA, such as but not limited to, topical application of non-cationic liposome-DNA complex, cationic liposome-DNA complex, particle-mediated (gene gun), puncture-mediated gene transfections, and viral delivery approaches. After delivery of the nucleic acid, gene products have been detected in a number of different skin cell types, including, but not limited to, basal keratinocytes, sebaceous gland cells, dermal fibroblasts and dermal macrophages.

[0750] In one embodiment, the invention provides for a variety of dressings (e.g., wound dressings) or bandages (e.g., adhesive bandages) for conveniently and/or effectively carrying out methods of the present invention. Typically dressing or bandages may comprise sufficient amounts of pharmaceutical compositions and/or polynucleotides, primary constructs or mmRNA described herein to allow a user to perform multiple treatments of a subject(s).

[0751] In one embodiment, the invention provides for the polynucleotides, primary constructs or mmRNA compositions to be delivered in more than one injection.

[0752] In one embodiment, before topical and/or transdermal administration at least one area of tissue, such as skin, may be subjected to a device and/or solution which may increase permeability. In one embodiment, the tissue may be subjected to an abrasion device to increase the permeability of the skin (see U.S. Patent Publication No. 20080275468, herein incorporated by reference in its entirety). In another embodiment, the tissue may be subjected to an ultrasound enhancement device. An ultrasound enhancement device may include, but is not limited to, the devices described in U.S. Publication No. 20040236268 and U.S. Pat. Nos. 6,491,657 and 6,234,990; each of which are herein incorporated by reference in their entireties. Methods of enhancing the permeability of tissue are described in U.S. Publication Nos. 20040171980 and 20040236268 and U.S. Pat. No. 6,190,315; each of which are herein incorporated by reference in their entireties.

[0753] In one embodiment, a device may be used to increase permeability of tissue before delivering formulations of modified mRNA described herein. The permeability of skin may be measured by methods known in the art and/or described in U.S. Pat. No. 6,190,315, herein incorporated by reference in its entirety. As a non-limiting example, a modified mRNA formulation may be delivered by the drug delivery methods described in U.S. Pat. No. 6,190,315, herein incorporated by reference in its entirety.

[0754] In another non-limiting example tissue may be treated with a eutectic mixture of local anesthetics (EMLA) cream before, during and/or after the tissue may be subjected to a device which may increase permeability. Katz et al. (Anesth Analg (2004); 98:371-76; herein incorporated by reference in its entirety) showed that using the EMLA cream in combination with a low energy, an onset of superficial cutaneous analgesia was seen as fast as 5 minutes after a pretreatment with a low energy ultrasound.

[0755] In one embodiment, enhancers may be applied to the tissue before, during, and/or after the tissue has been treated to increase permeability. Enhancers include, but are not limited to, transport enhancers, physical enhancers, and cavitation enhancers. Non-limiting examples of enhancers are described in U.S. Pat. No. 6,190,315, herein incorporated by reference in its entirety.

[0756] In one embodiment, a device may be used to increase permeability of tissue before delivering formulations of modified mRNA described herein, which may further contain a substance that invokes an immune response. In another non-limiting example, a formulation containing a substance to invoke an immune response may be delivered by the methods described in U.S. Publication Nos. 20040171980 and 20040236268; each of which are herein incorporated by reference in their entireties.

[0757] Dosage forms for topical and/or transdermal administration of a composition may include ointments, pastes, creams, lotions, gels, powders, solutions, sprays, inhalants and/or patches. Generally, an active ingredient is admixed under sterile conditions with a pharmaceutically acceptable excipient and/or any needed preservatives and/or buffers as may be required.

[0758] Additionally, the present invention contemplates the use of transdermal patches, which often have the added advantage of providing controlled delivery of a compound to the body. Such dosage forms may be prepared, for example, by dissolving and/or dispensing the compound in the proper medium. Alternatively or additionally, rate may be controlled by either providing a rate controlling membrane and/or by dispersing the compound in a polymer matrix and/or gel.

[0759] Formulations suitable for topical administration include, but are not limited to, liquid and/or semi liquid preparations such as liniments, lotions, oil in water and/or water in oil emulsions such as creams, ointments and/or pastes, and/or solutions and/or suspensions.

[0760] Topically-administrable formulations may, for example, comprise from about 0.1% to about 10% (w/w) active ingredient, although the concentration of active ingredient may be as high as the solubility limit of the active ingredient in the solvent. Formulations for topical administration may further comprise one or more of the additional ingredients described herein.

### Depot Administration

[0761] As described herein, in some embodiments, the composition is formulated in depots for extended release. Generally, a specific organ or tissue (a “target tissue”) is targeted for administration.

[0762] In some aspects of the invention, the polynucleotides, primary constructs or mmRNA are spatially retained within or proximal to a target tissue. Provided are method of providing a composition to a target tissue of a mammalian subject by contacting the target tissue (which contains one or more target cells) with the composition under conditions such that the composition, in particular the nucleic acid component(s) of the composition, is substantially retained in the target tissue, meaning that at least 10, 20, 30, 40, 50, 60, 70, 80, 85, 90, 95, 96, 97, 98, 99, 99.9, 99.99 or greater than 99.99% of the composition is retained in the target tissue. Advantageously, retention is determined by measuring the amount of the nucleic acid present in the composition that enters one or more target cells. For example, at least 1, 5, 10, 20, 30, 40, 50, 60, 70, 80, 85, 90, 95, 96, 97, 98, 99, 99.9, 99.99 or greater than 99.99% of the nucleic acids administered to the subject are present intracellularly at a period of time following administration. For example, intramuscular injection to a mammalian subject is performed using an aqueous composition containing a ribonucleic acid and a transfection reagent, and retention of the composition is determined by measuring the amount of the ribonucleic acid present in the muscle cells.

[0763] Aspects of the invention are directed to methods of providing a composition to a target tissue of a mammalian subject, by contacting the target tissue (containing one or more target cells) with the composition under conditions such that the composition is substantially retained in the target tissue. The composition contains an effective amount of a polynucleotides, primary constructs or mmRNA such that the polypeptide of interest is produced in at least one target cell. The compositions generally contain a cell penetration agent, although “naked” nucleic acid (such as nucleic acids without a cell penetration agent or other agent) is also contemplated, and a pharmaceutically acceptable carrier.

[0764] In some circumstances, the amount of a protein produced by cells in a tissue is desirably increased. Preferably, this increase in protein production is spatially restricted to cells within the target tissue. Thus, provided are methods of increasing production of a protein of interest in a tissue of a mammalian subject. A composition is provided that contains polynucleotides, primary constructs or mmRNA characterized in that a unit quantity of composition has been determined to produce the polypeptide of interest in a substantial percentage of cells contained within a predetermined volume of the target tissue.

[0765] In some embodiments, the composition includes a plurality of different polynucleotides, primary constructs or mmRNA, where one or more than one of the polynucleotides, primary constructs or mmRNA encodes a polypeptide of interest. Optionally, the composition also contains a cell penetration agent to assist in the intracellular delivery of the composition. A determination is made of the dose of the composition required to produce the polypeptide of interest in a substantial percentage of cells contained within the predetermined volume of the target tissue (generally, without inducing significant production of the polypeptide of interest in tissue adjacent to the predetermined volume, or distally to the target tissue). Subsequent to this determination, the determined dose is introduced directly into the tissue of the mammalian subject.

[0766] In one embodiment, the invention provides for the polynucleotides, primary constructs or mmRNA to be delivered in more than one injection or by split dose injections.

[0767] In one embodiment, the invention may be retained near target tissue using a small disposable drug reservoir, patch pump or osmotic pump. Non-limiting examples of patch pumps include those manufactured and/or sold by BD® (Franklin Lakes, NJ), Insulet Corporation (Bedford, MA), SteadyMed Therapeutics (San Francisco, CA), Medtronic (Minneapolis, MN) (e.g., MiniMed), UniLife (York, PA), Valeritas (Bridgewater, NJ), and SpringLeaf Therapeutics (Boston, MA). A non-limiting example of an osmotic pump include those manufactured by DURECT® (Cupertino, CA) (e.g., DUROS® and ALZET®).

### Pulmonary Administration

[0768] A pharmaceutical composition may be prepared, packaged, and/or sold in a formulation suitable for pulmonary administration via the buccal cavity. Such a formulation may comprise dry particles which comprise the active ingredient and which have a diameter in the range from about 0.5 nm to about 7 nm or from about 1 nm to about 6 nm. Such compositions are suitably in the form of dry powders for administration using a device comprising a dry powder reservoir to which a stream of propellant may be directed to disperse the powder and/or using a self propelling solvent/powder dispensing container such as a device comprising the active ingredient dissolved and/or suspended in a low-boiling propellant in a sealed container. Such powders comprise particles wherein at least 98% of the particles by weight have a diameter greater than 0.5 nm and at least 95% of the particles by number have a diameter less than 7 nm. Alternatively, at least 95% of the particles by weight have a diameter greater than 1 nm and at least 90% of the particles by number have a diameter less than 6 nm. Dry powder compositions may include a solid fine powder diluent such as sugar and are conveniently provided in a unit dose form.

[0769] Low boiling propellants generally include liquid propellants having a boiling point of below 65° F. at atmospheric pressure. Generally the propellant may constitute 50% to 99.9% (w/w) of the composition, and active ingredient may constitute 0.1% to 20% (w/w) of the composition. A propellant may further comprise additional ingredients such as a liquid non-ionic and/or solid anionic surfactant and/or a solid diluent (which may have a particle size of the same order as particles comprising the active ingredient).

[0770] As a non-limiting example, the polynucleotides, primary constructs and/or mmRNA described herein may be formulated for pulmonary delivery by the methods described in U.S. Pat. No. 8,257,685; herein incorporated by reference in its entirety.

[0771] Pharmaceutical compositions formulated for pulmonary delivery may provide an active ingredient in the form of droplets of a solution and/or suspension. Such formulations may be prepared, packaged, and/or sold as aqueous and/or dilute alcoholic solutions and/or suspensions, optionally sterile, comprising active ingredient, and may conveniently be administered using any nebulization and/or atomization device. Such formulations may further comprise one or more additional ingredients including, but not limited to, a flavoring agent such as saccharin sodium, a volatile oil, a buffering agent, a surface active agent, and/or a preservative such as methylhydroxybenzoate. Droplets provided by this route of administration may have an average diameter in the range from about 0.1 nm to about 200 nm.

### Intranasal, Nasal and Buccal Administration

[0772] Formulations described herein as being useful for pulmonary delivery are useful for intranasal delivery of a pharmaceutical composition. Another formulation suitable for intranasal administration is a coarse powder comprising the active ingredient and having an average particle from about 0.2 μm to 500 μm. Such a formulation is administered in the manner in which snuff is taken, i.e. by rapid inhalation through the nasal passage from a container of the powder held close to the nose.

[0773] Formulations suitable for nasal administration may, for example, comprise from about as little as 0.1% (w/w) and as much as 100% (w/w) of active ingredient, and may comprise one or more of the additional ingredients described herein. A pharmaceutical composition may be prepared, packaged, and/or sold in a formulation suitable for buccal administration. Such formulations may, for example, be in the form of tablets and/or lozenges made using conventional methods, and may, for example, 0.1% to 20% (w/w) active ingredient, the balance comprising an orally dissolvable and/or degradable composition and, optionally, one or more of the additional ingredients described herein. Alternately, formulations suitable for buccal administration may comprise a powder and/or an aerosolized and/or atomized solution and/or suspension comprising active ingredient. Such powdered, aerosolized, and/or aerosolized formulations, when dispersed, may have an average particle and/or droplet size in the range from about 0.1 nm to about 200 nm, and may further comprise one or more of any additional ingredients described herein.

### Ophthalmic Administration

[0774] A pharmaceutical composition may be prepared, packaged, and/or sold in a formulation suitable for ophthalmic administration. Such formulations may, for example, be in the form of eye drops including, for example, a 0.1/1.0% (w/w) solution and/or suspension of the active ingredient in an aqueous or oily liquid excipient. Such drops may further comprise buffering agents, salts, and/or one or more other of any additional ingredients described herein. Other ophthalmically-administrable formulations which are useful include those which comprise the active ingredient in microcrystalline form and/or in a liposomal preparation. Ear drops and/or eye drops are contemplated as being within the scope of this invention. A multilayer thin film device may be prepared to contain a pharmaceutical composition for delivery to the eye and/or surrounding tissue.

### Payload Administration: Detectable Agents and Therapeutic Agents

[0775] The polynucleotides, primary constructs or mmRNA described herein can be used in a number of different scenarios in which delivery of a substance (the “payload”) to a biological target is desired, for example delivery of detectable substances for detection of the target, or delivery of a therapeutic agent. Detection methods can include, but are not limited to, both imaging in vitro and in vivo imaging methods, e.g., immunohistochemistry, bioluminescence imaging (BLI), Magnetic Resonance Imaging (MRI), positron emission tomography (PET), electron microscopy, X-ray computed tomography, Raman imaging, optical coherence tomography, absorption imaging, thermal imaging, fluorescence reflectance imaging, fluorescence microscopy, fluorescence molecular tomographic imaging, nuclear magnetic resonance imaging, X-ray imaging, ultrasound imaging, photoacoustic imaging, lab assays, or in any situation where tagging/staining/imaging is required.

[0776] The polynucleotides, primary constructs or mmRNA can be designed to include both a linker and a payload in any useful orientation. For example, a linker having two ends is used to attach one end to the payload and the other end to the nucleobase, such as at the C-7 or C-8 positions of the deaza-adenosine or deaza-guanosine or to the N-3 or C-5 positions of cytosine or uracil. The polynucleotide of the invention can include more than one payload (e.g., a label and a transcription inhibitor), as well as a cleavable linker. In one embodiment, the modified nucleotide is a modified 7-deaza-adenosine triphosphate, where one end of a cleavable linker is attached to the C7 position of 7-deaza-adenine, the other end of the linker is attached to an inhibitor (e.g., to the C5 position of the nucleobase on a cytidine), and a label (e.g., Cy5) is attached to the center of the linker (see, e.g., compound 1 of A*pCp C5 Parg Capless in FIG. 5 and columns 9 and 10 of U.S. Pat. No. 7,994,304, incorporated herein by reference). Upon incorporation of the modified 7-deaza-adenosine triphosphate to an encoding region, the resulting polynucleotide having a cleavable linker attached to a label and an inhibitor (e.g., a polymerase inhibitor). Upon cleavage of the linker (e.g., with reductive conditions to reduce a linker having a cleavable disulfide moiety), the label and inhibitor are released. Additional linkers and payloads (e.g., therapeutic agents, detectable labels, and cell penetrating payloads) are described herein.

[0777] Scheme 12 below depicts an exemplary modified nucleotide wherein the nucleobase, adenine, is attached to a linker at the C-7 carbon of 7-deaza adenine. In addition, Scheme 12 depicts the modified nucleotide with the linker and payload, e.g., a detectable agent, incorporated onto the 3′ end of the mRNA. Disulfide cleavage and 1,2-addition of the thiol group onto the propargyl ester releases the detectable agent. The remaining structure (depicted, for example, as pApC5Parg in Scheme 12) is the inhibitor. The rationale for the structure of the modified nucleotides is that the tethered inhibitor sterically interferes with the ability of the polymerase to incorporate a second base. Thus, it is critical that the tether be long enough to affect this function and that the inhibiter be in a stereochemical orientation that inhibits or prohibits second and follow on nucleotides into the growing polynucleotide strand.

[chemical structure]

[chemical structure]

[0778] For example, the polynucleotides, primary constructs or mmRNA described herein can be used in reprogramming induced pluripotent stem cells (iPS cells), which can directly track cells that are transfected compared to total cells in the cluster. In another example, a drug that may be attached to the polynucleotides, primary constructs or mmRNA via a linker and may be fluorescently labeled can be used to track the drug in vivo, e.g. intracellularly. Other examples include, but are not limited to, the use of a polynucleotides, primary constructs or mmRNA in reversible drug delivery into cells.

[0779] The polynucleotides, primary constructs or mmRNA described herein can be used in intracellular targeting of a payload, e.g., detectable or therapeutic agent, to specific organelle. Exemplary intracellular targets can include, but are not limited to, the nuclear localization for advanced mRNA processing, or a nuclear localization sequence (NLS) linked to the mRNA containing an inhibitor.

[0780] In addition, the polynucleotides, primary constructs or mmRNA described herein can be used to deliver therapeutic agents to cells or tissues, e.g., in living animals. For example, the polynucleotides, primary constructs or mmRNA described herein can be used to deliver highly polar chemotherapeutics agents to kill cancer cells. The polynucleotides, primary constructs or mmRNA attached to the therapeutic agent through a linker can facilitate member permeation allowing the therapeutic agent to travel into a cell to reach an intracellular target.

[0781] In one example, the linker is attached at the 2′-position of the ribose ring and/or at the 3′ and/or 5′ position of the polynucleotides, primary constructs mmRNA (See e.g., International Pub. No. WO2012030683, herein incorporated by reference in its entirety). The linker may be any linker disclosed herein, known in the art and/or disclosed in International Pub. No. WO2012030683, herein incorporated by reference in its entirety.

[0782] In another example, the polynucleotides, primary constructs or mmRNA can be attached to the polynucleotides, primary constructs or mmRNA a viral inhibitory peptide (VIP) through a cleavable linker. The cleavable linker can release the VIP and dye into the cell. In another example, the polynucleotides, primary constructs or mmRNA can be attached through the linker to an ADP-ribosylate, which is responsible for the actions of some bacterial toxins, such as cholera toxin, diphtheria toxin, and pertussis toxin. These toxin proteins are ADP-ribosyltransferases that modify target proteins in human cells. For example, cholera toxin ADP-ribosylates G proteins modifies human cells by causing massive fluid secretion from the lining of the small intestine, which results in life-threatening diarrhea.

[0783] In some embodiments, the payload may be a therapeutic agent such as a cytotoxin, radioactive ion, chemotherapeutic, or other therapeutic agent. A cytotoxin or cytotoxic agent includes any agent that may be detrimental to cells. Examples include, but are not limited to, taxol, cytochalasin B, gramicidin D, ethidium bromide, emetine, mitomycin, etoposide, teniposide, vincristine, vinblastine, colchicine, doxorubicin, daunorubicin, dihydroxyanthracinedione, mitoxantrone, mithramycin, actinomycin D, 1-dehydrotestosterone, glucocorticoids, procaine, tetracaine, lidocaine, propranolol, puromycin, maytansinoids, e.g., maytansinol (see U.S. Pat. No. 5,208,020 incorporated herein in its entirety), rachelmycin (CC-1065, see U.S. Pat. Nos. 5,475,092, 5,585,499, and 5,846,545, all of which are incorporated herein by reference), and analogs or homologs thereof. Radioactive ions include, but are not limited to iodine (e.g., iodine 125 or iodine 131), strontium 89, phosphorous, palladium, cesium, iridium, phosphate, cobalt, yttrium 90, samarium 153, and praseodymium. Other therapeutic agents include, but are not limited to, antimetabolites (e.g., methotrexate, 6-mercaptopurine, 6-thioguanine, cytarabine, 5-fluorouracil decarbazine), alkylating agents (e.g., mechlorethamine, thiotepa chlorambucil, rachelmycin (CC-1065), melphalan, carmustine (BSNU), lomustine (CCNU), cyclophosphamide, busulfan, dibromomannitol, streptozotocin, mitomycin C, and cis-dichlorodiamine platinum (II) (DDP) cisplatin), anthracyclines (e.g., daunorubicin (formerly daunomycin) and doxorubicin), antibiotics (e.g., dactinomycin (formerly actinomycin), bleomycin, mithramycin, and anthramycin (AMC)), and anti-mitotic agents (e.g., vincristine, vinblastine, taxol and maytansinoids).

[0784] In some embodiments, the payload may be a detectable agent, such as various organic small molecules, inorganic compounds, nanoparticles, enzymes or enzyme substrates, fluorescent materials, luminescent materials (e.g., luminol), bioluminescent materials (e.g., luciferase, luciferin, and aequorin), chemiluminescent materials, radioactive materials (e.g., ¹⁸F, ⁶⁷Ga, ^{81m}Kr, ⁸²Rb, ¹¹¹In, ¹²³I, ¹³³Xe, ²⁰¹Tl, ¹²⁵I, ³S, ¹⁴C, ³H, or ^{99m}Tc (e.g., as pertechnetate (technetate(VII), TcO₄⁻)), and contrast agents (e.g., gold (e.g., gold nanoparticles), gadolinium (e.g., chelated Gd), iron oxides (e.g., superparamagnetic iron oxide (SPIO), monocrystalline iron oxide nanoparticles (MIONs), and ultrasmall superparamagnetic iron oxide (USPIO)), manganese chelates (e.g., Mn-DPDP), barium sulfate, iodinated contrast media (iohexol), microbubbles, or perfluorocarbons). Such optically-detectable labels include for example, without limitation, 4-acetamido-4′-isothiocyanatostilbene-2,2′disulfonic acid; acridine and derivatives (e.g., acridine and acridine isothiocyanate); 5-(2′-aminoethyl)aminonaphthalene-1-sulfonic acid (EDANS); 4-amino-N-[3-vinylsulfonyl)phenyl]naphthalimide-3,5 disulfonate; N-(4-anilino-1-naphthyl)maleimide; anthranilamide; BODIPY; Brilliant Yellow; coumarin and derivatives (e.g., coumarin, 7-amino-4-methylcoumarin (AMC, Coumarin 120), and 7-amino-4-trifluoromethylcoumarin (Coumarin 151)); cyanine dyes; cyanosine; 4′,6-diaminidino-2-phenylindole (DAPI); 5′ 5″-dibromopyrogallol-sulfonaphthalein (Bromopyrogallol Red); 7-diethylamino-3-(4′-isothiocyanatophenyl)-4-methylcoumarin; diethylenetriamine pentaacetate; 4,4′-diisothiocyanatodihydro-stilbene-2,2′-disulfonic acid; 4,4′-diisothiocyanatostilbene-2,2′-disulfonic acid; 5-[dimethylamino]-naphthalene-1-sulfonyl chloride (DNS, dansylchloride); 4-dimethylaminophenylazophenyl-4′-isothiocyanate (DABITC); eosin and derivatives (e.g., eosin and eosin isothiocyanate); erythrosin and derivatives (e.g., erythrosin B and erythrosin isothiocyanate); ethidium; fluorescein and derivatives (e.g., 5-carboxyfluorescein (FAM), 5-(4,6-dichlorotriazin-2-yl)aminofluorescein (DTAF), 2′,7′-dimethoxy-4′5′-dichloro-6-carboxyfluorescein, fluorescein, fluorescein isothiocyanate, X-rhodamine-5-(and-6)-isothiocyanate (QFITC or XRITC), and fluorescamine); 2-[2-[3-[[1,3-dihydro-1,1-dimethyl-3-(3-sulfopropyl)-2H-benz[e]indol-2-ylidene]ethylidene]-2-[4-(ethoxycarbonyl)-1-piperazinyl]-1-cyclopenten-1-yl]ethenyl]-1,1-dimethyl-3-(3-sulforpropyl)-1H-benz[e]indolium hydroxide, inner salt, compound with n,n-diethylethanamine(1:1) (IR144); 5-chloro-2-[2-[3-[(5-chloro-3-ethyl-2(3H)-benzothiazol-ylidene)ethylidene]-2-(diphenylamino)-1-cyclopenten-1-yl]ethenyl]-3-ethyl benzothiazolium perchlorate (IR140); Malachite Green isothiocyanate; 4-methylumbelliferone orthocresolphthalein; nitrotyrosine; pararosaniline; Phenol Red; B-phycoerythrin; o-phthaldialdehyde; pyrene and derivatives(e.g., pyrene, pyrene butyrate, and succinimidyl 1-pyrene); butyrate quantum dots; Reactive Red 4 (CIBACRON™ Brilliant Red 3B-A); rhodamine and derivatives (e.g., 6-carboxy-X-rhodamine (ROX), 6-carboxyrhodamine (R6G), lissamine rhodamine B sulfonyl chloride rhodarnine (Rhod), rhodamine B, rhodamine 123, rhodamine X isothiocyanate, sulforhodamine B, sulforhodamine 101, sulfonyl chloride derivative of sulforhodamine 101 (Texas Red), N,N,N′,N′tetramethyl-6-carboxyrhodamine (TAMRA) tetramethyl rhodamine, and tetramethyl rhodamine isothiocyanate (TRITC)); riboflavin; rosolic acid; terbium chelate derivatives; Cyanine-3 (Cy3); Cyanine-5 (Cy5); cyanine-5.5 (Cy5.5), Cyanine-7 (Cy7); TRD 700; IRD 800; Alexa 647; La Jolta Blue; phthalo cyanine; and naphthalo cyanine.

[0785] In some embodiments, the detectable agent may be a non-detectable precursor that becomes detectable upon activation (e.g., fluorogenic tetrazine-fluorophore constructs (e.g., tetrazine-BODIPY FL, tetrazine-Oregon Green 488, or tetrazine-BODIPY TMR-X) or enzyme activatable fluorogenic agents (e.g., PROSENSE® (VisEn Medical))). In vitro assays in which the enzyme labeled compositions can be used include, but are not limited to, enzyme linked immunosorbent assays (ELISAs), immunoprecipitation assays, immunofluorescence, enzyme immunoassays (EIA), radioimmunoassays (RIA), and Western blot analysis.

### Combinations

[0786] The polynucleotides, primary constructs or mmRNA may be used in combination with one or more other therapeutic, prophylactic, diagnostic, or imaging agents. By “in combination with,” it is not intended to imply that the agents must be administered at the same time and/or formulated for delivery together, although these methods of delivery are within the scope of the present disclosure. Compositions can be administered concurrently with, prior to, or subsequent to, one or more other desired therapeutics or medical procedures. In general, each agent will be administered at a dose and/or on a time schedule determined for that agent. In some embodiments, the present disclosure encompasses the delivery of pharmaceutical, prophylactic, diagnostic, or imaging compositions in combination with agents that may improve their bioavailability, reduce and/or modify their metabolism, inhibit their excretion, and/or modify their distribution within the body. As a non-limiting example, the nucleic acids or mmRNA may be used in combination with a pharmaceutical agent for the treatment of cancer or to control hyperproliferative cells. In U.S. Pat. No. 7,964,571, herein incorporated by reference in its entirety, a combination therapy for the treatment of solid primary or metastasized tumor is described using a pharmaceutical composition including a DNA plasmid encoding for interleukin-12 with a lipopolymer and also administering at least one anticancer agent or chemotherapeutic. Further, the nucleic acids and mmRNA of the present invention that encodes anti-proliferative molecules may be in a pharmaceutical composition with a lipopolymer (see e.g., U.S. Pub. No. 20110218231, herein incorporated by reference in its entirety, claiming a pharmaceutical composition comprising a DNA plasmid encoding an anti-proliferative molecule and a lipopolymer) which may be administered with at least one chemotherapeutic or anticancer agent.

[0787] It will further be appreciated that therapeutically, prophylactically, diagnostically, or imaging active agents utilized in combination may be administered together in a single composition or administered separately in different compositions. In general, it is expected that agents utilized in combination with be utilized at levels that do not exceed the levels at which they are utilized individually. In some embodiments, the levels utilized in combination will be lower than those utilized individually. In one embodiment, the combinations, each or together may be administered according to the split dosing regimens described herein.

### Dosing

[0788] The present invention provides methods comprising administering modified mRNAs and their encoded proteins or complexes in accordance with the invention to a subject in need thereof. Nucleic acids, proteins or complexes, or pharmaceutical, imaging, diagnostic, or prophylactic compositions thereof, may be administered to a subject using any amount and any route of administration effective for preventing, treating, diagnosing, or imaging a disease, disorder, and/or condition (e.g., a disease, disorder, and/or condition relating to working memory deficits). The exact amount required will vary from subject to subject, depending on the species, age, and general condition of the subject, the severity of the disease, the particular composition, its mode of administration, its mode of activity, and the like. Compositions in accordance with the invention are typically formulated in dosage unit form for ease of administration and uniformity of dosage. It will be understood, however, that the total daily usage of the compositions of the present invention may be decided by the attending physician within the scope of sound medical judgment. The specific therapeutically effective, prophylactically effective, or appropriate imaging dose level for any particular patient will depend upon a variety of factors including the disorder being treated and the severity of the disorder; the activity of the specific compound employed; the specific composition employed; the age, body weight, general health, sex and diet of the patient; the time of administration, route of administration, and rate of excretion of the specific compound employed; the duration of the treatment; drugs used in combination or coincidental with the specific compound employed; and like factors well known in the medical arts.

[0789] In certain embodiments, compositions in accordance with the present invention may be administered at dosage levels sufficient to deliver from about 0.0001 mg/kg to about 100 mg/kg, from about 0.001 mg/kg to about 0.05 mg/kg, from about 0.005 mg/kg to about 0.05 mg/kg, from about 0.001 mg/kg to about 0.005 mg/kg, from about 0.05 mg/kg to about 0.5 mg/kg, from about 0.01 mg/kg to about 50 mg/kg, from about 0.1 mg/kg to about 40 mg/kg, from about 0.5 mg/kg to about 30 mg/kg, from about 0.01 mg/kg to about 10 mg/kg, from about 0.1 mg/kg to about 10 mg/kg, or from about 1 mg/kg to about 25 mg/kg, of subject body weight per day, one or more times a day, to obtain the desired therapeutic, diagnostic, prophylactic, or imaging effect. The desired dosage may be delivered three times a day, two times a day, once a day, every other day, every third day, every week, every two weeks, every three weeks, or every four weeks. In certain embodiments, the desired dosage may be delivered using multiple administrations (e.g., two, three, four, five, six, seven, eight, nine, ten, eleven, twelve, thirteen, fourteen, or more administrations). When multiple administrations are employed, split dosing regimens such as those described herein may be used.

[0790] According to the present invention, it has been discovered that administration of mmRNA in split-dose regimens produce higher levels of proteins in mammalian subjects. As used herein, a “split dose” is the division of single unit dose or total daily dose into two or more doses, e.g, two or more administrations of the single unit dose. As used herein, a “single unit dose” is a dose of any therapeutic administed in one dose/at one time/single route/single point of contact, i.e., single administration event. As used herein, a “total daily dose” is an amount given or prescribed in 24 hr period. It may be administered as a single unit dose. In one embodiment, the mmRNA of the present invention are administed to a subject in split doses. The mmRNA may be formulated in buffer only or in a formulation described herein.

### Dosage Forms

[0791] A pharmaceutical composition described herein can be formulated into a dosage form described herein, such as a topical, intranasal, intratracheal, or injectable (e.g., intravenous, intraocular, intravitreal, intramuscular, intracardiac, intraperitoneal, subcutaneous).

### Liquid Dosage Forms

[0792] Liquid dosage forms for parenteral administration include, but are not limited to, pharmaceutically acceptable emulsions, microemulsions, solutions, suspensions, syrups, and/or elixirs. In addition to active ingredients, liquid dosage forms may comprise inert diluents commonly used in the art including, but not limited to, water or other solvents, solubilizing agents and emulsifiers such as ethyl alcohol, isopropyl alcohol, ethyl carbonate, ethyl acetate, benzyl alcohol, benzyl benzoate, propylene glycol, 1,3-butylene glycol, dimethylformamide, oils (in particular, cottonseed, groundnut, corn, germ, olive, castor, and sesame oils), glycerol, tetrahydrofurfuryl alcohol, polyethylene glycols and fatty acid esters of sorbitan, and mixtures thereof. In certain embodiments for parenteral administration, compositions may be mixed with solubilizing agents such as CREMOPHOR®, alcohols, oils, modified oils, glycols, polysorbates, cyclodextrins, polymers, and/or combinations thereof.

### Injectable

[0793] Injectable preparations, for example, sterile injectable aqueous or oleaginous suspensions may be formulated according to the known art and may include suitable dispersing agents, wetting agents, and/or suspending agents. Sterile injectable preparations may be sterile injectable solutions, suspensions, and/or emulsions in nontoxic parenterally acceptable diluents and/or solvents, for example, a solution in 1,3-butanediol. Among the acceptable vehicles and solvents that may be employed include, but are not limited to, water, Ringer's solution, U.S.P., and isotonic sodium chloride solution. Sterile, fixed oils are conventionally employed as a solvent or suspending medium. For this purpose any bland fixed oil can be employed including synthetic mono- or diglycerides. Fatty acids such as oleic acid can be used in the preparation of injectables.

[0794] Injectable formulations can be sterilized, for example, by filtration through a bacterial-retaining filter, and/or by incorporating sterilizing agents in the form of sterile solid compositions which can be dissolved or dispersed in sterile water or other sterile injectable medium prior to use.

[0795] In order to prolong the effect of an active ingredient, it may be desirable to slow the absorption of the active ingredient from subcutaneous or intramuscular injection. This may be accomplished by the use of a liquid suspension of crystalline or amorphous material with poor water solubility. The rate of absorption of the polynucleotide, primary construct or mmRNA then depends upon its rate of dissolution which, in turn, may depend upon crystal size and crystalline form. Alternatively, delayed absorption of a parenterally administered polynucleotide, primary construct or mmRNA may be accomplished by dissolving or suspending the polynucleotide, primary construct or mmRNA in an oil vehicle. Injectable depot forms are made by forming microencapsule matrices of the polynucleotide, primary construct or mmRNA in biodegradable polymers such as polylactide-polyglycolide. Depending upon the ratio of polynucleotide, primary construct or mmRNA to polymer and the nature of the particular polymer employed, the rate of polynucleotide, primary construct or mmRNA release can be controlled. Examples of other biodegradable polymers include, but are not limited to, poly(orthoesters) and poly(anhydrides). Depot injectable formulations may be prepared by entrapping the polynucleotide, primary construct or mmRNA in liposomes or microemulsions which are compatible with body tissues.

### Pulmonary

[0796] Formulations described herein as being useful for pulmonary delivery may also be used for intranasal delivery of a pharmaceutical composition. Another formulation suitable for intranasal administration may be a coarse powder comprising the active ingredient and having an average particle from about 0.2 μm to 500 μm. Such a formulation may be administered in the manner in which snuff is taken, i.e. by rapid inhalation through the nasal passage from a container of the powder held close to the nose.

[0797] Formulations suitable for nasal administration may, for example, comprise from about as little as 0.1% (w/w) and as much as 100% (w/w) of active ingredient, and may comprise one or more of the additional ingredients described herein. A pharmaceutical composition may be prepared, packaged, and/or sold in a formulation suitable for buccal administration. Such formulations may, for example, be in the form of tablets and/or lozenges made using conventional methods, and may, for example, contain about 0.1% to 20% (w/w) active ingredient, where the balance may comprise an orally dissolvable and/or degradable composition and, optionally, one or more of the additional ingredients described herein. Alternately, formulations suitable for buccal administration may comprise a powder and/or an aerosolized and/or atomized solution and/or suspension comprising active ingredient. Such powdered, aerosolized, and/or aerosolized formulations, when dispersed, may have an average particle and/or droplet size in the range from about 0.1 nm to about 200 nm, and may further comprise one or more of any additional ingredients described herein.

[0798] General considerations in the formulation and/or manufacture of pharmaceutical agents may be found, for example, in Remington: The Science and Practice of Pharmacy 21^{st} ed., Lippincott Williams & Wilkins, 2005 (incorporated herein by reference in its entirety).

### Coatings or Shells

[0799] Solid dosage forms of tablets, dragees, capsules, pills, and granules can be prepared with coatings and shells such as enteric coatings and other coatings well known in the pharmaceutical formulating art. They may optionally comprise opacifying agents and can be of a composition that they release the active ingredient(s) only, or preferentially, in a certain part of the intestinal tract, optionally, in a delayed manner. Examples of embedding compositions which can be used include polymeric substances and waxes. Solid compositions of a similar type may be employed as fillers in soft and hard-filled gelatin capsules using such excipients as lactose or milk sugar as well as high molecular weight polyethylene glycols and the like.

### Properties of Pharmaceutical Compositions

[0800] The pharmaceutical compositions described herein can be characterized by one or more of bioavailability, therapeutic window and/or volume of distribution.

### Bioavailability

[0801] The polynucleotides, primary constructs or mmRNA, when formulated into a composition with a delivery agent as described herein, can exhibit an increase in bioavailability as compared to a composition lacking a delivery agent as described herein. As used herein, the term “bioavailability” refers to the systemic availability of a given amount of polynucleotides, primary constructs or mmRNA administered to a mammal. Bioavailability can be assessed by measuring the area under the curve (AUC) or the maximum serum or plasma concentration (Cₘₐₓ) of the unchanged form of a compound following administration of the compound to a mammal. AUC is a determination of the area under the curve plotting the serum or plasma concentration of a compound along the ordinate (Y-axis) against time along the abscissa (X-axis). Generally, the AUC for a particular compound can be calculated using methods known to those of ordinary skill in the art and as described in G. S. Banker, Modern Pharmaceutics, Drugs and the Pharmaceutical Sciences, v. 72, Marcel Dekker, New York, Inc., 1996, herein incorporated by reference in its entirety.

[0802] The Cₘₐₓ value is the maximum concentration of the compound achieved in the serum or plasma of a mammal following administration of the compound to the mammal. The Cₘₐₓ value of a particular compound can be measured using methods known to those of ordinary skill in the art. The phrases “increasing bioavailability” or “improving the pharmacokinetics,” as used herein mean that the systemic availability of a first polynucleotide, primary construct or mmRNA, measured as AUC, Cₘₐₓ, or Cₘᵢₙ in a mammal is greater, when co-administered with a delivery agent as described herein, than when such co-administration does not take place. In some embodiments, the bioavailability of the polynucleotide, primary construct or mmRNA can increase by at least about 2%, at least about 5%, at least about 10%, at least about 15%, at least about 20%, at least about 25%, at least about 30%, at least about 35%, at least about 40%, at least about 45%, at least about 50%, at least about 55%, at least about 60%, at least about 65%, at least about 70%, at least about 75%, at least about 80%, at least about 85%, at least about 90%, at least about 95%, or about 100%.

### Therapeutic Window

[0803] The polynucleotides, primary constructs or mmRNA, when formulated into a composition with a delivery agent as described herein, can exhibit an increase in the therapeutic window of the administered polynucleotide, primary construct or mmRNA composition as compared to the therapeutic window of the administered polynucleotide, primary construct or mmRNA composition lacking a delivery agent as described herein. As used herein “therapeutic window” refers to the range of plasma concentrations, or the range of levels of therapeutically active substance at the site of action, with a high probability of eliciting a therapeutic effect. In some embodiments, the therapeutic window of the polynucleotide, primary construct or mmRNA when co-administered with a delivery agent as described herein can increase by at least about 2%, at least about 5%, at least about 10%, at least about 15%, at least about 20%, at least about 25%, at least about 30%, at least about 35%, at least about 40%, at least about 45%, at least about 50%, at least about 55%, at least about 60%, at least about 65%, at least about 70%, at least about 75%, at least about 80%, at least about 85%, at least about 90%, at least about 95%, or about 100%.

### Volume of Distribution

[0804] The polynucleotides, primary constructs or mmRNA, when formulated into a composition with a delivery agent as described herein, can exhibit an improved volume of distribution (V_{dist}), e.g., reduced or targeted, relative to a composition lacking a delivery agent as described herein. The volume of distribution (V_{dist}) relates the amount of the drug in the body to the concentration of the drug in the blood or plasma. As used herein, the term “volume of distribution” refers to the fluid volume that would be required to contain the total amount of the drug in the body at the same concentration as in the blood or plasma: V_{dist} equals the amount of drug in the body/concentration of drug in blood or plasma. For example, for a 10 mg dose and a plasma concentration of 10 mg/L, the volume of distribution would be 1 liter. The volume of distribution reflects the extent to which the drug is present in the extravascular tissue. A large volume of distribution reflects the tendency of a compound to bind to the tissue components compared with plasma protein binding. In a clinical setting, V_{dist} can be used to determine a loading dose to achieve a steady state concentration. In some embodiments, the volume of distribution of the polynucleotide, primary construct or mmRNA when co-administered with a delivery agent as described herein can decrease at least about 2%, at least about 5%, at least about 10%, at least about 15%, at least about 20%, at least about 25%, at least about 30%, at least about 35%, at least about 40%, at least about 45%, at least about 50%, at least about 55%, at least about 60%, at least about 65%, at least about 70%.

### Biological Effect

[0805] In one embodiment, the biological effect of the modified mRNA delivered to the animals may be categorized by analyzing the protein expression in the animals. The protein expression may be determined from analyzing a biological sample collected from a mammal administered the modified mRNA of the present invention. In one embodiment, the expression protein encoded by the modified mRNA administered to the mammal of at least 50 pg/ml may be preferred. For example, a protein expression of 50-200 pg/ml for the protein encoded by the modified mRNA delivered to the mammal may be seen as a therapeutically effective amount of protein in the mammal.

### Detection of Modified Nucleic Acids by Mass Spectrometry

[0806] Mass spectrometry (MS) is an analytical technique that can provide structural and molecular mass/concentration information on molecules after their conversion to ions. The molecules are first ionized to acquire positive or negative charges and then they travel through the mass analyzer to arrive at different areas of the detector according to their mass/charge (m/z) ratio.

[0807] Mass spectrometry is performed using a mass spectrometer which includes an ion source for ionizing the fractionated sample and creating charged molecules for further analysis. For example ionization of the sample may be performed by electrospray ionization (ESI), atmospheric pressure chemical ionization (APCI), photoionization, electron ionization, fast atom bombardment (FAB)/liquid secondary ionization (LSIMS), matrix assisted laser desorption/ionization (MALDI), field ionization, field desorption, thermospray/plasmaspray ionization, and particle beam ionization. The skilled artisan will understand that the choice of ionization method can be determined based on the analyte to be measured, type of sample, the type of detector, the choice of positive versus negative mode, etc.

[0808] After the sample has been ionized, the positively charged or negatively charged ions thereby created may be analyzed to determine a mass-to-charge ratio (i.e., m/z). Suitable analyzers for determining mass-to-charge ratios include quadropole analyzers, ion traps analyzers, and time-of-flight analyzers. The ions may be detected using several detection modes. For example, selected ions may be detected (i.e., using a selective ion monitoring mode (SIM)), or alternatively, ions may be detected using a scanning mode, e.g., multiple reaction monitoring (MRM) or selected reaction monitoring (SRM).

[0809] Liquid chromatography-multiple reaction monitoring (LC-MS/MRM) coupled with stable isotope labeled dilution of peptide standards has been shown to be an effective method for protein verification (e.g., Keshishian et al., Mol Cell Proteomics 2009 8: 2339-2349; Kuhn et al., Clin Chem 2009 55:1108-1117; Lopez et al., Clin Chem 2010 56:281-290; each of which are herein incorporated by reference in its entirety). Unlike untargeted mass spectrometry frequently used in biomarker discovery studies, targeted MS methods are peptide sequence-based modes of MS that focus the full analytical capacity of the instrument on tens to hundreds of selected peptides in a complex mixture. By restricting detection and fragmentation to only those peptides derived from proteins of interest, sensitivity and reproducibility are improved dramatically compared to discovery-mode MS methods. This method of mass spectrometry-based multiple reaction monitoring (MRM) quantitation of proteins can dramatically impact the discovery and quantitation of biomarkers via rapid, targeted, multiplexed protein expression profiling of clinical samples.

[0810] In one embodiment, a biological sample which may contain at least one protein encoded by at least one modified mRNA of the present invention may be analyzed by the method of MRM-MS. The quantification of the biological sample may further include, but is not limited to, isotopically labeled peptides or proteins as internal standards.

[0811] According to the present invention, the biological sample, once obtained from the subject, may be subjected to enzyme digestion. As used herein, the term “digest” means to break apart into shorter peptides. As used herein, the phrase “treating a sample to digest proteins” means manipulating a sample in such a way as to break down proteins in a sample. These enzymes include, but are not limited to, trypsin, endoproteinase Glu-C and chymotrypsin. In one embodiment, a biological sample which may contain at least one protein encoded by at least one modified mRNA of the present invention may be digested using enzymes.

[0812] In one embodiment, a biological sample which may contain protein encoded by modified mRNA of the present invention may be analyzed for protein using electrospray ionization. Electrospray ionization (ESI) mass spectrometry (ESIMS) uses electrical energy to aid in the transfer of ions from the solution to the gaseous phase before they are analyzed by mass spectrometry. Samples may be analyzed using methods known in the art (e.g., Ho et al., Clin Biochem Rev. 2003 24(1):3-12; herein incorporated by reference in its entirety). The ionic species contained in solution may be transferred into the gas phase by dispersing a fine spray of charge droplets, evaporating the solvent and ejecting the ions from the charged droplets to generate a mist of highly charged droplets. The mist of highly charged droplets may be analyzed using at least 1, at least 2, at least 3 or at least 4 mass analyzers such as, but not limited to, a quadropole mass analyzer. Further, the mass spectrometry method may include a purification step. As a non-limiting example, the first quadrapole may be set to select a single m/z ratio so it may filter out other molecular ions having a different m/z ratio which may eliminate complicated and time-consuming sample purification procedures prior to MS analysis.

[0813] In one embodiment, a biological sample which may contain protein encoded by modified mRNA of the present invention may be analyzed for protein in a tandem ESIMS system (e.g., MS/MS). As non-limiting examples, the droplets may be analyzed using a product scan (or daughter scan) a precursor scan (parent scan) a neutral loss or a multiple reaction monitoring.

[0814] In one embodiment, a biological sample which may contain protein encoded by modified mRNA of the present invention may be analyzed using matrix-assisted laser desorption/ionization (MALDI) mass spectrometry (MALDIMS). MALDI provides for the nondestructive vaporization and ionization of both large and small molecules, such as proteins. In MALDI analysis, the analyte is first co-crystallized with a large molar excess of a matrix compound, which may also include, but is not limited to, an ultraviolet absorbing weak organic acid. Non-limiting examples of matrices used in MALDI are α-cyano-4-hydroxycinnamic acid, 3,5-dimethoxy-4-hydroxycinnamic acid and 2,5-dihydroxybenzoic acid. Laser radiation of the analyte-matrix mixture may result in the vaporization of the matrix and the analyte. The laser induced desorption provides high ion yields of the intact analyte and allows for measurement of compounds with high accuracy. Samples may be analyzed using methods known in the art (e.g., Lewis, Wei and Siuzdak, Encyclopedia of Analytical Chemistry 2000:5880-5894; herein incorporated by reference in its entirety). As non-limiting examples, mass analyzers used in the MALDI analysis may include a linear time-of-flight (TOF), a TOF reflectron or a Fourier transform mass analyzer.

[0815] In one embodiment, the analyte-matrix mixture may be formed using the dried-droplet method. A biologic sample is mixed with a matrix to create a saturated matrix solution where the matrix-to-sample ratio is approximately 5000:1. An aliquot (approximately 0.5-2.0 uL) of the saturated matrix solution is then allowed to dry to form the analyte-matrix mixture.

[0816] In one embodiment, the analyte-matrix mixture may be formed using the thin-layer method. A matrix homogeneous film is first formed and then the sample is then applied and may be absorbed by the matrix to form the analyte-matrix mixture.

[0817] In one embodiment, the analyte-matrix mixture may be formed using the thick-layer method. A matrix homogeneous film is formed with a nitro-cellulose matrix additive. Once the uniform nitro-cellulose matrix layer is obtained the sample is applied and absorbed into the matrix to form the analyte-matrix mixture.

[0818] In one embodiment, the analyte-matrix mixture may be formed using the sandwich method. A thin layer of matrix crystals is prepared as in the thin-layer method followed by the addition of droplets of aqueous trifluoroacetic acid, the sample and matrix. The sample is then absorbed into the matrix to form the analyte-matrix mixture.

### V. Uses of Polynucleotides, Primary Constructs and mmRNA of the Invention

[0819] The polynucleotides, primary constructs and mmRNA of the present invention are designed, in preferred embodiments, to provide for avoidance or evasion of deleterious bio-responses such as the immune response and/or degradation pathways, overcoming the threshold of expression and/or improving protein production capacity, improved expression rates or translation efficiency, improved drug or protein half life and/or protein concentrations, optimized protein localization, to improve one or more of the stability and/or clearance in tissues, receptor uptake and/or kinetics, cellular access by the compositions, engagement with translational machinery, secretion efficiency (when applicable), accessibility to circulation, and/or modulation of a cell's status, function and/or activity.

### Therapeutics

### Therapeutic Agents

[0820] The polynucleotides, primary constructs or mmRNA of the present invention, such as modified nucleic acids and modified RNAs, and the proteins translated from them described herein can be used as therapeutic or prophylactic agents. They are provided for use in medicine. For example, a polynucleotide, primary construct or mmRNA described herein can be administered to a subject, wherein the polynucleotide, primary construct or mmRNA is translated in vivo to produce a therapeutic or prophylactic polypeptide in the subject. Provided are compositions, methods, kits, and reagents for diagnosis, treatment or prevention of a disease or condition in humans and other mammals. The active therapeutic agents of the invention include polynucleotides, primary constructs or mmRNA, cells containing polynucleotides, primary constructs or mmRNA or polypeptides translated from the polynucleotides, primary constructs or mmRNA.

[0821] In certain embodiments, provided herein are combination therapeutics containing one or more polynucleotide, primary construct or mmRNA containing translatable regions that encode for a protein or proteins that boost a mammalian subject's immunity along with a protein that induces antibody-dependent cellular toxicity. For example, provided herein are therapeutics containing one or more nucleic acids that encode trastuzumab and granulocyte-colony stimulating factor (G-CSF). In particular, such combination therapeutics are useful in Her2+ breast cancer patients who develop induced resistance to trastuzumab. (See, e.g., Albrecht, Immunotherapy. 2(6):795-8 (2010)).

[0822] Provided herein are methods of inducing translation of a recombinant polypeptide in a cell population using the polynucleotide, primary construct or mmRNA described herein. Such translation can be in vivo, ex vivo, in culture, or in vitro. The cell population is contacted with an effective amount of a composition containing a nucleic acid that has at least one nucleoside modification, and a translatable region encoding the recombinant polypeptide. The population is contacted under conditions such that the nucleic acid is localized into one or more cells of the cell population and the recombinant polypeptide is translated in the cell from the nucleic acid.

[0823] An “effective amount” of the composition is provided based, at least in part, on the target tissue, target cell type, means of administration, physical characteristics of the nucleic acid (e.g., size, and extent of modified nucleosides), and other determinants. In general, an effective amount of the composition provides efficient protein production in the cell, preferably more efficient than a composition containing a corresponding unmodified nucleic acid. Increased efficiency may be demonstrated by increased cell transfection (i.e., the percentage of cells transfected with the nucleic acid), increased protein translation from the nucleic acid, decreased nucleic acid degradation (as demonstrated, e.g., by increased duration of protein translation from a modified nucleic acid), or reduced innate immune response of the host cell.

[0824] Aspects of the invention are directed to methods of inducing in vivo translation of a recombinant polypeptide in a mammalian subject in need thereof. Therein, an effective amount of a composition containing a nucleic acid that has at least one structural or chemical modification and a translatable region encoding the recombinant polypeptide is administered to the subject using the delivery methods described herein. The nucleic acid is provided in an amount and under other conditions such that the nucleic acid is localized into a cell of the subject and the recombinant polypeptide is translated in the cell from the nucleic acid. The cell in which the nucleic acid is localized, or the tissue in which the cell is present, may be targeted with one or more than one rounds of nucleic acid administration.

[0825] In certain embodiments, the administered polynucleotide, primary construct or mmRNA directs production of one or more recombinant polypeptides that provide a functional activity which is substantially absent in the cell, tissue or organism in which the recombinant polypeptide is translated. For example, the missing functional activity may be enzymatic, structural, or gene regulatory in nature. In related embodiments, the administered polynucleotide, primary construct or mmRNA directs production of one or more recombinant polypeptides that increases (e.g., synergistically) a functional activity which is present but substantially deficient in the cell in which the recombinant polypeptide is translated.

[0826] In other embodiments, the administered polynucleotide, primary construct or mmRNA directs production of one or more recombinant polypeptides that replace a polypeptide (or multiple polypeptides) that is substantially absent in the cell in which the recombinant polypeptide is translated. Such absence may be due to genetic mutation of the encoding gene or regulatory pathway thereof. In some embodiments, the recombinant polypeptide increases the level of an endogenous protein in the cell to a desirable level; such an increase may bring the level of the endogenous protein from a subnormal level to a normal level or from a normal level to a super-normal level.

[0827] Alternatively, the recombinant polypeptide functions to antagonize the activity of an endogenous protein present in, on the surface of, or secreted from the cell. Usually, the activity of the endogenous protein is deleterious to the subject; for example, due to mutation of the endogenous protein resulting in altered activity or localization. Additionally, the recombinant polypeptide antagonizes, directly or indirectly, the activity of a biological moiety present in, on the surface of, or secreted from the cell. Examples of antagonized biological moieties include lipids (e.g., cholesterol), a lipoprotein (e.g., low density lipoprotein), a nucleic acid, a carbohydrate, a protein toxin such as shiga and tetanus toxins, or a small molecule toxin such as botulinum, cholera, and diphtheria toxins. Additionally, the antagonized biological molecule may be an endogenous protein that exhibits an undesirable activity, such as a cytotoxic or cytostatic activity.

[0828] The recombinant proteins described herein may be engineered for localization within the cell, potentially within a specific compartment such as the nucleus, or are engineered for secretion from the cell or translocation to the plasma membrane of the cell.

[0829] In some embodiments, modified mRNAs and their encoded polypeptides in accordance with the present invention may be used for treatment of any of a variety of diseases, disorders, and/or conditions, including but not limited to one or more of the following: autoimmune disorders (e.g. diabetes, lupus, multiple sclerosis, psoriasis, rheumatoid arthritis); inflammatory disorders (e.g. arthritis, pelvic inflammatory disease); infectious diseases (e.g. viral infections (e.g., HIV, HCV, RSV), bacterial infections, fungal infections, sepsis); neurological disorders (e.g. Alzheimer's disease, Huntington's disease; autism; Duchenne muscular dystrophy); cardiovascular disorders (e.g. atherosclerosis, hypercholesterolemia, thrombosis, clotting disorders, angiogenic disorders such as macular degeneration); proliferative disorders (e.g. cancer, benign neoplasms); respiratory disorders (e.g. chronic obstructive pulmonary disease); digestive disorders (e.g. inflammatory bowel disease, ulcers); musculoskeletal disorders (e.g. fibromyalgia, arthritis); endocrine, metabolic, and nutritional disorders (e.g. diabetes, osteoporosis); urological disorders (e.g. renal disease); psychological disorders (e.g. depression, schizophrenia); skin disorders (e.g. wounds, eczema); blood and lymphatic disorders (e.g. anemia, hemophilia); etc.

[0830] Diseases characterized by dysfunctional or aberrant protein activity include cystic fibrosis, sickle cell anemia, epidermolysis bullosa, amyotrophic lateral sclerosis, and glucose-6-phosphate dehydrogenase deficiency. The present invention provides a method for treating such conditions or diseases in a subject by introducing nucleic acid or cell-based therapeutics containing the polynucleotide, primary construct or mmRNA provided herein, wherein the polynucleotide, primary construct or mmRNA encode for a protein that antagonizes or otherwise overcomes the aberrant protein activity present in the cell of the subject. Specific examples of a dysfunctional protein are the missense mutation variants of the cystic fibrosis transmembrane conductance regulator (CFTR) gene, which produce a dysfunctional protein variant of CFTR protein, which causes cystic fibrosis.

[0831] Diseases characterized by missing (or substantially diminished such that proper (normal or physiological protein function does not occur) protein activity include cystic fibrosis, Niemann-Pick type C, R thalassemia major, Duchenne muscular dystrophy, Hurler Syndrome, Hunter Syndrome, and Hemophilia A. Such proteins may not be present, or are essentially non-functional. The present invention provides a method for treating such conditions or diseases in a subject by introducing nucleic acid or cell-based therapeutics containing the polynucleotide, primary construct or mmRNA provided herein, wherein the polynucleotide, primary construct or mmRNA encode for a protein that replaces the protein activity missing from the target cells of the subject. Specific examples of a dysfunctional protein are the nonsense mutation variants of the cystic fibrosis transmembrane conductance regulator (CFTR) gene, which produce a nonfunctional protein variant of CFTR protein, which causes cystic fibrosis.

[0832] Thus, provided are methods of treating cystic fibrosis in a mammalian subject by contacting a cell of the subject with a polynucleotide, primary construct or mmRNA having a translatable region that encodes a functional CFTR polypeptide, under conditions such that an effective amount of the CTFR polypeptide is present in the cell. Preferred target cells are epithelial, endothelial and mesothelial cells, such as the lung, and methods of administration are determined in view of the target tissue; i.e., for lung delivery, the RNA molecules are formulated for administration by inhalation.

[0833] In another embodiment, the present invention provides a method for treating hyperlipidemia in a subject, by introducing into a cell population of the subject with a modified mRNA molecule encoding Sortilin, a protein recently characterized by genomic studies, thereby ameliorating the hyperlipidemia in a subject. The SORT1 gene encodes a trans-Golgi network (TGN) transmembrane protein called Sortilin. Genetic studies have shown that one of five individuals has a single nucleotide polymorphism, rs12740374, in the lp13 locus of the SORT1 gene that predisposes them to having low levels of low-density lipoprotein (LDL) and very-low-density lipoprotein (VLDL). Each copy of the minor allele, present in about 30% of people, alters LDL cholesterol by 8 mg/dL, while two copies of the minor allele, present in about 5% of the population, lowers LDL cholesterol 16 mg/dL. Carriers of the minor allele have also been shown to have a 40% decreased risk of myocardial infarction. Functional in vivo studies in mice describes that overexpression of SORT1 in mouse liver tissue led to significantly lower LDL-cholesterol levels, as much as 80% lower, and that silencing SORT1 increased LDL cholesterol approximately 200% (Musunuru K et al. From noncoding variant to phenotype via SORT1 at the lp13 cholesterol locus. Nature 2010; 466: 714-721).

[0834] In another embodiment, the present invention provides a method for treating hematopoietic disorders, cardiovascular disease, oncology, diabetes, cystic fibrosis, neurological diseases, inborn errors of metabolism, skin and systemic disorders, and blindness. The identity of molecular targets to treat these specific diseases has been described (Templeton ed., Gene and Cell Therapy: Therapeutic Mechanisms and Strategies, 3^{rd} Edition, Bota Raton, FL: CRC Press; herein incorporated by reference in its entirety).

[0835] Provided herein, are methods to prevent infection and/or sepsis in a subject at risk of developing infection and/or sepsis, the method comprising administering to a subject in need of such prevention a composition comprising a polynucleotide, primary construct or mmRNA precursor encoding an anti-microbial polypeptide (e.g., an anti-bacterial polypeptide), or a partially or fully processed form thereof in an amount sufficient to prevent infection and/or sepsis. In certain embodiments, the subject at risk of developing infection and/or sepsis may be a cancer patient. In certain embodiments, the cancer patient may have undergone a conditioning regimen. In some embodiments, the conditioning regiment may include, but is not limited to, chemotherapy, radiation therapy, or both. As a non-limiting example, a polynucleotide, primary construct or mmRNA can encode Protein C, its zymogen or prepro-protein, the activated form of Protein C (APC) or variants of Protein C which are known in the art. The polynucleotides, primary constructs or mmRNA may be chemically modified and delivered to cells. Non-limiting examples of polypeptides which may be encoded within the chemically modified mRNAs of the present invention include those taught in U.S. Pat. Nos. 7,226,999; 7,498,305; 6,630,138 each of which is incorporated herein by reference in its entirety. These patents teach Protein C like molecules, variants and derivatives, any of which may be encoded within the chemically modified molecules of the present invention.

[0836] Further provided herein, are methods to treat infection and/or sepsis in a subject, the method comprising administering to a subject in need of such treatment a composition comprising a polynucleotide, primary construct or mmRNA precursor encoding an anti-microbial polypeptide (e.g., an anti-bacterial polypeptide), e.g., an anti-microbial polypeptide described herein, or a partially or fully processed form thereof in an amount sufficient to treat an infection and/or sepsis. In certain embodiments, the subject in need of treatment is a cancer patient. In certain embodiments, the cancer patient has undergone a conditioning regimen. In some embodiments, the conditioning regiment may include, but is not limited to, chemotherapy, radiation therapy, or both.

[0837] In certain embodiments, the subject may exhibits acute or chronic microbial infections (e.g., bacterial infections). In certain embodiments, the subject may have received or may be receiving a therapy. In certain embodiments, the therapy may include, but is not limited to, radiotherapy, chemotherapy, steroids, ultraviolet radiation, or a combination thereof. In certain embodiments, the patient may suffer from a microvascular disorder. In some embodiments, the microvascular disorder may be diabetes. In certain embodiments, the patient may have a wound. In some embodiments, the wound may be an ulcer. In a specific embodiment, the wound may be a diabetic foot ulcer. In certain embodiments, the subject may have one or more burn wounds. In certain embodiments, the administration may be local or systemic. In certain embodiments, the administration may be subcutaneous. In certain embodiments, the administration may be intravenous. In certain embodiments, the administration may be oral. In certain embodiments, the administration may be topical. In certain embodiments, the administration may be by inhalation. In certain embodiments, the administration may be rectal. In certain embodiments, the administration may be vaginal.

[0838] Other aspects of the present disclosure relate to transplantation of cells containing polynucleotide, primary construct, or mmRNA to a mammalian subject. Administration of cells to mammalian subjects is known to those of ordinary skill in the art, and include, but is not limited to, local implantation (e.g., topical or subcutaneous administration), organ delivery or systemic injection (e.g., intravenous injection or inhalation), and the formulation of cells in pharmaceutically acceptable carrier. Such compositions containing polynucleotide, primary construct, or mmRNA can be formulated for administration intramuscularly, transarterially, intraperitoneally, intravenously, intranasally, subcutaneously, endoscopically, transdermally, or intrathecally. In some embodiments, the composition may be formulated for extended release.

[0839] The subject to whom the therapeutic agent may be administered suffers from or may be at risk of developing a disease, disorder, or deleterious condition. Provided are methods of identifying, diagnosing, and classifying subjects on these bases, which may include clinical diagnosis, biomarker levels, genome-wide association studies (GWAS), and other methods known in the art.

### Rare Liver Diseases or Disorders

### Progressive Familial Intrahepatic Cholestasis (PFIC)

[0840] In one embodiment, the rare liver disease or disorder polynucleotide, primary construct, or mmRNA of the present invention may be used to treat progressive familial intrahepatic cholestasis (PFIC). The term “progressive familial intrahepatic cholestasis” or “PFIC” as used herein refers to a liver disorder that can lead to liver failure. PFIC is characterized by autosomal recessive defects in bile formation and hepatocellular cholestasis. As used herein, “hepatocellular” is a term used to describe something that affects or pertains to liver cells (also referred to as hepatocytes). As used herein, the term “cholestasis” refers to a condition characterized by slowed or disrupted flow of bile from the liver. As used herein, the term “bile” refers to a liquid substance produced by the liver comprising water, bile salts, mucus, fats inorganic salts and cholesterol, which aids in the emulsification and digestion of dietary fats.

[0841] There are three known types of PFIC (PFIC-1, PFIC-2 and PFIC-3), and they have been traced to mutations in genes encoding proteins involved in the hepatocellular transport system and in the formation of bile.

[0842] PFIC-1 and PFIC-2 are typically diagnosed in infancy but diagnosis may occur during the prenatal period or the neonatal period. As used herein, the term “prenatal” refers to the period of time in the life of an organism that occurs before birth. As used herein, the term “neonatal” refers to a period of time in the life of an organism that occurs after birth. In humans, the neonatal period may include a period of time from birth to about 1 month, to about 3 months or to about 6 months after birth. As used herein, the term “infancy” refers to a period in the life of an organism that occurs between birth and childhood. In humans, infancy may include the period of time from birth to about 1 year of life, to about 2 years of life, to about 3 years of life or to about 4 years of life.

[0843] PFIC-3 may be diagnosed during the prenatal period, during the neonatal period or during infancy. In some cases, PFIC-3 may be able evade diagnosis until childhood or young adulthood. As used herein, the term “childhood” refers to the period of time in the life of an organism that occurs after infancy and before young adulthood. In humans, childhood may include the period of time from about 2 years of age to about 10 years of age, from about 3 years of age to about 11 years of age, from about 4 years of age to about 12 years of age or from about 5 years of age to about 13 years of age. As used herein, the term “young adulthood” refers to the period of time in the life of an organism between childhood and adulthood. In humans, young adulthood may include the periods of time from about 10 years of age to about 16 years of age, from about 11 years of age to about 17 years of age, from about 12 years of age to about 18 years of age, from about 13 years of age to about 19 years of age and from about 14 years of age to about 20 years of age.

[0844] Clinical manifestations of PFIC include, but are not limited to pruritus, cholestasis and jaundice. As used herein, the term “pruritus” refers to an uncomfortable sensation that leads to the urge to scratch or rub an afflicted part of the body. As used herein, the term “jaundice” refers to a condition characterized by yellow skin, eyes and/or mucus membranes resulting from the buildup of bilirubin.

[0845] Most patients with PFIC develop fibrosis and suffer from liver failure prior to adulthood. Individuals afflicted with PFIC may be diagnosed through observation of clinical manifestations, cholangiography, liver ultrasonography, liver histology and genetic testing. Additional tests may be conducted to exclude other disorders resulting in childhood cholestasis.

[0846] Dysfunction in one of three different cellular transporters causes each of PFIC types 1, 2 and 3. Each is involved in lipid transport and each plays a vital role in the secretion of bile from the liver. PFIC type 1 is caused by genetic mutations that lead to dysfunction of ATPase aminophospholipid transporter, class I, type 8B, member 1 (ATP8B1). ATP8B1 functions to translocate phosphatidylserine and phosphatidylethanolamine from one side of a phospholipid bilayer to the other. Both PFIC-2 and PFIC-3 are caused by mutations affecting the function of ATP-binding cassette (ABC) transporters. ABC, subfamily B, member 11 (ABCB11) transporters support bile production through the transport of taurocholate as well as other cholate-linked compounds from hepatocytes into the bile. Defective ABCB11 function leads to PFIC-2. ABC subfamily B, member 4 (ABCB4) transports phospholipids, preferably phosphatidyl choline, across hepatocellular membranes for incorporation into bile. Gene mutations that lead to dysfunction of ABCB4 are responsible for PFIC-3. (Davit-Spraul, A. et al., Progressive familial intrahepatic cholestasis. Orphanet J Rare Dis. 2009 Jan. 8; 4:1; Degiorgio, D. et al., Molecular characterization and structural implications of 25 new ABCB4 mutations in progressive familial intrahepatic cholestasis type 3 (PFIC3). Eur J Hum Genet. 2007 December; 15(12):1230-8; each of which are herein incorporated by reference in their entireties).

[0847] In one embodiment, patients with PFIC may be administered a composition comprising at least one rare liver disease or disorder polynucleotide, primary construct or mmRNA of the present invention. The rare liver disease or disorder polynucleotide, primary construct or mmRNA may encode a peptide, protein or fragment thereof such as, but not limited to, ATP-binding cassette, sub-family (MDR/TAP), member 4 (ABCB4), ATP-binding cassette, sub-family (MDR/TAP, member 11 (ABCB 11) and ATPase, aminophopholipid transporter, class I, type 8B, member 1 (ATP8B1).

[0848] In one embodiment, PFIC-1 may be treated by administering a composition of the present invention comprising at least one rare liver disease or disorder polynucleotide, primary construct or mmRNA encoding a peptide, protein or fragment thereof of ATP8B1. In another embodiment, PFIC-1 may be treated by administering a composition of the present invention comprising at least one rare liver disease or disorder polynucleotide, primary construct or mmRNA encoding a peptide, protein or fragment thereof comprising SEQ ID NO: 855 or 856.

[0849] In one embodiment, PFIC-2 may be treated by administering a composition of the present invention comprising at least one rare liver disease or disorder polynucleotide, primary construct or mmRNA encoding a peptide, protein or fragment thereof of ABCB11. In another embodiment, PFIC-2 may be treated by administering a composition of the present invention comprising at least one rare liver disease or disorder polynucleotide, primary construct or mmRNA encoding a peptide, protein or fragment thereof comprising SEQ ID NO: 865.

[0850] In one embodiment, PFIC-3 may be treated by administering a composition of the present invention comprising at least one rare liver disease or disorder polynucleotide, primary construct or mmRNA encoding a peptide, protein or fragment thereof of ABCB4. In another embodiment, PFIC-3 may be treated by administering a composition of the present invention comprising at least one rare liver disease or disorder polynucleotide, primary construct or mmRNA encoding a peptide, protein or fragment thereof comprising SEQ ID NO: 866-871.

### Familial Hypercholesterolemia

[0851] In one embodiment, the rare liver disease or disorder polynucleotide, primary construct, or mmRNA of the present invention may be used to treat familial hypercholesterolemia (FH). As used herein, the term “familial hypercholesterolemia” or “FH” refers to an inherited disorder characterized by elevated levels of low density lipoprotein (LDL)-associated cholesterol in the plasma. Patients or subjects with FH may have an increased risk for cardiovascular disease at a young age. In some embodiments, high levels of LDL in the blood of these individuals may be the result of mutations in the gene encoding the LDL receptor. It is believed, and is no means limiting, that the LDL receptor binds LDL in the circulation and facilitates endocytosis of LDL into the cell that the receptor is expressed on. When this receptor is dysfunctional, LDL levels remain elevated in the circulation and promote the development of atherosclerosis. Individuals with FH may be heterozygous or homozygous for FH-related gene mutations. Symptoms in homozygous individuals can be more severe. Diagnosis is possible during childhood or young adulthood by methods known in the art including, but not limited to, a physical exam that reveals xanthomas (fatty skin growths). Earlier diagnosis of FH may be made through an analysis of family history and genetics. (Sjouke, B. et al., Familial hypercholesterolemia: present and future management. Curr Cardiol Rep. 2011 December; 13(6):527-36; Avis, H. J. et al., A systematic review and meta-analysis of statin therapy in children with familial hypercholesterolemia. Arterioscler Thromb Vasc Biol. 2007 August; 27(8):1803-10; each of which are herein incorporated by reference in their entireties).

[0852] In one embodiment, patients with FH may be administered a composition comprising at least one rare liver disease or disorder polynucleotide, primary construct or mmRNA of the present invention. The rare liver disease or disorder polynucleotide, primary construct or mmRNA may encode a peptide, protein or fragment thereof such as, but not limited to, low density lipoprotein receptor (LDLR), apolipoprotein B (APOB), and proprotein convertase subtilisin/kexin type 9 (PCSK9).

[0853] In one embodiment, FH may be treated by administering a composition of the present invention comprising at least one rare liver disease or disorder polynucleotide, primary construct or mmRNA encoding a peptide, protein or fragment thereof of LDLR. In another embodiment, FH may be treated by administering a composition of the present invention comprising at least one rare liver disease or disorder polynucleotide, primary construct or mmRNA encoding a peptide, protein or fragment thereof comprising SEQ ID NO: 1145-1151.

[0854] In one embodiment, FH may be treated by administering a composition of the present invention comprising at least one rare liver disease or disorder polynucleotide, primary construct or mmRNA encoding a peptide, protein or fragment thereof of APOB. In another embodiment, FH may be treated by administering a composition of the present invention comprising at least one rare liver disease or disorder polynucleotide, primary construct or mmRNA encoding a peptide, protein or fragment thereof comprising SEQ ID NO: 819 or 819.

[0855] In one embodiment, FH may be treated by administering a composition of the present invention comprising at least one rare liver disease or disorder polynucleotide, primary construct or mmRNA encoding a peptide, protein or fragment thereof of PCSK9. In another embodiment, FH may be treated by administering a composition of the present invention comprising at least one rare liver disease or disorder polynucleotide, primary construct or mmRNA encoding a peptide, protein or fragment thereof comprising SEQ ID NO: 1241-1243.

### Ornithine Transcarbamylase Deficiency

[0856] In one embodiment, the rare liver disease or disorder polynucleotide, primary construct, or mmRNA of the present invention may be used to treat ornithine transcarbamylase deficiency (OTCD). As used herein, the term “ornithine transcarbamylase deficiency” or “OTCD” refers to an inherited disorder in the synthesis of urea resulting from mutations in the gene encoding the enzyme ornithine transcarbamylase (OTC). These mutations can lead to hyperammonemia, neurological problems and an increased rate of death. OTC is an important component of the urea cycle, catalyzing the formation of citrulline from carbamoyl phosphate and ornithine. This process is critical to the removal of excess ammonia from the body. The gene for OTC is carried on the X chromosome making OTCD an X-linked disorder. As with most X-linked disorders, OTCD primarily affects males, while females are carriers. The severity of OTCD depends upon the nature of the mutation in the gene. Gene mutations in individuals that result in non-functional OTC typically lead to the death of those individuals within the first month of life. Such mutations may be discovered by genetic analysis in an individual suspected of suffering from OTCD. Individuals with gene mutations that lead to varying degrees of enzyme function may survive longer and respond to treatments to reduce the effects of the disease. Diagnosis of OTCD may occur after the observation of symptoms and the detection of high levels of ammonia and orotic acid in the urine. (Brunetti-Pierri, N. et al., Phenotypic correction of ornithine transcarbamylase deficiency using low dose helper-dependent adenoviral vectors. J Gene Med. 2008 August; 10(8):890-6; Wilmslow, U.K., Ornithine transcarbamylase deficiency: a urea cycle defect. Eur J Paediatr Neurol. 2003; 7(3):115-21; each of which are herein incorporated by reference in their entireties).

[0857] In one embodiment, patients with OTC may be administered a composition comprising at least one rare liver disease or disorder polynucleotide, primary construct or mmRNA of the present invention. The rare liver disease or disorder polynucleotide, primary construct or mmRNA may encode a peptide, protein or fragment thereof such as, but not limited to, ornithine carbamoyltransferase (OTC).

[0858] In one embodiment, OTCD may be treated by administering a composition of the present invention comprising at least one rare liver disease or disorder polynucleotide, primary construct or mmRNA encoding a peptide, protein or fragment thereof of OTC. In another embodiment, OTCD may be treated by administering a composition of the present invention comprising at least one rare liver disease or disorder polynucleotide, primary construct or mmRNA encoding a peptide, protein or fragment thereof comprising SEQ ID NO: 1192.

### Crigler-Najjar Syndrome

[0859] In one embodiment, the rare liver disease or disorder polynucleotide, primary construct, or mmRNA of the present invention may be used to treat Crigler-Najjar syndrome. As used herein, the term “Crigler-Najjar syndrome” refers to an inborn error affecting the function of the 1A1 isoform of the enzyme bilirubin-uridine diphosphate glucuronosyltransferase (UGT1A1). UGT1A1 is critical in the detoxification of hydrophobic bilirubin, a toxic byproduct of heme degradation. It is believed that UGT1A1 functions by linking hydrophobic bilirubin to glucoronic acid for excretion into the bile. Individuals suffering from Crigler-Najjar syndrome can experience unconjugated hyperbilirubinemia (or excess hydrophobic bilirubin in the circulation), leading to neurological impairment and the requirement for regular phototherapy that becomes less and less effective as the patients age. Diagnosis of Crigler-Najjar syndrome typically begins with the observation of jaundice in infants and then enzyme function may be evaluated by enzyme and liver assays known in the art. (Lysy, P. A. et al., Liver cell transplantationfor Crigler-Najjar syndrome type I: update and perspectives. World J Gastroenterol. Jun. 14, 2008; 14(22):3464-70; Sugatani, J., Function, genetic polymorphism, and transcriptional regulation of human UDP-glucuronosyltransferase (UGT) 1A1. Drug Metab Pharmacokinet. Oct. 23, 2012 [Epub ahead of print]; each of which are herein incorporated by reference in their entireties).

[0860] In one embodiment, patients with Crigler-Najjar syndrome may be administered a composition comprising at least one rare liver disease or disorder polynucleotide, primary construct or mmRNA of the present invention. The rare liver disease or disorder polynucleotide, primary construct or mmRNA may encode a peptide, protein or fragment thereof such as, but not limited to, UGT1A1.

[0861] In one embodiment, Crigler-Najjar syndrome may be treated by administering a composition of the present invention comprising at least one rare liver disease or disorder polynucleotide, primary construct or mmRNA encoding a peptide, protein or fragment thereof of UGT1A1. In another embodiment, Crigler-Najjar syndrome may be treated by administering a composition of the present invention comprising at least one rare liver disease or disorder polynucleotide, primary construct or mmRNA encoding a peptide, protein or fragment thereof comprising SEQ ID NO: 1357 or 1358.

### Aceruloplasminemia

[0862] In one embodiment, the rare liver disease or disorder polynucleotide, primary construct, or mmRNA of the present invention may be used to treat Aceruloplasminemia. As used herein, the term “aceruloplasminemia” refers to a disease in which ceruloplasmin (CP) may be defective and/or dysfunctional due to a gene mutation in the CP gene. It is believed that CP is a transport protein responsible for transporting iron from cells into capillaries. Once in the capillaries, iron can bind to ferritin and enters the blood stream. In the absence of functional CP, iron accumulates within cells and serum ferritin levels become elevated. (Ogimoto, M. et al., Criteria for early identification of aceruloplasminemia. Intern Med. 2011; 50(13):1415-8; Miyajima, H., Aceruloplasminemia. GeneReviews [Internet]. Seattle (WA): University of Washington, Seattle; Aug. 12, 2003 [updated Feb. 17, 2011]; each of which are herein incorporated by reference in its entirety).

[0863] Iron accumulation may be especially severe in the liver as well as in the eye, brain and pancreas. Aceruloplasminemia, arising from genetic defects in the CP gene, is an autosomal recessive disorder. As used herein, the term “autosomal rescessive” refers to a disease, disorder, trait or phenotype that can affect those who are homozygous for a responsible gene. Symptoms of the disease typically manifest between the ages of 25 and 60 years old. Diagnosis of individuals believed to be suffering from the disease may occur by way of serum analysis for ceruloplasmin and iron levels or through MRI analysis of the brain to look for iron accumulation.

[0864] In one embodiment, patients with Aceruloplasminemia may be administered a composition comprising at least one rare liver disease or disorder polynucleotide, primary construct or mmRNA of the present invention. The rare liver disease or disorder polynucleotide, primary construct or mmRNA may encode a peptide, protein or fragment thereof such as, but not limited to, CP.

[0865] In one embodiment, Aceruloplasminemia may be treated by administering a composition of the present invention comprising at least one rare liver disease or disorder polynucleotide, primary construct or mmRNA encoding a peptide, protein or fragment thereof of CP. In another embodiment, Aceruloplasminemia may be treated by administering a composition of the present invention comprising at least one rare liver disease or disorder polynucleotide, primary construct or mmRNA encoding a peptide, protein or fragment thereof comprising SEQ ID NO: 891.

### Alpha-Mannosidosis

[0866] In one embodiment, the rare liver disease or disorder polynucleotide, primary construct, or mmRNA of the present invention may be used to treat alpha-mannosidosis. As used herein, the term “alpha-mannosidosis” refers to a disorder caused by defective and/or dysfunctional alpha-D-mannosidase enzyme activity resulting in lysosomal storage disorder. Alpha-mannosidosis, arising from genetic defects in the MAN2B1 gene (encoding alpha-D-mannosidase), is an autosomal recessive disorder. Characteristics of those suffering from alpha-mannosidosis include, but are not limited to immunodeficiency, abnormalities of the face and skeleton, impaired hearing and intellectual impairment. Diagnosis may occur as early as during infancy using methods known in the art including, but not limited to, analysis of phenotypic characteristics as well as liver and spleen dysfunction. Milder forms of the disease may remain undiagnosed through childhood and young adulthood. Diagnosis of the disease is typically confirmed by measurement of alpha-D-mannosidase enzymatic activity in while blood cells. (Malm, D. et al., Alpha-mannosidosis. Orphanet J Rare Dis. Jul. 23, 2008; 3:21; herein incorporated by reference in its entirety).

[0867] In one embodiment, patients with alpha-mannosidosis may be administered a composition comprising at least one rare liver disease or disorder polynucleotide, primary construct or mmRNA of the present invention. The rare liver disease or disorder polynucleotide, primary construct or mmRNA may encode a peptide, protein or fragment thereof such as, but not limited to, MAN2B1.

[0868] In one embodiment, alpha-mannosidosis may be treated by administering a composition of the present invention comprising at least one rare liver disease or disorder polynucleotide, primary construct or mmRNA encoding a peptide, protein or fragment thereof of MAN2B1. In another embodiment, alpha-mannosidosis may be treated by administering a composition of the present invention comprising at least one rare liver disease or disorder polynucleotide, primary construct or mmRNA encoding a peptide, protein or fragment thereof comprising SEQ ID NO: 1156-1158.

### Tyrosinemia

[0869] In one embodiment, the rare liver disease or disorder polynucleotide, primary construct, or mmRNA of the present invention may be used to treat tyrosinemia. As used herein, the term “tyrosinemia” refers to a disorder and/or condition characterized by elevated levels of tyrosine and/or tyrosine byproducts in the blood. In some embodiments, tyrosinemia is caused by a genetic mutation resulting in a defective and/or dysfunctional enzyme necessary for tyrosine degradation. Symptoms include, but are not limited to failure to thrive, diarrhea, vomiting, jaundice, an increased tendency for nosebleeds, microcephaly, tremor, ataxia, self-mutilating behavior, fine motor coordination disturbances, language deficits, convulsions and/or a cabbage-like odor. (Nakamura, K. et al., Animal models of tyrosinemia. J Nutr. June 2007; 137 (6 Suppl 1):1556S-1560S; discussion 1573S-1575S; Bergeron, A. et al., Hereditary tyrosinemia: an endoplasmic reticulum stress disorder? Med Sci (Paris). October 2003; 19(10):976-80; Mehere, P. et al., Tyrosine aminotransferase: biochemical and structural properties and molecular dynamics simulations. Protein Cell. November 2010; 1(11):1023-32; each of which is herein incorporated by reference in its entirety).

[0870] Type-1 tyrosinemia refers to a form of the disorder caused by a lack of fumarylacetoacetate hydrolase (FAH) activity. The lack of FAH activity in tyrosinemia type-1 leads to an accumulation of the metabolite fumarylacetoacetate, triggering cellular activities such as apoptosis, mutagenesis, aneugenesis and mitogenesis.

[0871] Tyrosinemia type-2 refers to a form of the disorder caused by a lack of tyrosine aminotransferase (TAT) activity. TAT is responsible for the reversible transamination of tyrosine as well as other aromatic amino acids including, but not limited to p-hydroxyphenylpyruvate (pHPP).

[0872] In one embodiment, patients with tyrosinemia may be administered a composition comprising at least one rare liver disease or disorder polynucleotide, primary construct or mmRNA of the present invention. The rare liver disease or disorder polynucleotide, primary construct or mmRNA may encode a peptide, protein or fragment thereof such as, but not limited to, FAH or TAT.

[0873] In one embodiment, tyrosinemia type-1 may be treated by administering a composition of the present invention comprising at least one rare liver disease or disorder polynucleotide, primary construct or mmRNA encoding a peptide, protein or fragment thereof of FAH. In another embodiment, tyrosinemia type-1 may be treated by administering a composition of the present invention comprising at least one rare liver disease or disorder polynucleotide, primary construct or mmRNA encoding a peptide, protein or fragment thereof comprising SEQ ID NO: 985-987.

[0874] In one embodiment, tyrosinemia type-2 may be treated by administering a composition of the present invention comprising at least one rare liver disease or disorder polynucleotide, primary construct or mmRNA encoding a peptide, protein or fragment thereof of TAT. In another embodiment, tyrosinmia type-2 may be treated by administering a composition of the present invention comprising at least one rare liver disease or disorder polynucleotide, primary construct or mmRNA encoding a peptide, protein or fragment thereof comprising SEQ ID NO: 1356.

### Hemochromatosis

[0875] In one embodiment, the rare liver disease or disorder polynucleotide, primary construct, or mmRNA of the present invention may be used to treat hemochromatosis. As used herein, the term “hemochromatosis” refers to a disorder or condition characterized by iron overload that may result from a genetic defect. Symptoms of hemochromatosis include, but are not limited to hepatic cirrhosis, hyperpigmentation, decreased pituitary function, diabetes and/or arthritis. The genetic defect associated with hemochromatosis is used to characterize the form of the disease. Hemochromatosis type 1 is caused by a genetic mutation in the HFE gene. Types 2A and 2B are the result of mutations in the HFE2 and HAMP genes, respectively. While symptoms for hemochromatosis type 1 do not typically present until adulthood, symptoms for hemochromatosis types 2A and 2B typically present during childhood. (Papanikolaou, G. et al., Hepcidin in iron overload disorders. Blood. May 15, 2005; 105(10): 4103-5; Nandar, W. et al., HFE gene variants affect iron in the brain. J Nutr. Apr. 1, 2011; 141(4):729S-739S; Wallace, D. F. et al., Non-HFE haemochromatosis. World J Gastroenterol. Sep. 21, 2007; 13(35):4690-8; each of which is herein incorporated by reference in its entirety).

[0876] In one embodiment, patients with hemochromatosis may be administered a composition comprising at least one rare liver disease or disorder polynucleotide, primary construct or mmRNA of the present invention. The rare liver disease or disorder polynucleotide, primary construct or mmRNA may encode a peptide, protein or fragment thereof such as, but not limited to, HFE2, HAMP, solute carrier family 40, member 1 (SLC40A1) and transferrin receptor 2 (TFR2).

[0877] In one embodiment, hemochromatosis type-1 may be treated by administering a composition of the present invention comprising at least one rare liver disease or disorder polynucleotide, primary construct or mmRNA encoding a peptide, protein or fragment thereof of HFE. In another embodiment, hemochromatosis type-1 may be treated by administering a composition of the present invention comprising at least one rare liver disease or disorder polynucleotide, primary construct or mmRNA encoding a peptide, protein or fragment thereof comprising SEQ ID NO: 1038-1050.

[0878] In one embodiment, hemochromatosis type-2 may be treated by administering a composition of the present invention comprising at least one rare liver disease or disorder polynucleotide, primary construct or mmRNA encoding a peptide, protein or fragment thereof of HFE2 or HAMP. In another embodiment, hemochromatosis type-2 may be treated by administering a composition of the present invention comprising at least one rare liver disease or disorder polynucleotide, primary construct or mmRNA encoding a peptide, protein or fragment thereof comprising SEQ ID NO: 1051-1057, 1067 or 1068.

[0879] In one embodiment, hemochromatosis may be treated by administering a composition of the present invention comprising at least one rare liver disease or disorder polynucleotide, primary construct or mmRNA encoding a peptide, protein or fragment thereof of TFR2 or SLC40A1. In another embodiment, hemochromatosis may be treated by administering a composition of the present invention comprising at least one rare liver disease or disorder polynucleotide, primary construct or mmRNA encoding a peptide, protein or fragment thereof comprising SEQ ID NO: 1290-1296 or 1323-1326.

### Glycogen Storage Disease

[0880] In one embodiment, the rare liver disease or disorder polynucleotide, primary construct, or mmRNA of the present invention may be used to treat glycogen storage disease IV. As used herein, the terms “glycogen storage disease” or “GSD” refer to a disorder in an organism characterized by defective synthesis and/or breakdown of glycogen. In some embodiments, GSD includes, but is not limited to GSD type 4 also known as Andersen disease, Brancher deficiency, amylopectinosis and glycogen branching enzyme deficiency. GSD type IV results from a deficiency in glycogen branching enzyme (GBE), encoded by the GBE1 gene, leading to the formation of abnormal glycogens that may be cytotoxic. Although variations exist due to the expression of tissue-specific isoforms, patients with classical hepatic GSD type IV appear healthy at birth; however, cirrhosis of the liver occurs early in life, typically leading to liver failure before the 5^{th} year of life. (Ozen, H., Glycogen storage diseases: new perspectives. World J Gastroenterol. May 14, 2007; 13(18):2541-53; herein incorporated by reference in its entirety).

[0881] In one embodiment, patients with GSD may be administered a composition comprising at least one rare liver disease or disorder polynucleotide, primary construct or mmRNA of the present invention. The rare liver disease or disorder polynucleotide, primary construct or mmRNA may encode a peptide, protein or fragment thereof such as, but not limited to, glucan (1,4-alpha-), branching enzyme 1 (GBE1).

[0882] In one embodiment, GSD type IV may be treated by administering a composition of the present invention comprising at least one rare liver disease or disorder polynucleotide, primary construct or mmRNA encoding a peptide, protein or fragment thereof of GBE1. In another embodiment, GSD IV may be treated by administering a composition of the present invention comprising at least one rare liver disease or disorder polynucleotide, primary construct or mmRNA encoding a peptide, protein or fragment thereof comprising SEQ ID NO: 1010-1012.

### Fanconi Cystinosis

[0883] In one embodiment, the rare liver disease or disorder polynucleotide, primary construct, or mmRNA of the present invention may be used to treat fanconi cystinosis. As used herein, the term “cystinosis” refers to a disease characterized by the abnormal accumulation of cystine within lysosomes. It is the most common cause of Fanconi syndrome, a kidney disease that prevents reabsorption of metabolites into the blood stream, causing them to instead be passed in the urine. Cystine is formed through a disulfide bond between two cysteine residues. Lysosomes are sites of hydrolytic protein digestion and cystine accumulating within lysosomes relies on carrier-mediated transport for its release. Cystinosin, encoded by the CTNS gene, is a seven transmembrane protein that binds cystine in lysosomes and facilitates its removal from lysosomes in collaboration with other proteins. Individuals with severe defects in cystinosin function are affected between 6 and 12 months of age and present with fluid and electrolyte loss as well as other renal and metabolic complications. Renal failure typically occurs by the age of 10. Current treatment is with the drug cysteamine which is capable of cleaving cystine molecules, allowing them to be cleared from lysosomes. (Kalatzis, V. et al., Cystinosis: from gene to disease. Nephrol Dial Transplant. November 2002; 17(11):1883-6; herein incorporated by reference in its entirety).

[0884] In one embodiment, patients with hemochromatosis may be administered a composition comprising at least one rare liver disease or disorder polynucleotide, primary construct or mmRNA of the present invention. The rare liver disease or disorder polynucleotide, primary construct or mmRNA may encode a peptide, protein or fragment thereof such as, but not limited to, cystinosin, lysosomal cysteine transporter (CTNS).

[0885] In one embodiment, fanconi cystinosis may be treated by administering a composition of the present invention comprising at least one rare liver disease or disorder polynucleotide, primary construct or mmRNA encoding a peptide, protein or fragment thereof of CTNS. In another embodiment, fanconi cystinosis may be treated by administering a composition of the present invention comprising at least one rare liver disease or disorder polynucleotide, primary construct or mmRNA encoding a peptide, protein or fragment thereof comprising SEQ ID NO: 938-941.

### Farber Lipogranulomatosis

[0886] In one embodiment, the rare liver disease or disorder polynucleotide, primary construct, or mmRNA of the present invention may be used to treat farber lipogranulomatosis. As used herein, the terms “Farber lipogranulomatosis,” “Farber's lipogranulomatosis” or “Farber disease” refers to a lysosomal storage disorder identified by Sidney Farber in 1957. The disease is caused by a defect in the enzyme acid ceramindase, encoded by the N-acylsphingosine amidohydrolase (acid ceramidase) 1 (ASAH1) gene. Deficiency of this enzyme prevents the normal breakdown of intracellular ceramide into sphingosine and fatty acid and causes the abnormal accumulation ceramide that leads to disease symptoms. Symptoms are typically present in early infancy, but may also occur in later life. In the classic form of the disease, symptoms develop within the first few weeks of life and may include deformity of the joints, the presence of subcutaneous nodules and hoarseness. Patients may also suffer neurological impairment, typically leading to death in infancy. Patients with mild neurological impairment may survive into their fourth decade. Currently, there are no treatments available for Farber lipogranulomatosis. (Ekici, B. et al., Farber disease: A clinical diagnosis. J Pediatr Neurosci. May 2012; 7(2):154-5; Farber, S. et al., Lipogranulomatosis; a new lipo-glycoprotein storage disease. J Mt Sinai Hosp N Y. November-December 1957; 24(6):816-37; each of which is herein incorporated by reference in its entirety).

[0887] In one embodiment, patients with hemochromatosis may be administered a composition comprising at least one rare liver disease or disorder polynucleotide, primary construct or mmRNA of the present invention. The rare liver disease or disorder polynucleotide, primary construct or mmRNA may encode a peptide, protein or fragment thereof such as, but not limited to, N-acylsphingosine amidohydrolase (acid ceramidase) 1 (ASAH1).

[0888] In one embodiment, farber lipogranulomatosis may be treated by administering a composition of the present invention comprising at least one rare liver disease or disorder polynucleotide, primary construct or mmRNA encoding a peptide, protein or fragment thereof of ASAH1. In another embodiment, fanconi cystinosis may be treated by administering a composition of the present invention comprising at least one rare liver disease or disorder polynucleotide, primary construct or mmRNA encoding a peptide, protein or fragment thereof comprising SEQ ID NO: 1171-1175.

### Wound Management

[0889] The polynucleotides, primary constructs or mmRNA of the present invention may be used for wound treatment, e.g. of wounds exhibiting delayed healing. Provided herein are methods comprising the administration of polynucleotide, primary construct or mmRNA in order to manage the treatment of wounds. The methods herein may further comprise steps carried out either prior to, concurrent with or post administration of the polynucleotide, primary construct or mmRNA. For example, the wound bed may need to be cleaned and prepared in order to facilitate wound healing and hopefully obtain closure of the wound. Several strategies may be used in order to promote wound healing and achieve wound closure including, but not limited to: (i) debridement, optionally repeated, sharp debridement (surgical removal of dead or infected tissue from a wound), optionally including chemical debriding agents, such as enzymes, to remove necrotic tissue; (ii) wound dressings to provide the wound with a moist, warm environment and to promote tissue repair and healing.

[0890] Examples of materials that are used in formulating wound dressings include, but are not limited to: hydrogels (e.g., AQUASORB®; DUODERM®), hydrocolloids (e.g., AQUACEL®; COMFEEL®), foams (e.g., LYOFOAM®; SPYROSORB®), and alginates (e.g., ALGISITE®; CURASORB®); (iii) additional growth factors to stimulate cell division and proliferation and to promote wound healing e.g. becaplermin (REGRANEX GEL®), a human recombinant platelet-derived growth factor that is approved by the FDA for the treatment of neuropathic foot ulcers; (iv) soft-tissue wound coverage, a skin graft may be necessary to obtain coverage of clean, non-healing wounds. Examples of skin grafts that may be used for soft-tissue coverage include, but are not limited to: autologous skin grafts, cadaveric skin graft, bioengineered skin substitutes (e.g., APLIGRAF®; DERMAGRAFT®).

[0891] In certain embodiments, the polynucleotide, primary construct or mmRNA of the present invention may further include hydrogels (e.g., AQUASORB®; DUODERM®), hydrocolloids (e.g., AQUACEL®; COMFEEL®), foams (e.g., LYOFOAM®; SPYROSORB®), and/or alginates (e.g., ALGISITE®; CURASORB®). In certain embodiments, the polynucleotide, primary construct or mmRNA of the present invention may be used with skin grafts including, but not limited to, autologous skin grafts, cadaveric skin graft, or bioengineered skin substitutes (e.g., APLIGRAF®; DERMAGRAFT®). In some embodiments, the polynucleotide, primary construct or mmRNA may be applied with would dressing formulations and/or skin grafts or they may be applied separately but methods such as, but not limited to, soaking or spraying.

[0892] In some embodiments, compositions for wound management may comprise a polynucleotide, primary construct or mmRNA encoding for an anti-microbial polypeptide (e.g., an anti-bacterial polypeptide) and/or an anti-viral polypeptide. A precursor or a partially or fully processed form of the anti-microbial polypeptide may be encoded. The composition may be formulated for administration using a bandage (e.g., an adhesive bandage). The anti-microbial polypeptide and/or the anti-viral polypeptide may be intermixed with the dressing compositions or may be applied separately, e.g., by soaking or spraying.

### Production of Antibodies

[0893] In one embodiment of the invention, the polynucleotides, primary constructs or mmRNA may encode antibodies and fragments of such antibodies. These may be produced by any one of the methods described herein. The antibodies may be of any of the different subclasses or isotypes of immunoglobulin such as, but not limited to, IgA, IgG, or IgM, or any of the other subclasses. Exemplary antibody molecules and fragments that may be prepared according to the invention include, but are not limited to, immunoglobulin molecules, substantially intact immunoglobulin molecules and those portions of an immunoglobulin molecule that may contain the paratope. Such portion of antibodies that contain the paratope include, but are not limited to Fab, Fab′, F(ab′)₂, F(v) and those portions known in the art.

[0894] The polynucleotides of the invention may encode variant antibody polypeptides which may have a certain identity with a reference polypeptide sequence, or have a similar or dissimilar binding characteristic with the reference polypeptide sequence.

[0895] Antibodies obtained by the methods of the present invention may be chimeric antibodies comprising non-human antibody-derived variable region(s) sequences, derived from the immunized animals, and human antibody-derived constant region(s) sequences. In addition, they can also be humanized antibodies comprising complementary determining regions (CDRs) of non-human antibodies derived from the immunized animals and the framework regions (FRs) and constant regions derived from human antibodies. In another embodiment, the methods provided herein may be useful for enhancing antibody protein product yield in a cell culture process.

### Managing Infection

[0896] In one embodiment, provided are methods for treating or preventing a microbial infection (e.g., a bacterial infection) and/or a disease, disorder, or condition associated with a microbial or viral infection, or a symptom thereof, in a subject, by administering a polynucleotide, primary construct or mmRNA encoding an anti-microbial polypeptide. Said administration may be in combination with an anti-microbial agent (e.g., an anti-bacterial agent), e.g., an anti-microbial polypeptide or a small molecule anti-microbial compound described herein. The anti-microbial agents include, but are not limited to, anti-bacterial agents, anti-viral agents, anti-fungal agents, anti-protozoal agents, anti-parasitic agents, and anti-prion agents.

[0897] The agents can be administered simultaneously, for example in a combined unit dose (e.g., providing simultaneous delivery of both agents). The agents can also be administered at a specified time interval, such as, but not limited to, an interval of minutes, hours, days or weeks. Generally, the agents may be concurrently bioavailable, e.g., detectable, in the subject. In some embodiments, the agents may be administered essentially simultaneously, for example two unit dosages administered at the same time, or a combined unit dosage of the two agents. In other embodiments, the agents may be delivered in separate unit dosages. The agents may be administered in any order, or as one or more preparations that includes two or more agents. In a preferred embodiment, at least one administration of one of the agents, e.g., the first agent, may be made within minutes, one, two, three, or four hours, or even within one or two days of the other agent, e.g., the second agent. In some embodiments, combinations can achieve synergistic results, e.g., greater than additive results, e.g., at least 25, 50, 75, 100, 200, 300, 400, or 500% greater than additive results.

Conditions Associated with Bacterial Infection

[0898] Diseases, disorders, or conditions which may be associated with bacterial infections include, but are not limited to one or more of the following: abscesses, actinomycosis, acute prostatitis, Aeromonas hydrophila, annual ryegrass toxicity, anthrax, bacillary peliosis, bacteremia, bacterial gastroenteritis, bacterial meningitis, bacterial pneumonia, bacterial vaginosis, bacterium-related cutaneous conditions, bartonellosis, BCG-oma, botryomycosis, botulism, Brazilian purpuric fever, Brodie abscess, brucellosis, Buruli ulcer, campylobacteriosis, caries, Carrion's disease, cat scratch disease, cellulitis, chlamydia infection, cholera, chronic bacterial prostatitis, chronic recurrent multifocal osteomyelitis, clostridial necrotizing enteritis, combined periodontic-endodontic lesions, contagious bovine pleuropneumonia, diphtheria, diphtheritic stomatitis, ehrlichiosis, erysipelas, piglottitis, erysipelas, Fitz-Hugh-Curtis syndrome, flea-borne spotted fever, foot rot (infectious pododermatitis), Garre's sclerosing osteomyelitis, Gonorrhea, Granuloma inguinale, human granulocytic anaplasmosis, human monocytotropic ehrlichiosis, hundred days' cough, impetigo, late congenital syphilitic oculopathy, legionellosis, Lemierre's syndrome, leprosy (Hansen's Disease), leptospirosis, listeriosis, Lyme disease, lymphadenitis, melioidosis, meningococcal disease, meningococcal septicaemia, methicillin-resistant Staphylococcus aureus (MRSA) infection, Mycobacterium avium-intracellulare (MAI), mycoplasma pneumonia, necrotizing fasciitis, nocardiosis, noma (cancrum oris or gangrenous stomatitis), omphalitis, orbital cellulitis, osteomyelitis, overwhelming post-splenectomy infection (OPSI), ovine brucellosis, pasteurellosis, periorbital cellulitis, pertussis (whooping cough), plague, pneumococcal pneumonia, Pott disease, proctitis, pseudomonas infection, psittacosis, pyaemia, pyomyositis, Q fever, relapsing fever (typhinia), rheumatic fever, Rocky Mountain spotted fever (RMSF), rickettsiosis, salmonellosis, scarlet fever, sepsis, serratia infection, shigellosis, southern tick-associated rash illness, staphylococcal scalded skin syndrome, streptococcal pharyngitis, swimming pool granuloma, swine brucellosis, syphilis, syphilitic aortitis, tetanus, toxic shock syndrome (TSS), trachoma, trench fever, tropical ulcer, tuberculosis, tularemia, typhoid fever, typhus, urogenital tuberculosis, urinary tract infections, vancomycin-resistant Staphylococcus aureus infection, Waterhouse-Friderichsen syndrome, pseudotuberculosis (Yersinia) disease, and yersiniosis. Other diseases, disorders, and/or conditions associated with bacterial infections can include, for example, Alzheimer's disease, anorexia nervosa, asthma, atherosclerosis, attention deficit hyperactivity disorder, autism, autoimmune diseases, bipolar disorder, cancer (e.g., colorectal cancer, gallbladder cancer, lung cancer, pancreatic cancer, and stomach cancer), chronic fatigue syndrome, chronic obstructive pulmonary disease, Crohn's disease, coronary heart disease, dementia, depression, Guillain-Barre syndrome, metabolic syndrome, multiple sclerosis, myocardial infarction, obesity, obsessive-compulsive disorder, panic disorder, psoriasis, rheumatoid arthritis, sarcoidosis, schizophrenia, stroke, thromboangiitis obliterans (Buerger's disease), and Tourette syndrome.

### Bacterial Pathogens

[0899] The bacterium described herein can be a Gram-positive bacterium or a Gram-negative bacterium. Bacterial pathogens include, but are not limited to, Acinetobacter baumannii, Bacillus anthracis, Bacillus subtilis, Bordetella pertussis, Borrelia burgdorferi, Brucella abortus, Brucella canis, Brucella melitensis, Brucella suis, Campylobacter jejuni, Chlamydia pneumoniae, Chlamydia trachomatis, Chlamydophila psittaci, Clostridium botulinum, Clostridium difficile, Clostridium perfringens, Clostridium tetani, coagulase Negative Staphylococcus, Corynebacterium diphtheria, Enterococcus faecalis, Enterococcus faecium, Escherichia coli, enterotoxigenic Escherichia coli (ETEC), enteropathogenic E. coli, E. coli O157:H7, Enterobacter sp., Francisella tularensis, Haemophilus influenzae, Helicobacter pylori, Klebsiella pneumoniae, Legionella pneumophila, Leptospira interrogans, Listeria monocytogenes, Moraxella catarralis, Mycobacterium leprae, Mycobacterium tuberculosis, Mycoplasma pneumoniae, Neisseria gonorrhoeae, Neisseria meningitides, Preteus mirabilis, Proteus sps., Pseudomonas aeruginosa, Rickettsia rickettsii, Salmonella typhi, Salmonella typhimurium, Serratia marcesens, Shigella flexneri, Shigella sonnei, Staphylococcus aureus, Staphylococcus epidermidis, Staphylococcus saprophyticus, Streptococcus agalactiae, Streptococcus mutans, Streptococcus pneumoniae, Streptococcus pyogenes, Treponema pallidum, Vibrio cholerae, and Yersinia pestis. Bacterial pathogens may also include bacteria that cause resistant bacterial infections, for example, clindamycin-resistant Clostridium difficile, fluoroquinolon-resistant Clostridium difficile, methicillin-resistant Staphylococcus aureus (MRSA), multidrug-resistant Enterococcus faecalis, multidrug-resistant Enterococcus faecium, multidrug-resistance Pseudomonas aeruginosa, multidrug-resistant Acinetobacter baumannii, and vancomycin-resistant Staphylococcus aureus (VRSA).

### Antibiotic Combinations

[0900] In one embodiment, the modified mRNA of the present invention may be administered in conjunction with one or more antibiotics. These include, but are not limited to Aknilox, Ambisome, Amoxycillin, Ampicillin, Augmentin, Avelox, Azithromycin, Bactroban, Betadine, Betnovate, Blephamide, Cefaclor, Cefadroxil, Cefdinir, Cefepime, Cefix, Cefixime, Cefoxitin, Cefpodoxime, Cefprozil, Cefuroxime, Cefzil, Cephalexin, Cephazolin, Ceptaz, Chloramphenicol, Chlorhexidine, Chloromycetin, Chlorsig, Ciprofloxacin, Clarithromycin, Clindagel, Clindamycin, Clindatech, Cloxacillin, Colistin, Co-trimoxazole, Demeclocycline, Diclocil, Dicloxacillin, Doxycycline, Duricef, Erythromycin, Flamazine, Floxin, Framycetin, Fucidin, Furadantin, Fusidic, Gatifloxacin, Gemifloxacin, Gemifloxacin, Ilosone, Iodine, Levaquin, Levofloxacin, Lomefloxacin, Maxaquin, Mefoxin, Meronem, Minocycline, Moxifloxacin, Myambutol, Mycostatin, Neosporin, Netromycin, Nitrofurantoin, Norfloxacin, Norilet, Ofloxacin, Omnicef, Ospamox, Oxytetracycline, Paraxin, Penicillin, Pneumovax, Polyfax, Povidone, Rifadin, Rifampin, Rifaximin, Rifinah, Rimactane, Rocephin, Roxithromycin, Seromycin, Soframycin, Sparfloxacin, Staphlex, Targocid, Tetracycline, Tetradox, Tetralysal, tobramycin, Tobramycin, Trecator, Tygacil, Vancocin, Velosef, Vibramycin, Xifaxan, Zagam, Zitrotek, Zoderm, Zymar, and Zyvox.

### Antibacterial Agents

[0901] Exemplary anti-bacterial agents include, but are not limited to, aminoglycosides (e.g., amikacin (AMIKIN®), gentamicin (GARAMYCIN®), kanamycin (KANTREX®), neomycin (MYCIFRADIN®), netilmicin (NETROMYCIN®), tobramycin (NEBCIN®), Paromomycin (HUMATIN®)), ansamycins (e.g., geldanamycin, herbimycin), carbacephem (e.g., loracarbef (LORABID®), Carbapenems (e.g., ertapenem (INVANZ®), doripenem (DORIBAX®), imipenem/cilastatin (PRIMAXIN®), meropenem (MERREM®), cephalosporins (first generation) (e.g., cefadroxil (DURICEF®), cefazolin (ANCEF®), cefalotin or cefalothin (KEFLIN®), cefalexin (KEFLEX®), cephalosporins (second generation) (e.g., cefaclor (CECLOR®), cefamandole (MANDOL®), cefoxitin (MEFOXIN®), cefprozil (CEFZTL®), cefuroxime (CEFTIN®, ZINNAT®)), cephalosporins (third generation) (e.g., cefixime (SUPRAX®), cefdinir (OMNICEF®, CEFDIEL®), cefditoren (SPECTRACEF®), cefoperazone (CEFOBID®), cefotaxime (CLAFORAN®), cefpodoxime (VANTIN®), ceftazidime (FORTAZ®), ceftibuten (CEDAX®), ceftizoxime (CEFIZOX®), ceftriaxone (ROCEPHIN®)), cephalosporins (fourth generation) (e.g., cefepime (MAXIPIME®)), cephalosporins (fifth generation) (e.g., ceftobiprole (ZEFTERA®)), glycopeptides (e.g., teicoplanin (TARGOCID®), vancomycin (VANCOCIN®), telavancin (VIBATIV®)), lincosamides (e.g., clindamycin (CLEOCIN®), lincomycin (LINCOCIN®)), lipopeptide (e.g., daptomycin (CUBICIN®)), macrolides (e.g., azithromycin (ZITHROMAX®, SUMAMED®, ZITROCIN®), clarithromycin (BIAXIN®), dirithromycin (DYNABAC®), erythromycin (ERYTHOCIN®, ERYTHROPED®), roxithromycin, troleandomycin (TAO®), telithromycin (KETEK®), spectinomycin (TROBICIN®)), monobactams (e.g., aztreonam (AZACTAM®)), nitrofurans (e.g., furazolidone (FUROXONE®), nitrofurantoin (MACRODANTIN®, MACROBID®)), penicillins (e.g., amoxicillin (NOVAMOX®, AMOXIL®), ampicillin (PRINCIPEN®), azlocillin, carbenicillin (GEOCILLIN®), cloxacillin (TEGOPEN®), dicloxacillin (DYNAPEN®), flucloxacillin (FLOXAPEN®), mezlocillin (MEZLIN®), methicillin (STAPHCILLIN®), nafcillin (UNIPEN®), oxacillin (PROSTAPHLIN®), penicillin G (PENTIDS®), penicillin V (PEN-VEE-K®), piperacillin (PIPRACIL®), temocillin (NEGABAN®), ticarcillin (TICAR®)), penicillin combinations (e.g., amoxicillin/clavulanate (AUGMENTIN®), ampicillin/sulbactam (UNASYN®), piperacillin/tazobactam (ZOSYN®), ticarcillin/clavulanate (TIMENTIN®)), polypeptides (e.g., bacitracin, colistin (COLY-MYCIN-S®), polymyxin B, quinolones (e.g., ciprofloxacin (CIPRO®, CIPROXIN®, CIPROBAY®), enoxacin (PENETREX®), gatifloxacin (TEQUIN®), levofloxacin (LEVAQUIN®), lomefloxacin (MAXAQUIN®), moxifloxacin (AVELOX®), nalidixic acid (NEGGRAM®), norfloxacin (NOROXIN®), ofloxacin (FLOXIN®, OCUFLOX®), trovafloxacin (TROVAN®), grepafloxacin (RAXAR®), sparfloxacin (ZAGAM®), temafloxacin (OMNIFLOX®)), sulfonamides (e.g., mafenide (SULFAMYLON®), sulfonamidochrysoidine (PRONTOSIL®), sulfacetamide (SULAMYD®, BLEPH-10®), sulfadiazine (MICRO-SULFON®), silver sulfadiazine (SILVADENE®), sulfamethizole (THIOSULFIL FORTE®), sulfamethoxazole (GANTANOL®), sulfanilimide, sulfasalazine (AZULFIDINE®), sulfisoxazole (GANTRISIN®), trimethoprim (PROLOPRIM®), TRIMPEX®), trimethoprim-sulfamethoxazole (co-trimoxazole) (TMP-SMX) (BACTRIM®, SEPTRA®)), tetracyclines (e.g., demeclocycline (DECLOMYCIN®), doxycycline (VIBRAMYCIN®), minocycline (MINOCIN®), oxytetracycline (TERRAMYCIN®), tetracycline (SUMYCIN®, ACHROMYCIN® V, STECLIN®)), drugs against mycobacteria (e.g., clofazimine (LAMPRENE®), dapsone (AVLOSULFON®), capreomycin (CAPASTAT®), cycloserine (SEROMYCIN®), ethambutol (MYAMBUTOL®), ethionamide (TRECATOR®), isoniazid (I.N.H.®), pyrazinamide (ALDINAMIDE®), rifampin (RIFADIN®, RIMACTANE®), rifabutin (MYCOBUTIN®), rifapentine (PRIFTIN®), streptomycin), and others (e.g., arsphenamine (SALVARSAN®), chloramphenicol (CHLOROMYCETIN®), fosfomycin (MONUROL®), fusidic acid (FUCIDIN®), linezolid (ZYVOX®), metronidazole (FLAGYL®), mupirocin (BACTROBAN®), platensimycin, quinupristin/dalfopristin (SYNERCID®), rifaximin (XIFAXAN®), thiamphenicol, tigecycline (TIGACYL®), tinidazole (TINDAMAX®, FASIGYN®)).

Conditions Associated with Viral Infection

[0902] In another embodiment, provided are methods for treating or preventing a viral infection and/or a disease, disorder, or condition associated with a viral infection, or a symptom thereof, in a subject, by administering a polynucleotide, primary construct or mmRNA encoding an anti-viral polypeptide, e.g., an anti-viral polypeptide described herein in combination with an anti-viral agent, e.g., an anti-viral polypeptide or a small molecule anti-viral agent described herein.

[0903] Diseases, disorders, or conditions associated with viral infections include, but are not limited to, acute febrile pharyngitis, pharyngoconjunctival fever, epidemic keratoconjunctivitis, infantile gastroenteritis, Coxsackie infections, infectious mononucleosis, Burkitt lymphoma, acute hepatitis, chronic hepatitis, hepatic cirrhosis, hepatocellular carcinoma, primary HSV-1 infection (e.g., gingivostomatitis in children, tonsillitis and pharyngitis in adults, keratoconjunctivitis), latent HSV-1 infection (e.g., herpes labialis and cold sores), primary HSV-2 infection, latent HSV-2 infection, aseptic meningitis, infectious mononucleosis, Cytomegalic inclusion disease, Kaposi sarcoma, multicentric Castleman disease, primary effusion lymphoma, AIDS, influenza, Reye syndrome, measles, postinfectious encephalomyelitis, Mumps, hyperplastic epithelial lesions (e.g., common, flat, plantar and anogenital warts, laryngeal papillomas, epidermodysplasia verruciformis), cervical carcinoma, squamous cell carcinomas, croup, pneumonia, bronchiolitis, common cold, Poliomyelitis, Rabies, bronchiolitis, pneumonia, influenza-like syndrome, severe bronchiolitis with pneumonia, German measles, congenital rubella, Varicella, and herpes zoster.

### Viral Pathogens

[0904] Viral pathogens include, but are not limited to, adenovirus, coxsackievirus, dengue virus, encephalitis virus, Epstein-Barr virus, hepatitis A virus, hepatitis B virus, hepatitis C virus, herpes simplex virus type 1, herpes simplex virus type 2, cytomegalovirus, human herpesvirus type 8, human immunodeficiency virus, influenza virus, measles virus, mumps virus, human papillomavirus, parainfluenza virus, poliovirus, rabies virus, respiratory syncytial virus, rubella virus, varicella-zoster virus, West Nile virus, and yellow fever virus. Viral pathogens may also include viruses that cause resistant viral infections.

### Antiviral Agents

[0905] Exemplary anti-viral agents include, but are not limited to, abacavir (ZIAGEN®), abacavir/lamivudine/zidovudine (Trizivir®), aciclovir or acyclovir (CYCLOVIR®, HERPEX®, ACIVIR®, ACIVIRAX®, ZOVIRAX®, ZOVIR®), adefovir (Preveon®, Hepsera®), amantadine (SYMMETREL®), amprenavir (AGENERASE®), ampligen, arbidol, atazanavir (REYATAZ®), boceprevir, cidofovir, darunavir (PREZISTA®), delavirdine (RESCRIPTOR®), didanosine (VIDEX®), docosanol (ABREVA®), edoxudine, efavirenz (SUSTIVA®, STOCRIN®), emtricitabine (EMTRIVA®), emtricitabine/tenofovir/efavirenz (ATRIPLA®), enfuvirtide (FUZEON®), entecavir (BARACLUDE®, ENTAVIR®), famciclovir (FAMVIR®), fomivirsen (VITRAVENE®), fosamprenavir (LEXIVA®, TELZIR®), foscarnet (FOSCAVIR®), fosfonet, ganciclovir (CYTOVENE®, CYMEVENE®, VITRASERT®), GS 9137 (ELVITEGRAVIR®), imiquimod (ALDARA®, ZYCLARA®, BESELNA®), indinavir (CRIXIVAN®), inosine, inosine pranobex (IMUNOVIR®), interferon type I, interferon type II, interferon type III, kutapressin (NEXAVIR®), lamivudine (ZEFFIX®, HEPTOVIR®, EPIVIR®), lamivudine/zidovudine (COMBIVIR®), lopinavir, loviride, maraviroc (SELZENTRY®, CELSENTRI®), methisazone, MK-2048, moroxydine, nelfinavir (VIRACEPT®), nevirapine (VIRAMUNE®), oseltamivir (TAMIFLU®), peginterferon alfa-2a (PEGASYS®), penciclovir (DENAVIR®), peramivir, pleconaril, podophyllotoxin (CONDYLOX®), raltegravir (ISENTRESS®), ribavirin (COPEGUs®, REBETOL®, RIBASPHERE®, VILONA® AND VIRAZOLE®), rimantadine (FLUMADINE®), ritonavir (NORVIR®), pyramidine, saquinavir (INVIRASE®, FORTOVASE®), stavudine, tea tree oil (melaleuca oil), tenofovir (VTREAD®), tenofovir/emtricitabine (TRUVADA®), tipranavir (APTIVUS®), trifluridine (VIROPTIC®), tromantadine (VIRU-MERZ®), valaciclovir (VALTREX®), valganciclovir (VALCYTE®), vicriviroc, vidarabine, viramidine, zalcitabine, zanamivir (RELENZA®), and zidovudine (azidothymidine (AZT), RETROVIR®, RETROVIS®).

Conditions Associated with Fungal Infections

[0906] Diseases, disorders, or conditions associated with fungal infections include, but are not limited to, aspergilloses, blastomycosis, candidasis, coccidioidomycosis, cryptococcosis, histoplasmosis, mycetomas, paracoccidioidomycosis, and tinea pedis. Furthermore, persons with immuno-deficiencies are particularly susceptible to disease by fungal genera such as Aspergillus, Candida, Cryptoccocus, Histoplasma, and Pneumocystis. Other fungi can attack eyes, nails, hair, and especially skin, the so-called dermatophytic fungi and keratinophilic fungi, and cause a variety of conditions, of which ringworms such as athlete's foot are common. Fungal spores are also a major cause of allergies, and a wide range of fungi from different taxonomic groups can evoke allergic reactions in some people.

### Fungal Pathogens

[0907] Fungal pathogens include, but are not limited to, Ascomycota (e.g., Fusarium oxysporum, Pneumocystis jirovecii, Aspergillus spp., Coccidioides immitis/posadasii, Candida albicans), Basidiomycota (e.g., Filobasidiella neoformans, Trichosporon), Microsporidia (e.g., Encephalitozoon cuniculi, Enterocytozoon bieneusi), and Mucoromycotina (e.g., Mucor circinelloides, Rhizopus oryzae, Lichtheimia corymbifera).

### Anti-Fungal Agents

[0908] Exemplary anti-fungal agents include, but are not limited to, polyene antifungals (e.g., natamycin, rimocidin, filipin, nystatin, amphotericin B, candicin, hamycin), imidazole antifungals (e.g., miconazole (MICATIN®, DAKTARIN®), ketoconazole (NIZORAL®, FUNGORAL®, SEBIZOLE®), clotrimazole (LOTRIMIN®, LOTRIMIN® AF, CANESTEN®), econazole, omoconazole, bifonazole, butoconazole, fenticonazole, isoconazole, oxiconazole, sertaconazole (ERTACZO®), sulconazole, tioconazole), triazole antifungals (e.g., albaconazole fluconazole, itraconazole, isavuconazole, ravuconazole, posaconazole, voriconazole, terconazole), thiazole antifungals (e.g., abafungin), allylamines (e.g., terbinafine (LAMISIL®), naftifine (NAFTIN®), butenafine (LOTRIMIN® Ultra)), echinocandins (e.g., anidulafungin, caspofungin, micafungin), and others (e.g., polygodial, benzoic acid, ciclopirox, tolnaftate (TINACTIN®, DESENEX®, AFTATE®), undecylenic acid, flucytosine or 5-fluorocytosine, griseofulvin, haloprogin, sodium bicarbonate, allicin).

Conditions Associated with Protozoal Infection

[0909] Diseases, disorders, or conditions associated with protozoal infections include, but are not limited to, amoebiasis, giardiasis, trichomoniasis, African Sleeping Sickness, American Sleeping Sickness, leishmaniasis (Kala-Azar), balantidiasis, toxoplasmosis, malaria, Acanthamoeba keratitis, and babesiosis.

### Protozoan Pathogens

[0910] Protozoal pathogens include, but are not limited to, Entamoeba histolytica, Giardia lambila, Trichomonas vaginalis, Trypanosoma brucei, T. cruzi, Leishmania donovani, Balantidium coli, Toxoplasma gondii, Plasmodium spp., and Babesia microti.

### Anti-Protozoan Agents

[0911] Exemplary anti-protozoal agents include, but are not limited to, eflornithine, furazolidone (FUROXONE®, DEPENDAL-M®), melarsoprol, metronidazole (FLAGYL®), ornidazole, paromomycin sulfate (HUMATIN®), pentamidine, pyrimethamine (DARAPRIM®), and tinidazole (TINDAMAX®, FASIGYN®).

Conditions Associated with Parasitic Infection

[0912] Diseases, disorders, or conditions associated with parasitic infections include, but are not limited to, Acanthamoeba keratitis, amoebiasis, ascariasis, babesiosis, balantidiasis, baylisascariasis, chagas disease, clonorchiasis, cochliomyia, cryptosporidiosis, diphyllobothriasis, dracunculiasis, echinococcosis, elephantiasis, enterobiasis, fascioliasis, fasciolopsiasis, filariasis, giardiasis, gnathostomiasis, hymenolepiasis, isosporiasis, katayama fever, leishmaniasis, lyme disease, malaria, metagonimiasis, myiasis, onchocerciasis, pediculosis, scabies, schistosomiasis, sleeping sickness, strongyloidiasis, taeniasis, toxocariasis, toxoplasmosis, trichinosis, and trichuriasis.

### Parasitic Pathogens

[0913] Parasitic pathogens include, but are not limited to, Acanthamoeba, Anisakis, Ascaris lumbricoides, botfly, Balantidium coli, bedbug, Cestoda, chiggers, Cochliomyia hominivorax, Entamoeba histolytica, Fasciola hepatica, Giardia lamblia, hookworm, Leishmania, Linguatula serrata, liver fluke, Loa loa, Paragonimus, pinworm, Plasmodium falciparum, Schistosoma, Strongyloides stercoralis, mite, tapeworm, Toxoplasma gondii, Trypanosoma, whipworm, Wuchereria bancrofti.

### Anti-Parasitic Agents

[0914] Exemplary anti-parasitic agents include, but are not limited to, antinematodes (e.g., mebendazole, pyrantel pamoate, thiabendazole, diethylcarbamazine, ivermectin), anticestodes (e.g., niclosamide, praziquantel, albendazole), antitrematodes (e.g., praziquantel), antiamoebics (e.g., rifampin, amphotericin B), and antiprotozoals (e.g., melarsoprol, eflornithine, metronidazole, tinidazole).

Conditions Associated with Prion Infection

[0915] Diseases, disorders, or conditions associated with prion infections include, but are not limited to Creutzfeldt-Jakob disease (CJD), iatrogenic Creutzfeldt-Jakob disease (iCJD), variant Creutzfeldt-Jakob disease (vCJD), familial Creutzfeldt-Jakob disease (fCJD), sporadic Creutzfeldt-Jakob disease (sCJD), Gerstmann-Straussler-Scheinker syndrome (GSS), fatal familial insomnia (FFI), Kuru, Scrapie, bovine spongiform encephalopathy (BSE), mad cow disease, transmissible mink encephalopathy (TME), chronic wasting disease (CWD), feline spongiform encephalopathy (FSE), exotic ungulate encephalopathy (EUE), and spongiform encephalopathy.

### Anti-Prion Agents

[0916] Exemplary anti-prion agents include, but are not limited to, flupirtine, pentosan polysuphate, quinacrine, and tetracyclic compounds.

### Modulation of the Immune Response

### Avoidance of the Immune Response

[0917] As described herein, a useful feature of the polynucleotides, primary constructs or mmRNA of the invention is the capacity to reduce, evade or avoid the innate immune response of a cell. In one aspect, provided herein are polynucleotides, primary constructs or mmRNA encoding a polypeptide of interest which when delivered to cells, results in a reduced immune response from the host as compared to the response triggered by a reference compound, e.g. an unmodified polynucleotide corresponding to a polynucleotide, primary construct or mmRNA of the invention, or a different polynucleotide, primary construct or mmRNA of the invention. As used herein, a “reference compound” is any molecule or substance which when administered to a mammal, results in an innate immune response having a known degree, level or amount of immune stimmulation. A reference compound need not be a nucleic acid molecule and it need not be any of the polynucleotides, primary constructs or mmRNA of the invention. Hence, the measure of a polynucleotides, primary constructs or mmRNA avoidance, evasion or failure to trigger an immune response can be expressed in terms relative to any compound or substance which is known to trigger such a response.

[0918] The term “innate immune response” includes a cellular response to exogenous single stranded nucleic acids, generally of viral or bacterial origin, which involves the induction of cytokine expression and release, particularly the interferons, and cell death. As used herein, the innate immune response or interferon response operates at the single cell level causing cytokine expression, cytokine release, global inhibition of protein synthesis, global destruction of cellular RNA, upregulation of major histocompatibility molecules, and/or induction of apoptotic death, induction of gene transcription of genes involved in apoptosis, anti-growth, and innate and adaptive immune cell activation. Some of the genes induced by type I IFNs include PKR, ADAR (adenosine deaminase acting on RNA), OAS (2′,5′-oligoadenylate synthetase), RNase L, and Mx proteins. PKR and ADAR lead to inhibition of translation initiation and RNA editing, respectively. OAS is a dsRNA-dependent synthetase that activates the endoribonuclease RNase L to degrade ssRNA.

[0919] In some embodiments, the innate immune response comprises expression of a Type I or Type II interferon, and the expression of the Type I or Type II interferon is not increased more than two-fold compared to a reference from a cell which has not been contacted with a polynucleotide, primary construct or mmRNA of the invention.

[0920] In some embodiments, the innate immune response comprises expression of one or more IFN signature genes and where the expression of the one of more IFN signature genes is not increased more than three-fold compared to a reference from a cell which has not been contacted with the polynucleotide, primary construct or mmRNA of the invention.

[0921] While in some circumstances, it might be advantageous to eliminate the innate immune response in a cell, the invention provides polynucleotides, primary constructs and mmRNA that upon administration result in a substantially reduced (significantly less) the immune response, including interferon signaling, without entirely eliminating such a response.

[0922] In some embodiments, the immune response is lower by 10%, 20%, 30%, 40%, 50%, 60%, 70%, 80%, 90%, 95%, 99%, 99.9%, or greater than 99.9% as compared to the immune response induced by a reference compound. The immune response itself may be measured by determining the expression or activity level of Type 1 interferons or the expression of interferon-regulated genes such as the toll-like receptors (e.g., TLR7 and TLR8). Reduction of innate immune response can also be measured by measuring the level of decreased cell death following one or more administrations to a cell population; e.g., cell death is 10%, 25%, 50%, 75%, 85%, 90%, 95%, or over 95% less than the cell death frequency observed with a reference compound. Moreover, cell death may affect fewer than 50%, 40%, 30%, 20%, 10%, 5%, 1%, 0.1%, 0.01% or fewer than 0.01% of cells contacted with the polynucleotide, primary construct or mmRNA.

[0923] In another embodiment, the polynucleotide, primary construct or mmRNA of the present invention is significantly less immunogenic than an unmodified in vitro-synthesized RNA molecule polynucleotide, or primary construct with the same sequence or a reference compound. As used herein, “significantly less immunogenic” refers to a detectable decrease in immunogenicity. In another embodiment, the term refers to a fold decrease in immunogenicity. In another embodiment, the term refers to a decrease such that an effective amount of the polynucleotide, primary construct or mmRNA can be administered without triggering a detectable immune response. In another embodiment, the term refers to a decrease such that the polynucleotide, primary construct or mmRNA can be repeatedly administered without eliciting an immune response sufficient to detectably reduce expression of the recombinant protein. In another embodiment, the decrease is such that the polynucleotide, primary construct or mmRNA can be repeatedly administered without eliciting an immune response sufficient to eliminate detectable expression of the recombinant protein.

[0924] In another embodiment, the polynucleotide, primary construct or mmRNA is 2-fold less immunogenic than its unmodified counterpart or reference compound. In another embodiment, immunogenicity is reduced by a 3-fold factor. In another embodiment, immunogenicity is reduced by a 5-fold factor. In another embodiment, immunogenicity is reduced by a 7-fold factor. In another embodiment, immunogenicity is reduced by a 10-fold factor. In another embodiment, immunogenicity is reduced by a 15-fold factor. In another embodiment, immunogenicity is reduced by a fold factor. In another embodiment, immunogenicity is reduced by a 50-fold factor. In another embodiment, immunogenicity is reduced by a 100-fold factor. In another embodiment, immunogenicity is reduced by a 200-fold factor. In another embodiment, immunogenicity is reduced by a 500-fold factor. In another embodiment, immunogenicity is reduced by a 1000-fold factor. In another embodiment, immunogenicity is reduced by a 2000-fold factor. In another embodiment, immunogenicity is reduced by another fold difference.

[0925] Methods of determining immunogenicity are well known in the art, and include, e.g. measuring secretion of cytokines (e.g. IL-12, IFNalpha, TNF-alpha, RANTES, MIP-1alpha or beta, IL-6, IFN-beta, or IL-8), measuring expression of DC activation markers (e.g. CD83, HLA-DR, CD80 and CD86), or measuring ability to act as an adjuvant for an adaptive immune response.

[0926] The the polynucleotide, primary construct or mmRNA of the invention, including the combination of modifications taught herein may have superior properties making them more suitable as therapeutic modalities.

[0927] It has been determined that the “all or none” model in the art is sorely insufficient to describe the biological phenomena associated with the therapeutic utility of modified mRNA. The present inventors have determined that to improve protein production, one may consider the nature of the modification, or combination of modifications, the percent modification and survey more than one cytokine or metric to determine the efficacy and risk profile of a particular modified mRNA.

[0928] In one aspect of the invention, methods of determining the effectiveness of a modified mRNA as compared to unmodified involves the measure and analysis of one or more cytokines whose expression is triggered by the administration of the exogenous nucleic acid of the invention. These values are compared to administration of an umodified nucleic acid or to a standard metric such as cytokine response, PolyIC, R-848 or other standard known in the art.

[0929] One example of a standard metric developed herein is the measure of the ratio of the level or amount of encoded polypeptide (protein) produced in the cell, tissue or organism to the level or amount of one or more (or a panel) of cytokines whose expression is triggered in the cell, tissue or organism as a result of administration or contact with the modified nucleic acid. Such ratios are referred to herein as the Protein:Cytokine Ratio or “PC” Ratio. The higher the PC ratio, the more efficacioius the modified nucleic acid (polynucleotide encoding the protein measured). Preferred PC Ratios, by cytokine, of the present invention may be greater than 1, greater than 10, greater than 100, greater than 1000, greater than 10,000 or more. Modified nucleic acids having higher PC Ratios than a modified nucleic acid of a different or unmodified construct are preferred.

[0930] The PC ratio may be further qualified by the percent modification present in the polynucleotide. For example, normalized to a 100% modified nucleic acid, the protein production as a function of cytokine (or risk) or cytokine profile can be determined.

[0931] In one embodiment, the present invention provides a method for determining, across chemistries, cytokines or percent modification, the relative efficacy of any particular modified the polynucleotide, primary construct or mmRNA by comparing the PC Ratio of the modified nucleic acid (polynucleotide, primary construct or mmRNA).

[0932] mmRNA containing varying levels of nucleobase subsitutions could be produced that maintain increased protein production and decreased immunostimulatory potential. The relative percentage of any modified nucleotide to its naturally occurring nucleotide counterpart can be varied during the IVT reaction (for instance, 100, 50, 25, 10, 5, 2.5, 1, 0.1, 0.01% 5 methyl cytidine usage versus cytidine; 100, 50, 25, 10, 5, 2.5, 1, 0.1, 0.01% pseudouridine or N1-methyl-pseudouridine usage versus uridine). mmRNA can also be made that utilize different ratios using 2 or more different nucleotides to the same base (for instance, different ratios of pseudouridine and N1-methyl-pseudouridine). mmRNA can also be made with mixed ratios at more than 1 “base” position, such as ratios of 5 methyl cytidine/cytidine and pseudouridine/N1-methyl-pseudouridine/uridine at the same time. Use of modified mRNA with altered ratios of modified nucleotides can be beneficial in reducing potential exposure to chemically modified nucleotides. Lastly, positional introduction of modified nucleotides into the mmRNA which modulate either protein production or immunostimulatory potential or both is also possible. The ability of such mmRNA to demonstrate these improved properties can be assessed in vitro (using assays such as the PBMC assay described herein), and can also be assessed in vivo through measurement of both mmRNA-encoded protein production and mediators of innate immune recognition such as cytokines.

[0933] In another embodiment, the relative immunogenicity of the polynucleotide, primary construct or mmRNA and its unmodified counterpart are determined by determining the quantity of the polynucleotide, primary construct or mmRNA required to elicit one of the above responses to the same degree as a given quantity of the unmodified nucleotide or reference compound. For example, if twice as much polynucleotide, primary construct or mmRNA is required to elicit the same response, than the polynucleotide, primary construct or mmRNA is two-fold less immunogenic than the unmodified nucleotide or the reference compound.

[0934] In another embodiment, the relative immunogenicity of the polynucleotide, primary construct or mmRNA and its unmodified counterpart are determined by determining the quantity of cytokine (e.g. IL-12, IFNalpha, TNF-alpha, RANTES, MIP-1alpha or beta, IL-6, IFN-beta, or IL-8) secreted in response to administration of the polynucleotide, primary construct or mmRNA, relative to the same quantity of the unmodified nucleotide or reference compound. For example, if one-half as much cytokine is secreted, than the polynucleotide, primary construct or mmRNA is two-fold less immunogenic than the unmodified nucleotide. In another embodiment, background levels of stimulation are subtracted before calculating the immunogenicity in the above methods.

[0935] Provided herein are also methods for performing the titration, reduction or elimination of the immune response in a cell or a population of cells. In some embodiments, the cell is contacted with varied doses of the same polynucleotides, primary constructs or mmRNA and dose response is evaluated. In some embodiments, a cell is contacted with a number of different polynucleotides, primary constructs or mmRNA at the same or different doses to determine the optimal composition for producing the desired effect. Regarding the immune response, the desired effect may be to avoid, evade or reduce the immune response of the cell. The desired effect may also be to alter the efficiency of protein production.

[0936] The polynucleotides, primary constructs and/or mmRNA of the present invention may be used to reduce the immune response using the method described in International Publication No. WO2013003475, herein incorporated by reference in its entirety.

### Activation of the Immune Response: Vaccines

[0937] Additionally, certain modified nucleosides, or combinations thereof, when introduced into the polynucleotides, primary constructs or mmRNA of the invention will activate the innate immune response. Such activating molecules are useful as adjuvants when combined with polypeptides and/or other vaccines. In certain embodiments, the activating molecules contain a translatable region which encodes for a polypeptide sequence useful as a vaccine, thus providing the ability to be a self-adjuvant.

[0938] In one embodiment, the polynucleotides, primary constructs and/or mmRNA of the invention may encode an immunogen. The delivery of the polynucleotides, primary constructs and/or mmRNA encoding an immunogen may activate the immune response. As a non-limiting example, the polynucleotides, primary constructs and/or mmRNA encoding an immunogen may be delivered to cells to trigger multiple innate response pathways (see International Pub. No. WO2012006377; herein incorporated by reference in its entirety). As another non-limiting example, the polynucleotides, primary constructs and mmRNA of the present invention encoding an immunogen may be delivered to a vertebrate in a dose amount large enough to be immunogenic to the vertebrate (see International Pub. No. WO2012006372 and WO2012006369; each of which is herein incorporated by reference in their entirety).

[0939] The polynucleotides, primary constructs or mmRNA of invention may encode a polypeptide sequence for a vaccine and may further comprise an inhibitor. The inhibitor may impair antigen presentation and/or inhibit various pathways known in the art. As a non-limiting example, the polynucleotides, primary constructs or mmRNA of the invention may be used for a vaccine in combination with an inhibitor which can impair antigen presentation (see International Pub. No. WO2012089225 and WO2012089338; each of which is herein incorporated by reference in their entirety).

[0940] In one embodiment, the polynucleotides, primary constructs or mmRNA of the invention may be self-replicating RNA. Self-replicating RNA molecules can enhance efficiency of RNA delivery and expression of the enclosed gene product. In one embodiment, the polynucleotides, primary constructs or mmRNA may comprise at least one modification described herein and/or known in the art. In one embodiment, the self-replicating RNA can be designed so that the self-replicating RNA does not induce production of infectious viral particles. As a non-limiting example the self-replicating RNA may be designed by the methods described in US Pub. No. US20110300205 and International Pub. No. WO2011005799, each of which is herein incorporated by reference in their entirety.

[0941] In one embodiment, the self-replicating polynucleotides, primary constructs or mmRNA of the invention may encode a protein which may raise the immune response. As a non-limiting example, the polynucleotides, primary constructs or mmRNA may be self-replicating mRNA may encode at least one antigen (see US Pub. No. US20110300205 and International Pub. Nos. WO2011005799, WO2013006838 and WO2013006842; each of which is herein incorporated by reference in their entirety).

[0942] In one embodiment, the self-replicating polynucleotides, primary constructs or mmRNA of the invention may be formulated using methods described herein or known in the art. As a non-limiting example, the self-replicating RNA may be formulated for delivery by the methods described in Geall et al (Nonviral delivery of self-amplifying RNA vaccines, PNAS 2012; PMID: 22908294).

[0943] In one embodiment, the polynucleotides, primary constructs or mmRNA of the present invention may encode amphipathic and/or immunogenic amphipathic peptides.

[0944] In on embodiment, a formulation of the polynucleotides, primary constructs or mmRNA of the present invention may further comprise an amphipathic and/or immunogenic amphipathic peptide. As a non-limiting example, the polynucleotides, primary constructs or mmRNA comprising an amphipathic and/or immunogenic amphipathic peptide may be formulated as described in US. Pub. No. US20110250237 and International Pub. Nos. WO2010009277 and WO2010009065; each of which is herein incorporated by reference in their entirety.

[0945] In one embodiment, the polynucleotides, primary constructs or mmRNA of the present invention may be immunostimultory. As a non-limiting example, the polynucleotides, primary constructs or mmRNA may encode all or a part of a positive-sense or a negative-sense stranded RNA virus genome (see International Pub No. WO2012092569 and US Pub No. US20120177701, each of which is herein incorporated by reference in their entirety). In another non-limiting example, the immunostimultory polynucleotides, primary constructs or mmRNA of the present invention may be formulated with an excipient for administration as described herein and/or known in the art (see International Pub No. WO2012068295 and US Pub No. US20120213812, each of which is herein incorporated by reference in their entirety).

[0946] In one embodiment, the response of the vaccine formulated by the methods described herein may be enhanced by the addition of various compounds to induce the therapeutic effect. As a non-limiting example, the vaccine formulation may include a MHC II binding peptide or a peptide having a similar sequence to a MHC II binding peptide (see International Pub Nos. WO2012027365, WO2011031298 and US Pub No. US20120070493, US20110110965, each of which is herein incorporated by reference in their entirety). As another example, the vaccine formulations may comprise modified nicotinic compounds which may generate an antibody response to nicotine residue in a subject (see International Pub No. WO2012061717 and US Pub No. US20120114677, each of which is herein incorporated by reference in their entirety).

### Naturally Occurring Mutants

[0947] In another embodiment, the polynucleotides, primary construct and/or mmRNA can be utilized to express variants of naturally occurring proteins that have an improved disease modifying activity, including increased biological activity, improved patient outcomes, or a protective function, etc. Many such modifier genes have been described in mammals (Nadeau, Current Opinion in Genetics & Development 2003 13: 290-295; Hamilton and Yu, PLoS Genet. 2012; 8: e1002644; Corder et al., Nature Genetics 1994 7:180-184; all herein incorporated by reference in their entireties). Examples in humans include Apo E2 protein, Apo A-I variant proteins (Apo A-I Milano, Apo A-I Paris), hyperactive Factor IX protein (Factor IX Padua Arg338Lys), transthyretin mutants (TTR Thr119Met). Expression of ApoE2 (cys112, cys158) has been shown to confer protection relative to other ApoE isoforms (ApoE3 (cys112, arg158), and ApoE4 (arg112, arg158)) by reducing susceptibility to Alzheimer's disease and possibly other conditions such as cardiovascular disease (Corder et al., Nature Genetics 1994 7: 180-184; Seripa et al., Rejuvenation Res. 2011 14: 491-500; Liu et al. Nat Rev Neurol. 2013 9: 106-118; all herein incorporated by reference in their entireties). Expression of Apo A-I variants has been associated with reduced cholesterol (deGoma and Rader, 2011 Nature Rev Cardiol 8: 266-271; Nissen et al., 2003 JAMA 290: 2292-2300; all herein incorporated by reference in its entirety). The amino acid sequence of ApoA-I in certain populations has been changed to cysteine in Apo A-I Milano (Arg 173 changed to Cys) and in Apo A-I Paris (Arg 151 changed to Cys). Factor IX mutation at position R338L (FIX Padua) results in a Factor IX protein that has ˜10-fold increased activity (Simioni et al., N Engl J Med. 2009 361: 1671-1675; Finn et al., Blood. 2012 120: 4521-4523; Cantore et al., Blood. 2012 120: 4517-20; all herein incorporated by reference in their entireties). Mutation of transthyretin at positions 104 or 119 (Arg104 His, Thr 119Met) has been shown to provide protection to patients also harboring the disease causing Val30Met mutations (Saraiva, Hum Mutat. 2001 17: 493-503; DATA BASE ON TRANSTHYRETIN MUTATIONS www.ibmc.up.pt/mjsaraiva/ttrmut.html; all herein incorporated by reference in its entirety). Differences in clinical presentation and severity of symptoms among Portuguese and Japanese Met 30 patients carrying respectively the Met 119 and the His104 mutations are observed with a clear protective effect exerted by the non pathogenic mutant (Coelho et al. 1996 Neuromuscular Disorders (Suppl) 6: S20; Terazaki et al. 1999. Biochem Biophys Res Commun 264: 365-370; all herein incorporated by reference in its entirety), which confer more stability to the molecule. A modified mRNA encoding these protective TTR alleles can be expressed in TTR amyloidosis patients, thereby reducing the effect of the pathogenic mutant TTR protein.

### Major Groove Interacting Partners

[0948] As described herein, the phrase “major groove interacting partner” refers to RNA recognition receptors that detect and respond to RNA ligands through interactions, e.g. binding, with the major groove face of a nucleotide or nucleic acid. As such, RNA ligands comprising modified nucleotides or nucleic acids such as the polynucleotide, primary construct or mmRNA as described herein decrease interactions with major groove binding partners, and therefore decrease an innate immune response.

[0949] Example major groove interacting, e.g. binding, partners include, but are not limited to the following nucleases and helicases. Within membranes, TLRs (Toll-like Receptors) 3, 7, and 8 can respond to single- and double-stranded RNAs. Within the cytoplasm, members of the superfamily 2 class of DEX(D/H) helicases and ATPases can sense RNAs to initiate antiviral responses. These helicases include the RIG-I (retinoic acid-inducible gene I) and MDA5 (melanoma differentiation-associated gene 5). Other examples include laboratory of genetics and physiology 2 (LGP2), HIN-200 domain containing proteins, or Helicase-domain containing proteins.

### Targeting of Pathogenic Organisms or Diseased Cells

[0950] Provided herein are methods for targeting pathogenic microorganisms, such as bacteria, yeast, protozoa, helminthes and the like, or diseased cells such as cancer cells using polynucleotides, primary constructs or mmRNA that encode cytostatic or cytotoxic polypeptides. Preferably the mRNA introduced contains modified nucleosides or other nucleic acid sequence modifications that are translated exclusively, or preferentially, in the target pathogenic organism, to reduce possible off-target effects of the therapeutic. Such methods are useful for removing pathogenic organisms or killing diseased cells found in any biological material, including blood, semen, eggs, and transplant materials including embryos, tissues, and organs.

### Bioprocessing

[0951] The methods provided herein may be useful for enhancing protein product yield in a cell culture process. In a cell culture containing a plurality of host cells, introduction of a polynucleotide, primary construct or mmRNA described herein results in increased protein production efficiency relative to a corresponding unmodified nucleic acid. Such increased protein production efficiency can be demonstrated, e.g., by showing increased cell transfection, increased protein translation from the polynucleotide, primary construct or mmRNA, decreased nucleic acid degradation, and/or reduced innate immune response of the host cell. Protein production can be measured by enzyme-linked immunosorbent assay (ELISA), and protein activity can be measured by various functional assays known in the art. The protein production may be generated in a continuous or a batch-fed mammalian process.

[0952] Additionally, it is useful to optimize the expression of a specific polypeptide in a cell line or collection of cell lines of potential interest, particularly a polypeptide of interest such as a protein variant of a reference protein having a known activity. In one embodiment, provided is a method of optimizing expression of a polypeptide of interest in a target cell, by providing a plurality of target cell types, and independently contacting with each of the plurality of target cell types a polynucleotide, primary construct or mmRNA encoding a polypeptide of interest. The cells may be transfected with two or more polynucleotide, primary construct or mmRNA simultaneously or sequentially.

[0953] In certain embodiments, multiple rounds of the methods described herein may be used to obtain cells with increased expression of one or more nucleic acids or proteins of interest. For example, cells may be transfected with one or more polynucleotide, primary construct or mmRNA that encode a nucleic acid or protein of interest. The cells may be isolated according to methods described herein before being subjected to further rounds of transfections with one or more other nucleic acids which encode a nucleic acid or protein of interest before being isolated again. This method may be useful for generating cells with increased expression of a complex of proteins, nucleic acids or proteins in the same or related biological pathway, nucleic acids or proteins that act upstream or downstream of each other, nucleic acids or proteins that have a modulating, activating or repressing function to each other, nucleic acids or proteins that are dependent on each other for function or activity, or nucleic acids or proteins that share homology.

[0954] Additionally, culture conditions may be altered to increase protein production efficiency. Subsequently, the presence and/or level of the polypeptide of interest in the plurality of target cell types is detected and/or quantitated, allowing for the optimization of a polypeptide's expression by selection of an efficient target cell and cell culture conditions relating thereto. Such methods are particularly useful when the polypeptide contains one or more post-translational modifications or has substantial tertiary structure, situations which often complicate efficient protein production.

[0955] In one embodiment, the cells used in the methods of the present invention may be cultured. The cells may be cultured in suspension or as adherent cultures. The cells may be cultured in a varied of vessels including, but not limited to, bioreactors, cell bags, wave bags, culture plates, flasks and other vessels well known to those of ordinary skill in the art. Cells may be cultured in IMDM (Invitrogen, Catalog number 12440-53) or any other suitable media including, but not limited to, chemically defined media formulations. The ambient conditions which may be suitable for cell culture, such as temperature and atmospheric composition, are well known to those skilled in the art. The methods of the invention may be used with any cell that is suitable for use in protein production.

[0956] The invention provides for the repeated introduction (e.g., transfection) of modified nucleic acids into a target cell population, e.g., in vitro, ex vivo, in situ, or in vivo. For example, contacting the same cell population may be repeated one or more times (such as two, three, four, five or more than five times). In some embodiments, the step of contacting the cell population with the polynucleotides, primary constructs or mmRNA is repeated a number of times sufficient such that a predetermined efficiency of protein translation in the cell population is achieved. Given the often reduced cytotoxicity of the target cell population provided by the nucleic acid modifications, repeated transfections are achievable in a diverse array of cell types and within a variety of tissues, as provided herein.

[0957] In one embodiment, the bioprocessing methods of the present invention may be used to produce antibodies or functional fragments thereof. The functional fragments may comprise a Fab, Fab′, F(ab′)₂, an Fv domain, an scFv, or a diabody. They may be variable in any region including the complement determining region (CDR). In one embodiment, there is complete diversity in the CDR3 region. In another embodiment, the antibody is substantially conserved except in the CDR3 region.

[0958] Antibodies may be made which bind or associate with any biomolecule, whether human, pathogenic or non-human in origin. The pathogen may be present in a non-human mammal, a clinical specimen or from a commercial product such as a cosmetic or pharmaceutical material. They may also bind to any specimen or sample including clinical specimens or tissue samples from any organism.

[0959] In some embodiments, the contacting step is repeated multiple times at a frequency selected from the group consisting of: 6 hour, 12 hour, 24 hour, 36 hour, 48 hour, 72 hour, 84 hour, 96 hour, and 108 hour and at concentrations of less than 20 nM, less than 50 nM, less than 80 nM or less than 100 nM. Compositions may also be administered at less than 1 mM, less than 5 mM, less than 10 mM, less than 100 mM or less than 500 mM.

[0960] In some embodiments, the polynucleotides, primary constructs or mmRNA are added at an amount of 50 molecules per cell, 100 molecules/cell, 200 molecules/cell, 300 molecules/cell, 400 molecules/cell, 500 molecules/cell, 600 molecules/cell, 700 molecules/cell, 800 molecules/cell, 900 molecules/cell, 1000 molecules/cell, 2000 molecules/cell, or 5000 molecules/cell.

[0961] In other embodiments, the polynucleotides, primary constructs or mmRNA are added at a concentration selected from the group consisting of: 0.01 fmol/106 cells, 0.1 fmol/106 cells, 0.5 fmol/106 cells, 0.75 fmol/106 cells, 1 fmol/106 cells, 2 fmol/106 cells, 5 fmol/106 cells, 10 fmol/106 cells, 20 fmol/106 cells, 30 fmol/106 cells, 40 fmol/106 cells, 50 fmol/106 cells, 60 fmol/106 cells, 100 fmol/106 cells, 200 fmol/106 cells, 300 fmol/106 cells, 400 fmol/106 cells, 500 fmol/106 cells, 700 fmol/106 cells, 800 fmol/106 cells, 900 fmol/106 cells, and 1 pmol/106 cells.

[0962] In some embodiments, the production of a biological product upon is detected by monitoring one or more measurable bioprocess parameters, such as a parameter selected from the group consisting of: cell density, pH, oxygen levels, glucose levels, lactic acid levels, temperature, and protein production. Protein production can be measured as specific productivity (SP) (the concentration of a product, such as a heterologously expressed polypeptide, in solution) and can be expressed as mg/L or g/L; in the alternative, specific productivity can be expressed as pg/cell/day. An increase in SP can refer to an absolute or relative increase in the concentration of a product produced under two defined set of conditions (e.g., when compared with controls not treated with modified mRNA(s)).

### Cells

[0963] In one embodiment, the cells are selected from the group consisting of mammalian cells, bacterial cells, plant, microbial, algal and fungal cells. In some embodiments, the cells are mammalian cells, such as, but not limited to, human, mouse, rat, goat, horse, rabbit, hamster or cow cells. In a further embodiment, the cells may be from an established cell line, including, but not limited to, HeLa, NSO, SP2/0, KEK 293T, Vero, Caco, Caco-2, MDCK, COS-1, COS-7, K562, Jurkat, CHO-K1, DG44, CHOK1SV, CHO-S, Huvec, CV-1, Huh-7, NIH3T3, HEK293, 293, A549, HepG2, EVIR-90, MCF-7, U-20S, Per.C6, SF9, SF21 or Chinese Hamster Ovary (CHO) cells.

[0964] In certain embodiments, the cells are fungal cells, such as, but not limited to, Chrysosporium cells, Aspergillus cells, Trichoderma cells, Dictyostelium cells, Candida cells, Saccharomyces cells, Schizosaccharomyces cells, and Penicillium cells.

[0965] In certain embodiments, the cells are bacterial cells such as, but not limited to, E. coli, B. subtilis, or BL21 cells. Primary and secondary cells to be transfected by the methods of the invention can be obtained from a variety of tissues and include, but are not limited to, all cell types which can be maintained in culture. For examples, primary and secondary cells which can be transfected by the methods of the invention include, but are not limited to, fibroblasts, keratinocytes, epithelial cells (e.g., mammary epithelial cells, intestinal epithelial cells), endothelial cells, glial cells, neural cells, formed elements of the blood (e.g., lymphocytes, bone marrow cells), muscle cells and precursors of these somatic cell types. Primary cells may also be obtained from a donor of the same species or from another species (e.g., mouse, rat, rabbit, cat, dog, pig, cow, bird, sheep, goat, horse).

### Purification and Isolation

[0966] Those of ordinary skill in the art should be able to make a determination of the methods to use to purify or isolate of a protein of interest from cultured cells. Generally, this is done through a capture method using affinity binding or non-affinity purification. If the protein of interest is not secreted by the cultured cells, then a lysis of the cultured cells should be performed prior to purification or isolation. One may use unclarified cell culture fluid containing the protein of interest along with cell culture media components as well as cell culture additives, such as anti-foam compounds and other nutrients and supplements, cells, cellular debris, host cell proteins, DNA, viruses and the like in the present invention. The process may be conducted in the bioreactor itself. The fluid may either be preconditioned to a desired stimulus such as pH, temperature or other stimulus characteristic or the fluid can be conditioned upon the addition of polymer(s) or the polymer(s) can be added to a carrier liquid that is properly conditioned to the required parameter for the stimulus condition required for that polymer to be solubilized in the fluid. The polymer may be allowed to circulate thoroughly with the fluid and then the stimulus may be applied (change in pH, temperature, salt concentration, etc) and the desired protein and polymer(s) precipitate can out of the solution. The polymer and the desired protein(s) can be separated from the rest of the fluid and optionally washed one or more times to remove any trapped or loosely bound contaminants. The desired protein may then be recovered from the polymer(s) by, for example, elution and the like. Preferably, the elution may be done under a set of conditions such that the polymer remains in its precipitated form and retains any impurities to it during the selected elution of the desired protein. The polymer and protein as well as any impurities may be solubilized in a new fluid such as water or a buffered solution and the protein may be recovered by a means such as affinity, ion exchanged, hydrophobic, or some other type of chromatography that has a preference and selectivity for the protein over that of the polymer or impurities. The eluted protein may then be recovered and may be subjected to additional processing steps, either batch like steps or continuous flow through steps if appropriate.

[0967] In another embodiment, it may be useful to optimize the expression of a specific polypeptide in a cell line or collection of cell lines of potential interest, particularly a polypeptide of interest such as a protein variant of a reference protein having a known activity. In one embodiment, provided is a method of optimizing expression of a polypeptide of interest in a target cell, by providing a plurality of target cell types, and independently contacting with each of the plurality of target cell types a modified mRNA encoding a polypeptide. Additionally, culture conditions may be altered to increase protein production efficiency. Subsequently, the presence and/or level of the polypeptide of interest in the plurality of target cell types is detected and/or quantitated, allowing for the optimization of a polypeptide of interest's expression by selection of an efficient target cell and cell culture conditions relating thereto. Such methods may be useful when the polypeptide of interest contains one or more post-translational modifications or has substantial tertiary structure, which often complicate efficient protein production.

### Protein Recovery

[0968] The protein of interest may be preferably recovered from the culture medium as a secreted polypeptide, or it can be recovered from host cell lysates if expressed without a secretory signal. It may be necessary to purify the protein of interest from other recombinant proteins and host cell proteins in a way that substantially homogenous preparations of the protein of interest are obtained. The cells and/or particulate cell debris may be removed from the culture medium or lysate. The product of interest may then be purified from contaminant soluble proteins, polypeptides and nucleic acids by, for example, fractionation on immunoaffinity or ion-exchange columns, ethanol precipitation, reverse phase IPLC (RP-IPLC), SEPHADEX® chromatography, chromatography on silica or on a cation exchange resin such as DEAE. Methods of purifying a protein heterologous expressed by a host cell are well known in the art.

[0969] Methods and compositions described herein may be used to produce proteins which are capable of attenuating or blocking the endogenous agonist biological response and/or antagonizing a receptor or signaling molecule in a mammalian subject. For example, IL-12 and IL-23 receptor signaling may be enhanced in chronic autoimmune disorders such as multiple sclerosis and inflammatory diseases such as rheumatoid arthritis, psoriasis, lupus erythematosus, ankylosing spondylitis and Chron's disease (Kikly K, Liu L, Na S, Sedgwich J D (2006) Cur. Opin. Immunol. 18(6): 670-5). In another embodiment, a nucleic acid encodes an antagonist for chemokine receptors. Chemokine receptors CXCR-4 and CCR-5 are required for HIV enry into host cells (Arenzana-Seisdedos F et al, (1996) Nature. October 3; 383 (6599):400).

### Gene Silencing

[0970] The polynucleotides, primary constructs and mmRNA described herein are useful to silence (i.e., prevent or substantially reduce) expression of one or more target genes in a cell population. A polynucleotide, primary construct or mmRNA encoding a polypeptide of interest capable of directing sequence-specific histone H3 methylation is introduced into the cells in the population under conditions such that the polypeptide is translated and reduces gene transcription of a target gene via histone H3 methylation and subsequent heterochromatin formation. In some embodiments, the silencing mechanism is performed on a cell population present in a mammalian subject. By way of non-limiting example, a useful target gene is a mutated Janus Kinase-2 family member, wherein the mammalian subject expresses the mutant target gene suffers from a myeloproliferative disease resulting from aberrant kinase activity.

[0971] Co-administration of polynucleotides, primary constructs and mmRNA and RNAi agents are also provided herein.

### Modulation of Biological Pathways

[0972] The rapid translation polynucleotides, primary constructs and mmRNA introduced into cells provides a desirable mechanism of modulating target biological pathways. Such modulation includes antagonism or agonism of a given pathway. In one embodiment, a method is provided for antagonizing a biological pathway in a cell by contacting the cell with an effective amount of a composition comprising a polynucleotide, primary construct or mmRNA encoding a polypeptide of interest, under conditions such that the polynucleotides, primary constructs and mmRNA is localized into the cell and the polypeptide is capable of being translated in the cell from the polynucleotides, primary constructs and mmRNA, wherein the polypeptide inhibits the activity of a polypeptide functional in the biological pathway. Exemplary biological pathways are those defective in an autoimmune or inflammatory disorder such as multiple sclerosis, rheumatoid arthritis, psoriasis, lupus erythematosus, ankylosing spondylitis colitis, or Crohn's disease; in particular, antagonism of the IL-12 and IL-23 signaling pathways are of particular utility. (See Kikly K, Liu L, Na S, Sedgwick J D (2006) Curr. Opin. Immunol. 18 (6): 670-5).

[0973] Further, provided are polynucleotide, primary construct or mmRNA encoding an antagonist for chemokine receptors; chemokine receptors CXCR-4 and CCR-5 are required for, e.g., HIV entry into host cells (Arenzana-Seisdedos F et al, (1996) Nature. October 3; 383(6599):400).

[0974] Alternatively, provided are methods of agonizing a biological pathway in a cell by contacting the cell with an effective amount of a polynucleotide, primary construct or mmRNA encoding a recombinant polypeptide under conditions such that the nucleic acid is localized into the cell and the recombinant polypeptide is capable of being translated in the cell from the nucleic acid, and the recombinant polypeptide induces the activity of a polypeptide functional in the biological pathway. Exemplary agonized biological pathways include pathways that modulate cell fate determination. Such agonization is reversible or, alternatively, irreversible.

### Expression of Ligand or Receptor on Cell Surface

[0975] In some aspects and embodiments of the aspects described herein, the polynucleotides, primary constructs or mmRNA described herein can be used to express a ligand or ligand receptor on the surface of a cell (e.g., a homing moiety). A ligand or ligand receptor moiety attached to a cell surface can permit the cell to have a desired biological interaction with a tissue or an agent in vivo. A ligand can be an antibody, an antibody fragment, an aptamer, a peptide, a vitamin, a carbohydrate, a protein or polypeptide, a receptor, e.g., cell-surface receptor, an adhesion molecule, a glycoprotein, a sugar residue, a therapeutic agent, a drug, a glycosaminoglycan, or any combination thereof. For example, a ligand can be an antibody that recognizes a cancer-cell specific antigen, rendering the cell capable of preferentially interacting with tumor cells to permit tumor-specific localization of a modified cell. A ligand can confer the ability of a cell composition to accumulate in a tissue to be treated, since a preferred ligand may be capable of interacting with a target molecule on the external face of a tissue to be treated. Ligands having limited cross-reactivity to other tissues are generally preferred.

[0976] In some cases, a ligand can act as a homing moiety which permits the cell to target to a specific tissue or interact with a specific ligand. Such homing moieties can include, but are not limited to, any member of a specific binding pair, antibodies, monoclonal antibodies, or derivatives or analogs thereof, including without limitation: Fv fragments, single chain Fv (scFv) fragments, Fab′ fragments, F(ab′)₂ fragments, single domain antibodies, camelized antibodies and antibody fragments, humanized antibodies and antibody fragments, and multivalent versions of the foregoing; multivalent binding reagents including without limitation: monospecific or bispecific antibodies, such as disulfide stabilized Fv fragments, scFv tandems ((SCFV)₂ fragments), diabodies, tribodies or tetrabodies, which typically are covalently linked or otherwise stabilized (i.e., leucine zipper or helix stabilized) scFv fragments; and other homing moieties include for example, aptamers, receptors, and fusion proteins.

[0977] In some embodiments, the homing moiety may be a surface-bound antibody, which can permit tuning of cell targeting specificity. This is especially useful since highly specific antibodies can be raised against an epitope of interest for the desired targeting site. In one embodiment, multiple antibodies are expressed on the surface of a cell, and each antibody can have a different specificity for a desired target. Such approaches can increase the avidity and specificity of homing interactions.

[0978] A skilled artisan can select any homing moiety based on the desired localization or function of the cell, for example an estrogen receptor ligand, such as tamoxifen, can target cells to estrogen-dependent breast cancer cells that have an increased number of estrogen receptors on the cell surface. Other non-limiting examples of ligand/receptor interactions include CCRI (e.g., for treatment of inflamed joint tissues or brain in rheumatoid arthritis, and/or multiple sclerosis), CCR7, CCR8 (e.g., targeting to lymph node tissue), CCR6, CCR9, CCR10 (e.g., to target to intestinal tissue), CCR4, CCR10 (e.g., for targeting to skin), CXCR4 (e.g., for general enhanced transmigration), HCELL (e.g., for treatment of inflammation and inflammatory disorders, bone marrow), Alpha4beta7 (e.g., for intestinal mucosa targeting), VLA-4/VCAM-1 (e.g., targeting to endothelium). In general, any receptor involved in targeting (e.g., cancer metastasis) can be harnessed for use in the methods and compositions described herein.

### Modulation of Cell Lineage

[0979] Provided are methods of inducing an alteration in cell fate in a target mammalian cell. The target mammalian cell may be a precursor cell and the alteration may involve driving differentiation into a lineage, or blocking such differentiation. Alternatively, the target mammalian cell may be a differentiated cell, and the cell fate alteration includes driving de-differentiation into a pluripotent precursor cell, or blocking such de-differentiation, such as the dedifferentiation of cancer cells into cancer stem cells. In situations where a change in cell fate is desired, effective amounts of mRNAs encoding a cell fate inductive polypeptide is introduced into a target cell under conditions such that an alteration in cell fate is induced. In some embodiments, the modified mRNAs are useful to reprogram a subpopulation of cells from a first phenotype to a second phenotype. Such a reprogramming may be temporary or permanent.

[0980] Optionally, the reprogramming induces a target cell to adopt an intermediate phenotype.

[0981] Additionally, the methods of the present invention are particularly useful to generate induced pluripotent stem cells (iPS cells) because of the high efficiency of transfection, the ability to re-transfect cells, and the tenability of the amount of recombinant polypeptides produced in the target cells. Further, the use of iPS cells generated using the methods described herein is expected to have a reduced incidence of teratoma formation.

[0982] Also provided are methods of reducing cellular differentiation in a target cell population. For example, a target cell population containing one or more precursor cell types is contacted with a composition having an effective amount of a polynucleotides, primary constructs and mmRNA encoding a polypeptide, under conditions such that the polypeptide is translated and reduces the differentiation of the precursor cell. In non-limiting embodiments, the target cell population contains injured tissue in a mammalian subject or tissue affected by a surgical procedure. The precursor cell is, e.g., a stromal precursor cell, a neural precursor cell, or a mesenchymal precursor cell.

[0983] In a specific embodiment, provided are polynucleotide, primary construct or mmRNA that encode one or more differentiation factors Gata4, Mef2c and Tbx4. These mRNA-generated factors are introduced into fibroblasts and drive the reprogramming into cardiomyocytes. Such a reprogramming can be performed in vivo, by contacting an mRNA-containing patch or other material to damaged cardiac tissue to facilitate cardiac regeneration. Such a process promotes cardiomyocyte genesis as opposed to fibrosis.

### Mediation of Cell Death

[0984] In one embodiment, polynucleotides, primary constructs or mmRNA compositions can be used to induce apoptosis in a cell (e.g., a cancer cell) by increasing the expression of a death receptor, a death receptor ligand or a combination thereof. This method can be used to induce cell death in any desired cell and has particular usefulness in the treatment of cancer where cells escape natural apoptotic signals.

[0985] Apoptosis can be induced by multiple independent signaling pathways that converge upon a final effector mechanism consisting of multiple interactions between several “death receptors” and their ligands, which belong to the tumor necrosis factor (TNF) receptor/ligand superfamily. The best-characterized death receptors are CD95 (“Fas”), TNFRI (p55), death receptor 3 (DR3 or Apo3/TRAMO), DR4 and DR5 (apo2-TRAIL-R2). The final effector mechanism of apoptosis may be the activation of a series of proteinases designated as caspases. The activation of these caspases results in the cleavage of a series of vital cellular proteins and cell death. The molecular mechanism of death receptors/ligands-induced apoptosis is well known in the art. For example, Fas/FasL-mediated apoptosis is induced by binding of three FasL molecules which induces trimerization of Fas receptor via C-terminus death domains (DDs), which in turn recruits an adapter protein FADD (Fas-associated protein with death domain) and Caspase-8. The oligomerization of this trimolecular complex, Fas/FAIDD/caspase-8, results in proteolytic cleavage of proenzyme caspase-8 into active caspase-8 that, in turn, initiates the apoptosis process by activating other downstream caspases through proteolysis, including caspase-3. Death ligands in general are apoptotic when formed into trimers or higher order of structures. As monomers, they may serve as antiapoptotic agents by competing with the trimers for binding to the death receptors.

[0986] In one embodiment, the polynucleotides, primary constructs or mmRNA composition encodes for a death receptor (e.g., Fas, TRAIL, TRAMO, TNFR, TLR etc). Cells made to express a death receptor by transfection of polynucleotides, primary constructs and mmRNA become susceptible to death induced by the ligand that activates that receptor. Similarly, cells made to express a death ligand, e.g., on their surface, will induce death of cells with the receptor when the transfected cell contacts the target cell. In another embodiment, the polynucleotides, primary constructs and mmRNA composition encodes for a death receptor ligand (e.g., FasL, TNF, etc). In another embodiment, the polynucleotides, primary constructs and mmRNA composition encodes a caspase (e.g., caspase 3, caspase 8, caspase 9 etc). Where cancer cells often exhibit a failure to properly differentiate to a non-proliferative or controlled proliferative form, in another embodiment, the synthetic, polynucleotides, primary constructs and mmRNA composition encodes for both a death receptor and its appropriate activating ligand. In another embodiment, the synthetic, polynucleotides, primary constructs and mmRNA composition encodes for a differentiation factor that when expressed in the cancer cell, such as a cancer stem cell, will induce the cell to differentiate to a non-pathogenic or nonself-renewing phenotype (e.g., reduced cell growth rate, reduced cell division etc) or to induce the cell to enter a dormant cell phase (e.g., G₀ resting phase).

[0987] One of skill in the art will appreciate that the use of apoptosis-inducing techniques may require that the polynucleotides, primary constructs or mmRNA are appropriately targeted to e.g., tumor cells to prevent unwanted wide-spread cell death. Thus, one can use a delivery mechanism (e.g., attached ligand or antibody, targeted liposome etc) that recognizes a cancer antigen such that the polynucleotides, primary constructs or mmRNA are expressed only in cancer cells.

### Cosmetic Applications

[0988] In one embodiment, the polynucleotides, primary constructs and/or mmRNA may be used in the treatment, amelioration or prophylaxis of cosmetic conditions. Such conditions include acne, rosacea, scarring, wrinkles, eczema, shingles, psoriasis, age spots, birth marks, dry skin, calluses, rash (e.g., diaper, heat), scabies, hives, warts, insect bites, vitiligo, dandruff, freckles, and general signs of aging.

### VI. Kits and Devices

### Kits

[0989] The invention provides a variety of kits for conveniently and/or effectively carrying out methods of the present invention. Typically kits will comprise sufficient amounts and/or numbers of components to allow a user to perform multiple treatments of a subject(s) and/or to perform multiple experiments.

[0990] In one aspect, the present invention provides kits comprising the molecules (polynucleotides, primary constructs or mmRNA) of the invention. In one embodiment, the kit comprises one or more functional antibodies or function fragments thereof.

[0991] Said kits can be for protein production, comprising a first polynucleotide, primary construct or mmRNA comprising a translatable region. The kit may further comprise packaging and instructions and/or a delivery agent to form a formulation composition. The delivery agent may comprise a saline, a buffered solution, a lipidoid or any delivery agent disclosed herein.

[0992] In one embodiment, the buffer solution may include sodium chloride, calcium chloride, phosphate and/or EDTA. In another embodiment, the buffer solution may include, but is not limited to, saline, saline with 2 mM calcium, 5% sucrose, 5% sucrose with 2 mM calcium, 5% Mannitol, 5% Mannitol with 2 mM calcium, Ringer's lactate, sodium chloride, sodium chloride with 2 mM calcium and mannose (See e.g., U.S. Pub. No. 20120258046; herein incorporated by reference in its entirety). In a futher embodiment, the buffer solutions may be precipitated or it may be lyophilized. The amount of each component may be varied to enable consistent, reproducible higher concentration saline or simple buffer formulations. The components may also be varied in order to increase the stability of modified RNA in the buffer solution over a period of time and/or under a variety of conditions. In one aspect, the present invention provides kits for protein production, comprising: a polynucleotide, primary construct or mmRNA comprising a translatable region, provided in an amount effective to produce a desired amount of a protein encoded by the translatable region when introduced into a target cell; a second polynucleotide comprising an inhibitory nucleic acid, provided in an amount effective to substantially inhibit the innate immune response of the cell; and packaging and instructions.

[0993] In one aspect, the present invention provides kits for protein production, comprising a polynucleotide, primary construct or mmRNA comprising a translatable region, wherein the polynucleotide exhibits reduced degradation by a cellular nuclease, and packaging and instructions.

[0994] In one aspect, the present invention provides kits for protein production, comprising a polynucleotide, primary construct or mmRNA comprising a translatable region, wherein the polynucleotide exhibits reduced degradation by a cellular nuclease, and a mammalian cell suitable for translation of the translatable region of the first nucleic acid.

[0995] In one embodiment, the levels of Protein C may be measured by immunoassay. The assay may be purchased and is available from any number of suppliers including BioMerieux, Inc. (Durham, NC), Abbott Laboratories (Abbott Park, IL), Siemens Medical Solutions USA, Inc. (Malvern, PA), BIOPORTO® Diagnostics A/S (Gentofte, Denmark), USCN® Life Science Inc. (Houston, TX) or Roche Diagnostic Corporation (Indianapolis, IN). In this embodiment, the assay may be used to assess levels of Protein C or its activated form or a variant delivered as or in response to administration of a modified mRNA molecule.

### Devices

[0996] The present invention provides for devices which may incorporate polynucleotides, primary constructs or mmRNA that encode polypeptides of interest. These devices contain in a stable formulation the reagents to synthesize a polynucleotide in a formulation available to be immediately delivered to a subject in need thereof, such as a human patient. Non-limiting examples of such a polypeptide of interest include a growth factor and/or angiogenesis stimulator for wound healing, a peptide antibiotic to facilitate infection control, and an antigen to rapidly stimulate an immune response to a newly identified virus.

[0997] Devices may also be used in conjunction with the present invention. In one embodiment, a device is used to assess levels of a protein which has been administered in the form of a modified mRNA. The device may comprise a blood, urine or other biofluidic test. It may be as large as to include an automated central lab platform or a small decentralized bench top device. It may be point of care or a handheld device. In this embodiment, for example, Protein C or APC may be quatitated before, during or after treatment with a modified mRNA encoding Protein C (its zymogen), APC or any variants thereof. Protein C, also known as autoprothrombin IIA and blood coagulation factor XIV is a zymogen, or precursor, of a serine protease which plays an important role in the regulation of blood coagulation and generation of fibrinolytic activity in vivo. It is synthesized in the liver as a single-chain polypeptide but undergoes posttranslational processing to give rise to a two-chain intermediate. The intermediate form of Protein C is converted via thrombin-mediated cleavage of a 12-residue peptide from the amino-terminus of the heavy chain to of the molecule to the active form, known as “activated protein C” (APC). The device may be useful in drug discovery efforts as a companion diagnostic test associated with Protein C, or APC treatment such as for sepsis or severe sepsis. In early studies it was suggested that APC had the ability to reduce mortality in severe sepsis. Following this line of work, clinical studies lead to the FDA approval of one compound, activated drotrecogin alfa (recombinant protein C). However, in late 2011, the drug was withdrawn from sale in all markets following results of the PROWESS-SHOCK study, which showed the study did not meet the primary endpoint of a statistically significant reduction in 28-day all-cause mortality in patients with septic shock. The present invention provides modified mRNA molecules which may be used in the diagnosis and treatment of sepsis, severe sepsis and septicemia which overcome prior issues or problems associated with increasing protein expression efficiencies in mammals.

[0998] In some embodiments the device is self-contained, and is optionally capable of wireless remote access to obtain instructions for synthesis and/or analysis of the generated polynucleotide, primary construct or mmRNA. The device is capable of mobile synthesis of at least one polynucleotide, primary construct or mmRNA and preferably an unlimited number of different polynucleotides, primary constructs or mmRNA. In certain embodiments, the device is capable of being transported by one or a small number of individuals. In other embodiments, the device is scaled to fit on a benchtop or desk. In other embodiments, the device is scaled to fit into a suitcase, backpack or similarly sized object. In another embodiment, the device may be a point of care or handheld device. In further embodiments, the device is scaled to fit into a vehicle, such as a car, truck or ambulance, or a military vehicle such as a tank or personnel carrier. The information necessary to generate a modified mRNA encoding polypeptide of interest is present within a computer readable medium present in the device.

[0999] In one embodiment, a device may be used to assess levels of a protein which has been administered in the form of a polynucleotide, primary construct or mmRNA. The device may comprise a blood, urine or other biofluidic test.

[1000] In some embodiments, the device is capable of communication (e.g., wireless communication) with a database of nucleic acid and polypeptide sequences. The device contains at least one sample block for insertion of one or more sample vessels. Such sample vessels are capable of accepting in liquid or other form any number of materials such as template DNA, nucleotides, enzymes, buffers, and other reagents. The sample vessels are also capable of being heated and cooled by contact with the sample block. The sample block is generally in communication with a device base with one or more electronic control units for the at least one sample block. The sample block preferably contains a heating module, such heating molecule capable of heating and/or cooling the sample vessels and contents thereof to temperatures between about −20C and above +100C. The device base is in communication with a voltage supply such as a battery or external voltage supply. The device also contains means for storing and distributing the materials for RNA synthesis.

[1001] Optionally, the sample block contains a module for separating the synthesized nucleic acids. Alternatively, the device contains a separation module operably linked to the sample block. Preferably the device contains a means for analysis of the synthesized nucleic acid. Such analysis includes sequence identity (demonstrated such as by hybridization), absence of non-desired sequences, measurement of integrity of synthesized mRNA (such has by microfluidic viscometry combined with spectrophotometry), and concentration and/or potency of modified RNA (such as by spectrophotometry).

[1002] In certain embodiments, the device is combined with a means for detection of pathogens present in a biological material obtained from a subject, e.g., the IBIS PLEX-ID system (Abbott, Abbott Park, IL) for microbial identification.

[1003] Suitable devices for use in delivering intradermal pharmaceutical compositions described herein include short needle devices such as those described in U.S. Pat. Nos. 4,886,499; 5,190,521; 5,328,483; 5,527,288; 4,270,537; 5,015,235; 5,141,496; and 5,417,662; each of which is herein incorporated by reference in their entirety. Intradermal compositions may be administered by devices which limit the effective penetration length of a needle into the skin, such as those described in PCT publication WO 99/34850 (herein incorporated by reference in its entirety) and functional equivalents thereof. Jet injection devices which deliver liquid compositions to the dermis via a liquid jet injector and/or via a needle which pierces the stratum corneum and produces a jet which reaches the dermis are suitable. Jet injection devices are described, for example, in U.S. Pat. Nos. 5,480,381; 5,599,302; 5,334,144; 5,993,412; 5,649,912; 5,569,189; 5,704,911; 5,383,851; 5,893,397; 5,466,220; 5,339,163; 5,312,335; 5,503,627; 5,064,413; 5,520,639; 4,596,556; 4,790,824; 4,941,880; 4,940,460; and PCT publications WO 97/37705 and WO 97/13537; each of which are hrein incorporated by reference in their entirety. Ballistic powder/particle delivery devices which use compressed gas to accelerate vaccine in powder form through the outer layers of the skin to the dermis are suitable. Alternatively or additionally, conventional syringes may be used in the classical mantoux method of intradermal administration.

[1004] In some embodiments, the device may be a pump or comprise a catheter for administration of compounds or compositions of the invention across the blood brain barrier. Such devices include but are not limited to a pressurized olfactory delivery device, iontophoresis devices, multi-layered microfluidic devices, and the like. Such devices may be portable or stationary. They may be implantable or externally tethered to the body or combinations thereof.

[1005] Devices for administration may be employed to deliver the polynucleotides, primary constructs or mmRNA of the present invention according to single, multi- or split-dosing regimens taught herein. Such devices are described below.

[1006] Method and devices known in the art for multi-administration to cells, organs and tissues are contemplated for use in conjunction with the methods and compositions disclosed herein as embodiments of the present invention. These include, for example, those methods and devices having multiple needles, hybrid devices employing for example lumens or catheters as well as devices utilizing heat, electric current or radiation driven mechanisms.

[1007] According to the present invention, these multi-administration devices may be utilized to deliver the single, multi- or split doses contemplated herein.

[1008] A method for delivering therapeutic agents to a solid tissue has been described by Bahrami et al. and is taught for example in US Patent Publication 20110230839, the contents of which are incorporated herein by reference in their entirety. According to Bahrami, an array of needles is incorporated into a device which delivers a substantially equal amount of fluid at any location in said solid tissue along each needle's length.

[1009] A device for delivery of biological material across the biological tissue has been described by Kodgule et al. and is taught for example in US Patent Publication 20110172610, the contents of which are incorporated herein by reference in their entirety. According to Kodgule, multiple hollow micro-needles made of one or more metals and having outer diameters from about 200 microns to about 350 microns and lengths of at least 100 microns are incorporated into the device which delivers peptides, proteins, carbohydrates, nucleic acid molecules, lipids and other pharmaceutically active ingredients or combinations thereof.

[1010] A delivery probe for delivering a therapeutic agent to a tissue has been described by Gunday et al. and is taught for example in US Patent Publication 20110270184, the contents of each of which are incorporated herein by reference in their entirety. According to Gunday, multiple needles are incorporated into the device which moves the attached capsules between an activated position and an inactivated position to force the agent out of the capsules through the needles.

[1011] A multiple-injection medical apparatus has been described by Assaf and is taught for example in US Patent Publication 20110218497, the contents of which are incorporated herein by reference in their entirety. According to Assaf, multiple needles are incorporated into the device which has a chamber connected to one or more of said needles and a means for continuously refilling the chamber with the medical fluid after each injection.

[1012] In one embodiment, the polynucleotide, primary construct, or mmRNA is administered subcutaneously or intramuscularly via at least 3 needles to three different, optionally adjacent, sites simultaneously, or within a 60 minutes period (e.g., administration to 4, 5, 6, 7, 8, 9, or 10 sites simultaneously or within a 60 minute period). The split doses can be administered simultaneously to adjacent tissue using the devices described in U.S. Patent Publication Nos. 20110230839 and 20110218497, each of which is incorporated herein by reference in their entirety.

[1013] An at least partially implantable system for injecting a substance into a patient's body, in particular a penis erection stimulation system has been described by Forsell and is taught for example in US Patent Publication 20110196198, the contents of which are incorporated herein by reference in their entirety. According to Forsell, multiple needles are incorporated into the device which is implanted along with one or more housings adjacent the patient's left and right corpora cavernosa. A reservoir and a pump are also implanted to supply drugs through the needles.

[1014] A method for the transdermal delivery of a therapeutic effective amount of iron has been described by Berenson and is taught for example in US Patent Publication 20100130910, the contents of which are incorporated herein by reference in their entirety. According to Berenson, multiple needles may be used to create multiple micro channels in stratum corneum to enhance transdermal delivery of the ionic iron on an iontophoretic patch.

[1015] A method for delivery of biological material across the biological tissue has been described by Kodgule et al and is taught for example in US Patent Publication 20110196308, the contents of which are incorporated herein by reference in their entirety. According to Kodgule, multiple biodegradable microneedles containing a therapeutic active ingredient are incorporated in a device which delivers proteins, carbohydrates, nucleic acid molecules, lipids and other pharmaceutically active ingredients or combinations thereof.

[1016] A transdermal patch comprising a botulinum toxin composition has been described by Donovan and is taught for example in US Patent Publication 20080220020, the contents of which are incorporated herein by reference in their entirety. According to Donovan, multiple needles are incorporated into the patch which delivers botulinum toxin under stratum corneum through said needles which project through the stratum corneum of the skin without rupturing a blood vessel.

[1017] A small, disposable drug reservoir, or patch pump, which can hold approximately 0.2 to 15 mL of liquid formulations can be placed on the skin and deliver the formulation continuously subcutaneously using a small bore needed (e.g., 26 to 34 gauge). As non-limiting examples, the patch pump may be 50 mm by 76 mm by 20 mm spring loaded having a 30 to 34 gauge needle (BD™ Microinfuser, Franklin Lakes NJ), 41 mm by 62 mm by 17 mm with a 2 mL reservoir used for drug delivery such as insulin (OMNIPOD®, Insulet Corporation Bedford, MA), or 43-60 mm diameter, 10 mm thick with a 0.5 to 10 mL reservoir (PATCHPUMP®, SteadyMed Therapeutics, San Francisco, CA). Further, the patch pump may be battery powered and/or rechargeable.

[1018] A cryoprobe for administration of an active agent to a location of cryogenic treatment has been described by Toubia and is taught for example in US Patent Publication 20080140061, the contents of which are incorporated herein by reference in their entirety. According to Toubia, multiple needles are incorporated into the probe which receives the active agent into a chamber and administers the agent to the tissue.

[1019] A method for treating or preventing inflammation or promoting healthy joints has been described by Stock et al and is taught for example in US Patent Publication 20090155186, the contents of which are incorporated herein by reference in their entirety. According to Stock, multiple needles are incorporated in a device which administers compositions containing signal transduction modulator compounds.

[1020] A multi-site injection system has been described by Kimmell et al. and is taught for example in US Patent Publication 20100256594, the contents of which are incorporated herein by reference in their entirety. According to Kimmell, multiple needles are incorporated into a device which delivers a medication into a stratum corneum through the needles.

[1021] A method for delivering interferons to the intradermal compartment has been described by Dekker et al. and is taught for example in US Patent Publication 20050181033, the contents of which are incorporated herein by reference in their entirety. According to Dekker, multiple needles having an outlet with an exposed height between 0 and 1 mm are incorporated into a device which improves pharmacokinetics and bioavailability by delivering the substance at a depth between 0.3 mm and 2 mm.

[1022] A method for delivering genes, enzymes and biological agents to tissue cells has described by Desai and is taught for example in US Patent Publication 20030073908, the contents of which are incorporated herein by reference in their entirety. According to Desai, multiple needles are incorporated into a device which is inserted into a body and delivers a medication fluid through said needles.

[1023] A method for treating cardiac arrhythmias with fibroblast cells has been described by Lee et al and is taught for example in US Patent Publication 20040005295, the contents of which are incorporated herein by reference in their entirety. According to Lee, multiple needles are incorporated into the device which delivers fibroblast cells into the local region of the tissue.

[1024] A method using a magnetically controlled pump for treating a brain tumor has been described by Shachar et al. and is taught for example in U.S. Pat. No. 7,799,012 (method) and 7799016 (device), the contents of which are incorporated herein by reference in their entirety. According Shachar, multiple needles were incorporated into the pump which pushes a medicating agent through the needles at a controlled rate.

[1025] Methods of treating functional disorders of the bladder in mammalian females have been described by Versi et al. and are taught for example in U.S. Pat. No. 8,029,496, the contents of which are incorporated herein by reference in their entirety. According to Versi, an array of micro-needles is incorporated into a device which delivers a therapeutic agent through the needles directly into the trigone of the bladder.

[1026] A micro-needle transdermal transport device has been described by Angel et al and is taught for example in U.S. Pat. No. 7,364,568, the contents of which are incorporated herein by reference in their entirety. According to Angel, multiple needles are incorporated into the device which transports a substance into a body surface through the needles which are inserted into the surface from different directions. The micro-needle transdermal transport device may be a solid micro-needle system or a hollow micro-needle system. As a non-limiting example, the solid micro-needle system may have up to a 0.5 mg capacity, with 300-1500 solid micro-needles per cm² about 150-700 μm tall coated with a drug. The micro-needles penetrate the stratum corneum and remain in the skin for short duration (e.g., 20 seconds to 15 minutes). In another example, the hollow micro-needle system has up to a 3 mL capacity to deliver liquid formulations using 15-20 microneedles per cm2 being approximately 950 μm tall. The micro-needles penetrate the skin to allow the liquid formulations to flow from the device into the skin. The hollow micro-needle system may be worn from 1 to 30 minutes depending on the formulation volume and viscocity.

[1027] A device for subcutaneous infusion has been described by Dalton et al and is taught for example in U.S. Pat. No. 7,150,726, the contents of which are incorporated herein by reference in their entirety. According to Dalton, multiple needles are incorporated into the device which delivers fluid through the needles into a subcutaneous tissue.

[1028] A device and a method for intradermal delivery of vaccines and gene therapeutic agents through microcannula have been described by Mikszta et al. and are taught for example in U.S. Pat. No. 7,473,247, the contents of which are incorporated herein by reference in their entirety. According to Mitszta, at least one hollow micro-needle is incorporated into the device which delivers the vaccines to the subject's skin to a depth of between 0.025 mm and 2 mm.

[1029] A method of delivering insulin has been described by Pettis et al and is taught for example in U.S. Pat. No. 7,722,595, the contents of which are incorporated herein by reference in their entirety. According to Pettis, two needles are incorporated into a device wherein both needles insert essentially simultaneously into the skin with the first at a depth of less than 2.5 mm to deliver insulin to intradermal compartment and the second at a depth of greater than 2.5 mm and less than 5.0 mm to deliver insulin to subcutaneous compartment.

[1030] Cutaneous injection delivery under suction has been described by Kochamba et al. and is taught for example in U.S. Pat. No. 6,896,666, the contents of which are incorporated herein by reference in their entirety. According to Kochamba, multiple needles in relative adjacency with each other are incorporated into a device which injects a fluid below the cutaneous layer.

[1031] A device for withdrawing or delivering a substance through the skin has been described by Down et al and is taught for example in U.S. Pat. No. 6,607,513, the contents of which are incorporated herein by reference in their entirety. According to Down, multiple skin penetrating members which are incorporated into the device have lengths of about 100 microns to about 2000 microns and are about 30 to 50 gauge.

[1032] A device for delivering a substance to the skin has been described by Palmer et al and is taught for example in U.S. Pat. No. 6,537,242, the contents of which are incorporated herein by reference in their entirety. According to Palmer, an array of micro-needles is incorporated into the device which uses a stretching assembly to enhance the contact of the needles with the skin and provides a more uniform delivery of the substance.

[1033] A perfusion device for localized drug delivery has been described by Zamoyski and is taught for example in U.S. Pat. No. 6,468,247, the contents of which are incorporated herein by reference in their entirety. According to Zamoyski, multiple hypodermic needles are incorporated into the device which injects the contents of the hypodermics into a tissue as said hypodermics are being retracted.

[1034] A method for enhanced transport of drugs and biological molecules across tissue by improving the interaction between micro-needles and human skin has been described by Prausnitz et al. and is taught for example in U.S. Pat. No. 6,743,211, the contents of which are incorporated herein by reference in their entirety. According to Prausnitz, multiple micro-needles are incorporated into a device which is able to present a more rigid and less deformable surface to which the micro-needles are applied.

[1035] A device for intraorgan administration of medicinal agents has been described by Ting et al and is taught for example in U.S. Pat. No. 6,077,251, the contents of which are incorporated herein by reference in their entirety. According to Ting, multiple needles having side openings for enhanced administration are incorporated into a device which by extending and retracting said needles from and into the needle chamber forces a medicinal agent from a reservoir into said needles and injects said medicinal agent into a target organ.

[1036] A multiple needle holder and a subcutaneous multiple channel infusion port has been described by Brown and is taught for example in U.S. Pat. No. 4,695,273, the contents of which are incorporated herein by reference in their entirety. According to Brown, multiple needles on the needle holder are inserted through the septum of the infusion port and communicate with isolated chambers in said infusion port.

[1037] A dual hypodermic syringe has been described by Horn and is taught for example in U.S. Pat. No. 3,552,394, the contents of which are incorporated herein by reference in their entirety. According to Horn, two needles incorporated into the device are spaced apart less than 68 mm and may be of different styles and lengths, thus enabling injections to be made to different depths.

[1038] A syringe with multiple needles and multiple fluid compartments has been described by Hershberg and is taught for example in U.S. Pat. No. 3,572,336, the contents of which are incorporated herein by reference in their entirety. According to Hershberg, multiple needles are incorporated into the syringe which has multiple fluid compartments and is capable of simultaneously administering incompatible drugs which are not able to be mixed for one injection.

[1039] A surgical instrument for intradermal injection of fluids has been described by Eliscu et al. and is taught for example in U.S. Pat. No. 2,588,623, the contents of which are incorporated herein by reference in their entirety. According to Eliscu, multiple needles are incorporated into the instrument which injects fluids intradermally with a wider disperse.

[1040] An apparatus for simultaneous delivery of a substance to multiple breast milk ducts has been described by Hung and is taught for example in EP 1818017, the contents of which are incorporated herein by reference in their entirety. According to Hung, multiple lumens are incorporated into the device which inserts though the orifices of the ductal networks and delivers a fluid to the ductal networks.

[1041] A catheter for introduction of medications to the tissue of a heart or other organs has been described by Tkebuchava and is taught for example in WO2006138109, the contents of which are incorporated herein by reference in their entirety. According to Tkebuchava, two curved needles are incorporated which enter the organ wall in a flattened trajectory.

[1042] Devices for delivering medical agents have been described by Mckay et al. and are taught for example in WO2006118804, the content of which are incorporated herein by reference in their entirety. According to Mckay, multiple needles with multiple orifices on each needle are incorporated into the devices to facilitate regional delivery to a tissue, such as the interior disc space of a spinal disc.

[1043] A method for directly delivering an immunomodulatory substance into an intradermal space within a mammalian skin has been described by Pettis and is taught for example in WO2004020014, the contents of which are incorporated herein by reference in their entirety. According to Pettis, multiple needles are incorporated into a device which delivers the substance through the needles to a depth between 0.3 mm and 2 mm.

[1044] Methods and devices for administration of substances into at least two compartments in skin for systemic absorption and improved pharmacokinetics have been described by Pettis et al. and are taught for example in WO2003094995, the contents of which are incorporated herein by reference in their entirety. According to Pettis, multiple needles having lengths between about 300 μm and about 5 mm are incorporated into a device which delivers to intradermal and subcutaneous tissue compartments simultaneously.

[1045] A drug delivery device with needles and a roller has been described by Zimmerman et al. and is taught for example in WO2012006259, the contents of which are incorporated herein by reference in their entirety. According to Zimmerman, multiple hollow needles positioned in a roller are incorporated into the device which delivers the content in a reservoir through the needles as the roller rotates.

[1046] A drug delivery device such as a stent is known in the art and is taught for example in U.S. Pat. No. 8,333,799, U.S. Pub. Nos. US20060020329, US20040172127 and US20100161032; the contents of each of which are herein incorporated by reference in their entirety. Formulations of the polynucleotides, primary constructs, mmRNA described herein may be delivered using stents. Additionally, stents used herein may be able to deliver multiple polynucleotides, primary constructs and/or mmRNA and/or formulations at the same or varied rates of delivery. Non-limiting examples of manufacturers of stents include CORDIS® (Miami, FL) (CYPHER®), Boston Scientific Corporation (Natick, MA) (TAXUS®), Medtronic (Minneapolis, MN) (ENDEAVOUR®) and Abbott (Abbott Park, TL) (XIENCE V®).

Methods and Devices Utilizing Catheters and/or Lumens

[1047] Methods and devices using catheters and lumens may be employed to administer the mmRNA of the present invention on a single, multi- or split dosing schedule. Such methods and devices are described below.

[1048] A catheter-based delivery of skeletal myoblasts to the myocardium of damaged hearts has been described by Jacoby et al and is taught for example in US Patent Publication 20060263338, the contents of which are incorporated herein by reference in their entirety. According to Jacoby, multiple needles are incorporated into the device at least part of which is inserted into a blood vessel and delivers the cell composition through the needles into the localized region of the subject's heart.

[1049] An apparatus for treating asthma using neurotoxin has been described by Deem et al and is taught for example in US Patent Publication 20060225742, the contents of which are incorporated herein by reference in their entirety. According to Deem, multiple needles are incorporated into the device which delivers neurotoxin through the needles into the bronchial tissue.

[1050] A method for administering multiple-component therapies has been described by Nayak and is taught for example in U.S. Pat. No. 7,699,803, the contents of which are incorporated herein by reference in their entirety. According to Nayak, multiple injection cannulas may be incorporated into a device wherein depth slots may be included for controlling the depth at which the therapeutic substance is delivered within the tissue.

[1051] A surgical device for ablating a channel and delivering at least one therapeutic agent into a desired region of the tissue has been described by McIntyre et al and is taught for example in U.S. Pat. No. 8,012,096, the contents of which are incorporated herein by reference in their entirety. According to McIntyre, multiple needles are incorporated into the device which dispenses a therapeutic agent into a region of tissue surrounding the channel and is particularly well suited for transmyocardial revascularization operations.

[1052] Methods of treating functional disorders of the bladder in mammalian females have been described by Versi et al and are taught for example in U.S. Pat. No. 8,029,496, the contents of which are incorporated herein by reference in their entirety. According to Versi, an array of micro-needles is incorporated into a device which delivers a therapeutic agent through the needles directly into the trigone of the bladder.

[1053] A device and a method for delivering fluid into a flexible biological barrier have been described by Yeshurun et al. and are taught for example in U.S. Pat. Nos. 7,998,119 (device) and 8,007,466 (method), the contents of which are incorporated herein by reference in their entirety. According to Yeshurun, the micro-needles on the device penetrate and extend into the flexible biological barrier and fluid is injected through the bore of the hollow micro-needles.

[1054] A method for epicardially injecting a substance into an area of tissue of a heart having an epicardial surface and disposed within a torso has been described by Bonner et al and is taught for example in U.S. Pat. No. 7,628,780, the contents of which are incorporated herein by reference in their entirety. According to Bonner, the devices have elongate shafts and distal injection heads for driving needles into tissue and injecting medical agents into the tissue through the needles.

[1055] A device for sealing a puncture has been described by Nielsen et al and is taught for example in U.S. Pat. No. 7,972,358, the contents of which are incorporated herein by reference in their entirety. According to Nielsen, multiple needles are incorporated into the device which delivers a closure agent into the tissue surrounding the puncture tract.

[1056] A method for myogenesis and angiogenesis has been described by Chiu et al. and is taught for example in U.S. Pat. No. 6,551,338, the contents of which are incorporated herein by reference in their entirety. According to Chiu, 5 to 15 needles having a maximum diameter of at least 1.25 mm and a length effective to provide a puncture depth of 6 to 20 mm are incorporated into a device which inserts into proximity with a myocardium and supplies an exogeneous angiogenic or myogenic factor to said myocardium through the conduits which are in at least some of said needles.

[1057] A method for the treatment of prostate tissue has been described by Bolmsj et al. and is taught for example in U.S. Pat. No. 6,524,270, the contents of which are incorporated herein by reference in their entirety. According to Bolmsj, a device comprising a catheter which is inserted through the urethra has at least one hollow tip extendible into the surrounding prostate tissue. An astringent and analgesic medicine is administered through said tip into said prostate tissue.

[1058] A method for infusing fluids to an intraosseous site has been described by Findlay et al. and is taught for example in U.S. Pat. No. 6,761,726, the contents of which are incorporated herein by reference in their entirety. According to Findlay, multiple needles are incorporated into a device which is capable of penetrating a hard shell of material covered by a layer of soft material and delivers a fluid at a predetermined distance below said hard shell of material.

[1059] A device for injecting medications into a vessel wall has been described by Vigil et al. and is taught for example in U.S. Pat. No. 5,713,863, the contents of which are incorporated herein by reference in their entirety. According to Vigil, multiple injectors are mounted on each of the flexible tubes in the device which introduces a medication fluid through a multi-lumen catheter, into said flexible tubes and out of said injectors for infusion into the vessel wall.

[1060] A catheter for delivering therapeutic and/or diagnostic agents to the tissue surrounding a bodily passageway has been described by Faxon et al. and is taught for example in U.S. Pat. No. 5,464,395, the contents of which are incorporated herein by reference in their entirety. According to Faxon, at least one needle cannula is incorporated into the catheter which delivers the desired agents to the tissue through said needles which project outboard of the catheter.

[1061] Balloon catheters for delivering therapeutic agents have been described by Orr and are taught for example in WO2010024871, the contents of which are incorporated herein by reference in their entirety. According to Orr, multiple needles are incorporated into the devices which deliver the therapeutic agents to different depths within the tissue. In another aspect, drug-eluting balloons may be used to deliver the formulations described herein. The drug-eluting balloons may be used in target lesion applications such as, but are not limited to, in-stent restenosis, treating lesion in tortuous vessels, bifurcation lesions, femoral/popliteal lesions and below the knee lesions.

[1062] A device for deliverying therapeutic agents (e.g., polynucleotides, primary constructs or mmRNA) to tissue disposed about a lumin has been described by Perry et al. and is taught for example in U.S. Pat. Pub. US20100125239, the contents of which are herein incorporated by reference in their entirety. According to Perry, the catheter has a balloon which may be coated with a therapeutic agent by methods known in the art and described in Perry. When the balloon expands, the therapeutic agent will contact the surrounding tissue. The device may additionally have a heat source to change the temperature of the coating on the balloon to release the thereapeutic agent to the tissue.

### Methods and Devices Utilizing Electrical Current

[1063] Methods and devices utilizing electric current may be employed to deliver the mmRNA of the present invention according to the single, multi- or split dosing regimens taught herein. Such methods and devices are described below.

[1064] An electro collagen induction therapy device has been described by Marquez and is taught for example in US Patent Publication 20090137945, the contents of which are incorporated herein by reference in their entirety. According to Marquez, multiple needles are incorporated into the device which repeatedly pierce the skin and draw in the skin a portion of the substance which is applied to the skin first.

[1065] An electrokinetic system has been described by Etheredge et al. and is taught for example in US Patent Publication 20070185432, the contents of which are incorporated herein by reference in their entirety. According to Etheredge, micro-needles are incorporated into a device which drives by an electrical current the medication through the needles into the targeted treatment site.

[1066] An iontophoresis device has been described by Matsumura et al. and is taught for example in U.S. Pat. No. 7,437,189, the contents of which are incorporated herein by reference in their entirety. According to Matsumura, multiple needles are incorporated into the device which is capable of delivering ionizable drug into a living body at higher speed or with higher efficiency.

[1067] Intradermal delivery of biologically active agents by needle-free injection and electroporation has been described by Hoffmann et al and is taught for example in U.S. Pat. No. 7,171,264, the contents of which are incorporated herein by reference in their entirety. According to Hoffmann, one or more needle-free injectors are incorporated into an electroporation device and the combination of needle-free injection and electroporation is sufficient to introduce the agent into cells in skin, muscle or mucosa.

[1068] A method for electropermeabilization-mediated intracellular delivery has been described by Lundkvist et al. and is taught for example in U.S. Pat. No. 6,625,486, the contents of which are incorporated herein by reference in their entirety. According to Lundkvist, a pair of needle electrodes is incorporated into a catheter. Said catheter is positioned into a body lumen followed by extending said needle electrodes to penetrate into the tissue surrounding said lumen. Then the device introduces an agent through at least one of said needle electrodes and applies electric field by said pair of needle electrodes to allow said agent pass through the cell membranes into the cells at the treatment site.

[1069] A delivery system for transdermal immunization has been described by Levin et al. and is taught for example in WO2006003659, the contents of which are incorporated herein by reference in their entirety. According to Levin, multiple electrodes are incorporated into the device which applies electrical energy between the electrodes to generate micro channels in the skin to facilitate transdermal delivery.

[1070] A method for delivering RF energy into skin has been described by Schomacker and is taught for example in WO2011163264, the contents of which are incorporated herein by reference in their entirety. According to Schomacker, multiple needles are incorporated into a device which applies vacuum to draw skin into contact with a plate so that needles insert into skin through the holes on the plate and deliver RF energy.

### VII. Definitions

[1071] At various places in the present specification, substituents of compounds of the present disclosure are disclosed in groups or in ranges. It is specifically intended that the present disclosure include each and every individual subcombination of the members of such groups and ranges. For example, the term “C₁₋₆ alkyl” is specifically intended to individually disclose methyl, ethyl, C₃ alkyl, C₄ alkyl, C₅ alkyl, and C₆ alkyl.

[1072] About: As used herein, the term “about” means+/−10% of the recited value.

[1073] Administered in combination: As used herein, the term “administered in combination” or “combined administration” means that two or more agents are administered to a subject at the same time or within an interval such that there may be an overlap of an effect of each agent on the patient. In some embodiments, they are administered within about 60, 30, 15, 10, 5, or 1 minute of one another. In some embodiments, the administrations of the agents are spaced sufficiently closely together such that a combinatorial (e.g., a synergistic) effect is achieved.

[1074] Animal: As used herein, the term “animal” refers to any member of the animal kingdom. In some embodiments, “animal” refers to humans at any stage of development. In some embodiments, “animal” refers to non-human animals at any stage of development. In certain embodiments, the non-human animal is a mammal (e.g., a rodent, a mouse, a rat, a rabbit, a monkey, a dog, a cat, a sheep, cattle, a primate, or a pig). In some embodiments, animals include, but are not limited to, mammals, birds, reptiles, amphibians, fish, and worms. In some embodiments, the animal is a transgenic animal, genetically-engineered animal, or a clone.

[1075] Antigens of interest or desired antigens: As used herein, the terms “antigens of interest” or “desired antigens” include those proteins and other biomolecules provided herein that are immunospecifically bound by the antibodies and fragments, mutants, variants, and alterations thereof described herein. Examples of antigens of interest include, but are not limited to, insulin, insulin-like growth factor, hGH, tPA, cytokines, such as interleukins (IL), e.g., IL-1, IL-2, IL-3, IL-4, IL-5, IL-6, IL-7, IL-8, IL-9, IL-10, IL-11, IL-12, IL-13, IL-14, IL-15, IL-16, IL-17, IL-18, interferon (IFN) alpha, IFN beta, IFN gamma, IFN omega or IFN tau, tumor necrosis factor (TNF), such as TNF alpha and TNF beta, TNF gamma, TRAIL; G-CSF, GM-CSF, M-CSF, MCP-1 and VEGF.

[1076] Approximately: As used herein, the term “approximately” or “about,” as applied to one or more values of interest, refers to a value that is similar to a stated reference value. In certain embodiments, the term “approximately” or “about” refers to a range of values that fall within 25%, 20%, 19%, 18%, 17%, 16%, 15%, 14%, 13%, 12%, 11%, 10%, 9%, 8%, 7%, 6%, 5%, 4%, 3%, 2%, 1%, or less in either direction (greater than or less than) of the stated reference value unless otherwise stated or otherwise evident from the context (except where such number would exceed 100% of a possible value).

[1077] Associated with: As used herein, the terms “associated with,” “conjugated,” “linked,” “attached,” and “tethered,” when used with respect to two or more moieties, means that the moieties are physically associated or connected with one another, either directly or via one or more additional moieties that serves as a linking agent, to form a structure that is sufficiently stable so that the moieties remain physically associated under the conditions in which the structure is used, e.g., physiological conditions. An “association” need not be strictly through direct covalent chemical bonding. It may also suggest ionic or hydrogen bonding or a hybridization based connectivity sufficiently stable such that the “associated” entities remain physically associated.

[1078] Bifunctional: As used herein, the term “bifunctional” refers to any substance, molecule or moiety which is capable of or maintains at least two functions. The functions may effect the same outcome or a different outcome. The structure that produces the function may be the same or different. For example, bifunctional modified RNAs of the present invention may encode a cytotoxic peptide (a first function) while those nucleosides which comprise the encoding RNA are, in and of themselves, cytotoxic (second function). In this example, delivery of the bifunctional modified RNA to a cancer cell would produce not only a peptide or protein molecule which may ameliorate or treat the cancer but would also deliver a cytotoxic payload of nucleosides to the cell should degradation, instead of translation of the modified RNA, occur.

[1079] Biocompatible: As used herein, the term “biocompatible” means compatible with living cells, tissues, organs or systems posing little to no risk of injury, toxicity or rejection by the immune system.

[1080] Biodegradable: As used herein, the term “biodegradable” means capable of being broken down into innocuous products by the action of living things.

[1081] Biologically active: As used herein, the phrase “biologically active” refers to a characteristic of any substance that has activity in a biological system and/or organism. For instance, a substance that, when administered to an organism, has a biological effect on that organism, is considered to be biologically active. In particular embodiments, a polynucleotide, primary construct or mmRNA of the present invention may be considered biologically active if even a portion of the polynucleotide, primary construct or mmRNA is biologically active or mimics an activity considered biologically relevant.

[1082] Chemical terms: The following provides the definition of various chemical terms from “acyl” to “thiol.”

[1083] The term “acyl,” as used herein, represents a hydrogen or an alkyl group (e.g., a haloalkyl group), as defined herein, that is attached to the parent molecular group through a carbonyl group, as defined herein, and is exemplified by formyl (i.e., a carboxyaldehyde group), acetyl, propionyl, butanoyl and the like. Exemplary unsubstituted acyl groups include from 1 to 7, from 1 to 11, or from 1 to 21 carbons. In some embodiments, the alkyl group is further substituted with 1, 2, 3, or 4 substituents as described herein.

[1084] The term “acylamino,” as used herein, represents an acyl group, as defined herein, attached to the parent molecular group though an amino group, as defined herein (i.e., —N(R^{N1})—C(O)—R, where R is H or an optionally substituted C₁₋₆, C₁₋₁₀, or C₁₋₂₀ alkyl group and R^{N1} is as defined herein). Exemplary unsubstituted acylamino groups include from 1 to 41 carbons (e.g., from 1 to 7, from 1 to 13, from 1 to 21, from 2 to 7, from 2 to 13, from 2 to 21, or from 2 to 41 carbons). In some embodiments, the alkyl group is further substituted with 1, 2, 3, or 4 substituents as described herein, and/or the amino group is —NH₂ or —N—R^{N1}, wherein R^{N1} is, independently, OH, NO₂, NH₂, NR^{H2}₂, SO₂OR^{N2}, SO₂R^{N2}, SOR^{N2}, alkyl, or aryl, and each R^{N2} can be H, alkyl, or aryl.

[1085] The term “acyloxy,” as used herein, represents an acyl group, as defined herein, attached to the parent molecular group though an oxygen atom (i.e., —O—C(O)—R, where R is H or an optionally substituted C₁₋₆, C₁₋₁₀, or C₁₋₂₀ alkyl group). Exemplary unsubstituted acyloxy groups include from 1 to 21 carbons (e.g., from 1 to 7 or from 1 to 11 carbons). In some embodiments, the alkyl group is further substituted with 1, 2, 3, or 4 substituents as described herein, and/or the amino group is —NH₂ or -M-R^{N1}, wherein R^{N1} is, independently, OH, NO₂, NH₂, NR^{H2}₂, SO₂OR^{N2}, SO₂R^{N2}, SOR^{N2}, alkyl, or aryl, and each R^{N2} can be H, alkyl, or aryl.

[1086] The term “alkaryl,” as used herein, represents an aryl group, as defined herein, attached to the parent molecular group through an alkylene group, as defined herein. Exemplary unsubstituted alkaryl groups are from 7 to 30 carbons (e.g., from 7 to 16 or from 7 to 20 carbons, such as C₁₋₆ alk-C₆₋₁₀ aryl, C₁₋₁₀ alk-C₆₋₁₀ aryl, or C₁₋₂₀ alk-C₆₋₁₀ aryl). In some embodiments, the alkylene and the aryl each can be further substituted with 1, 2, 3, or 4 substituent groups as defined herein for the respective groups. Other groups preceded by the prefix “alk-” are defined in the same manner, where “alk” refers to a C₁₋₆ alkylene, unless otherwise noted, and the attached chemical structure is as defined herein.

[1087] The term “alkcycloalkyl” represents a cycloalkyl group, as defined herein, attached to the parent molecular group through an alkylene group, as defined herein (e.g., an alkylene group of from 1 to 4, from 1 to 6, from 1 to 10, or form 1 to 20 carbons). In some embodiments, the alkylene and the cycloalkyl each can be further substituted with 1, 2, 3, or 4 substituent groups as defined herein for the respective group.

[1088] The term “alkenyl,” as used herein, represents monovalent straight or branched chain groups of, unless otherwise specified, from 2 to 20 carbons (e.g., from 2 to 6 or from 2 to 10 carbons) containing one or more carbon-carbon double bonds and is exemplified by ethenyl, 1-propenyl, 2-propenyl, 2-methyl-1-propenyl, 1-butenyl, 2-butenyl, and the like. Alkenyls include both cis and trans isomers. Alkenyl groups may be optionally substituted with 1, 2, 3, or 4 substituent groups that are selected, independently, from amino, aryl, cycloalkyl, or heterocyclyl (e.g., heteroaryl), as defined herein, or any of the exemplary alkyl substituent groups described herein.

[1089] The term “alkenyloxy” represents a chemical substituent of formula —OR, where R is a C₂₋₂₀ alkenyl group (e.g., C₂₋₆ or C₂₋₁₀ alkenyl), unless otherwise specified. Exemplary alkenyloxy groups include ethenyloxy, propenyloxy, and the like. In some embodiments, the alkenyl group can be further substituted with 1, 2, 3, or 4 substituent groups as defined herein (e.g., a hydroxy group).

[1090] The term “alkheteroaryl” refers to a heteroaryl group, as defined herein, attached to the parent molecular group through an alkylene group, as defined herein. Exemplary unsubstituted alkheteroaryl groups are from 2 to 32 carbons (e.g., from 2 to 22, from 2 to 18, from 2 to 17, from 2 to 16, from 3 to 15, from 2 to 14, from 2 to 13, or from 2 to 12 carbons, such as C₁₋₆ alk-C₁₋₁₂ heteroaryl, C₁₋₁₀ alk-C₁₋₁₂ heteroaryl, or C₁₋₂₀ alk-C₁₋₁₂ heteroaryl). In some embodiments, the alkylene and the heteroaryl each can be further substituted with 1, 2, 3, or 4 substituent groups as defined herein for the respective group. Alkheteroaryl groups are a subset of alkheterocyclyl groups.

[1091] The term “alkheterocyclyl” represents a heterocyclyl group, as defined herein, attached to the parent molecular group through an alkylene group, as defined herein. Exemplary unsubstituted alkheterocyclyl groups are from 2 to 32 carbons (e.g., from 2 to 22, from 2 to 18, from 2 to 17, from 2 to 16, from 3 to 15, from 2 to 14, from 2 to 13, or from 2 to 12 carbons, such as C₁₋₆ alk-C₁₋₁₂ heterocyclyl, C₁₋₁₀ alk-C₁₋₁₂ heterocyclyl, or C₁₋₂₀ alk-C₁₋₁₂ heterocyclyl). In some embodiments, the alkylene and the heterocyclyl each can be further substituted with 1, 2, 3, or 4 substituent groups as defined herein for the respective group.

[1092] The term “alkoxy” represents a chemical substituent of formula —OR, where R is a C₁₋₂₀ alkyl group (e.g., C₁₋₆ or C₁₋₁₀ alkyl), unless otherwise specified. Exemplary alkoxy groups include methoxy, ethoxy, propoxy (e.g., n-propoxy and isopropoxy), t-butoxy, and the like. In some embodiments, the alkyl group can be further substituted with 1, 2, 3, or 4 substituent groups as defined herein (e.g., hydroxy or alkoxy).

[1093] The term “alkoxyalkoxy” represents an alkoxy group that is substituted with an alkoxy group. Exemplary unsubstituted alkoxyalkoxy groups include between 2 to 40 carbons (e.g., from 2 to 12 or from 2 to 20 carbons, such as C₁₋₆ alkoxy-C₁₋₆ alkoxy, C₁₋₁₀ alkoxy-C₁₋₁₀ alkoxy, or C₁₋₂₀ alkoxy-C₁₋₂₀ alkoxy). In some embodiments, the each alkoxy group can be further substituted with 1, 2, 3, or 4 substituent groups as defined herein.

[1094] The term “alkoxyalkyl” represents an alkyl group that is substituted with an alkoxy group. Exemplary unsubstituted alkoxyalkyl groups include between 2 to 40 carbons (e.g., from 2 to 12 or from 2 to 20 carbons, such as C₁₋₆ alkoxy-C₁₋₆ alkyl, C₁₋₁₀ alkoxy-C₁₋₁₀ alkyl, or C₁₋₂₀ alkoxy-C₁₋₂₀ alkyl). In some embodiments, the alkyl and the alkoxy each can be further substituted with 1, 2, 3, or 4 substituent groups as defined herein for the respective group.

[1095] The term “alkoxycarbonyl,” as used herein, represents an alkoxy, as defined herein, attached to the parent molecular group through a carbonyl atom (e.g., —C(O)—OR, where R is H or an optionally substituted C₁₋₆, C₁₋₁₀, or C₁₋₂₀ alkyl group). Exemplary unsubstituted alkoxycarbonyl include from 1 to 21 carbons (e.g., from 1 to 11 or from 1 to 7 carbons). In some embodiments, the alkoxy group is further substituted with 1, 2, 3, or 4 substituents as described herein.

[1096] The term “alkoxycarbonylalkoxy,” as used herein, represents an alkoxy group, as defined herein, that is substituted with an alkoxycarbonyl group, as defined herein (e.g., —O-alkyl-C(O)—OR, where R is an optionally substituted C₁₋₆, C₁₋₁₀, or C₁₋₂₀ alkyl group). Exemplary unsubstituted alkoxycarbonylalkoxy include from 3 to 41 carbons (e.g., from 3 to 10, from 3 to 13, from 3 to 17, from 3 to 21, or from 3 to 31 carbons, such as C₁₋₆ alkoxycarbonyl-C₁₋₆ alkoxy, C₁₋₁₀ alkoxycarbonyl-C₁₋₁₀ alkoxy, or C₁₋₂₀ alkoxycarbonyl-C₁₋₂₀ alkoxy). In some embodiments, each alkoxy group is further independently substituted with 1, 2, 3, or 4 substituents, as described herein (e.g., a hydroxy group).

[1097] The term “alkoxycarbonylalkyl,” as used herein, represents an alkyl group, as defined herein, that is substituted with an alkoxycarbonyl group, as defined herein (e.g., -alkyl-C(O)—OR, where R is an optionally substituted C₁₋₂₀, C₁₋₁₀, or C₁₋₆ alkyl group). Exemplary unsubstituted alkoxycarbonylalkyl include from 3 to 41 carbons (e.g., from 3 to 10, from 3 to 13, from 3 to 17, from 3 to 21, or from 3 to 31 carbons, such as C₁₋₆ alkoxycarbonyl-C₁₋₆ alkyl, C₁₋₁₀ alkoxycarbonyl-C₁₋₁₀ alkyl, or C₁₋₂₀ alkoxycarbonyl-C₁₋₂₀ alkyl). In some embodiments, each alkyl and alkoxy group is further independently substituted with 1, 2, 3, or 4 substituents as described herein (e.g., a hydroxy group).

[1098] The term “alkyl,” as used herein, is inclusive of both straight chain and branched chain saturated groups from 1 to 20 carbons (e.g., from 1 to 10 or from 1 to 6), unless otherwise specified. Alkyl groups are exemplified by methyl, ethyl, n- and isopropyl, n-, sec-, iso- and tert-butyl, neopentyl, and the like, and may be optionally substituted with one, two, three, or, in the case of alkyl groups of two carbons or more, four substituents independently selected from the group consisting of: (1) C₁₋₆ alkoxy; (2) C₁₋₆ alkylsulfinyl; (3) amino, as defined herein (e.g., unsubstituted amino (i.e., —NH₂) or a substituted amino (i.e., —N(R^{N1})₂, where R^{N1} is as defined for amino); (4) C₆₋₁₀ aryl-C₁₋₆ alkoxy; (5) azido; (6) halo; (7) (C₂₋₉ heterocyclyl)oxy; (8) hydroxy; (9) nitro; (10) oxo (e.g., carboxyaldehyde or acyl); (11) C₁₋₇ spirocyclyl; (12) thioalkoxy; (13) thiol; (14) —CO₂R^{A}′, where R^{A}′ is selected from the group consisting of (a) C₁₋₂₀ alkyl (e.g., C₁₋₆ alkyl), (b) C₂₋₂₀ alkenyl (e.g., C₂₋₆ alkenyl), (c) C₆₋₁₀ aryl, (d) hydrogen, (e) C₁₋₆ alk-C₆₋₁₀ aryl, (f) amino-C₁₋₂₀ alkyl, (g) polyethylene glycol of —(CH₂)ₛ₂(OCH₂CH₂)ₛ₁(CH₂)ₛ₃OR′, wherein s1 is an integer from 1 to 10 (e.g., from 1 to 6 or from 1 to 4), each of s2 and s3, independently, is an integer from 0 to 10 (e.g., from 0 to 4, from 0 to 6, from 1 to 4, from 1 to 6, or from 1 to 10), and R′ is H or C₁₋₂₀ alkyl, and (h) amino-polyethylene glycol of —NR^{N1}(CH₂)ₛ₂(CH₂CH₂O)ₛ₁(CH₂)ₛ₃NR^{N1}, wherein s1 is an integer from 1 to 10 (e.g., from 1 to 6 or from 1 to 4), each of s2 and s3, independently, is an integer from 0 to 10 (e.g., from 0 to 4, from 0 to 6, from 1 to 4, from 1 to 6, or from 1 to 10), and each R^{N1} is, independently, hydrogen or optionally substituted C₁₋₆ alkyl; (15) —C(O)NR^{B}′R^{C}′, where each of R^{B}′ and R^{C}′ is, independently, selected from the group consisting of (a) hydrogen, (b) C₁₋₆ alkyl, (c) C₆₋₁₀ aryl, and (d) C₁₋₆ alk-C₆₋₁₀ aryl; (16) —SO₂R^{D}′, where R^{D}′ is selected from the group consisting of (a) C₁₋₆ alkyl, (b) C₆₋₁₀ aryl, (c) C₁₋₆ alk-C₆₋₁₀ aryl, and (d) hydroxy; (17) —SO₂NR^{E}′R^{F}′, where each of R^{E}′ and RF′ is, independently, selected from the group consisting of (a) hydrogen, (b) C₁₋₆ alkyl, (c) C₆₋₁₀ aryl and (d) C₁₋₆ alk-C₆₋₁₀ aryl; (18) —C(O)R^{G}′, where R^{G}′ is selected from the group consisting of (a) C₁₋₂₀ alkyl (e.g., C₁₋₆ alkyl), (b) C₂₋₂₀ alkenyl (e.g., C₂₋₆ alkenyl), (c) C₆₋₁₀ aryl, (d) hydrogen, (e) C₁₋₆ alk-C₆₋₁₀ aryl, (f) amino-C₁₋₂₀ alkyl, (g) polyethylene glycol of —(CH₂)ₛ₂(OCH₂CH₂)ₛ₁(CH₂)ₛ₃OR′, wherein s1 is an integer from 1 to 10 (e.g., from 1 to 6 or from 1 to 4), each of s2 and s3, independently, is an integer from 0 to 10 (e.g., from 0 to 4, from 0 to 6, from 1 to 4, from 1 to 6, or from 1 to 10), and R′ is H or C₁₋₂₀ alkyl, and (h) amino-polyethylene glycol of —NR^{N1}(CH₂)ₛ₂(CH₂CH₂O)ₛ₁(CH₂)ₛ₃NR^{N1}, wherein s1 is an integer from 1 to 10 (e.g., from 1 to 6 or from 1 to 4), each of s2 and s3, independently, is an integer from 0 to 10 (e.g., from 0 to 4, from 0 to 6, from 1 to 4, from 1 to 6, or from 1 to 10), and each R^{N1} is, independently, hydrogen or optionally substituted C₁₋₆ alkyl; (19) —NR^{H}′C(O)R^{I}′, wherein R^{H}′ is selected from the group consisting of (a1) hydrogen and (b1) C₁₋₆ alkyl, and R′ is selected from the group consisting of (a2) C₁₋₂₀ alkyl (e.g., C₁₋₆ alkyl), (b2) C₂₋₂₀ alkenyl (e.g., C₂₋₆ alkenyl), (c2) C₆₋₁₀ aryl, (d2) hydrogen, (e2) C₁₋₆ alk-C₆₋₁₀ aryl, (f2) amino-C₁₋₂₀ alkyl, (g²) polyethylene glycol of —(CH₂)ₛ₂(OCH₂CH₂)ₛ₁(CH₂)ₛ₃OR′, wherein s1 is an integer from 1 to 10 (e.g., from 1 to 6 or from 1 to 4), each of s2 and s3, independently, is an integer from 0 to 10 (e.g., from 0 to 4, from 0 to 6, from 1 to 4, from 1 to 6, or from 1 to 10), and R′ is H or C₁₋₂₀ alkyl, and (h2) amino-polyethylene glycol of —NR^{N1}(CH₂)ₛ₂(CH₂CH₂O)ₛ₁(CH₂)ₛ₃NR^{N1}, wherein s1 is an integer from 1 to 10 (e.g., from 1 to 6 or from 1 to 4), each of s2 and s3, independently, is an integer from 0 to 10 (e.g., from 0 to 4, from 0 to 6, from 1 to 4, from 1 to 6, or from 1 to 10), and each R^{N1} is, independently, hydrogen or optionally substituted C₁₋₆ alkyl; (20) —NR^{J}′C(O)OR^{K}′, wherein R^{J}′ is selected from the group consisting of (a1) hydrogen and (b1) C₁₋₆ alkyl, and R^{K}′ is selected from the group consisting of (a2) C₁₋₂₀ alkyl (e.g., C₁₋₆ alkyl), (b2) C₂₋₂₀ alkenyl (e.g., C₂₋₆ alkenyl), (c2) C₆₋₁₀ aryl, (d2) hydrogen, (e2) C₁₋₆ alk-C₆₋₁₀ aryl, (f2) amino-C₁₋₂₀ alkyl, (g2) polyethylene glycol of —(CH₂)ₛ₂(OCH₂CH₂)ₛ₁(CH₂)ₛ₃OR′, wherein s1 is an integer from 1 to 10 (e.g., from 1 to 6 or from 1 to 4), each of s2 and s3, independently, is an integer from 0 to 10 (e.g., from 0 to 4, from 0 to 6, from 1 to 4, from 1 to 6, or from 1 to 10), and R′ is H or C₁₋₂₀ alkyl, and (h2) amino-polyethylene glycol of —NR^{N1}(CH₂)ₛ₂(CH₂CH₂O)ₛ₁(CH₂)ₛ₃NR^{N1}, wherein s1 is an integer from 1 to 10 (e.g., from 1 to 6 or from 1 to 4), each of s2 and s3, independently, is an integer from 0 to 10 (e.g., from 0 to 4, from 0 to 6, from 1 to 4, from 1 to 6, or from 1 to 10), and each R^{N1} is, independently, hydrogen or optionally substituted C₁₋₆ alkyl; and (21) amidine. In some embodiments, each of these groups can be further substituted as described herein. For example, the alkylene group of a C₁-alkaryl can be further substituted with an oxo group to afford the respective aryloyl substituent.

[1099] The term “alkylene” and the prefix “alk-,” as used herein, represent a saturated divalent hydrocarbon group derived from a straight or branched chain saturated hydrocarbon by the removal of two hydrogen atoms, and is exemplified by methylene, ethylene, isopropylene, and the like. The term “C_{x-y} alkylene” and the prefix “C_{x-y} alk-” represent alkylene groups having between x and y carbons. Exemplary values for x are 1, 2, 3, 4, 5, and 6, and exemplary values for y are 2, 3, 4, 5, 6, 7, 8, 9, 10, 12, 14, 16, 18, or 20 (e.g., C₁₋₆, C₁₋₁₀, C₂₋₂₀, C₂₋₆, C₂₋₁₀, or C₂₋₂₀ alkylene). In some embodiments, the alkylene can be further substituted with 1, 2, 3, or 4 substituent groups as defined herein for an alkyl group.

[1100] The term “alkylsulfinyl,” as used herein, represents an alkyl group attached to the parent molecular group through an —S(O)-group. Exemplary unsubstituted alkylsulfinyl groups are from 1 to 6, from 1 to 10, or from 1 to 20 carbons. In some embodiments, the alkyl group can be further substituted with 1, 2, 3, or 4 substituent groups as defined herein.

[1101] The term “alkylsulfinylalkyl,” as used herein, represents an alkyl group, as defined herein, substituted by an alkylsulfinyl group. Exemplary unsubstituted alkylsulfinylalkyl groups are from 2 to 12, from 2 to 20, or from 2 to 40 carbons. In some embodiments, each alkyl group can be further substituted with 1, 2, 3, or 4 substituent groups as defined herein.

[1102] The term “alkynyl,” as used herein, represents monovalent straight or branched chain groups from 2 to 20 carbon atoms (e.g., from 2 to 4, from 2 to 6, or from 2 to 10 carbons) containing a carbon-carbon triple bond and is exemplified by ethynyl, 1-propynyl, and the like. Alkynyl groups may be optionally substituted with 1, 2, 3, or 4 substituent groups that are selected, independently, from aryl, cycloalkyl, or heterocyclyl (e.g., heteroaryl), as defined herein, or any of the exemplary alkyl substituent groups described herein.

[1103] The term “alkynyloxy” represents a chemical substituent of formula —OR, where R is a C₂₋₂₀ alkynyl group (e.g., C₂₋₆ or C₂₋₁₀ alkynyl), unless otherwise specified. Exemplary alkynyloxy groups include ethynyloxy, propynyloxy, and the like. In some embodiments, the alkynyl group can be further substituted with 1, 2, 3, or 4 substituent groups as defined herein (e.g., a hydroxy group).

[1104] The term “amidine,” as used herein, represents a —C(═NH)NH₂ group.

[1105] The term “amino,” as used herein, represents —N(R^{N1})₂, wherein each R^{N1} is, independently, H, OH, NO₂, N(R^{N2})₂, SO₂OR^{N2}, SO₂R^{N2}, SOR^{N2}, an N-protecting group, alkyl, alkenyl, alkynyl, alkoxy, aryl, alkaryl, cycloalkyl, alkcycloalkyl, carboxyalkyl, sulfoalkyl, heterocyclyl (e.g., heteroaryl), or alkheterocyclyl (e.g., alkheteroaryl), wherein each of these recited R^{N1} groups can be optionally substituted, as defined herein for each group; or two R^{N1} combine to form a heterocyclyl or an N-protecting group, and wherein each R^{N2} is, independently, H, alkyl, or aryl. The amino groups of the invention can be an unsubstituted amino (i.e., —NH₂) or a substituted amino (i.e., —N(R^{N1})₂). In a preferred embodiment, amino is —NH₂ or —NR^{N1}, wherein R^{N1} is, independently, OH, NO₂, NH₂, NR^{N22}, SO₂OR^{N2}, SO₂R^{N2}, SOR^{N2}, alkyl, carboxyalkyl, sulfoalkyl, or aryl, and each R^{N2} can be H, C₁₋₂₀ alkyl (e.g., C₁₋₆ alkyl), or C₆₋₁₀ aryl.

[1106] The term “amino acid,” as described herein, refers to a molecule having a side chain, an amino group, and an acid group (e.g., a carboxy group of —CO₂H or a sulfo group of —SO₃H), wherein the amino acid is attached to the parent molecular group by the side chain, amino group, or acid group (e.g., the side chain). In some embodiments, the amino acid is attached to the parent molecular group by a carbonyl group, where the side chain or amino group is attached to the carbonyl group. Exemplary side chains include an optionally substituted alkyl, aryl, heterocyclyl, alkaryl, alkheterocyclyl, aminoalkyl, carbamoylalkyl, and carboxyalkyl. Exemplary amino acids include alanine, arginine, asparagine, aspartic acid, cysteine, glutamic acid, glutamine, glycine, histidine, hydroxynorvaline, isoleucine, leucine, lysine, methionine, norvaline, ornithine, phenylalanine, proline, pyrrolysine, selenocysteine, serine, taurine, threonine, tryptophan, tyrosine, and valine. Amino acid groups may be optionally substituted with one, two, three, or, in the case of amino acid groups of two carbons or more, four substituents independently selected from the group consisting of: (1) C₁₋₆ alkoxy; (2) C₁₋₆ alkylsulfinyl; (3) amino, as defined herein (e.g., unsubstituted amino (i.e., —NH₂) or a substituted amino (i.e., —N(R^{N1})₂, where R^{N1} is as defined for amino); (4) C₆₋₁₀ aryl-C₁₋₆ alkoxy; (5) azido; (6) halo; (7) (C₂₋₉ heterocyclyl)oxy; (8) hydroxy; (9) nitro; (10) oxo (e.g., carboxyaldehyde or acyl); (11) C₁₋₇ spirocyclyl; (12) thioalkoxy; (13) thiol; (14) —CO₂R^{A}′, where R^{A}′ is selected from the group consisting of (a) C₁₋₂₀ alkyl (e.g., C₁₋₆ alkyl), (b) C₂₋₂₀ alkenyl (e.g., C₂₋₆ alkenyl), (c) C₆₋₁₀ aryl, (d) hydrogen, (e) C₁₋₆ alk-C₆₋₁₀ aryl, (f) amino-C₁₋₂₀ alkyl, (g) polyethylene glycol of —(CH₂)ₛ₂(OCH₂CH₂)ₛ₁(CH₂)ₛ₃OR′, wherein s1 is an integer from 1 to 10 (e.g., from 1 to 6 or from 1 to 4), each of s2 and s3, independently, is an integer from 0 to 10 (e.g., from 0 to 4, from 0 to 6, from 1 to 4, from 1 to 6, or from 1 to 10), and R′ is H or C₁₋₂₀ alkyl, and (h) amino-polyethylene glycol of —NR^{N1}(CH₂)ₛ₂(CH₂CH₂O)ₛ₁(CH₂)ₛ₃NR^{N1}, wherein s1 is an integer from 1 to 10 (e.g., from 1 to 6 or from 1 to 4), each of s2 and s3, independently, is an integer from 0 to 10 (e.g., from 0 to 4, from 0 to 6, from 1 to 4, from 1 to 6, or from 1 to 10), and each R^{N1} is, independently, hydrogen or optionally substituted C₁₋₆ alkyl; (15) —C(O)NR^{B}′R^{C}′, where each of R^{B}′ and R^{C}′ is, independently, selected from the group consisting of (a) hydrogen, (b) C₁₋₆ alkyl, (c) C₆₋₁₀ aryl, and (d) C₁₋₆ alk-C₁₋₁₀ aryl; (16) —SO₂R^{D}′, where R^{D}′ is selected from the group consisting of (a) C₁₋₆ alkyl, (b) C₆₋₁₀ aryl, (c) C₁₋₆ alk-C₆₋₁₀ aryl, and (d) hydroxy; (17) —SO₂NR^{E}′R^{F}′, where each of R^{E}′ and R^{F}′ is, independently, selected from the group consisting of (a) hydrogen, (b) C₁₋₆ alkyl, (c) C₆₋₁₀ aryl and (d) C₁₋₆ alk-C₆₋₁₀ aryl; (18) —C(O)R^{G}′, where R^{G}′ is selected from the group consisting of (a) C₁₋₂₀ alkyl (e.g., C₁₋₆ alkyl), (b) C₂₋₂₀ alkenyl (e.g., C₂₋₆ alkenyl), (c) C₆₋₁₀ aryl, (d) hydrogen, (e) C₁₋₆ alk-C₆₋₁₀ aryl, (f) amino-C₁₋₂₀ alkyl, (g) polyethylene glycol of —(CH₂)ₛ₂(OCH₂CH₂)ₛ₁(CH₂)ₛ₃OR′, wherein s1 is an integer from 1 to 10 (e.g., from 1 to 6 or from 1 to 4), each of s2 and s3, independently, is an integer from 0 to 10 (e.g., from 0 to 4, from 0 to 6, from 1 to 4, from 1 to 6, or from 1 to 10), and R′ is H or C₁₋₂₀ alkyl, and (h) amino-polyethylene glycol of —NR^{N1}(CH₂)ₛ₂(CH₂CH₂O)ₛ₁(CH₂)ₛ₃NR^{N1}, wherein s1 is an integer from 1 to 10 (e.g., from 1 to 6 or from 1 to 4), each of s2 and s3, independently, is an integer from 0 to 10 (e.g., from 0 to 4, from 0 to 6, from 1 to 4, from 1 to 6, or from 1 to 10), and each R^{N1} is, independently, hydrogen or optionally substituted C₁₋₆ alkyl; (19) —NR^{H}′C(O)R^{I}′, wherein R^{H}′ is selected from the group consisting of (a1) hydrogen and (b1) C₁₋₆ alkyl, and R′ is selected from the group consisting of (a2) C₁₋₂₀ alkyl (e.g., C₁₋₆ alkyl), (b2) C₂₋₂₀ alkenyl (e.g., C₂₋₆ alkenyl), (c2) C₆₋₁₀ aryl, (d2) hydrogen, (e2) C₁₋₆ alk-C₁₋₁₀ aryl, (f2) amino-C₁₋₂₀ alkyl, (g²) polyethylene glycol of —(CH₂)ₛ₂(OCH₂CH₂)ₛ₁(CH₂)ₛ₃OR′, wherein s1 is an integer from 1 to 10 (e.g., from 1 to 6 or from 1 to 4), each of s2 and s3, independently, is an integer from 0 to 10 (e.g., from 0 to 4, from 0 to 6, from 1 to 4, from 1 to 6, or from 1 to 10), and R′ is H or C₁₋₂₀ alkyl, and (h2) amino-polyethylene glycol of —NR^{N1}(CH₂)ₛ₂(CH₂CH₂O)ₛ₁(CH₂)ₛ₃NR^{N1}, wherein s1 is an integer from 1 to 10 (e.g., from 1 to 6 or from 1 to 4), each of s2 and s3, independently, is an integer from 0 to 10 (e.g., from 0 to 4, from 0 to 6, from 1 to 4, from 1 to 6, or from 1 to 10), and each RN is, independently, hydrogen or optionally substituted C₁₋₆ alkyl; (20) —NR^{J}′C(O)OR^{K}′, wherein R^{J}′ is selected from the group consisting of (a1) hydrogen and (b1) C₁₋₆ alkyl, and R^{K}′ is selected from the group consisting of (a2) C₁₋₂₀ alkyl (e.g., C₁₋₆ alkyl), (b2) C₂₋₂₀ alkenyl (e.g., C₂₋₆ alkenyl), (c2) C₆₋₁₀ aryl, (d2) hydrogen, (e2) C₁₋₆ alk-C₆₋₁₀ aryl, (f2) amino-C₁₋₂₀ alkyl, (g2) polyethylene glycol of —(CH₂)ₛ₂(OCH₂CH₂)ₛ₁(CH₂)ₛ₃OR′, wherein s1 is an integer from 1 to 10 (e.g., from 1 to 6 or from 1 to 4), each of s2 and s3, independently, is an integer from 0 to 10 (e.g., from 0 to 4, from 0 to 6, from 1 to 4, from 1 to 6, or from 1 to 10), and R′ is H or C₁₋₂₀ alkyl, and (h2) amino-polyethylene glycol of —NR^{N1}(CH₂)ₛ₂(CH₂CH₂O)ₛ₁(CH₂)ₛ₃N1, wherein s1 is an integer from 1 to 10 (e.g., from 1 to 6 or from 1 to 4), each of s2 and s3, independently, is an integer from 0 to 10 (e.g., from 0 to 4, from 0 to 6, from 1 to 4, from 1 to 6, or from 1 to 10), and each RN is, independently, hydrogen or optionally substituted C₁₋₆ alkyl; and (21) amidine. In some embodiments, each of these groups can be further substituted as described herein.

[1107] The term “aminoalkoxy,” as used herein, represents an alkoxy group, as defined herein, substituted by an amino group, as defined herein. The alkyl and amino each can be further substituted with 1, 2, 3, or 4 substituent groups as described herein for the respective group (e.g., CO₂R^{A}′, where R^{A}′ is selected from the group consisting of (a) C₁₋₆ alkyl, (b) C₆₋₁₀ aryl, (c) hydrogen, and (d) C₁₋₆ alk-C₆₋₁₀ aryl, e.g., carboxy).

[1108] The term “aminoalkyl,” as used herein, represents an alkyl group, as defined herein, substituted by an amino group, as defined herein. The alkyl and amino each can be further substituted with 1, 2, 3, or 4 substituent groups as described herein for the respective group (e.g., CO₂R^{A}′, where R^{A}′ is selected from the group consisting of (a) C₁₋₆ alkyl, (b) C₆₋₁₀ aryl, (c) hydrogen, and (d) C₁₋₆ alk-C₆₋₁₀ aryl, e.g., carboxy).

[1109] The term “aryl,” as used herein, represents a mono-, bicyclic, or multicyclic carbocyclic ring system having one or two aromatic rings and is exemplified by phenyl, naphthyl, 1,2-dihydronaphthyl, 1,2,3,4-tetrahydronaphthyl, anthracenyl, phenanthrenyl, fluorenyl, indanyl, indenyl, and the like, and may be optionally substituted with 1, 2, 3, 4, or 5 substituents independently selected from the group consisting of: (1) C₁₋₇ acyl (e.g., carboxyaldehyde); (2) C₁₋₂₀ alkyl (e.g., C₁₋₆ alkyl, C₁₋₆ alkoxy-C₁₋₆ alkyl, C₁₋₆ alkylsulfinyl-C₁₋₆ alkyl, amino-C₁₋₆ alkyl, azido-C₁₋₆ alkyl, (carboxyaldehyde)-C₁₋₆ alkyl, halo-C₁₋₆ alkyl (e.g., perfluoroalkyl), hydroxy-C₁₋₆ alkyl, nitro-C₁₋₆ alkyl, or C₁₋₆ thioalkoxy-C₁₋₆ alkyl); (3) C₁₋₂₀ alkoxy (e.g., C₁₋₆ alkoxy, such as perfluoroalkoxy); (4) C₁₋₆ alkylsulfinyl; (5) C₆₋₁₀ aryl; (6) amino; (7) C₁₋₆ alk-C₆₋₁₀ aryl; (8) azido; (9) C₃₋₈ cycloalkyl; (10) C₁₋₆ alk-C₃₋₈ cycloalkyl; (11) halo; (12) C₁₋₁₂ heterocyclyl (e.g., C₁₋₁₂ heteroaryl); (13) (C₁₋₁₂ heterocyclyl)oxy; (14) hydroxy; (15) nitro; (16) C₁₋₂₀ thioalkoxy (e.g., C₁₋₆ thioalkoxy); (17) —(CH₂)_{q}CO₂R^{A}′, where q is an integer from zero to four, and R^{A}′ is selected from the group consisting of (a) C₁₋₆ alkyl, (b) C₆₋₁₀ aryl, (c) hydrogen, and (d) C₁₋₆ alk-C₆₋₁₀ aryl; (18) —(CH₂)_{q}CONR^{B}′R^{C}′, where q is an integer from zero to four and where R^{B}′ and R^{C}′ are independently selected from the group consisting of (a) hydrogen, (b) C₁₋₆ alkyl, (c) C₆₋₁₀ aryl, and (d) C₁₋₆ alk-C₆₋₁₀ aryl; (19) —(CH₂)_{q}SO₂R^{D}′, where q is an integer from zero to four and where R^{D}′ is selected from the group consisting of (a) alkyl, (b) C₆₋₁₀ aryl, and (c) alk-C₆₋₁₀ aryl; (20) —(CH₂)_{q}SO₂NR^{E}′R^{F}′ where q is an integer from zero to four and where each of R^{E}′ and R^{F}′ is, independently, selected from the group consisting of (a) hydrogen, (b) C₁₋₆ alkyl, (c) C₆₋₁₀ aryl, and (d) C₁₋₆ alk-C₆₋₁₀ aryl; (21) thiol; (22) C₆₋₁₀ aryloxy; (23) C₃₋₈ cycloalkoxy; (24) C₆₋₁₀ aryl-C₁₋₆ alkoxy; (25) C₁₋₆ alk-C₁₋₁₂ heterocyclyl (e.g., C₁₋₆ alk-C₁₋₁₂ heteroaryl); (26) C₂₋₂₀ alkenyl; and (27) C₂₋₂₀ alkynyl. In some embodiments, each of these groups can be further substituted as described herein. For example, the alkylene group of a C₁-alkaryl or a C₁-alkheterocyclyl can be further substituted with an oxo group to afford the respective aryloyl and (heterocyclyl)oyl substituent group.

[1110] The term “arylalkoxy,” as used herein, represents an alkaryl group, as defined herein, attached to the parent molecular group through an oxygen atom. Exemplary unsubstituted alkoxyalkyl groups include from 7 to 30 carbons (e.g., from 7 to 16 or from 7 to 20 carbons, such as C₆₋₁₀ aryl-C₁₋₆ alkoxy, C₆₋₁₀ aryl-C₁₋₁₀ alkoxy, or C₆₋₁₀ aryl-C₁₋₂₀ alkoxy). In some embodiments, the arylalkoxy group can be substituted with 1, 2, 3, or 4 substituents as defined herein

[1111] The term “aryloxy” represents a chemical substituent of formula —OR′, where R′ is an aryl group of 6 to 18 carbons, unless otherwise specified. In some embodiments, the aryl group can be substituted with 1, 2, 3, or 4 substituents as defined herein.

[1112] The term “aryloyl,” as used herein, represents an aryl group, as defined herein, that is attached to the parent molecular group through a carbonyl group. Exemplary unsubstituted aryloyl groups are of 7 to 11 carbons. In some embodiments, the aryl group can be substituted with 1, 2, 3, or 4 substituents as defined herein.

[1113] The term “azido” represents an —N₃ group, which can also be represented as —N═N═N.

[1114] The term “bicyclic,” as used herein, refer to a structure having two rings, which may be aromatic or non-aromatic. Bicyclic structures include spirocyclyl groups, as defined herein, and two rings that share one or more bridges, where such bridges can include one atom or a chain including two, three, or more atoms. Exemplary bicyclic groups include a bicyclic carbocyclyl group, where the first and second rings are carbocyclyl groups, as defined herein; a bicyclic aryl groups, where the first and second rings are aryl groups, as defined herein; bicyclic heterocyclyl groups, where the first ring is a heterocyclyl group and the second ring is a carbocyclyl (e.g., aryl) or heterocyclyl (e.g., heteroaryl) group; and bicyclic heteroaryl groups, where the first ring is a heteroaryl group and the second ring is a carbocyclyl (e.g., aryl) or heterocyclyl (e.g., heteroaryl) group. In some embodiments, the bicyclic group can be substituted with 1, 2, 3, or 4 substituents as defined herein for cycloalkyl, heterocyclyl, and aryl groups.

[1115] The terms “carbocyclic” and “carbocyclyl,” as used herein, refer to an optionally substituted C₃₋₁₂ monocyclic, bicyclic, or tricyclic structure in which the rings, which may be aromatic or non-aromatic, are formed by carbon atoms. Carbocyclic structures include cycloalkyl, cycloalkenyl, and aryl groups.

[1116] The term “carbamoyl,” as used herein, represents —C(O)—N(R^{N1})₂, where the meaning of each R^{N1} is found in the definition of “amino” provided herein.

[1117] The term “carbamoylalkyl,” as used herein, represents an alkyl group, as defined herein, substituted by a carbamoyl group, as defined herein. The alkyl group can be further substituted with 1, 2, 3, or 4 substituent groups as described herein.

[1118] The term “carbamyl,” as used herein, refers to a carbamate group having the structure —NR^{N1}C(═O)OR or —OC(═O)N(R^{N1})₂, where the meaning of each R^{N1} is found in the definition of “amino” provided herein, and R is alkyl, cycloalkyl, alkcycloalkyl, aryl, alkaryl, heterocyclyl (e.g., heteroaryl), or alkheterocyclyl (e.g., alkheteroaryl), as defined herein.

[1119] The term “carbonyl,” as used herein, represents a C(O) group, which can also be represented as C═O.

[1120] The term “carboxyaldehyde” represents an acyl group having the structure —CHO.

[1121] The term “carboxy,” as used herein, means —CO₂H.

[1122] The term “carboxyalkoxy,” as used herein, represents an alkoxy group, as defined herein, substituted by a carboxy group, as defined herein. The alkoxy group can be further substituted with 1, 2, 3, or 4 substituent groups as described herein for the alkyl group.

[1123] The term “carboxyalkyl,” as used herein, represents an alkyl group, as defined herein, substituted by a carboxy group, as defined herein. The alkyl group can be further substituted with 1, 2, 3, or 4 substituent groups as described herein.

[1124] The term “cyano,” as used herein, represents an —CN group.

[1125] The term “cycloalkoxy” represents a chemical substituent of formula —OR, where R is a C₃₋₈ cycloalkyl group, as defined herein, unless otherwise specified. The cycloalkyl group can be further substituted with 1, 2, 3, or 4 substituent groups as described herein. Exemplary unsubstituted cycloalkoxy groups are from 3 to 8 carbons. In some embodiment, the cycloalkyl group can be further substituted with 1, 2, 3, or 4 substituent groups as described herein.

[1126] The term “cycloalkyl,” as used herein represents a monovalent saturated or unsaturated non-aromatic cyclic hydrocarbon group from three to eight carbons, unless otherwise specified, and is exemplified by cyclopropyl, cyclobutyl, cyclopentyl, cyclohexyl, cycloheptyl, bicyclo[2.2.1.]heptyl, and the like. When the cycloalkyl group includes one carbon-carbon double bond, the cycloalkyl group can be referred to as a “cycloalkenyl” group. Exemplary cycloalkenyl groups include cyclopentenyl, cyclohexenyl, and the like. The cycloalkyl groups of this invention can be optionally substituted with: (1) C₁₋₇ acyl (e.g., carboxyaldehyde); (2) C₁₋₂₀ alkyl (e.g., C₁₋₆ alkyl, C₁₋₆ alkoxy-C₁₋₆ alkyl, C₁₋₆ alkylsulfinyl-C₁₋₆ alkyl, amino-C₁₋₆ alkyl, azido-C₁₋₆ alkyl, (carboxyaldehyde)-C₁₋₆ alkyl, halo-C₁₋₆ alkyl (e.g., perfluoroalkyl), hydroxy-C₁₋₆ alkyl, nitro-C₁₋₆ alkyl, or C₁₋₆ thioalkoxy-C₁₋₆ alkyl); (3) C₁₋₂₀ alkoxy (e.g., C₁₋₆ alkoxy, such as perfluoroalkoxy); (4) C₁₋₆ alkylsulfinyl; (5) C₆₋₁₀ aryl; (6) amino; (7) C₁₋₆ alk-C₆₋₁₀ aryl; (8) azido; (9) C₃₋₈ cycloalkyl; (10) C₁₋₆ alk-C₃₋₈ cycloalkyl; (11) halo; (12) C₁₋₁₂ heterocyclyl (e.g., C₁₋₁₂ heteroaryl); (13) (C₁₋₁₂ heterocyclyl)oxy; (14) hydroxy; (15) nitro; (16) C₁₋₂₀ thioalkoxy (e.g., C₁₋₆ thioalkoxy); (17) —(CH₂)_{q}CO₂R^{A}′, where q is an integer from zero to four, and R^{A}′ is selected from the group consisting of (a) C₁₋₆ alkyl, (b) C₆₋₁₀ aryl, (c) hydrogen, and (d) C₁₋₆ alk-C₆₋₁₀ aryl; (18) —(CH₂)_{q}CONR^{B}′R^{C}′, where q is an integer from zero to four and where R^{B}′ and R^{C}′ are independently selected from the group consisting of (a) hydrogen, (b) C₆₋₁₀ alkyl, (c) C₆₋₁₀ aryl, and (d) C₁₋₆ alk-C₆₋₁₀ aryl; (19) —(CH₂)_{q}SO₂R^{D}′, where q is an integer from zero to four and where R^{D}′ is selected from the group consisting of (a) C₆₋₁₀ alkyl, (b) C₆₋₁₀ aryl, and (c) C₁₋₆ alk-C₆₋₁₀ aryl; (20) —(CH₂)_{q}SO₂NR^{E}′R^{F}′, where q is an integer from zero to four and where each of R^{E}′ and R^{F}′ is, independently, selected from the group consisting of (a) hydrogen, (b) C₆₋₁₀ alkyl, (c) C₆₋₁₀ aryl, and (d) C₁₋₆ alk-C₆₋₁₀ aryl; (21) thiol; (22) C₆₋₁₀ aryloxy; (23) C₃₋₈ cycloalkoxy; (24) C₆₋₁₀ aryl-C₁₋₆ alkoxy; (25) C₁₋₆ alk-C₁₋₁₂ heterocyclyl (e.g., C₁₋₆ alk-C₁₋₁₂ heteroaryl); (26) oxo; (27) C₂₋₂₀ alkenyl; and (28) C₂₋₂₀ alkynyl. In some embodiments, each of these groups can be further substituted as described herein. For example, the alkylene group of a C₁-alkaryl or a C₁-alkheterocyclyl can be further substituted with an oxo group to afford the respective aryloyl and (heterocyclyl)oyl substituent group.

[1127] The term “diastereomer,” as used herein means stereoisomers that are not mirror images of one another and are non-superimposable on one another.

[1128] The term “effective amount” of an agent, as used herein, is that amount sufficient to effect beneficial or desired results, for example, clinical results, and, as such, an “effective amount” depends upon the context in which it is being applied. For example, in the context of administering an agent that treats cancer, an effective amount of an agent is, for example, an amount sufficient to achieve treatment, as defined herein, of cancer, as compared to the response obtained without administration of the agent.

[1129] The term “enantiomer,” as used herein, means each individual optically active form of a compound of the invention, having an optical purity or enantiomeric excess (as determined by methods standard in the art) of at least 80% (i.e., at least 90% of one enantiomer and at most 10% of the other enantiomer), preferably at least 90% and more preferably at least 98%.

[1130] The term “halo,” as used herein, represents a halogen selected from bromine, chlorine, iodine, or fluorine.

[1131] The term “haloalkoxy,” as used herein, represents an alkoxy group, as defined herein, substituted by a halogen group (i.e., F, Cl, Br, or I). A haloalkoxy may be substituted with one, two, three, or, in the case of alkyl groups of two carbons or more, four halogens. Haloalkoxy groups include perfluoroalkoxys (e.g., —OCF₃), —OCHF₂, —OCH₂F, —OCCl₃, —OCH₂CH₂Br, —OCH₂CH(CH₂CH₂Br)CH₃, and —OCHICH₃. In some embodiments, the haloalkoxy group can be further substituted with 1, 2, 3, or 4 substituent groups as described herein for alkyl groups.

[1132] The term “haloalkyl,” as used herein, represents an alkyl group, as defined herein, substituted by a halogen group (i.e., F, Cl, Br, or I). A haloalkyl may be substituted with one, two, three, or, in the case of alkyl groups of two carbons or more, four halogens. Haloalkyl groups include perfluoroalkyls (e.g., —CF₃), —CHF₂, —CH₂F, —CCl₃, —CH₂CH₂Br, —CH₂CH(CH₂CH₂Br)CH₃, and —CHICH₃. In some embodiments, the haloalkyl group can be further substituted with 1, 2, 3, or 4 substituent groups as described herein for alkyl groups.

[1133] The term “heteroalkylene,” as used herein, refers to an alkylene group, as defined herein, in which one or two of the constituent carbon atoms have each been replaced by nitrogen, oxygen, or sulfur. In some embodiments, the heteroalkylene group can be further substituted with 1, 2, 3, or 4 substituent groups as described herein for alkylene groups.

[1134] The term “heteroaryl,” as used herein, represents that subset of heterocyclyls, as defined herein, which are aromatic: i.e., they contain 4n+2 pi electrons within the mono- or multicyclic ring system. Exemplary unsubstituted heteroaryl groups are of 1 to 12 (e.g., 1 to 11, 1 to 10, 1 to 9, 2 to 12, 2 to 11, 2 to 10, or 2 to 9) carbons. In some embodiment, the heteroaryl is substituted with 1, 2, 3, or 4 substituents groups as defined for a heterocyclyl group.

[1135] The term “heterocyclyl,” as used herein represents a 5-, 6- or 7-membered ring, unless otherwise specified, containing one, two, three, or four heteroatoms independently selected from the group consisting of nitrogen, oxygen, and sulfur. The 5-membered ring has zero to two double bonds, and the 6- and 7-membered rings have zero to three double bonds. Exemplary unsubstituted heterocyclyl groups are of 1 to 12 (e.g., 1 to 11, 1 to 10, 1 to 9, 2 to 12, 2 to 11, 2 to 10, or 2 to 9) carbons. The term “heterocyclyl” also represents a heterocyclic compound having a bridged multicyclic structure in which one or more carbons and/or heteroatoms bridges two nonadjacent members of a monocyclic ring, e.g., a quinuclidinyl group. The term “heterocyclyl” includes bicyclic, tricyclic, and tetracyclic groups in which any of the above heterocyclic rings is fused to one, two, or three carbocyclic rings, e.g., an aryl ring, a cyclohexane ring, a cyclohexene ring, a cyclopentane ring, a cyclopentene ring, or another monocyclic heterocyclic ring, such as indolyl, quinolyl, isoquinolyl, tetrahydroquinolyl, benzofuryl, benzothienyl and the like. Examples of fused heterocyclyls include tropanes and 1,2,3,5,8,8a-hexahydroindolizine. Heterocyclics include pyrrolyl, pyrrolinyl, pyrrolidinyl, pyrazolyl, pyrazolinyl, pyrazolidinyl, imidazolyl, imidazolinyl, imidazolidinyl, pyridyl, piperidinyl, homopiperidinyl, pyrazinyl, piperazinyl, pyrimidinyl, pyridazinyl, oxazolyl, oxazolidinyl, isoxazolyl, isoxazolidiniyl, morpholinyl, thiomorpholinyl, thiazolyl, thiazolidinyl, isothiazolyl, isothiazolidinyl, indolyl, indazolyl, quinolyl, isoquinolyl, quinoxalinyl, dihydroquinoxalinyl, quinazolinyl, cinnolinyl, phthalazinyl, benzimidazolyl, benzothiazolyl, benzoxazolyl, benzothiadiazolyl, furyl, thienyl, thiazolidinyl, isothiazolyl, triazolyl, tetrazolyl, oxadiazolyl (e.g., 1,2,3-oxadiazolyl), purinyl, thiadiazolyl (e.g., 1,2,3-thiadiazolyl), tetrahydrofuranyl, dihydrofuranyl, tetrahydrothienyl, dihydrothienyl, dihydroindolyl, dihydroquinolyl, tetrahydroquinolyl, tetrahydroisoquinolyl, dihydroisoquinolyl, pyranyl, dihydropyranyl, dithiazolyl, benzofuranyl, isobenzofuranyl, benzothienyl, and the like, including dihydro and tetrahydro forms thereof, where one or more double bonds are reduced and replaced with hydrogens. Still other exemplary heterocyclyls include: 2,3,4,5-tetrahydro-2-oxo-oxazolyl; 2,3-dihydro-2-oxo-1H-imidazolyl; 2,3,4,5-tetrahydro-5-oxo-1H-pyrazolyl (e.g., 2,3,4,5-tetrahydro-2-phenyl-5-oxo-1H-pyrazolyl); 2,3,4,5-tetrahydro-2,4-dioxo-1H-imidazolyl (e.g., 2,3,4,5-tetrahydro-2,4-dioxo-5-methyl-5-phenyl-1H-imidazolyl); 2,3-dihydro-2-thioxo-1,3,4-oxadiazolyl (e.g., 2,3-dihydro-2-thioxo-5-phenyl-1,3,4-oxadiazolyl); 4,5-dihydro-5-oxo-1H-triazolyl (e.g., 4,5-dihydro-3-methyl-4-amino 5-oxo-1H-triazolyl); 1,2,3,4-tetrahydro-2,4-dioxopyridinyl (e.g., 1,2,3,4-tetrahydro-2,4-dioxo-3,3-diethylpyridinyl); 2,6-dioxo-piperidinyl (e.g., 2,6-dioxo-3-ethyl-3-phenylpiperidinyl); 1,6-dihydro-6-oxopyridiminyl; 1,6-dihydro-4-oxopyrimidinyl (e.g., 2-(methylthio)-1,6-dihydro-4-oxo-5-methylpyrimidin-1-yl); 1,2,3,4-tetrahydro-2,4-dioxopyrimidinyl (e.g., 1,2,3,4-tetrahydro-2,4-dioxo-3-ethylpyrimidinyl); 1,6-dihydro-6-oxo-pyridazinyl (e.g., 1,6-dihydro-6-oxo-3-ethylpyridazinyl); 1,6-dihydro-6-oxo-1,2,4-triazinyl (e.g., 1,6-dihydro-5-isopropyl-6-oxo-1,2,4-triazinyl); 2,3-dihydro-2-oxo-1H-indolyl (e.g., 3,3-dimethyl-2,3-dihydro-2-oxo-1H-indolyl and 2,3-dihydro-2-oxo-3,3′-spiropropane-1H-indol-1-yl); 1,3-dihydro-1-oxo-2H-iso-indolyl; 1,3-dihydro-1,3-dioxo-2H-iso-indolyl; 1H-benzopyrazolyl (e.g., 1-(ethoxycarbonyl)-1H-benzopyrazolyl); 2,3-dihydro-2-oxo-1H-benzimidazolyl (e.g., 3-ethyl-2,3-dihydro-2-oxo-1H-benzimidazolyl); 2,3-dihydro-2-oxo-benzoxazolyl (e.g., 5-chloro-2,3-dihydro-2-oxo-benzoxazolyl); 2,3-dihydro-2-oxo-benzoxazolyl; 2-oxo-2H-benzopyranyl; 1,4-benzodioxanyl; 1,3-benzodioxanyl; 2,3-dihydro-3-oxo,4H-1,3-benzothiazinyl; 3,4-dihydro-4-oxo-3H-quinazolinyl (e.g., 2-methyl-3,4-dihydro-4-oxo-3H-quinazolinyl); 1,2,3,4-tetrahydro-2,4-dioxo-3H-quinazolyl (e.g., 1-ethyl-1,2,3,4-tetrahydro-2,4-dioxo-3H-quinazolyl); 1,2,3,6-tetrahydro-2,6-dioxo-7H-purinyl (e.g., 1,2,3,6-tetrahydro-1,3-dimethyl-2,6-dioxo-7 H-purinyl); 1,2,3,6-tetrahydro-2,6-dioxo-1 H-purinyl (e.g., 1,2,3,6-tetrahydro-3,7-dimethyl-2,6-dioxo-1 H-purinyl); 2-oxobenz[c,d]indolyl; 1,1-dioxo-2H-naphth[1,8-c,d]isothiazolyl; and 1,8-naphthylenedicarboxamido. Additional heterocyclics include 3,3a,4,5,6,6a-hexahydro-pyrrolo[3,4-b]pyrrol-(2H)-yl, and 2,5-diazabicyclo[2.2.1]heptan-2-yl, homopiperazinyl (or diazepanyl), tetrahydropyranyl, dithiazolyl, benzofuranyl, benzothienyl, oxepanyl, thiepanyl, azocanyl, oxecanyl, and thiocanyl. Heterocyclic groups also include groups of the formula F G,

[chemical structure]

where

[1136] E′ is selected from the group consisting of —N— and —CH—; F′ is selected from the group consisting of —N═CH—, —NH—CH₂—, —NH—C(O)—, —NH—, —CH═N—, —CH₂—NH—, —C(O)—NH—, —CH═CH—, —CH₂—, —CH₂CH₂—, —CH₂O—, —OCH₂—, —O—, and —S—; and G′ is selected from the group consisting of —CH— and —N—. Any of the heterocyclyl groups mentioned herein may be optionally substituted with one, two, three, four or five substituents independently selected from the group consisting of: (1) C₁₋₇ acyl (e.g., carboxyaldehyde); (2) C₁₋₂₀ alkyl (e.g., C₁₋₆ alkyl, C₁₋₆ alkoxy-C₁₋₆ alkyl, C₁₋₆ alkylsulfinyl-C₁₋₆ alkyl, amino-C₁₋₆ alkyl, azido-C₁₋₆ alkyl, (carboxyaldehyde)-C₁₋₆ alkyl, halo-C₁₋₆ alkyl (e.g., perfluoroalkyl), hydroxy-C₁₋₆ alkyl, nitro-C₁₋₆ alkyl, or C₁₋₆ thioalkoxy-C₁₋₆ alkyl); (3) C₁₋₂₀ alkoxy (e.g., C₁₋₆ alkoxy, such as perfluoroalkoxy); (4) C₁₋₆ alkylsulfinyl; (5) C₆₋₁₀ aryl; (6) amino; (7) C₁₋₆ alk-C₆₋₁₀ aryl; (8) azido; (9) C₃₋₈ cycloalkyl; (10) C₁₋₆ alk-C₃₋₈ cycloalkyl; (11) halo; (12) C₁₋₁₂ heterocyclyl (e.g., C₂₋₁₂ heteroaryl); (13) (C₁₋₁₂ heterocyclyl)oxy; (14) hydroxy; (15) nitro; (16) C₁₋₂₀ thioalkoxy (e.g., C₁₋₆ thioalkoxy); (17) —(CH₂)_{q}CO₂R^{A}′, where q is an integer from zero to four, and R^{A}′ is selected from the group consisting of (a) C₁₋₆ alkyl, (b) C₆₋₁₀ aryl, (c) hydrogen, and (d) C₁₋₆ alk-C₆₋₁₀ aryl; (18) —(CH₂)_{q}CONR^{B}′R^{C}′, where q is an integer from zero to four and where R^{B}′ and R′ are independently selected from the group consisting of (a) hydrogen, (b) C₁₋₆ alkyl, (c) C₆₋₁₀ aryl, and (d) C₁₋₆ alk-C₆₋₁₀ aryl; (19) —(CH₂)_{q}SO₂R^{D}′ where q is an integer from zero to four and where R^{D}′ is selected from the group consisting of (a) C₁₋₆ alkyl, (b) C₆₋₁₀ aryl, and (c) C₁₋₆ alk-C₆₋₁₀ aryl; (20) —(CH₂)_{q}SO₂NR^{E}′R^{F}′, where q is an integer from zero to four and where each of R^{E}′ and R^{F}′ is, independently, selected from the group consisting of (a) hydrogen, (b) C₁₋₆ alkyl, (c) C₆₋₁₀ aryl, and (d) C₁₋₆ alk-C₆₋₁₀ aryl; (21) thiol; (22) C₆₋₁₀ aryloxy; (23) C₃₋₈ cycloalkoxy; (24) arylalkoxy; (25) C₁₋₆ alk-C₁₋₁₂ heterocyclyl (e.g., C₁₋₆ alk-C₁₋₁₂ heteroaryl); (26) oxo; (27) (C₁₋₁₂ heterocyclyl)imino; (28) C₂₋₂₀ alkenyl; and (29) C₂₋₂₀ alkynyl. In some embodiments, each of these groups can be further substituted as described herein. For example, the alkylene group of a C₁-alkaryl or a C₁-alkheterocyclyl can be further substituted with an oxo group to afford the respective aryloyl and (heterocyclyl)oyl substituent group.

[1137] The term “(heterocyclyl)imino,” as used herein, represents a heterocyclyl group, as defined herein, attached to the parent molecular group through an imino group. In some embodiments, the heterocyclyl group can be substituted with 1, 2, 3, or 4 substituent groups as defined herein.

[1138] The term “(heterocyclyl)oxy,” as used herein, represents a heterocyclyl group, as defined herein, attached to the parent molecular group through an oxygen atom. In some embodiments, the heterocyclyl group can be substituted with 1, 2, 3, or 4 substituent groups as defined herein.

[1139] The term “(heterocyclyl)oyl,” as used herein, represents a heterocyclyl group, as defined herein, attached to the parent molecular group through a carbonyl group. In some embodiments, the heterocyclyl group can be substituted with 1, 2, 3, or 4 substituent groups as defined herein.

[1140] The term “hydrocarbon,” as used herein, represents a group consisting only of carbon and hydrogen atoms.

[1141] The term “hydroxy,” as used herein, represents an —OH group.

[1142] The term “hydroxyalkenyl,” as used herein, represents an alkenyl group, as defined herein, substituted by one to three hydroxy groups, with the proviso that no more than one hydroxy group may be attached to a single carbon atom of the alkyl group, and is exemplified by dihydroxypropenyl, hydroxyisopentenyl, and the like.

[1143] The term “hydroxyalkyl,” as used herein, represents an alkyl group, as defined herein, substituted by one to three hydroxy groups, with the proviso that no more than one hydroxy group may be attached to a single carbon atom of the alkyl group, and is exemplified by hydroxymethyl, dihydroxypropyl, and the like.

[1144] The term “isomer,” as used herein, means any tautomer, stereoisomer, enantiomer, or diastereomer of any compound of the invention. It is recognized that the compounds of the invention can have one or more chiral centers and/or double bonds and, therefore, exist as stereoisomers, such as double-bond isomers (i.e., geometric E/Z isomers) or diastereomers (e.g., enantiomers (i.e., (+) or (−)) or cis/trans isomers). According to the invention, the chemical structures depicted herein, and therefore the compounds of the invention, encompass all of the corresponding stereoisomers, that is, both the stereomerically pure form (e.g., geometrically pure, enantiomerically pure, or diastereomerically pure) and enantiomeric and stereoisomeric mixtures, e.g., racemates. Enantiomeric and stereoisomeric mixtures of compounds of the invention can typically be resolved into their component enantiomers or stereoisomers by well-known methods, such as chiral-phase gas chromatography, chiral-phase high performance liquid chromatography, crystallizing the compound as a chiral salt complex, or crystallizing the compound in a chiral solvent. Enantiomers and stereoisomers can also be obtained from stereomerically or enantiomerically pure intermediates, reagents, and catalysts by well-known asymmetric synthetic methods.

[1145] The term “N-protected amino,” as used herein, refers to an amino group, as defined herein, to which is attached one or two N-protecting groups, as defined herein.

[1146] The term “N-protecting group,” as used herein, represents those groups intended to protect an amino group against undesirable reactions during synthetic procedures. Commonly used N-protecting groups are disclosed in Greene, “Protective Groups in Organic Synthesis,” 3^{rd} Edition (John Wiley & Sons, New York, 1999), which is incorporated herein by reference. N-protecting groups include acyl, aryloyl, or carbamyl groups such as formyl, acetyl, propionyl, pivaloyl, t-butylacetyl, 2-chloroacetyl, 2-bromoacetyl, trifluoroacetyl, trichloroacetyl, phthalyl, o-nitrophenoxyacetyl, α-chlorobutyryl, benzoyl, 4-chlorobenzoyl, 4-bromobenzoyl, 4-nitrobenzoyl, and chiral auxiliaries such as protected or unprotected D, L or D, L-amino acids such as alanine, leucine, phenylalanine, and the like; sulfonyl-containing groups such as benzenesulfonyl, p-toluenesulfonyl, and the like; carbamate forming groups such as benzyloxycarbonyl, p-chlorobenzyloxycarbonyl, p-methoxybenzyloxycarbonyl, p-nitrobenzyloxycarbonyl, 2-nitrobenzyloxycarbonyl, p-bromobenzyloxycarbonyl, 3,4-dimethoxybenzyloxycarbonyl, 3,5-dimethoxybenzyloxycarbonyl, 2,4-dimethoxybenzyloxycarbonyl, 4-methoxybenzyloxycarbonyl, 2-nitro-4,5-dimethoxybenzyloxycarbonyl, 3,4,5-trimethoxybenzyloxycarbonyl, 1-(p-biphenylyl)-1-methylethoxycarbonyl, α,α-dimethyl-3,5-dimethoxybenzyloxycarbonyl, benzhydryloxy carbonyl, t-butyloxycarbonyl, diisopropylmethoxycarbonyl, isopropyloxycarbonyl, ethoxycarbonyl, methoxycarbonyl, allyloxycarbonyl, 2,2,2,-trichloroethoxycarbonyl, phenoxycarbonyl, 4-nitrophenoxy carbonyl, fluorenyl-9-methoxycarbonyl, cyclopentyloxycarbonyl, adamantyloxycarbonyl, cyclohexyloxycarbonyl, phenylthiocarbonyl, and the like, alkaryl groups such as benzyl, triphenylmethyl, benzyloxymethyl, and the like and silyl groups, such as trimethylsilyl, and the like. Preferred N-protecting groups are formyl, acetyl, benzoyl, pivaloyl, t-butylacetyl, alanyl, phenylsulfonyl, benzyl, t-butyloxycarbonyl (Boc), and benzyloxycarbonyl (Cbz).

[1147] The term “nitro,” as used herein, represents an —NO₂ group.

[1148] The term “oxo” as used herein, represents ═O.

[1149] The term “perfluoroalkyl,” as used herein, represents an alkyl group, as defined herein, where each hydrogen radical bound to the alkyl group has been replaced by a fluoride radical. Perfluoroalkyl groups are exemplified by trifluoromethyl, pentafluoroethyl, and the like.

[1150] The term “perfluoroalkoxy,” as used herein, represents an alkoxy group, as defined herein, where each hydrogen radical bound to the alkoxy group has been replaced by a fluoride radical. Perfluoroalkoxy groups are exemplified by trifluoromethoxy, pentafluoroethoxy, and the like.

[1151] The term “spirocyclyl,” as used herein, represents a C₂₋₇ alkylene diradical, both ends of which are bonded to the same carbon atom of the parent group to form a spirocyclic group, and also a C₁₋₆ heteroalkylene diradical, both ends of which are bonded to the same atom. The heteroalkylene radical forming the spirocyclyl group can containing one, two, three, or four heteroatoms independently selected from the group consisting of nitrogen, oxygen, and sulfur. In some embodiments, the spirocyclyl group includes one to seven carbons, excluding the carbon atom to which the diradical is attached. The spirocyclyl groups of the invention may be optionally substituted with 1, 2, 3, or 4 substituents provided herein as optional substituents for cycloalkyl and/or heterocyclyl groups.

[1152] The term “stereoisomer,” as used herein, refers to all possible different isomeric as well as conformational forms which a compound may possess (e.g., a compound of any formula described herein), in particular all possible stereochemically and conformationally isomeric forms, all diastereomers, enantiomers and/or conformers of the basic molecular structure. Some compounds of the present invention may exist in different tautomeric forms, all of the latter being included within the scope of the present invention.

[1153] The term “sulfoalkyl,” as used herein, represents an alkyl group, as defined herein, substituted by a sulfo group of —SO₃H. In some embodiments, the alkyl group can be further substituted with 1, 2, 3, or 4 substituent groups as described herein.

[1154] The term “sulfonyl,” as used herein, represents an —S(O)₂-group.

[1155] The term “thioalkaryl,” as used herein, represents a chemical substituent of formula —SR, where R is an alkaryl group. In some embodiments, the alkaryl group can be further substituted with 1, 2, 3, or 4 substituent groups as described herein.

[1156] The term “thioalkheterocyclyl,” as used herein, represents a chemical substituent of formula —SR, where R is an alkheterocyclyl group. In some embodiments, the alkheterocyclyl group can be further substituted with 1, 2, 3, or 4 substituent groups as described herein.

[1157] The term “thioalkoxy,” as used herein, represents a chemical substituent of formula —SR, where R is an alkyl group, as defined herein. In some embodiments, the alkyl group can be further substituted with 1, 2, 3, or 4 substituent groups as described herein.

[1158] The term “thiol” represents an —SH group.

[1159] Compound: As used herein, the term “compound,” is meant to include all stereoisomers, geometric isomers, tautomers, and isotopes of the structures depicted.

[1160] The compounds described herein can be asymmetric (e.g., having one or more stereocenters). All stereoisomers, such as enantiomers and diastereomers, are intended unless otherwise indicated. Compounds of the present disclosure that contain asymmetrically substituted carbon atoms can be isolated in optically active or racemic forms. Methods on how to prepare optically active forms from optically active starting materials are known in the art, such as by resolution of racemic mixtures or by stereoselective synthesis. Many geometric isomers of olefins, C═N double bonds, and the like can also be present in the compounds described herein, and all such stable isomers are contemplated in the present disclosure. Cis and trans geometric isomers of the compounds of the present disclosure are described and may be isolated as a mixture of isomers or as separated isomeric forms.

[1161] Compounds of the present disclosure also include tautomeric forms. Tautomeric forms result from the swapping of a single bond with an adjacent double bond and the concomitant migration of a proton. Tautomeric forms include prototropic tautomers which are isomeric protonation states having the same empirical formula and total charge. Examples prototropic tautomers include ketone—enol pairs, amide—imidic acid pairs, lactam—lactim pairs, amide—imidic acid pairs, enamine—imine pairs, and annular forms where a proton can occupy two or more positions of a heterocyclic system, such as, 1H- and 3H-imidazole, 1H-, 2H- and 4H-1,2,4-triazole, 1H- and 2H-isoindole, and 1H- and 2H-pyrazole. Tautomeric forms can be in equilibrium or sterically locked into one form by appropriate substitution.

[1162] Compounds of the present disclosure also include all of the isotopes of the atoms occurring in the intermediate or final compounds. “Isotopes” refers to atoms having the same atomic number but different mass numbers resulting from a different number of neutrons in the nuclei. For example, isotopes of hydrogen include tritium and deuterium.

[1163] The compounds and salts of the present disclosure can be prepared in combination with solvent or water molecules to form solvates and hydrates by routine methods.

[1164] Conserved: As used herein, the term “conserved” refers to nucleotides or amino acid residues of a polynucleotide sequence or polypeptide sequence, respectively, that are those that occur unaltered in the same position of two or more sequences being compared. Nucleotides or amino acids that are relatively conserved are those that are conserved amongst more related sequences than nucleotides or amino acids appearing elsewhere in the sequences.

[1165] In some embodiments, two or more sequences are said to be “completely conserved” if they are 100% identical to one another. In some embodiments, two or more sequences are said to be “highly conserved” if they are at least 70% identical, at least 80% identical, at least 90% identical, or at least 95% identical to one another. In some embodiments, two or more sequences are said to be “highly conserved” if they are about 70% identical, about 80% identical, about 90% identical, about 95%, about 98%, or about 99% identical to one another. In some embodiments, two or more sequences are said to be “conserved” if they are at least 30% identical, at least 40% identical, at least 50% identical, at least 60% identical, at least 70% identical, at least 80% identical, at least 90% identical, or at least 95% identical to one another. In some embodiments, two or more sequences are said to be “conserved” if they are about 30% identical, about 40% identical, about 50% identical, about 60% identical, about 70% identical, about 80% identical, about 90% identical, about 95% identical, about 98% identical, or about 99% identical to one another. Conservation of sequence may apply to the entire length of an oligonucleotide or polypeptide or may apply to a portion, region or feature thereof.

[1166] Controlled Release: As used herein, the term “controlled release” refers to a pharmaceutical composition or compound release profile that conforms to a particular pattern of release to effect a therapeutic outcome.

[1167] Cyclic or Cyclized: As used herein, the term “cyclic” refers to the presence of a continuous loop. Cyclic molecules need not be circular, only joined to form an unbroken chain of subunits. Cyclic molecules such as the engineered RNA or mRNA of the present invention may be single units or multimers or comprise one or more components of a complex or higher order structure.

[1168] Cytostatic: As used herein, “cytostatic” refers to inhibiting, reducing, suppressing the growth, division, or multiplication of a cell (e.g., a mammalian cell (e.g., a human cell)), bacterium, virus, fungus, protozoan, parasite, prion, or a combination thereof.

[1169] Cytotoxic: As used herein, “cytotoxic” refers to killing or causing injurious, toxic, or deadly effect on a cell (e.g., a mammalian cell (e.g., a human cell)), bacterium, virus, fungus, protozoan, parasite, prion, or a combination thereof.

[1170] Delivery: As used herein, “delivery” refers to the act or manner of delivering a compound, substance, entity, moiety, cargo or payload.

[1171] Delivery Agent: As used herein, “delivery agent” refers to any substance which facilitates, at least in part, the in vivo delivery of a polynucleotide, primary construct or mmRNA to targeted cells.

[1172] Destabilized: As used herein, the term “destable,” “destabilize,” or “destabilizing region” means a region or molecule that is less stable than a starting, wild-type or native form of the same region or molecule.

[1173] Detectable label: As used herein, “detectable label” refers to one or more markers, signals, or moieties which are attached, incorporated or associated with another entity that is readily detected by methods known in the art including radiography, fluorescence, chemiluminescence, enzymatic activity, absorbance and the like. Detectable labels include radioisotopes, fluorophores, chromophores, enzymes, dyes, metal ions, ligands such as biotin, avidin, streptavidin and haptens, quantum dots, and the like. Detectable labels may be located at any position in the peptides or proteins disclosed herein. They may be within the amino acids, the peptides, or proteins, or located at the N- or C-termini.

[1174] Digest: As used herein, the term “digest” means to break apart into smaller pieces or components. When referring to polypeptides or proteins, digestion results in the production of peptides.

[1175] Distal: As used herein, the term “distal” means situated away from the center or away from a point or region of interest.

[1176] Dosing regimen: As used herein, a “dosing regimen” is a schedule of administration or physician determined regimen of treatment, prophylaxis, or palliative care.

[1177] Dose splitting factor (DSF)-ratio of PUD of dose split treatment divided by PUD of total daily dose or single unit dose. The value is derived from comparison of dosing regimens groups.

[1178] Encapsulate: As used herein, the term “encapsulate” means to enclose, surround or encase.

[1179] Encodedprotein cleavage signal: As used herein, “encoded protein cleavage signal” refers to the nucleotide sequence which encodes a protein cleavage signal.

[1180] Engineered: As used herein, embodiments of the invention are “engineered” when they are designed to have a feature or property, whether structural or chemical, that varies from a starting point, wild type or native molecule.

[1181] Exosome: As used herein, “exosome” is a vesicle secreted by mammalian cells or a complex involved in RNA degradation.

[1182] Expression: As used herein, “expression” of a nucleic acid sequence refers to one or more of the following events: (1) production of an RNA template from a DNA sequence (e.g., by transcription); (2) processing of an RNA transcript (e.g., by splicing, editing, 5′ cap formation, and/or 3′ end processing); (3) translation of an RNA into a polypeptide or protein; and (4) post-translational modification of a polypeptide or protein.

[1183] Feature: As used herein, a “feature” refers to a characteristic, a property, or a distinctive element.

[1184] Formulation: As used herein, a “formulation” includes at least a polynucleotide, primary construct or mmRNA and a delivery agent.

[1185] Fragment: A “fragment,” as used herein, refers to a portion. For example, fragments of proteins may comprise polypeptides obtained by digesting full-length protein isolated from cultured cells.

[1186] Functional: As used herein, a “functional” biological molecule is a biological molecule in a form in which it exhibits a property and/or activity by which it is characterized.

[1187] Homology: As used herein, the term “homology” refers to the overall relatedness between polymeric molecules, e.g. between nucleic acid molecules (e.g. DNA molecules and/or RNA molecules) and/or between polypeptide molecules. In some embodiments, polymeric molecules are considered to be “homologous” to one another if their sequences are at least 25%, 30%, 35%, 40%, 45%, 50%, 55%, 60%, 65%, 70%, 75%, 80%, 85%, 90%, 95%, or 99% identical or similar. The term “homologous” necessarily refers to a comparison between at least two sequences (polynucleotide or polypeptide sequences). In accordance with the invention, two polynucleotide sequences are considered to be homologous if the polypeptides they encode are at least about 50%, 60%, 70%, 80%, 90%, 95%, or even 99% for at least one stretch of at least about 20 amino acids. In some embodiments, homologous polynucleotide sequences are characterized by the ability to encode a stretch of at least 4-5 uniquely specified amino acids. For polynucleotide sequences less than 60 nucleotides in length, homology is determined by the ability to encode a stretch of at least 4-5 uniquely specified amino acids. In accordance with the invention, two protein sequences are considered to be homologous if the proteins are at least about 50%, 60%, 70%, 80%, or 90% identical for at least one stretch of at least about 20 amino acids.

[1188] Identity: As used herein, the term “identity” refers to the overall relatedness between polymeric molecules, e.g., between oligonucleotide molecules (e.g. DNA molecules and/or RNA molecules) and/or between polypeptide molecules. Calculation of the percent identity of two polynucleotide sequences, for example, can be performed by aligning the two sequences for optimal comparison purposes (e.g., gaps can be introduced in one or both of a first and a second nucleic acid sequences for optimal alignment and non-identical sequences can be disregarded for comparison purposes). In certain embodiments, the length of a sequence aligned for comparison purposes is at least 30%, at least 40%, at least 50%, at least 60%, at least 70%, at least 80%, at least 90%, at least 95%, or 100% of the length of the reference sequence. The nucleotides at corresponding nucleotide positions are then compared. When a position in the first sequence is occupied by the same nucleotide as the corresponding position in the second sequence, then the molecules are identical at that position. The percent identity between the two sequences is a function of the number of identical positions shared by the sequences, taking into account the number of gaps, and the length of each gap, which needs to be introduced for optimal alignment of the two sequences. The comparison of sequences and determination of percent identity between two sequences can be accomplished using a mathematical algorithm. For example, the percent identity between two nucleotide sequences can be determined using methods such as those described in Computational Molecular Biology, Lesk, A. M., ed., Oxford University Press, New York, 1988; Biocomputing: Informatics and Genome Projects, Smith, D. W., ed., Academic Press, New York, 1993; Sequence Analysis in Molecular Biology, von Heinje, G., Academic Press, 1987; Computer Analysis of Sequence Data, Part I, Griffin, A. M., and Griffin, H. G., eds., Humana Press, New Jersey, 1994; and Sequence Analysis Primer, Gribskov, M. and Devereux, J., eds., M Stockton Press, New York, 1991; each of which is incorporated herein by reference. For example, the percent identity between two nucleotide sequences can be determined using the algorithm of Meyers and Miller (CABIOS, 1989, 4:11-17), which has been incorporated into the ALIGN program (version 2.0) using a PAM120 weight residue table, a gap length penalty of 12 and a gap penalty of 4. The percent identity between two nucleotide sequences can, alternatively, be determined using the GAP program in the GCG software package using an NWSgapdna.CMP matrix. Methods commonly employed to determine percent identity between sequences include, but are not limited to those disclosed in Carillo, H., and Lipman, D., SIAM J Applied Math., 48:1073 (1988); incorporated herein by reference. Techniques for determining identity are codified in publicly available computer programs. Exemplary computer software to determine homology between two sequences include, but are not limited to, GCG program package, Devereux, J., et al., Nucleic Acids Research, 12(1), 387 (1984)), BLASTP, BLASTN, and FASTA Altschul, S. F. et al., J. Molec. Biol., 215, 403 (1990)).

[1189] Inhibit expression of a gene: As used herein, the phrase “inhibit expression of a gene” means to cause a reduction in the amount of an expression product of the gene. The expression product can be an RNA transcribed from the gene (e.g., an mRNA) or a polypeptide translated from an mRNA transcribed from the gene. Typically a reduction in the level of an mRNA results in a reduction in the level of a polypeptide translated therefrom. The level of expression may be determined using standard techniques for measuring mRNA or protein.

[1190] In vitro: As used herein, the term “in vitro” refers to events that occur in an artificial environment, e.g., in a test tube or reaction vessel, in cell culture, in a Petri dish, etc., rather than within an organism (e.g., animal, plant, or microbe).

[1191] In vivo: As used herein, the term “in vivo” refers to events that occur within an organism (e.g., animal, plant, or microbe or cell or tissue thereof).

[1192] Isolated: As used herein, the term “isolated” refers to a substance or entity that has been separated from at least some of the components with which it was associated (whether in nature or in an experimental setting). Isolated substances may have varying levels of purity in reference to the substances from which they have been associated. Isolated substances and/or entities may be separated from at least about 10%, about 20%, about 30%, about 40%, about 50%, about 60%, about 70%, about 80%, about 90%, or more of the other components with which they were initially associated. In some embodiments, isolated agents are more than about 80%, about 85%, about 90%, about 91%, about 92%, about 93%, about 94%, about 95%, about 96%, about 97%, about 98%, about 99%, or more than about 99% pure. As used herein, a substance is “pure” if it is substantially free of other components. Substantially isolated: By “substantially isolated” is meant that the compound is substantially separated from the environment in which it was formed or detected. Partial separation can include, for example, a composition enriched in the compound of the present disclosure. Substantial separation can include compositions containing at least about 50%, at least about 60%, at least about 70%, at least about 80%, at least about 90%, at least about 95%, at least about 97%, or at least about 99% by weight of the compound of the present disclosure, or salt thereof. Methods for isolating compounds and their salts are routine in the art.

[1193] Linker: As used herein, a linker refers to a group of atoms, e.g., 10-1,000 atoms, and can be comprised of the atoms or groups such as, but not limited to, carbon, amino, alkylamino, oxygen, sulfur, sulfoxide, sulfonyl, carbonyl, and imine. The linker can be attached to a modified nucleoside or nucleotide on the nucleobase or sugar moiety at a first end, and to a payload, e.g., a detectable or therapeutic agent, at a second end. The linker may be of sufficient length as to not interfere with incorporation into a nucleic acid sequence. The linker can be used for any useful purpose, such as to form mmRNA multimers (e.g., through linkage of two or more polynucleotides, primary constructs, or mmRNA molecules) or mmRNA conjugates, as well as to administer a payload, as described herein. Examples of chemical groups that can be incorporated into the linker include, but are not limited to, alkyl, alkenyl, alkynyl, amido, amino, ether, thioether, ester, alkylene, heteroalkylene, aryl, or heterocyclyl, each of which can be optionally substituted, as described herein. Examples of linkers include, but are not limited to, unsaturated alkanes, polyethylene glycols (e.g., ethylene or propylene glycol monomeric units, e.g., diethylene glycol, dipropylene glycol, triethylene glycol, tripropylene glycol, tetraethylene glycol, or tetraethylene glycol), and dextran polymers and derivatives thereof, Other examples include, but are not limited to, cleavable moieties within the linker, such as, for example, a disulfide bond (—S—S—) or an azo bond (—N═N—), which can be cleaved using a reducing agent or photolysis. Non-limiting examples of a selectively cleavable bond include an amido bond can be cleaved for example by the use of tris(2-carboxyethyl)phosphine (TCEP), or other reducing agents, and/or photolysis, as well as an ester bond can be cleaved for example by acidic or basic hydrolysis.

[1194] MicroRNA (miRNA) binding site: As used herein, a microRNA (miRNA) binding site represents a nucleotide location or region of a nucleic acid transcript to which at least the “seed” region of a miRNA binds.

[1195] Modified: As used herein “modified” refers to a changed state or structure of a molecule of the invention. Molecules may be modified in many ways including chemically, structurally, and functionally. In one embodiment, the mRNA molecules of the present invention are modified by the introduction of non-natural nucleosides and/or nucleotides, e.g., as it relates to the natural ribonucleotides A, U, G, and C. Noncanonical nucleotides such as the cap structures are not considered “modified” although they differ from the chemical structure of the A, C, G, U ribonucleotides.

[1196] Mucus: As used herein, “mucus” refers to the natural substance that is viscous and comprises mucin glycoproteins.

[1197] Naturally occurring: As used herein, “naturally occurring” means existing in nature without artificial aid.

[1198] Non-human vertebrate: As used herein, a “non human vertebrate” includes all vertebrates except Homo sapiens, including wild and domesticated species. Examples of non-human vertebrates include, but are not limited to, mammals, such as alpaca, banteng, bison, camel, cat, cattle, deer, dog, donkey, gayal, goat, guinea pig, horse, llama, mule, pig, rabbit, reindeer, sheep water buffalo, and yak.

[1199] Off-target: As used herein, “off target” refers to any unintended effect on any one or more target, gene, or cellular transcript.

[1200] Open reading frame: As used herein, “open reading frame” or “ORF” refers to a sequence which does not contain a stop codon in a given reading frame.

[1201] Operably linked: As used herein, the phrase “operably linked” refers to a functional connection between two or more molecules, constructs, transcripts, entities, moieties or the like.

[1202] Optionally substituted: Herein a phrase of the form “optionally substituted X” (e.g., optionally substituted alkyl) is intended to be equivalent to “X, wherein X is optionally substituted” (e.g., “alkyl, wherein said alkyl is optionally substituted”). It is not intended to mean that the feature “X” (e.g. alkyl) per se is optional.

[1203] Peptide: As used herein, “peptide” is less than or equal to 50 amino acids long, e.g., about 5, 10, 15, 20, 25, 30, 35, 40, 45, or 50 amino acids long.

[1204] Paratope: As used herein, a “paratope” refers to the antigen-binding site of an antibody.

[1205] Patient: As used herein, “patient” refers to a subject who may seek or be in need of treatment, requires treatment, is receiving treatment, will receive treatment, or a subject who is under care by a trained professional for a particular disease or condition.

[1206] Pharmaceutically acceptable: The phrase “pharmaceutically acceptable” is employed herein to refer to those compounds, materials, compositions, and/or dosage forms which are, within the scope of sound medical judgment, suitable for use in contact with the tissues of human beings and animals without excessive toxicity, irritation, allergic response, or other problem or complication, commensurate with a reasonable benefit/risk ratio.

[1207] Pharmaceutically acceptable excipients: The phrase “pharmaceutically acceptable excipient,” as used herein, refers any ingredient other than the compounds described herein (for example, a vehicle capable of suspending or dissolving the active compound) and having the properties of being substantially nontoxic and non-inflammatory in a patient. Excipients may include, for example: antiadherents, antioxidants, binders, coatings, compression aids, disintegrants, dyes (colors), emollients, emulsifiers, fillers (diluents), film formers or coatings, flavors, fragrances, glidants (flow enhancers), lubricants, preservatives, printing inks, sorbents, suspensing or dispersing agents, sweeteners, and waters of hydration. Exemplary excipients include, but are not limited to: butylated hydroxytoluene (BHT), calcium carbonate, calcium phosphate (dibasic), calcium stearate, croscarmellose, crosslinked polyvinyl pyrrolidone, citric acid, crospovidone, cysteine, ethylcellulose, gelatin, hydroxypropyl cellulose, hydroxypropyl methylcellulose, lactose, magnesium stearate, maltitol, mannitol, methionine, methylcellulose, methyl paraben, microcrystalline cellulose, polyethylene glycol, polyvinyl pyrrolidone, povidone, pregelatinized starch, propyl paraben, retinyl palmitate, shellac, silicon dioxide, sodium carboxymethyl cellulose, sodium citrate, sodium starch glycolate, sorbitol, starch (corn), stearic acid, sucrose, talc, titanium dioxide, vitamin A, vitamin E, vitamin C, and xylitol.

[1208] Pharmaceutically acceptable salts: The present disclosure also includes pharmaceutically acceptable salts of the compounds described herein. As used herein, “pharmaceutically acceptable salts” refers to derivatives of the disclosed compounds wherein the parent compound is modified by converting an existing acid or base moiety to its salt form (e.g., by reacting the free base group with a suitable organic acid). Examples of pharmaceutically acceptable salts include, but are not limited to, mineral or organic acid salts of basic residues such as amines; alkali or organic salts of acidic residues such as carboxylic acids; and the like. Representative acid addition salts include acetate, adipate, alginate, ascorbate, aspartate, benzenesulfonate, benzoate, bisulfate, borate, butyrate, camphorate, camphorsulfonate, citrate, cyclopentanepropionate, digluconate, dodecylsulfate, ethanesulfonate, fumarate, glucoheptonate, glycerophosphate, hemisulfate, heptonate, hexanoate, hydrobromide, hydrochloride, hydroiodide, 2-hydroxy-ethanesulfonate, lactobionate, lactate, laurate, lauryl sulfate, malate, maleate, malonate, methanesulfonate, 2-naphthalenesulfonate, nicotinate, nitrate, oleate, oxalate, palmitate, pamoate, pectinate, persulfate, 3-phenylpropionate, phosphate, picrate, pivalate, propionate, stearate, succinate, sulfate, tartrate, thiocyanate, toluenesulfonate, undecanoate, valerate salts, and the like. Representative alkali or alkaline earth metal salts include sodium, lithium, potassium, calcium, magnesium, and the like, as well as nontoxic ammonium, quaternary ammonium, and amine cations, including, but not limited to ammonium, tetramethylammonium, tetraethylammonium, methylamine, dimethylamine, trimethylamine, triethylamine, ethylamine, and the like. The pharmaceutically acceptable salts of the present disclosure include the conventional non-toxic salts of the parent compound formed, for example, from non-toxic inorganic or organic acids. The pharmaceutically acceptable salts of the present disclosure can be synthesized from the parent compound which contains a basic or acidic moiety by conventional chemical methods. Generally, such salts can be prepared by reacting the free acid or base forms of these compounds with a stoichiometric amount of the appropriate base or acid in water or in an organic solvent, or in a mixture of the two; generally, nonaqueous media like ether, ethyl acetate, ethanol, isopropanol, or acetonitrile are preferred. Lists of suitable salts are found in Remington's Pharmaceutical Sciences, 17^{th} ed., Mack Publishing Company, Easton, Pa., 1985, p. 1418, Pharmaceutical Salts: Properties, Selection, and Use, P. H. Stahl and C. G. Wermuth (eds.), Wiley-VCH, 2008, and Berge et al., Journal of Pharmaceutical Science, 66, 1-19 (1977), each of which is incorporated herein by reference in its entirety.

[1209] Pharmaceutically acceptable solvate: The term “pharmaceutically acceptable solvate,” as used herein, means a compound of the invention wherein molecules of a suitable solvent are incorporated in the crystal lattice. A suitable solvent is physiologically tolerable at the dosage administered. For example, solvates may be prepared by crystallization, recrystallization, or precipitation from a solution that includes organic solvents, water, or a mixture thereof. Examples of suitable solvents are ethanol, water (for example, mono-, di-, and tri-hydrates), N-methylpyrrolidinone (NMP), dimethyl sulfoxide (DMSO), N,N′-dimethylformamide (DMF), N,N′-dimethylacetamide (DMAC), 1,3-dimethyl-2-imidazolidinone (DMEU), 1,3-dimethyl-3,4,5,6-tetrahydro-2-(1H)-pyrimidinone (DMPU), acetonitrile (ACN), propylene glycol, ethyl acetate, benzyl alcohol, 2-pyrrolidone, benzyl benzoate, and the like. When water is the solvent, the solvate is referred to as a “hydrate.”

[1210] Pharmacokinetic: As used herein, “pharmacokinetic” refers to any one or more properties of a molecule or compound as it relates to the determination of the fate of substances administered to a living organism. Pharmacokinetics is divided into several areas including the extent and rate of absorption, distribution, metabolism and excretion. This is commonly referred to as ADME where: (A) Absorption is the process of a substance entering the blood circulation; (D) Distribution is the dispersion or dissemination of substances throughout the fluids and tissues of the body; (M) Metabolism (or Biotransformation) is the irreversible transformation of parent compounds into daughter metabolites; and (E) Excretion (or Elimination) refers to the elimination of the substances from the body. In rare cases, some drugs irreversibly accumulate in body tissue.

[1211] Physicochemical: As used herein, “physicochemical” means of or relating to a physical and/or chemical property.

[1212] Polypeptide per unit drug (PUD): As used herein, a PUD or product per unit drug, is defined as a subdivided portion of total daily dose, usually 1 mg, pg, kg, etc., of a product (such as a polypeptide) as measured in body fluid or tissue, usually defined in concentration such as pmol/mL, mmol/mL, etc divided by the measure in the body fluid.

[1213] Preventing: As used herein, the term “preventing” refers to partially or completely delaying onset of an infection, disease, disorder and/or condition; partially or completely delaying onset of one or more symptoms, features, or clinical manifestations of a particular infection, disease, disorder, and/or condition; partially or completely delaying onset of one or more symptoms, features, or manifestations of a particular infection, disease, disorder, and/or condition; partially or completely delaying progression from an infection, a particular disease, disorder and/or condition; and/or decreasing the risk of developing pathology associated with the infection, the disease, disorder, and/or condition.

[1214] Prodrug: The present disclosure also includes prodrugs of the compounds described herein. As used herein, “prodrugs” refer to any substance, molecule or entity which is in a form predicate for that substance, molecule or entity to act as a therapeutic upon chemical or physical alteration. Prodrugs may by covalently bonded or sequestered in some way and which release or are converted into the active drug moiety prior to, upon or after administered to a mammalian subject. Prodrugs can be prepared by modifying functional groups present in the compounds in such a way that the modifications are cleaved, either in routine manipulation or in vivo, to the parent compounds. Prodrugs include compounds wherein hydroxyl, amino, sulfhydryl, or carboxyl groups are bonded to any group that, when administered to a mammalian subject, cleaves to form a free hydroxyl, amino, sulfhydryl, or carboxyl group respectively. Preparation and use of prodrugs is discussed in T. Higuchi and V. Stella, “Pro-drugs as Novel Delivery Systems,” Vol. 14 of the A.C.S. Symposium Series, and in Bioreversible Carriers in Drug Design, ed. Edward B. Roche, American Pharmaceutical Association and Pergamon Press, 1987, both of which are hereby incorporated by reference in their entirety.

[1215] Proliferate: As used herein, the term “proliferate” means to grow, expand or increase or cause to grow, expand or increase rapidly. “Proliferative” means having the ability to proliferate. “Anti-proliferative” means having properties counter to or inapposite to proliferative properties.

[1216] Protein cleavage site: As used herein, “protein cleavage site” refers to a site where controlled cleavage of the amino acid chain can be accomplished by chemical, enzymatic or photochemical means.

[1217] Protein cleavage signal: As used herein “protein cleavage signal” refers to at least one amino acid that flags or marks a polypeptide for cleavage.

[1218] Protein of interest: As used herein, the terms “proteins of interest” or “desired proteins” include those provided herein and fragments, mutants, variants, and alterations thereof.

[1219] Proximal: As used herein, the term “proximal” means situated nearer to the center or to a point or region of interest.

[1220] Pseudouridine: As used herein, pseudouridine refers to the C-glycoside isomer of the nucleoside uridine. A “pseudouridine analog” is any modification, variant, isoform or derivative of pseudouridine. For example, pseudouridine analogs include but are not limited to 1-carboxymethyl-pseudouridine, 1-propynyl-pseudouridine, 1-taurinomethyl-pseudouridine, 1-taurinomethyl-4-thio-pseudouridine, 1-methylpseudouridine (m¹ψ), 1-methyl-4-thio-pseudouridine (m¹s⁴ψ), 4-thio-1-methyl-pseudouridine, 3-methyl-pseudouridine (m³ψ), 2-thio-1-methyl-pseudouridine, 1-methyl-1-deaza-pseudouridine, 2-thio-1-methyl-1-deaza-pseudouridine, dihydropseudouridine, 2-thio-dihydropseudouridine, 2-methoxyuridine, 2-methoxy-4-thio-uridine, 4-methoxy-pseudouridine, 4-methoxy-2-thio-pseudouridine, N1-methyl-pseudouridine, 1-methyl-3-(3-amino-3-carboxypropyl)pseudouridine (acp³ ψ), and 2′-O-methyl-pseudouridine (ψm).

[1221] Purified: As used herein, “purify,” “purified,” “purification” means to make substantially pure or clear from unwanted components, material defilement, admixture or imperfection.

[1222] Sample: As used herein, the term “sample” or “biological sample” refers to a subset of its tissues, cells or component parts (e.g. body fluids, including but not limited to blood, mucus, lymphatic fluid, synovial fluid, cerebrospinal fluid, saliva, amniotic fluid, amniotic cord blood, urine, vaginal fluid and semen). A sample further may include a homogenate, lysate or extract prepared from a whole organism or a subset of its tissues, cells or component parts, or a fraction or portion thereof, including but not limited to, for example, plasma, serum, spinal fluid, lymph fluid, the external sections of the skin, respiratory, intestinal, and genitourinary tracts, tears, saliva, milk, blood cells, tumors, organs. A sample further refers to a medium, such as a nutrient broth or gel, which may contain cellular components, such as proteins or nucleic acid molecule.

[1223] Signal Sequences: As used herein, the phrase “signal sequences” refers to a sequence which can direct the transport or localization of a protein.

[1224] Single unit dose: As used herein, a “single unit dose” is a dose of any therapeutic administed in one dose/at one time/single route/single point of contact, i.e., single administration event.

[1225] Similarity: As used herein, the term “similarity” refers to the overall relatedness between polymeric molecules, e.g. between polynucleotide molecules (e.g. DNA molecules and/or RNA molecules) and/or between polypeptide molecules. Calculation of percent similarity of polymeric molecules to one another can be performed in the same manner as a calculation of percent identity, except that calculation of percent similarity takes into account conservative substitutions as is understood in the art.

[1226] Split dose: As used herein, a “split dose” is the division of single unit dose or total daily dose into two or more doses.

[1227] Stable: As used herein “stable” refers to a compound that is sufficiently robust to survive isolation to a useful degree of purity from a reaction mixture, and preferably capable of formulation into an efficacious therapeutic agent.

[1228] Stabilized: As used herein, the term “stabilize”, “stabilized,” “stabilized region” means to make or become stable.

[1229] Subject: As used herein, the term “subject” or “patient” refers to any organism to which a composition in accordance with the invention may be administered, e.g., for experimental, diagnostic, prophylactic, and/or therapeutic purposes. Typical subjects include animals (e.g., mammals such as mice, rats, rabbits, non-human primates, and humans) and/or plants.

[1230] Substantially: As used herein, the term “substantially” refers to the qualitative condition of exhibiting total or near-total extent or degree of a characteristic or property of interest. One of ordinary skill in the biological arts will understand that biological and chemical phenomena rarely, if ever, go to completion and/or proceed to completeness or achieve or avoid an absolute result. The term “substantially” is therefore used herein to capture the potential lack of completeness inherent in many biological and chemical phenomena.

[1231] Substantially equal: As used herein as it relates to time differences between doses, the term means plus/minus 2%.

[1232] Substantially simultaneously: As used herein and as it relates to plurality of doses, the term means within 2 seconds.

[1233] Suffering from: An individual who is “suffering from” a disease, disorder, and/or condition has been diagnosed with or displays one or more symptoms of a disease, disorder, and/or condition.

[1234] Susceptible to: An individual who is “susceptible to” a disease, disorder, and/or condition has not been diagnosed with and/or may not exhibit symptoms of the disease, disorder, and/or condition but harbors a propensity to develop a disease or its symptoms. In some embodiments, an individual who is susceptible to a disease, disorder, and/or condition (for example, cancer) may be characterized by one or more of the following: (1) a genetic mutation associated with development of the disease, disorder, and/or condition; (2) a genetic polymorphism associated with development of the disease, disorder, and/or condition; (3) increased and/or decreased expression and/or activity of a protein and/or nucleic acid associated with the disease, disorder, and/or condition; (4) habits and/or lifestyles associated with development of the disease, disorder, and/or condition; (5) a family history of the disease, disorder, and/or condition; and (6) exposure to and/or infection with a microbe associated with development of the disease, disorder, and/or condition. In some embodiments, an individual who is susceptible to a disease, disorder, and/or condition will develop the disease, disorder, and/or condition. In some embodiments, an individual who is susceptible to a disease, disorder, and/or condition will not develop the disease, disorder, and/or condition.

[1235] Sustained release: As used herein, the term “sustained release” refers to a pharmaceutical composition or compound release profile that conforms to a release rate over a specific period of time.

[1236] Synthetic: The term “synthetic” means produced, prepared, and/or manufactured by the hand of man. Synthesis of polynucleotides or polypeptides or other molecules of the present invention may be chemical or enzymatic.

[1237] Targeted Cells: As used herein, “targeted cells” refers to any one or more cells of interest. The cells may be found in vitro, in vivo, in situ or in the tissue or organ of an organism. The organism may be an animal, preferably a mammal, more preferably a human and most preferably a patient.

[1238] Therapeutic Agent: The term “therapeutic agent” refers to any agent that, when administered to a subject, has a therapeutic, diagnostic, and/or prophylactic effect and/or elicits a desired biological and/or pharmacological effect.

[1239] Therapeutically effective amount: As used herein, the term “therapeutically effective amount” means an amount of an agent to be delivered (e.g., nucleic acid, drug, therapeutic agent, diagnostic agent, prophylactic agent, etc.) that is sufficient, when administered to a subject suffering from or susceptible to an infection, disease, disorder, and/or condition, to treat, improve symptoms of, diagnose, prevent, and/or delay the onset of the infection, disease, disorder, and/or condition.

[1240] Therapeutically effective outcome: As used herein, the term “therapeutically effective outcome” means an outcome that is sufficient in a subject suffering from or susceptible to an infection, disease, disorder, and/or condition, to treat, improve symptoms of, diagnose, prevent, and/or delay the onset of the infection, disease, disorder, and/or condition.

[1241] Total daily dose: As used herein, a “total daily dose” is an amount given or prescribed in 24 hr period. It may be administered as a single unit dose.

[1242] Transcription factor: As used herein, the term “transcription factor” refers to a DNA-binding protein that regulates transcription of DNA into RNA, for example, by activation or repression of transcription. Some transcription factors effect regulation of transcription alone, while others act in concert with other proteins. Some transcription factor can both activate and repress transcription under certain conditions. In general, transcription factors bind a specific target sequence or sequences highly similar to a specific consensus sequence in a regulatory region of a target gene. Transcription factors may regulate transcription of a target gene alone or in a complex with other molecules.

[1243] Treating: As used herein, the term “treating” refers to partially or completely alleviating, ameliorating, improving, relieving, delaying onset of, inhibiting progression of, reducing severity of, and/or reducing incidence of one or more symptoms or features of a particular infection, disease, disorder, and/or condition. For example, “treating” cancer may refer to inhibiting survival, growth, and/or spread of a tumor. Treatment may be administered to a subject who does not exhibit signs of a disease, disorder, and/or condition and/or to a subject who exhibits only early signs of a disease, disorder, and/or condition for the purpose of decreasing the risk of developing pathology associated with the disease, disorder, and/or condition.

[1244] Unmodified: As used herein, “unmodified” refers to any substance, compound or molecule prior to being changed in any way. Unmodified may, but does not always, refer to the wild type or native form of a biomolecule. Molecules may undergo a series of modifications whereby each modified molecule may serve as the “unmodified” starting molecule for a subsequent modification.

### EQUIVALENTS AND SCOPE

[1245] Those skilled in the art will recognize, or be able to ascertain using no more than routine experimentation, many equivalents to the specific embodiments in accordance with the invention described herein. The scope of the present invention is not intended to be limited to the above Description, but rather is as set forth in the appended claims.

[1246] In the claims, articles such as “a,” “an,” and “the” may mean one or more than one unless indicated to the contrary or otherwise evident from the context. Claims or descriptions that include “or” between one or more members of a group are considered satisfied if one, more than one, or all of the group members are present in, employed in, or otherwise relevant to a given product or process unless indicated to the contrary or otherwise evident from the context. The invention includes embodiments in which exactly one member of the group is present in, employed in, or otherwise relevant to a given product or process. The invention includes embodiments in which more than one, or all of the group members are present in, employed in, or otherwise relevant to a given product or process.

[1247] It is also noted that the term “comprising” is intended to be open and permits but does not require the inclusion of additional elements or steps. When the term “comprising” is used herein, the term “consisting of” is thus also encompassed and disclosed.

[1248] Where ranges are given, endpoints are included. Furthermore, it is to be understood that unless otherwise indicated or otherwise evident from the context and understanding of one of ordinary skill in the art, values that are expressed as ranges can assume any specific value or subrange within the stated ranges in different embodiments of the invention, to the tenth of the unit of the lower limit of the range, unless the context clearly dictates otherwise.

[1249] In addition, it is to be understood that any particular embodiment of the present invention that falls within the prior art may be explicitly excluded from any one or more of the claims. Since such embodiments are deemed to be known to one of ordinary skill in the art, they may be excluded even if the exclusion is not set forth explicitly herein. Any particular embodiment of the compositions of the invention (e.g., any nucleic acid or protein encoded thereby; any method of production; any method of use; etc.) can be excluded from any one or more claims, for any reason, whether or not related to the existence of prior art.

[1250] All cited sources, for example, references, publications, databases, database entries, and art cited herein, are incorporated into this application by reference, even if not expressly stated in the citation. In case of conflicting statements of a cited source and the instant application, the statement in the instant application shall control.

[1251] Section and table headings are not intended to be limiting.

### EXAMPLES

### Example 1. Modified mRNA Production

[1252] Modified mRNAs (mmRNA) according to the invention may be made using standard laboratory methods and materials. The open reading frame (ORF) of the gene of interest may be flanked by a 5′ untranslated region (UTR) which may contain a strong Kozak translational initiation signal and/or an alpha-globin 3′ UTR which may include an oligo(dT) sequence for templated addition of a poly-A tail. The modified mRNAs may be modified to reduce the cellular innate immune response. The modifications to reduce the cellular response may include pseudouridine (ψ) and 5-methyl-cytidine (5meC, 5 mc or m⁵C). (See, Kariko K et a1. Immunity 23:165-75 (2005), Kariko K et a1. Mol Ther 16:1833-40 (2008), Anderson B R et a1. NAR (2010); each of which are herein incorporated by reference in their entireties).

[1253] The ORF may also include various upstream or downstream additions (such as, but not limited to, β-globin, tags, etc.) may be ordered from an optimization service such as, but limited to, DNA2.0 (Menlo Park, CA) and may contain multiple cloning sites which may have XbaI recognition. Upon receipt of the construct, it may be reconstituted and transformed into chemically competent E. coli.

[1254] For the present invention, NEB DH5-alpha Competent E. coli are used. Transformations are performed according to NEB instructions using 100 ng of plasmid. The protocol is as follows:
[1255] 1 Thaw a tube of NEB 5-alpha Competent E. coli cells on ice for 10 minutes.
[1256] 2 Add 1-5 μl containing 1 pg-100 ng of plasmid DNA to the cell mixture. Carefully flick the tube 4-5 times to mix cells and DNA. Do not vortex.
[1257] 3 Place the mixture on ice for 30 minutes. Do not mix.
[1258] 4 Heat shock at 42° C. for exactly 30 seconds. Do not mix.
[1259] 5 Place on ice for 5 minutes. Do not mix.
[1260] 6 Pipette 950 μl of room temperature SOC into the mixture.
[1261] 7 Place at 37° C. for 60 minutes. Shake vigorously (250 rpm) or rotate.
[1262] 8 Warm selection plates to 37° C.
[1263] 9 Mix the cells thoroughly by flicking the tube and inverting.

[1264] Spread 50-100 μl of each dilution onto a selection plate and incubate overnight at 37° C. Alternatively, incubate at 30° C. for 24-36 hours or 25° C. for 48 hours.

[1265] A single colony is then used to inoculate 5 ml of LB growth media using the appropriate antibiotic and then allowed to grow (250 RPM, 37° C.) for 5 hours. This is then used to inoculate a 200 ml culture medium and allowed to grow overnight under the same conditions.

[1266] To isolate the plasmid (up to 850 μg), a maxi prep is performed using the Invitrogen PURELINK™ HiPure Maxiprep Kit (Carlsbad, CA), following the manufacturer's instructions.

[1267] In order to generate cDNA for In Vitro Transcription (IVT), the plasmid (an Example of which is shown in FIG. 3) is first linearized using a restriction enzyme such as XbaI. A typical restriction digest with XbaI will comprise the following: Plasmid 1.0 μg; 10× Buffer 1.0 μl; XbaI 1.5 μl; dH₂0 up to 10 μl; incubated at 37° C. for 1 hr. If performing at lab scale (<5 μg), the reaction is cleaned up using Invitrogen's PURELINK™ PCR Micro Kit (Carlsbad, CA) per manufacturer's instructions. Larger scale purifications may need to be done with a product that has a larger load capacity such as Invitrogen's standard PURELINK™ PCR Kit (Carlsbad, CA). Following the cleanup, the linearized vector is quantified using the NanoDrop and analyzed to confirm linearization using agarose gel electrophoresis.

[1268] The methods described herein to make modified mRNA may be used to produce molecules of all sizes including long molecules. Modified mRNA using the described methods has been made for different sized molecules including glucosidase, alpha; acid (GAA) (3.2 kb), cystic fibrosis transmembrane conductance regulator (CFTR) (4.7 kb), Factor VII (7.3 kb), lysosomal acid lipase (45.4 kDa), glucocerebrosidase (59.7 kDa) and iduronate 2-sulfatase (76 kDa).

[1269] As a non-limiting example, G-CSF may represent the polypeptide of interest. Sequences used in the steps outlined in Examples 1-5 are shown in Table 11. It should be noted that the start codon (ATG) has been underlined in each sequence of Table 11.

TABLE 11
G-CSF Sequences

| SEQ ID NO | Description |
|---|---|
| 21435 | cDNA sequence: |
| | ATGGCTGGACCTGCCACCCAGAGCCCCATGAAGCTGATGGCCCTGCAG |
| | CTGCTGCTGTGGCACAGTGCACTCTGGACAGTGCAGGAAGCCACCCCC |
| | CTGGGCCCTGCCAGCTCCCTGCCCCAGAGCTTCCTGCTCAAGTGCTTA |
| | GAGCAAGTGAGGAAGATCCAGGGCGATGGCGCAGCGCTCCAGGAGAA |
| | GCTGTGTGCCACCTACAAGCTGTGCCACCCCGAGGAGCTGGTGCTGCT |
| | CGGACACTCTCTGGGCATCCCCTGGGCTCCCCTGAGCAGCTGCCCCAG |
| | CCAGGCCCTGCAGCTGGCAGGCTGCTTGAGCCAACTCCATAGCGGCCT |
| | TTTCCTCTACCAGGGGCTCCTGCAGGCCCTGGAAGGGATCTCCCCCGA |
| | GTTGGGTCCCACCTTGGACACACTGCAGCTGGACGTCGCCGACTTTGC |
| | CACCACCATCTGGCAGCAGATGGAAGAACTGGGAATGGCCCCTGCCC |
| | TGCAGCCCACCCAGGGTGCCATGCCGGCCTTCGCCTCTGCTTTCCAGC |
| | GCCGGGCAGGAGGGGTCCTGGTTGCCTCCCATCTGCAGAGCTTCCTGG |
| | AGGTGTCGTACCGCGTTCTACGCCACCTTGCCCAGCCCTGA |
| 21436 | cDNA having T7 polymerase site, AfeI and Xba |
| | restriction site: |
| | TAATACGACTCACTATA |
| | GGGAAATAAGAGAGAAAAGAAGAGTAAGAAGAAATATAAGAGCCACC |
| | ATGGCTGGACCTGCCACCCAGAGCCCCATGAAGCTGATGGCCCTGCAG |
| | CTGCTGCTGTGGCACAGTGCACTCTGGACAGTGCAGGAAGCCACCCCC |
| | CTGGGCCCTGCCAGCTCCCTGCCCCAGAGCTTCCTGCTCAAGTGCTTA |
| | GAGCAAGTGAGGAAGATCCAGGGCGATGGCGCAGCGCTCCAGGAGAA |
| | GCTGTGTGCCACCTACAAGCTGTGCCACCCCGAGGAGCTGGTGCTGCT |
| | CGGACACTCTCTGGGCATCCCCTGGGCTCCCCTGAGCAGCTGCCCCAG |
| | CCAGGCCCTGCAGCTGGCAGGCTGCTTGAGCCAACTCCATAGCGGCCT |
| | TTTCCTCTACCAGGGGCTCCTGCAGGCCCTGGAAGGGATCTCCCCCGA |
| | GTTGGGTCCCACCTTGGACACACTGCAGCTGGACGTCGCCGACTTTGC |
| | CACCACCATCTGGCAGCAGATGGAAGAACTGGGAATGGCCCCTGCCC |
| | TGCAGCCCACCCAGGGTGCCATGCCGGCCTTCGCCTCTGCTTTCCAGC |
| | GCCGGGCAGGAGGGGTCCTGGTTGCCTCCCATCTGCAGAGCTTCCTGG |
| | AGGTGTCGTACCGCGTTCTACGCCACCTTGCCCAGCCCTGA |
| | AGCGCTGCCTTCTGCGGGGCTTGCCTTCTGGCCATGCCCTTCTTCTCTC |
| | CCTTGCACCTGTACCTCTTGGTCTTTGAATAAAGCCTGAGTAGGAAGG |
| | CGGCCGCTCGAGCATGCATCTAGA |
| 21437 | Optimized sequence; containing T7 polymerase site, |
| | AfeI and Xba restriction site |
| | TAATACGACTCACTATA |
| | GGGAAATAAGAGAGAAAAGAAGAGTAAGAAGAAATATAAGAGCCACC |
| | ATGGCCGGTCCCGCGACCCAAAGCCCCATGAAACTTATGGCCCTGCAG |
| | TTGCTGCTTTGGCACTCGGCCCTCTGGACAGTCCAAGAAGCGACTCCT |
| | CTCGGACCTGCCTCATCGTTGCCGCAGTCATTCCTTTTGAAGTGTCTGG |
| | AGCAGGTGCGAAAGATTCAGGGCGATGGAGCCGCACTCCAAGAGAAG |
| | CTCTGCGCGACATACAAACTTTGCCATCCCGAGGAGCTCGTACTGCTC |
| | GGGCACAGCTTGGGGATTCCCTGGGCTCCTCTCTCGTCCTGTCCGTCGC |
| | AGGCTTTGCAGTTGGCAGGGTGCCTTTCCCAGCTCCACTCCGGTTTGTT |
| | CTTGTATCAGGGACTGCTGCAAGCCCTTGAGGGAATCTCGCCAGAATT |
| | GGGCCCGACGCTGGACACGTTGCAGCTCGACGTGGCGGATTTCGCAAC |
| | AACCATCTGGCAGCAGATGGAGGAACTGGGGATGGCACCCGCGCTGC |
| | AGCCCACGCAGGGGGCAATGCCGGCCTTTGCGTCCGCGTTTCAGCGCA |
| | GGGCGGGTGGAGTCCTCGTAGCGAGCCACCTTCAATCATTTTTGGAAG |
| | TCTCGTACCGGGTGCTGAGACATCTTGCGCAGCCGTGA |
| | AGCGCTGCCTTCTGCGGGGCTTGCCTTCTGGCCATGCCCTTCTTCTCTC |
| | CCTTGCACCTGTACCTCTTGGTCTTTGAATAAAGCCTGAGTAGGAAGG |
| | CGGCCGCTCGAGCATGCATCTAGA |
| 21438 | mRNA sequence (transcribed) |
| | GGGAAAUAAGAGAGAAAAGAAGAGUAAGAAGAAAUAUAAGAGCCACC |
| | AUGGCCGGUCCCGCGACCCAAAGCCCCAUGAAACUUAUGGCCCUGCA |
| | GUUGCUGCUUUGGCACUCGGCCCUCUGGACAGUCCAAGAAGCGACU |
| | CCUCUCGGACCUGCCUCAUCGUUGCCGCAGUCAUUCCUUUUGAAGU |
| | GUCUGGAGCAGGUGCGAAAGAUUCAGGGCGAUGGAGCCGCACUCCA |
| | AGAGAAGCUCUGCGCGACAUACAAACUUUGCCAUCCCGAGGAGCUC |
| | GUACUGCUCGGGCACAGCUUGGGGAUUCCCUGGGCUCCUCUCUCGU |
| | CCUGUCCGUCGCAGGCUUUGCAGUUGGCAGGGUGCCUUUCCCAGCU |
| | CCACUCCGGUUUGUUCUUGUAUCAGGGACUGCUGCAAGCCCUUGAG |
| | GGAAUCUCGCCAGAAUUGGGCCCGACGCUGGACACGUUGCAGCUCG |
| | ACGUGGCGGAUUUCGCAACAACCAUCUGGCAGCAGAUGGAGGAACU |
| | GGGGAUGGCACCCGCGCUGCAGCCCACGCAGGGGGCAAUGCCGGCC |
| | UUUGCGUCCGCGUUUCAGCGCAGGGCGGGUGGAGUCCUCGUAGCGA |
| | GCCACCUUCAAUCAUUUUUGGAAGUCUCGUACCGGGUGCUGAGACA |
| | UCUUGCGCAGCCGUGA |
| | AGCGCUGCCUUCUGCGGGGCUUGCCUUCUGGCCAUGCCCUUCUUCUC |
| | UCCCUUGCACCUGUACCUCUUGGUCUUUGAAUAAAGCCUGAGUAGG |
| | AAG |

### Example 2: PCR for cDNA Production

[1270] PCR procedures for the preparation of cDNA are performed using 2× KAPA HIFI™ HotStart ReadyMix by Kapa Biosystems (Woburm, MA). This system includes 2× KAPA ReadyMix12.5 μl; Forward Primer (10 uM) 0.75 μl; Reverse Primer (10 uM) 0.75 μl; Template cDNA 100 ng; and dH₂O diluted to 25.0 μl. The reaction conditions are at 95° C. for 5 min. and 25 cycles of 98′ C for 20 sec, then 58° C. for 15 sec, then 72° C. for 45 sec, then 72° C. for 5 min. then 4° C. to termination.

[1271] The reverse primer of the instant invention incorporates a poly-T₁₂₀ for a poly-A₁₂₀ in the mRNA. Other reverse primers with longer or shorter poly(T) tracts can be used to adjust the length of the poly(A) tail in the mRNA.

[1272] The reaction is cleaned up using Invitrogen's PURELINK™ PCR Micro Kit (Carlsbad, CA) per manufacturer's instructions (up to 5 μg). Larger reactions will require a cleanup using a product with a larger capacity. Following the cleanup, the cDNA is quantified using the NANODROP™ and analyzed by agarose gel electrophoresis to confirm the cDNA is the expected size. The cDNA is then submitted for sequencing analysis before proceeding to the in vitro transcription reaction.

### Example 3. In Vitro Transcription (IVT)

[1273] The in vitro transcription reaction generates mRNA containing modified nucleotides or modified RNA. The input nucleotide triphosphate (NTP) mix is made in-house using natural and un-natural NTPs.

[1274] A typical in vitro transcription reaction includes the following:

| | | | |
|---|---|---|---|
| 1 | Template cDNA | 1.0 | μg |
| 2 | 10x transcription buffer (400 mM Tris- | 2.0 | μl |
| | HCl pH 8.0, 190 mM MgCl₂, 50 mM DTT, | | |
| | 10 mM Spermidine) | | |
| 3 | Custom NTPs (25 mM each) | 7.2 | μl |
| 4 | RNase Inhibitor | 20 | U |
| 5 | T7 RNA polymerase | 3000 | U |

| | | |
|---|---|---|
| 6 | dH₂0 | Up to 20.0 μl. and |
| 7 | Incubation at 37° C. for 3 hr-5 hrs. | |

[1275] The crude IVT mix may be stored at 4° C. overnight for cleanup the next day. 1 U of RNase-free DNase is then used to digest the original template. After 15 minutes of incubation at 37° C., the mRNA is purified using Ambion's MEGACLEAR™ Kit (Austin, TX) following the manufacturer's instructions. This kit can purify up to 500 μg of RNA. Following the cleanup, the RNA is quantified using the NanoDrop and analyzed by agarose gel electrophoresis to confirm the RNA is the proper size and that no degradation of the RNA has occurred.

### Example 4. Enzymatic Capping of mRNA

[1276] Capping of the mRNA is performed as follows where the mixture includes: IVT RNA 60 μg-180 μg and dH₂0 up to 72 μl. The mixture is incubated at 65° C. for 5 minutes to denature RNA, and then is transferred immediately to ice.

[1277] The protocol then involves the mixing of 10× Capping Buffer (0.5 M Tris-HCl (pH 8.0), 60 mM KCl, 12.5 mM MgCl₂) (10.0 μl); 20 mM GTP (5.0 μl); 20 mM S-Adenosyl Methionine (2.5 μl); RNase Inhibitor (100 U); 2′-O-Methyltransferase (400U); Vaccinia capping enzyme (Guanylyl transferase) (40 U); dH₂0 (Up to 28 μl); and incubation at 37° C. for 30 minutes for 60 μg RNA or up to 2 hours for 180 μg of RNA.

[1278] The mRNA is then purified using Ambion's MEGACLEAR™ Kit (Austin, TX) following the manufacturer's instructions. Following the cleanup, the RNA is quantified using the NANODROP™ (ThermoFisher, Waltham, MA) and analyzed by agarose gel electrophoresis to confirm the RNA is the proper size and that no degradation of the RNA has occurred. The RNA product may also be sequenced by running a reverse-transcription-PCR to generate the cDNA for sequencing.

### Example 5. PolyA Tailing Reaction

[1279] Without a poly-T in the cDNA, a poly-A tailing reaction must be performed before cleaning the final product. This is done by mixing Capped IVT RNA (100 μl); RNase Inhibitor (20 U); 10× Tailing Buffer (0.5 M Tris-HCl (pH 8.0), 2.5 M NaCl, 100 mM MgCl₂)(12.0 μl); 20 mM ATP (6.0 μl); Poly-A Polymerase (20 U); dH₂0 up to 123.5 μl and incubation at 37° C. for 30 min. If the poly-A tail is already in the transcript, then the tailing reaction may be skipped and proceed directly to cleanup with Ambion's MEGACLEAR™ kit (Austin, TX) (up to 500 μg). Poly-A Polymerase is preferably a recombinant enzyme expressed in yeast.

[1280] For studies performed and described herein, the poly-A tail is encoded in the IVT template to comprise 160 nucleotides in length. However, it should be understood that the processivity or integrity of the polyA tailing reaction may not always result in exactly 160 nucleotides. Hence polyA tails of approximately 160 nucleotides, e.g, about 150-165, 155, 156, 157, 158, 159, 160, 161, 162, 163, 164 or 165 are within the scope of the invention.

### Example 6. Natural 5′ Caps and 5′ Cap Analogues

[1281] 5′-capping of modified RNA may be completed concomitantly during the in vitro-transcription reaction using the following chemical RNA cap analogs to generate the 5′-guanosine cap structure according to manufacturer protocols: 3′-O-Me-m7G(5′)ppp(5′) G [the ARCA cap]; G(5′)ppp(5′)A; G(5′)ppp(5′)G; m7G(5′)ppp(5′)A; m7G(5′)ppp(5′)G (New England BioLabs, Ipswich, MA). 5′-capping of modified RNA may be completed post-transcriptionally using a Vaccinia Virus Capping Enzyme to generate the “Cap 0” structure: m7G(5′)ppp(5′)G (New England BioLabs, Ipswich, MA). Cap 1 structure may be generated using both Vaccinia Virus Capping Enzyme and a 2′-O methyl-transferase to generate: m7G(5′)ppp(5′)G-2′-O-methyl. Cap 2 structure may be generated from the Cap 1 structure followed by the 2′-O-methylation of the 5′-antepenultimate nucleotide using a 2′-O methyl-transferase. Cap 3 structure may be generated from the Cap 2 structure followed by the 2′-O-methylation of the 5′-preantepenultimate nucleotide using a 2′-O methyl-transferase. Enzymes are preferably derived from a recombinant source.

[1282] When transfected into mammalian cells, the modified mRNAs have a stability of between 12-18 hours or more than 18 hours, e.g., 24, 36, 48, 60, 72 or greater than 72 hours.

### Example 7. Capping

### A. Protein Expression Assay

[1283] Synthetic mRNAs encoding human G-CSF (cDNA shown in SEQ ID NO: 21435; mRNA sequence fully modified with 5-methylcytosine at each cytosine and pseudouridine replacement at each uridine site shown in SEQ ID NO: 21438 with a polyA tail approximately 160 nucletodies in length not shown in sequence) containing the ARCA (3′ O-Me-m7G(5′)ppp(5′)G) cap analog or the Cap1 structure can be transfected into human primary keratinocytes at equal concentrations. 6, 12, 24 and 36 hours post-transfection the amount of G-CSF secreted into the culture medium can be assayed by ELISA. Synthetic mRNAs that secrete higher levels of G-CSF into the medium would correspond to a synthetic mRNA with a higher translationally-competent Cap structure.

### B. Purity Analysis Synthesis

[1284] Synthetic mRNAs encoding human G-CSF (cDNA shown in SEQ ID NO: 21435; mRNA sequence fully modified with 5-methylcytosine at each cytosine and pseudouridine replacement at each uridine site shown in SEQ ID NO: 21438 with a polyA tail approximately 160 nucletodies in length not shown in sequence) containing the ARCA cap analog or the Cap1 structure crude synthesis products can be compared for purity using denaturing Agarose-Urea gel electrophoresis or IPLC analysis. Synthetic mRNAs with a single, consolidated band by electrophoresis correspond to the higher purity product compared to a synthetic mRNA with multiple bands or streaking bands. Synthetic mRNAs with a single IPLC peak would also correspond to a higher purity product. The capping reaction with a higher efficiency would provide a more pure mRNA population.

### C. Cytokine Analysis

[1285] Synthetic mRNAs encoding human G-CSF (cDNA shown in SEQ ID NO: 21435; mRNA sequence fully modified with 5-methylcytosine at each cytosine and pseudouridine replacement at each uridine site shown in SEQ ID NO: 21438 with a polyA tail approximately 160 nucletodies in length not shown in sequence) containing the ARCA cap analog or the Cap1 structure can be transfected into human primary keratinocytes at multiple concentrations. 6, 12, 24 and 36 hours post-transfection the amount of pro-inflammatory cytokines such as TNF-alpha and IFN-beta secreted into the culture medium can be assayed by ELISA. Synthetic mRNAs that secrete higher levels of pro-inflammatory cytokines into the medium would correspond to a synthetic mRNA containing an immune-activating cap structure.

### D. Capping Reaction Efficiency

[1286] Synthetic mRNAs encoding human G-CSF (cDNA shown in SEQ ID NO: 21435; mRNA sequence fully modified with 5-methylcytosine at each cytosine and pseudouridine replacement at each uridine site shown in SEQ ID NO: 21438 with a polyA tail approximately 160 nucletodies in length not shown in sequence) containing the ARCA cap analog or the Cap1 structure can be analyzed for capping reaction efficiency by LC-MS after capped mRNA nuclease treatment. Nuclease treatment of capped mRNAs would yield a mixture of free nucleotides and the capped 5′-5-triphosphate cap structure detectable by LC-MS. The amount of capped product on the LC-MS spectra can be expressed as a percent of total mRNA from the reaction and would correspond to capping reaction efficiency. The cap structure with higher capping reaction efficiency would have a higher amount of capped product by LC-MS.

### Example 8. Agarose Gel Electrophoresis of Modified RNA or RT PCR Products

[1287] Individual modified RNAs (200-400 ng in a 20 μl volume) or reverse transcribed PCR products (200-400 ng) are loaded into a well on a non-denaturing 1.2% Agarose E-Gel (Invitrogen, Carlsbad, CA) and run for 12-15 minutes according to the manufacturer protocol.

### Example 9. Nanodrop Modified RNA Quantification and UV Spectral Data

[1288] Modified RNAs in TE buffer (1 μl) are used for Nanodrop UV absorbance readings to quantitate the yield of each modified RNA from an in vitro transcription reaction.

### Example 10. Formulation of Modified mRNA Using Lipidoids

[1289] Modified mRNAs (mmRNA) are formulated for in vitro experiments by mixing the mmRNA with the lipidoid at a set ratio prior to addition to cells. In vivo formulation may require the addition of extra ingredients to facilitate circulation throughout the body. To test the ability of these lipidoids to form particles suitable for in vivo work, a standard formulation process used for siRNA-lipidoid formulations was used as a starting point. Initial mmRNA-lipidoid formulations may consist of particles composed of 42% lipidoid, 48% cholesterol and 10% PEG, with further optimization of ratios possible. After formation of the particle, mmRNA is added and allowed to integrate with the complex. The encapsulation efficiency is determined using a standard dye exclusion assays.

### Materials and Methods for Examples 11-15

### A. Lipid Synthesis

[1290] Six lipids, DLin-DMA, DLin-K-DMA, DLin-KC2-DMA, 98N12-5, C12-200 and DLin-MC3-DMA, were synthesized by methods outlined in the art in order to be formulated with modified RNA. DLin-DMA and precursors were synthesized as described in Heyes et. al, J. Control Release, 2005, 107, 276-287. DLin-K-DMA and DLin-KC2-DMA and precursors were synthesized as described in Semple et. al, Nature Biotechnology, 2010, 28, 172-176. 98N12-5 and precursor were synthesized as described in Akinc et. al, Nature Biotechnology, 2008, 26, 561-569.

[1291] C12-200 and precursors were synthesized according to the method outlined in Love et. al, PNAS, 2010, 107, 1864-1869. 2-epoxydodecane (5.10 g, 27.7 mmol, 8.2 eq) was added to a vial containing Amine 200 (0.723 g, 3.36 mmol, 1 eq) and a stirring bar. The vial was sealed and warmed to 80° C. The reaction was stirred for 4 days at 80° C. Then the mixture was purified by silica gel chromatography using a gradient from pure dichloromethane (DCM) to DCM:MeOH 98:2. The target compound was further purified by RP-HPLC to afford the desired compound.

[1292] DLin-MC3-DMA and precursors were synthesized according to procedures described in WO 2010054401 herein incorporated by reference in its entirety. A mixture of dilinoleyl methanol (1.5 g, 2.8 mmol, 1 eq), N,N-dimethylaminobutyric acid (1.5 g, 2.8 mmol, 1 eq), DIPEA (0.73 mL, 4.2 mmol, 1.5 eq) and TBTU(1.35 g, 4.2 mmol, 1.5 eq) in 10 mL of DMF was stirred for 10 h at room temperature. Then the reaction mixture was diluted in ether and washed with water. The organic layer was dried over anhydrous sodium sulfate, filtrated and concentrated under reduced pressure. The crude product was purified by silica gel chromatography using a gradient DCM to DCM:MeOH 98:2. Subsequently the target compound was subjected to an additional RP-HPLC purification which was done using a YMC—Pack C4 column to afford the target compound.

### B. Formulation of Modified RNA Nanoparticles

[1293] Solutions of synthesized lipid, 1,2-distearoyl-3-phosphatidylcholine (DSPC) (Avanti Polar Lipids, Alabaster, AL), cholesterol (Sigma-Aldrich, Taufkirchen, Germany), and α-[3′-(1,2-dimyristoyl-3-propanoxy)-carboxamide-propyl]-o-methoxy-polyoxyethylene (PEG-c-DOMG) (NOF, Bouwelven, Belgium) were prepared at concentrations of 50 mM in ethanol and stored at −20° C. The lipids were combined to yield molar ratio of 50:10:38.5:1.5 (Lipid: DSPC: Cholesterol: PEG-c-DOMG) and diluted with ethanol to a final lipid concentration of 25 mM. Solutions of modified mRNA at a concentration of 1-2 mg/mL in water were diluted in 50 mM sodium citrate buffer at a pH of 3 to form a stock modified mRNA solution. Formulations of the lipid and modified mRNA were prepared by combining the synthesized lipid solution with the modified mRNA solution at total lipid to modified mRNA weight ratio of 10:1, 15:1, 20:1 and 30:1. The lipid ethanolic solution was rapidly injected into aqueous modified mRNA solution to afford a suspension containing 33% ethanol. The solutions were injected either manually (MI) or by the aid of a syringe pump (SP) (Harvard Pump 33 Dual Syringe Pump Harvard Apparatus Holliston, MA).

[1294] To remove the ethanol and to achieve the buffer exhange, the formulations were dialyzed twice against phosphate buffered saline (PBS), pH 7.4 at volumes 200-times of the primary product using a Slide-A-Lyzer cassettes (Thermo Fisher Scientific Inc. Rockford, IL) with a molecular weight cutoff (MWCO) of 10 kD. The first dialysis was carried at room temperature for 3 hours and then the formulations were dialyzed overnight at 4° C. The resulting nanoparticle suspension was filtered through 0.2 μm sterile filter (Sarstedt, Numbrecht, Germany) into glass vials and sealed with a crimp closure.

### C. Characterization of Formulations

[1295] A Zetasizer Nano ZS (Malvern Instruments Ltd, Malvern, Worcestershire, UK) was used to determine the particle size, the polydispersity index (PDI) and the zeta potential of the modified mRNA nanoparticles in 1×PBS in determining particle size and 15 mM PBS in determining zeta potential.

[1296] Ultraviolet-visible spectroscopy was used to determine the concentration of modified mRNA nanoparticle formulation. 100 μL of the diluted formulation in 1×PBS was added to 900 μL of a 4:1 (v/v) mixture of methanol and chloroform. After mixing, the absorbance spectrum of the solution was recorded between 230 nm and 330 nm on a DU 800 spectrophotometer (Beckman Coulter, Beckman Coulter, Inc., Brea, CA). The modified RNA concentration in the nanoparicle formulation was calculated based on the extinction coefficient of the modified RNA used in the formulation and on the difference between the absorbance at a wavelength of 260 nm and the baseline value at a wavelength of 330 nm.

[1297] QUANT-IT™ RIBOGREEN® RNA assay (Invitrogen Corporation Carlsbad, CA) was used to evaluate the encapsulation of modified RNA by the nanoparticle. The samples were diluted to a concentration of approximately 5 μg/mL in TE buffer (10 mM Tris-HCl, 1 mM EDTA, pH 7.5). 50 μL of the diluted samples were transferred to a polystyrene 96 well plate, then either 50 μL of TE buffer or 50 μL of a 2% Triton X-100 solution was added. The plate was incubated at a temperature of 37° C. for 15 minutes. The RIBOGREEN® reagent was diluted 1:100 in TE buffer, 100 μL of this solution was added to each well. The fluorescence intensity was measured using a fluorescence plate reader (Wallac Victor 1420 Multilablel Counter; Perkin Elmer, Waltham, MA) at an excitation wavelength of −480 nm and an emission wavelength of −520 nm. The fluorescence values of the reagent blank were subtracted from that of each of the samples and the percentage of free modified RNA was determined by dividing the fluorescence intensity of the intact sample (without addition of Triton X-100) by the fluorescence value of the disrupted sample (caused by the addition of Triton X-100).

### D. In Vitro Incubation

[1298] Human embryonic kidney epithelial (HEK293) and hepatocellular carcinoma epithelial (HepG2) cells (LGC standards GmbH, Wesel, Germany) were seeded on 96-well plates (Greiner Bio-one GmbH, Frickenhausen, Germany) and plates for HEK293 cells were precoated with collagen type1. HEK293 were seeded at a density of 30,000 and HepG2 were seeded at a density of 35,000 cells per well in 100 μl cell culture medium. For HEK293 the cell culture medium was DMEM, 10% FCS, adding 2 mM L-Glutamine, 1 mM Sodiumpyruvate and 1× non-essential amino acids (Biochrom AG, Berlin, Germany) and 1.2 mg/ml Sodiumbicarbonate (Sigma-Aldrich, Munich, Germany) and for HepG2 the culture medium was MEM (Gibco Life Technologies, Darmstadt, Germany), 10% FCS adding 2 mM L-Glutamine, 1 mM Sodiumpyruvate and 1× non-essential amino acids (Biochrom AG, Berlin, Germany. Formulations containing mCherry mRNA (mRNA sequence shown in SEQ ID NO: 21439; polyA tail of approximately 160 nucleotides not shown in sequence; 5′cap, Cap1) were added in quadruplicates directly after seeding the cells and incubated. The mCherry cDNA with the T7 promoter, 5′untranslated region (UTR) and 3′ UTR used in in vitro transcription (IVT) is given in SEQ ID NO: 21440. The mCherry mRNA was modified with a 5meC at each cytosine and pseudouridine replacement at each uridine site.

[1299] Cells were harvested by transferring the culture media supernatants to a 96-well Pro-Bind U-bottom plate (Beckton Dickinson GmbH, Heidelberg, Germany). Cells were trypsinized with ½ volume Trypsin/EDTA (Biochrom AG, Berlin, Germany), pooled with respective supernatants and fixed by adding one volume PBS/2% FCS (both Biochrom AG, Berlin, Germany)/0.5% formaldehyde (Merck, Darmstadt, Germany). Samples then were submitted to a flow cytometer measurement with a 532 nm excitation laser and the 610/20 filter for PE-Texas Red in a LSRII cytometer (Beckton Dickinson GmbH, Heidelberg, Germany). The mean fluorescence intensity (MFI) of all events and the standard deviation of four independent wells are presented in for samples analyzed.

### Example 11. Purification of Nanoparticle Formulations

[1300] Nanoparticle formulations of DLin-KC2-DMA and 98N12-5 in HEK293 and HepG2 were tested to determine if the mean fluorescent intensity (MFI) was dependent on the lipid to modified RNA ratio and/or purification. Three formulations of DLin-KC2-DMA and two formulations of 98N12-5 were produced using a syringe pump to the specifications described in Table 12. Purified samples were purified by SEPHADEX™ G-25 DNA grade (GE Healthcare, Sweden). Each formulation before and after purification (aP) was tested at concentration of 250 ng modified RNA per well in a 24 well plate. The percentage of cells that are positive for the marker for FL4 channel (% FL4-positive) when analyzed by the flow cytometer for each formulation and the background sample, and the MFI of the marker for the FL4 channel for each formulation and the background sample are shown in Table 13. The formulations which had been purified had a slightly higher MFI than those formulations tested before purification.

TABLE 12
Formulations

| | | Lipid/RNA | |
|---|---|---|---|
| Formulation # | Lipid | wt/wt | Mean size (nm) |
| NPA-001-1 | DLin-KC2-DMA | 10 | 155 nm |
| | | | PDI: 0.08 |
| NPA-001-1 aP | DLin-KC2-DMA | 10 | 141 nm |
| | | | PDI: 0.14 |
| NPA-002-1 | DLin-KC2-DMA | 15 | 140 nm |
| | | | PDI: 0.11 |
| NPA-002-1 aP | DLin-KC2-DMA | 15 | 125 nm |
| | | | PDI: 0.12 |
| NPA-003-1 | DLin-KC2-DMA | 20 | 114 nm |
| | | | PDI: 0.08 |
| NPA-003-1 aP | DLin-KC2-DMA | 20 | 104 nm |
| | | | PDI: 0.06 |
| NPA-005-1 | 98N12-5 | 15 | 127 nm |
| | | | PDI: 0.12 |
| NPA-005-1 aP | 98N12-5 | 15 | 134 nm |
| | | | PDI: 0.17 |
| NPA-006-1 | 98N12 | 20 | 126 nm |
| | | | PDI: 0.08 |
| NPA-006-1 aP | 98N12 | 20 | 118 nm |
| | | | PDI: 0.13 |

TABLE 13
HEK293 and HepG2, 24-well, 250 ng Modified RNA/well

| | |
|---|---|
| % FL4-positive | FL4 MFI |

| Formulation | HEK293 | HepG2 | HEK293 | HepG2 |
|---|---|---|---|---|
| Untreated | 0.33 | 0.40 | 0.25 | 0.30 |
| NPA-001-1 | 62.42 | 5.68 | 1.49 | 0.41 |
| NPA-001-ap | 87.32 | 9.02 | 3.23 | 0.53 |
| NPA-002-1 | 91.28 | 9.90 | 4.43 | 0.59 |
| NPA-002-ap | 92.68 | 14.02 | 5.07 | 0.90 |
| NPA-003-1 | 87.70 | 11.76 | 6.83 | 0.88 |
| NPA-003-ap | 88.88 | 15.46 | 8.73 | 1.06 |
| NPA-005-1 | 50.60 | 4.75 | 1.83 | 0.46 |
| NPA-005-ap | 38.64 | 5.16 | 1.32 | 0.46 |
| NPA-006-1 | 54.19 | 13.16 | 1.30 | 0.60 |
| NPA-006-ap | 49.97 | 13.74 | 1.27 | 0.61 |

### Example 12. Concentration Response Curve

[1301] Nanoparticle formulations of 98N12-5 (NPA-005) and DLin-KC2-DMA (NPA-003) were tested at varying concentrations to determine the MFI of FL4 or mCherry (mRNA sequence shown in SEQ ID NO: 21439; polyA tail of approximately 160 nucleotides not shown in sequence; 5′cap, Cap1; fully modified with 5-methylcytosine and pseudouridine) over a range of doses. The formulations tested are outlined in Table 14. To determine the optimal concentration of nanoparticle formulations of 98N12-5, varying concentrations of formulated modified RNA (100 ng, 10 ng, 1.0 ng, 0.1 ng and 0.01 ng per well) were tested in a 24-well plate of HEK293, and the results of the FL4 MFI of each dose are shown in Table 15. Likewise, to determine the optimal concentration of nanoparticle formulations of DLin-KC2-DMA, varying concentrations of formulated modified RNA (250 ng 100 ng, 10 ng, 1.0 ng, 0.1 ng and 0.01 ng per well) were tested in a 24-well plate of HEK293, and the results of the FL4 MFI of each dose are shown in Table 16. Nanoparticle formulations of DLin-KC2-DMA were also tested at varying concentrations of formulated modified RNA (250 ng, 100 ng and 30 ng per well) in a 24 well plate of HEK293, and the results of the FL4 MFI of each dose are shown in Table 17. A dose of 1 ng/well for 98N12-5 and a dose of 10 ng/well for DLin-KC2-DMA were found to resemble the FL4 MFI of the background.

[1302] To determine how close the concentrations resembled the background, we utilized a flow cytometer with optimized filter sets for detection of mCherry expression, and were able to obtain results with increased sensitivity relative to background levels. Doses of 25 ng/well, 0.25 ng/well, 0.025 ng/well and 0.0025 ng/well were analyzed for 98N12-5 (NPA-005) and DLin-KC2-DMA (NPA-003) to determine the MFI of mCherry. As shown in Table 18, the concentration of 0.025 ng/well and lesser concentrations are similar to the background MFI level of mCherry which is about 386.125.

TABLE 14
Formulations

| Formulation # | NPA-003 | NPA-005 |
|---|---|---|
| Lipid | DLin-KC2-DMA | 98N12-5 |
| Lipid/RNA | 20 | 15 |
| wt/wt | | |
| Mean size | 114 nm | 106 nm |
| | PDI: 0.08 | PDI: 0.12 |

TABLE 15
HEK293, NPA-005, 24-well, n = 4

| Formulation | FL4 MFI |
|---|---|
| Untreated control | 0.246 |
| NPA-005 100 ng | 2.2175 |
| NPA-005 10 ng | 0.651 |
| NPA-005 1.0 ng | 0.28425 |
| NPA-005 0.1 ng | 0.27675 |
| NPA-005 0.01 ng | 0.2865 |

TABLE 16
HEK293, NPA-003, 24-well, n = 4

| Formulation | FL4 MFI |
|---|---|
| Untreated control | 0.3225 |
| NPA-003 250 ng | 2.9575 |
| NPA-003 100 ng | 1.255 |
| NPA-003 10 ng | 0.40025 |
| NPA-003 1 ng | 0.33025 |
| NPA-003 0.1 ng | 0.34625 |
| NPA-003 0.01 ng | 0.3475 |

TABLE 17
HEK293, NPA-003, 24-well, n = 4

| Formulation | FL4 MFI |
|---|---|
| Untreated control | 0.27425 |
| NPA-003 250 ng | 5.6075 |
| NPA-003 100 ng | 3.7825 |
| NPA-003 30 ng | 1.5525 |

TABLE 18
Concentration and MFI

MFI mCherry

| Formulation | NPA-003 | NPA-005 |
|---|---|---|
| 25 ng/well | 11963.25 | 12256.75 |
| 0.25 ng/well | 1349.75 | 2572.75 |
| 0.025 ng/well | 459.50 | 534.75 |
| 0.0025 ng/well | 310.75 | 471.75 |

### Example 13. Manual Injection and Syringe Pump Formulations

[1303] Two formulations of DLin-KC2-DMA and 98N12-5 were prepared by manual injection (MI) and syringe pump injection (SP) and analyzed along with a background sample to compare the MFI of mCherry (mRNA sequence shown in SEQ ID NO: 21439; polyA tail of approximately 160 nucleotides not shown in sequence; 5′cap, Cap1; fully modified with 5-methylcytosine and pseudouridine) of the different formulations. Table 19 shows that the syringe pump formulations had a higher MFI as compared to the manual injection formulations of the same lipid and lipid/RNA ratio.

TABLE 19
Formulations and MFI

| | | Lipid/ | | Method of | |
|---|---|---|---|---|---|
| Formulation | | RNA | Mean size | for- | |
| # | Lipid | wt/wt | (nm) | mulation | MFI |
| Untreated | N/A | N/A | N/A | N/A | 674.67 |
| Control | | | | | |
| NPA-002 | DLin-KC2- | 15 | 140 nm | MI | 10318.25 |
| | DMA | | PDI: 0.11 | | |
| NPA-002-2 | DLin-KC2- | 15 | 105 nm | SP | 37054.75 |
| | DMA | | PDI: 0.04 | | |
| NPA-003 | DLin-KC2- | 20 | 114 nm | MI | 22037.5 |
| | DMA | | PDI: 0.08 | | |
| NPA-003-2 | DLin-KC2- | 20 | 95 nm | SP | 37868.75 |
| | DMA | | PDI: 0.02 | | |
| NPA-005 | 98N12-5 | 15 | 127 nm | MI | 11504.75 |
| | | | PDI: 0.12 | | |
| NPA-005-2 | 98N12-5 | 15 | 106 nm | SP | 9343.75 |
| | | | PDI: 0.07 | | |
| NPA-006 | 98N12-5 | 20 | 126 nm | MI | 11182.25 |
| | | | PDI: 0.08 | | |
| NPA-006-2 | 98N12-5 | 20 | 93 nm | SP | 5167 |
| | | | PDI: 0.08 | | |

### Example 14. Lipid Nanoparticle Formulations

[1304] Formulations of DLin-DMA, DLin-K-DMA, DLin-KC2-DMA, 98N12-5, C12-200 and DLin-MC3-DMA were incubated at a concentration of 60 ng/well or 62.5 ng/well in a plate of HEK293 and 62.5 ng/well in a plate of HepG2 cells for 24 hours to determine the MFI of mCherry (SEQ ID NO: 21439; polyA tail of approximately 160 nucleotides not shown in sequence; 5′cap, Cap1; fully modified with 5-methylcytosine and pseudouridine) for each formulation. The formulations tested are outlined in Table 20 below. As shown in Table 21 for the 60 ng/well and Tables 22, 23, 24 and 25 for the 62.5 ng/well, the formulation of NPA-003 and NPA-018 have the highest mCherry MFI and the formulations of NPA-008, NPA-010 and NPA-013 are most the similar to the background sample mCherry MFI value.

TABLE 20
Formulations

| Formulation # | Lipid | Lipid/RNA wt/wt | Mean size (nm) |
|---|---|---|---|
| NPA-001 | DLin-KC2-DMA | 10 | 155 nm |
| | | | PDI: 0.08 |
| NPA-002 | DLin-KC2-DMA | 15 | 140 nm |
| | | | PDI: 0.11 |
| NPA-002-2 | DLin-KC2-DMA | 15 | 105 nm |
| | | | PDI: 0.04 |
| NPA-003 | DLin-KC2-DMA | 20 | 114 nm |
| | | | PDI: 0.08 |
| NPA-003-2 | DLin-KC2-DMA | 20 | 95 nm |
| | | | PDI: 0.02 |
| NPA-005 | 98N12-5 | 15 | 127 nm |
| | | | PDI: 0.12 |
| NPA-006 | 98N12-5 | 20 | 126 nm |
| | | | PDI: 0.08 |
| NPA-007 | DLin-DMA | 15 | 148 nm |
| | | | PDI: 0.09 |
| NPA-008 | DLin-K-DMA | 15 | 121 nm |
| | | | PDI: 0.08 |
| NPA-009 | C12-200 | 15 | 138 nm |
| | | | PDI: 0.15 |
| NPA-010 | DLin-MC3-DMA | 15 | 126 nm |
| | | | PDI: 0.09 |
| NPA-012 | DLin-DMA | 20 | 86 nm |
| | | | PDI: 0.08 |
| NPA-013 | DLin-K-DMA | 20 | 104 nm |
| | | | PDI: 0.03 |
| NPA-014 | C12-200 | 20 | 101 nm |
| | | | PDI: 0.06 |
| NPA-015 | DLin-MC3-DMA | 20 | 109 nm |
| | | | PDI: 0.07 |

TABLE 21
HEK293, 96-well, 60 ng Modified RNA/well

| Formulation | MFI mCherry |
|---|---|
| Untreated | 871.81 |
| NPA-001 | 6407.25 |
| NPA-002 | 14995 |
| NPA-003 | 29499.5 |
| NPA-005 | 3762 |
| NPA-006 | 2676 |
| NPA-007 | 9905.5 |
| NPA-008 | 1648.75 |
| NPA-009 | 2348.25 |
| NPA-010 | 4426.75 |
| NPA-012 | 11466 |
| NPA-013 | 2098.25 |
| NPA-014 | 3194.25 |
| NPA-015 | 14524 |

TABLE 22
HEK293, 62.5 ng/well

| Formulation | MFI mCherry |
|---|---|
| Untreated | 871.81 |
| NPA-001 | 6407.25 |
| NPA-002 | 14995 |
| NPA-003 | 29499.5 |
| NPA-005 | 3762 |
| NPA-006 | 2676 |
| NPA-007 | 9905.5 |
| NPA-008 | 1648.75 |
| NPA-009 | 2348.25 |
| NPA-010 | 4426.75 |
| NPA-012 | 11466 |
| NPA-013 | 2098.25 |
| NPA-014 | 3194.25 |
| NPA-015 | 14524 |

TABLE 23
HEK293, 62.5 ng/well

| Formulation | MFI mCherry |
|---|---|
| Untreated | 295 |
| NPA-007 | 3504 |
| NPA-012 | 8286 |
| NPA-017 | 6128 |
| NPA-003-2 | 17528 |
| NPA-018 | 34142 |
| NPA-010 | 1095 |
| NPA-015 | 5859 |
| NPA-019 | 3229 |

TABLE 24
HepG2, 62.5 ng/well

| Formulation | MFI mCherry |
|---|---|
| Untreated | 649.94 |
| NPA-001 | 6006.25 |
| NPA-002 | 8705 |
| NPA-002-2 | 15860.25 |
| NPA-003 | 15059.25 |
| NPA-003-2 | 28881 |
| NPA-005 | 1676 |
| NPA-006 | 1473 |
| NPA-007 | 15678 |
| NPA-008 | 2976.25 |
| NPA-009 | 961.75 |
| NPA-010 | 3301.75 |
| NPA-012 | 18333.25 |
| NPA-013 | 5853 |
| NPA-014 | 2257 |
| NPA-015 | 16225.75 |

TABLE 25
HepG2, 62.5 ng/well

| Formulation | MFI mCherry |
|---|---|
| Untreated control | 656 |
| NPA-007 | 16798 |
| NPA-012 | 21993 |
| NPA-017 | 20377 |
| NPA-003-2 | 35651 |
| NPA-018 | 40154 |
| NPA-010 | 2496 |
| NPA-015 | 19741 |
| NPA-019 | 16373 |

### Example 15. In Vivo Formulation Studies

[1305] Rodents (n=5) are administered intravenously, subcutaneously or intramuscularly a single dose of a formulation containing a modified mRNA and a lipid. The modified mRNA administered to the rodents is selected from G-CSF (mRNA sequence shown in SEQ ID NO: 21438; polyA tail of approximately 160 nucleotides not shown in sequence; 5′cap, Cap1), erythropoietin (EPO) (mRNA sequence shown in SEQ ID NO: 1638; polyA tail of approximately 160 nucleotides not shown in sequence; 5′cap, Cap1), Factor IX (mRNA sequence shown in SEQ ID NO: 1622; polyA tail of approximately 160 nucleotides not shown in sequence; 5′cap, Cap1) or mCherry (mRNA sequence shown in SEQ ID NO: 21439; polyA tail of approximately 160 nucleotides not shown in sequence; 5′cap, Cap1). The erythropoietin cDNA with the T7 promoter, 5′untranslated region (UTR) and 3′ UTR used in in vitro transcription (IVT) is given in SEQ ID NO: 21441 and SEQ ID NO: 21442.

[1306] Each formulation also contains a lipid which is selected from one of DLin-DMA, DLin-K-DMA, DLin-KC2-DMA, 98N12-5, C12-200, DLin-MC3-DMA, reLNP, ATUPLEX®, DACC and DBTC. The rodents are injected with 100 ug, 10 ug or 1 ug of the formulated modified mRNA and samples are collected at specified time intervals.

[1307] Serum from the rodents administered formulations containing human G-CSF modified mRNA are measured by specific G-CSF ELISA and serum from mice administered human factor IX modified RNA is analyzed by specific factor IX ELISA or chromogenic assay. The liver and spleen from the mice administered with mCherry modified mRNA are analyzed by immunohistochemistry (IHC) or fluorescence-activated cell sorting (FACS). As a control, a group of mice are not injected with any formulation and their serum and tissue are collected analyzed by ELISA, FACS and/or IHC.

### A. Time Course

[1308] The rodents are administered formulations containing at least one modified mRNA to study the time course of protein expression for the administered formulation. The rodents are bled at specified time intervals prior to and after administration of the modified mRNA formulations to determine protein expression and complete blood count. Samples are also collected from the site of administration of rodents administered modified mRNA formulations subcutaneously and intramuscularly to determine the protein expression in the tissue.

### B. Dose Response

[1309] The rodents are administered formulations containing at least one modified mRNA to determine dose response of each formulation. The rodents are bled at specified time intervals prior to and after administration of the modified mRNA formulations to determine protein expression and complete blood count. The rodents are also sacrified to analyze the effect of the modified mRNA formulation on the internal tissue. Samples are also collected from the site of administration of rodents administered modified mRNA formulations subcutaneously and intramuscularly to determine the protein expression in the tissue.

### C. Toxicity

[1310] The rodents are administered formulations containing at least one modified mRNA to study toxicity of each formulation. The rodents are bled at specified time intervals prior to and after administration of the modified mRNA formulations to determine protein expression and complete blood count. The rodents are also sacrificed to analyze the effect of the modified mRNA formulation on the internal tissue. Samples are also collected from the site of administration of rodents administered modified mRNA formulations subcutaneously and intramuscularly to determine the protein expression in the tissue.

### Example 16. PLGA Microsphere Formulations

[1311] Optimization of parameters used in the formulation of PLGA microspheres may allow for tunable release rates and high encapsulation efficiencies while maintaining the integrity of the modified RNA encapsulated in the microspheres. Parameters such as, but not limited to, particle size, recovery rates and encapsulation efficiency may be optimized to achieve the optimal formulation.

### A. Synthesis of PLGA Microspheres

[1312] Polylacticglycolic acid (PLGA) microspheres were synthesized using the water/oil/water double emulsification methods known in the art using PLGA (Lactel, Cat #B6010-2, inherent viscosity 0.55-0.75, 50:50 LA:GA), polyvinylalcohol (PVA) (Sigma, Cat #348406-25G, MW 13-23 k) dichloromethane and water. Briefly, 0.1 ml of water (W1) was added to 2 ml of PLGA dissolved in dichloromethane (DCM) (O1) at concentrations ranging from 50-200 mg/ml of PLGA. The W1/O1 emulsion was homogenized (TKA Ultra-Turrax Homogenizer, T18) for 30 seconds at speed 4 (˜15,000 rpm). The W1/O1 emulsion was then added to 100 to 200 ml of 0.3 to 1% PVA (W2) and homogenized for 1 minute at varied speeds. Formulations were left to stir for 3 hours and then washed by centrifugation (20-25 min, 4,000 rpm, 4° C.). The supernatant was discarded and the PLGA pellets were resuspended in 5-10 ml of water, which was repeated 2×. Average particle size (represents 20-30 particles) for each formulation was determined by microscopy after washing. Table 26 shows that an increase in the PLGA concentration led to larger sized microspheres. A PLGA concentration of 200 mg/mL gave an average particle size of 14.8 μm, 100 mg/mL was 8.7 μm, and 50 mg/mL of PLGA gave an average particle size of 4.0 μm.

TABLE 26
Varied PLGA Concentration

| Sam- | O1 | PLGA Con- | W2 | PVA Con- | | Average |
|---|---|---|---|---|---|---|
| ple | Volume | centration | Volume | centration | | Size |
| ID | (mL) | (mg/mL) | (mL) | (%) | Speed | (μm) |
| 1 | 2 | 200 | 100 | 0.3 | 5 | 14.8 |
| 2 | 2 | 100 | 100 | 0.3 | 5 | 8.7 |
| 3 | 2 | 50 | 100 | 0.3 | 5 | 4.0 |

[1313] Table 27 shows that decreasing the homogenization speed from 5 (˜20,000 rpm) to speed 4 (˜15,000 rpm) led to an increase in particle size from 14.8 μm to 29.7 μm.

TABLE 27
Varied Homogenization Speed

| Sam- | O1 | PLGA Con- | W2 | PVA Con- | | Average |
|---|---|---|---|---|---|---|
| ple | Volume | centration | Volume | centration | | Size |
| ID | (mL) | (mg/mL) | (mL) | (%) | Speed | (μm) |
| 1 | 2 | 200 | 100 | 0.3 | 5 | 14.8 |
| 4 | 2 | 200 | 100 | 0.3 | 4 | 29.7 |

[1314] Table 28 shows that increasing the W2 volume (i.e. increasing the ratio of W2:O1 from 50:1 to 100:1), decreased average particle size slightly. Altering the PVA concentration from 0.3 to 1 wt % had little impact on PLGA microsphere size.

TABLE 28
Varied W2 Volume and Concentration

| Sam- | O1 | PLGA Con- | W2 | PVA Con- | | Average |
|---|---|---|---|---|---|---|
| ple | Volume | centration | Volume | centration | | Size |
| ID | (mL) | (mg/mL) | (mL) | (%) | Speed | (μm) |
| 1 | 2 | 200 | 100 | 0.3 | 5 | 14.8 |
| 5 | 2 | 200 | 200 | 0.3 | 5 | 11.7 |
| 6 | 2 | 200 | 190 | 0.3 | 5 | 11.4 |
| 7 | 2 | 200 | 190 | 1.0 | 5 | 12.3 |

B. Encapsulation of Modified mRNA

[1315] Modified G-CSF mRNA (mRNA sequence shown in SEQ ID NO: 21438; polyA tail of approximately 160 nucleotides not shown in sequence; 5′cap, Cap1; fully modified with 5-methylcytosine and pseudouridine) was dissolved in water at a concentration of 2 mg/ml (W3). Three batches of PLGA microsphere formulations were made as described above with the following parameters: 0.1 ml of W3 at 2 mg/ml, 1.6 ml of 01 at 200 mg/ml, 160 ml of W2 at 1%, and homogenized at a speed of 4 for the first emulsion (W3/O1) and homogenized at a speed of 5 for the second emulstion (W3/O1/W2). After washing by centrifugation, the formulations were frozen in liquid nitrogen and then lyophilized for 3 days. To test the encapsulation efficiency of the formulations, the lyophilized material was deformulated in DCM for 6 hours followed by an overnight extraction in water. The modified RNA concentration in the samples was then determined by OD260. Encapsulation efficiency was calculated by taking the actual amount of modified RNA and dividing by the starting amount of modified RNA. In the three batches tested, there was an encapsulation efficiency of 59.2, 49.8 and 61.3.

C. Integrity of Modified mRNA Encapsulated in PLGA Microspheres

[1316] Modified Factor IX mRNA (mRNA sequence shown in SEQ ID NO: 1622; polyA tail of approximately 160 nucleotides not shown in sequence; 5′cap, Cap1; fully modified with 5-methylcytosine and pseudouridine) was dissolved in water at varied concentrations (W4) to vary the weight percent loading in the formulation (mg modified RNA/mg PLGA*100) and to determine encapsulation efficiency. The parameters in Table 29 were used to make four different batches of PLGA microsphere formulations with a homogenization speed of 4 for the first emulstion (W4/O1) and a homogenization speed of 5 for the second emulsion (W4/O1/W2).

TABLE 29
Factor IX PLGA Microsphere Formulation Parameters

| | | Factor | Factor | | | | | |
|---|---|---|---|---|---|---|---|---|
| | W4 | IX | IX | O1 | PLGA | W2 | PVA | Weight % |
| | Vol. | Conc. | Amount | Vol. | Conc. | Vol. | Conc. | (wt %) |
| ID | (uL) | (mg/ml) | (ug) | (ml) | (mg/ml) | (ml) | (%) | Loading |
| A | 100 | 2.0 | 200.0 | 2.0 | 200 | 200 | 1.0 | 0.05 |
| B | 100 | 4.0 | 400.0 | 2.0 | 200 | 200 | 1.0 | 0.10 |
| C | 400 | 2.0 | 800.0 | 2.0 | 200 | 200 | 1.0 | 0.20 |
| D | 400 | 4.0 | 1600.0 | 2.0 | 200 | 200 | 1.0 | 0.40 |

[1317] After lyophilization, PLGA microspheres were weighed out in 2 ml eppendorf tubes to correspond to ˜10 ug of modified RNA. Lyophilization was found to not destroy the overall structure of the PLGA microspheres. To increase weight percent loading (wt %) for the PLGA microspheres, increasing amounts of modified RNA were added to the samples. PLGA microspheres were deformulated by adding 1.0 ml of DCM to each tube and then shaking the samples for 6 hours. For modified RNA extraction, 0.5 ml of water was added to each sample and the samples were shaken overnight before the concentration of modified RNA in the samples was determined by OD260. To determine the recovery of the extraction process, unformulated Factor IX modified RNA (mRNA sequence shown in SEQ ID NO: 1622; polyA tail of approximately 160 nucleotides not shown in sequence; 5′cap, Cap1; fully modified with 5-methylcytosine and pseudouridine) (deformulation control) was spiked into DCM and was subjected to the deformulation process. Table 30 shows the loading and encapsulation efficiency for the samples. All encapsulation efficiency samples were normalized to the deformulation control.

TABLE 30
Weight Percent Loading and Encapsulation Efficiency

| | Theoretical | Actual modified | |
|---|---|---|---|
| | modified RNA | RNA | Encapsulation |
| ID | loading (wt %) | loading (wt %) | Efficiency (%) |
| A | 0.05 | 0.06 | 97.1 |
| B | 0.10 | 0.10 | 85.7 |
| C | 0.20 | 0.18 | 77.6 |
| D | 0.40 | 0.31 | 68.1 |
| Control | — | — | 100.0 |

D. Release Study of Modified mRNA Encapsulated in PLGA Microspheres

[1318] PLGA microspheres formulated with Factor IX modified RNA (mRNA sequence shown in SEQ ID NO: 1622; polyA tail of approximately 160 nucleotides not shown in sequence; 5′cap, Cap1; fully modified with 5-methylcytosine and pseudouridine) were deformulated as described above and the integrity of the extracted modified RNA was determined by automated electrophoresis (Bio-Rad Experion). The extracted modified mRNA was compared against unformulated modified mRNA and the deformulation control in order to test the integrity of the encapsulated modified mRNA. As shown in FIG. 4, the majority of modRNA was intact for batch ID A, B, C and D, for the deformulated control (Deform control) and the unformulated control (Unform control).

E. Protein Expression of Modified mRNA Encapsulated in PLGA Microspheres

[1319] PLGA microspheres formulated with Factor IX modified RNA (mRNA sequence shown in SEQ ID NO: 1622; polyA tail of approximately 160 nucleotides not shown in sequence; 5′cap, Cap1; fully modified with 5-methylcytosine and pseudouridine) were deformulated as described above and the protein expression of the extracted modified RNA was determined by an in vitro transfection assay. HEK293 cells were reverse transfected with 250 ng of Factor IX modified RNA complexed with RNAiMAX (Invitrogen) in triplicate.

[1320] Factor IX modified RNA was diluted in nuclease-free water to a concentration of 25 ng/μl and RNAiMAX was diluted 13.3× in serum-free EMEM. Equal volumes of diluted modified RNA and diluted RNAiMAX were mixed together and were allowed to stand for 20 to 30 minutes at room temperature. Subsequently, 20 μl of the transfection mix containing 250 ng of Factor IX modified RNA was added to 80 μl of a cell suspension containing 30,000 cells. Cells were then incubated for 16 h in a humidified 37° C./5% CO2 cell culture incubator before harvesting the cell culture supernatant. Factor IX protein expression in the cell supernatant was analyzed by an ELISA kit specific for Factor IX (Molecular Innovations, Cat #HFIXKT-TOT) and the protein expression is shown in Table 31 and FIG. 5. In all PLGA microsphere batches tested, Factor IX modified RNA remained active and expressed Factor IX protein after formulation in PLGA microspheres and subsequent deformulation.

TABLE 31
Protein Expression

| | Factor IX Protein |
|---|---|
| Sample | Expression (ng/ml) |
| Batch A | 0.83 |
| Batch B | 1.83 |
| Batch C | 1.54 |
| Batch D | 2.52 |
| Deformulated Control | 4.34 |
| Unformulated Control | 3.35 |

F. Release Study of Modified mRNA Encapsulated in PLGA Microspheres

[1321] PLGA micropsheres formulated with Factor IX modified RNA (mRNA sequence shown in SEQ ID NO: 1622; polyA tail of approximately 160 nucleotides not shown in sequence; 5′cap, Cap1; fully modified with 5-methylcytosine and pseudouridine) were resuspended in water to a PLGA microsphere concentration of 24 mg/ml. After resuspension, 150 ul of the PLGA microsphere suspension was aliquoted into eppendorf tubes. Samples were kept incubating and shaking at 37° C. during the course of the study. Triplicate samples were pulled at 0.2, 1, 2, 8, 14, and 21 days. To determine the amount of modified RNA released from the PLGA microspheres, samples were centrifuged, the supernatant was removed, and the modified RNA concentration in the supernatant was determined by OD 260. The percent release, shown in Table 32, was calculated based on the total amount of modified RNA in each sample. After 31 days, 96% of the Factor IX modified RNA was released from the PLGA microsphere formulations.

TABLE 32
Percent Release

| Time (days) | % Release |
|---|---|
| 0 | 0.0 |
| 0.2 | 27.0 |
| 1 | 37.7 |
| 2 | 45.3 |
| 4 | 50.9 |
| 8 | 57.0 |
| 14 | 61.8 |
| 21 | 75.5 |
| 31 | 96.4 |

### G. Particle Size Reproducibility of PLGA Microspheres

[1322] Three batches of Factor IX modified RNA (mRNA sequence shown in SEQ ID NO: 1622 polyA tail of approximately 160 nucleotides not shown in sequence; 5′cap, Cap1; fully modified with 5-methylcytosine and pseudouridine) PLGA microspheres were made using the same conditions described for Batch D, shown in Table 29, (0.4 ml of W4 at 4 mg/ml, 2.0 ml of 01 at 200 mg/ml, 200 ml of W2 at 1%, and homogenized at a speed of 5 for the W4/O1/W2 emulsion). To improve the homogeneity of the PLGA microsphere suspension, filtration was incorporated prior to centrifugation. After stirring for 3 hours and before centrifuging, all formulated material was passed through a 100 μm nylon mesh strainer (Fisherbrand Cell Strainer, Cat #22-363-549) to remove larger aggregates. After washing and resuspension with water, 100-200 μl of a PLGA microspheres sample was used to measure particle size of the formulations by laser diffraction (Malvern Mastersizer2000). The particle size of the samples is shown in Table 33.

TABLE 33
Particle Size Summary

| | | | | Volume | |
|---|---|---|---|---|---|
| | | | | Weighted | |
| ID | D10 (μm) | D50 (μm) | D90 (μm) | Mean (um) | Filtration |
| Control | 19.2 | 62.5 | 722.4 | 223.1 | No |
| A | 9.8 | 31.6 | 65.5 | 35.2 | Yes |
| B | 10.5 | 32.3 | 66.9 | 36.1 | Yes |
| C | 10.8 | 35.7 | 79.8 | 41.4 | Yes |

[1323] Results of the 3 PLGA microsphere batches using filtration were compared to a PLGA microsphere batch made under the same conditions without filtration. The inclusion of a filtration step before washing reduced the mean particle size and demonstrated a consistent particle size distribution between 3 PLGA microsphere batches.

### H. Serum Stability of Factor IX PLGA Microspheres

[1324] Factor IX mRNA RNA (mRNA sequence shown in SEQ ID NO: 1622 polyA tail of approximately 160 nucleotides not shown in sequence; 5′cap, Cap1; fully modified with 5-methylcytosine and pseudouridine) in buffer (TE) or 90% serum (Se), or Factor IX mRNA in PLGA in buffer, 90% serum or 1% serum was incubated in buffer, 90% serum or 1% serum at an mRNA concentration of 50 ng/ul in a total volume of 70 ul. The samples were removed at 0, 30, 60 or 120 minutes. RNases were inactivated with proteinase K digestion for 20 minutes at 55° C. by adding 25 ul of 4× proteinase K buffer (0.4 ml 1M TRIS-HCl pH 7.5, 0.1 ml 0.5M EDTA, 0.12 ml 5M NaCl, and 0.4 ml 10% SDS) and 8 ul of proteinase K at 20 mg/ml. The Factor IX mRNA was precipitated (add 250 ul 95% ethanol for 1 hour, centrifuge for 10 min at 13 k rpm and remove supernatant, add 200 ul 70% ethanol to the pellet, centrifuge again for 5 min at 13 k rpm and remove supernatant and resuspend the pellet in 70 ul water) or extracted from PLGA microspheres (centrifuge 5 min at 13 k rpm and remove supernatant, wash pellet with 1 ml water, centrifuge 5 min at 13 k rpm and remove supernatant, add 280 ul dichloromethane to the pellet and shake for 15 minutes, add 70 ul water and then shake for 2 hours and remove the aqueous phase) before being analyzed by bioanalyzer. PLGA microspheres protect Factor IX modified mRNA from degradation in 90% and 1% serum over 2 hours. Factor IX modified mRNA completely degrades in 90% serum at the initial time point.

### Example 17. Lipid Nanoparticle In Vivo Studies

[1325] G-CSF (cDNA with the T7 promoter, 5′ Untranslated region (UTR) and 3′UTR used in in vitro transcription is given in SEQ ID NO: 21437. mRNA sequence shown in SEQ ID NO: 21438; polyA tail of approximately 160 nucleotides not shown in sequence; 5′cap, Cap 1; fully modified with 5-methylcytosine and pseudouridine) and Factor IX (cDNA with the T7 promoter, 5′ UTR and 3′UTR used in in vitro transcription is given in SEQ ID NO: 21443. mRNA sequence shown in SEQ ID NO: 1622; polyA tail of approximately 160 nucleotides not shown in sequence; 5′cap, Cap 1; fully modified with 5-methylcytosine and pseudouridine) modified mRNA were formulated as lipid nanoparticles (LNPs) using the syringe pump method. The LNPs were formulated at a 20:1 weight ratio of total lipid to modified mRNA with a final lipid molar ratio of 50:10:38.5:1.5 (DLin-KC2-DMA: DSPC: Cholesterol: PEG-c-DOMG). Formulations, listed in Table 34, were characterized by particle size, zeta potential, and encapsulation.

TABLE 34
Formulations

Formulation #

| | NPA-029-1 | NPA-030-1 |
|---|---|---|
| Modified mRNA | Factor IX | G-CSF |
| Mean size | 91 nm | 106 nm |
| | PDI: 0.04 | PDI: 0.06 |
| Zeta at pH 7.4 | 1.8 mV | 0.9 mV |
| Encaps. | 92% | 100% |
| (RiboGr) | | |

[1326] LNP formulations were administered to mice (n=5) intravenously at a modified mRNA dose of 100, 10, or 1 ug. Mice were sacrificed at 8 hrs after dosing. Serum was collected by cardiac puncture from mice that were administered with G-CSF or Factor IX modified mRNA formulations. Protein expression was determined by ELISA.

[1327] There was no significant body weight loss (<5%) in the G-CSF or Factor IX dose groups. Protein expression for G-CSF or Factor IX dose groups was determined by ELISA from a standard curve. Serum samples were diluted (about 20-2500× for G-CSF and about 10-250× for Factor IX) to ensure samples were within the linear range of the standard curve. As shown in Table 35, G-CSF protein expression determined by ELISA was approximately 17, 1200, and 4700 ng/ml for the 1, 10, and 100 ug dose groups, respectively. As shown in Table 36, Factor IX protein expression determined by ELISA was approximately 36, 380, and 3000-11000 ng/ml for the 1, 10, and 100 ug dose groups, respectively.

TABLE 35
G-CSF Protein Expression

| Dose (ug) | Conc (ng/ml) | Dilution Factor | Sample Volume |
|---|---|---|---|
| 1 | 17.73 | 20x | 5 ul |
| 10 | 1204.82 | 2500x | 0.04 ul |
| 100 | 4722.20 | 2500x | 0.04 ul |

TABLE 36
Factor IX Protein Expression

| Dose (ug) | Conc (ng/ml) | Dilution Factor | Sample Volume |
|---|---|---|---|
| 1 | 36.05 | 10x | 5 ul |
| 10 | 383.04 | 10x | 5 ul |
| 100* | 3247.75 | 50x | 1 ul |
| 100* | 11177.20 | 250x | 0.2 ul |

[1328] As shown in Table 37, the LNP formulations described above have about a 10,000-100,000-fold increase in protein production compared to an administration of an intravenous (V)-lipoplex formulation for the same dosage of modified mRNA and intramuscular (IM) or subcutaneous (SC) administration of the same dose of modified mRNA in saline. As used in Table 37, the symbol “−” means about.

TABLE 37
Protein Production

| | | Serum Concentration (pg/ml) |
|---|---|---|
| G-CSF | Dose (ug) | 8-12 hours after administration |
| IM | 100 | ~20-80 |
| SC | 100 | ~10-40 |
| IV (Lipoplex) | 100 | ~30 |
| IV (LNP) | 100 | ~5,000,000 |
| IV (LNP) | 10 | ~1,000,000 |
| IV (LNP) | 1 | ~20,000 |

| | | Serum Concentration (ng/ml) | |
|---|---|---|---|
| Factor IX | Dose (ug) | 8-12 hours after administration | |
| IM | 2 x 100 | ~1.6 | ng/ml |
| IV (LNP) | 100 | ~3,000-10,000 | ng/ml |
| IV (LNP) | 10 | ~400 | ng/ml |
| IV (LNP) | 1 | ~40 | ng/ml |

### Materials and Methods for Examples 18-23

[1329] G-CSF (mRNA sequence shown in SEQ ID NO: 21438; polyA tail of approximately 160 nulceotides not shown in sequence; 5′cap, Cap 1; fully modified with 5-methylcytosine and pseudouridine) and EPO (mRNA sequence shown in SEQ ID NO: 1638; polyA tail of approximately 160 nulceotides not shown in sequence; 5′cap, Cap 1; fully modified with 5-methylcytosine and pseudouridine) modified mRNA were formulated as lipid nanoparticles (LNPs) using the syringe pump method. The LNPs were formulated at a 20:1 weight ratio of total lipid to modified mRNA with a final lipid molar ratio of 50:10:38.5:1.5 (DLin-KC2-DMA: DSPC: Cholesterol: PEG-c-DOMG). Formulations, listed in Table 38, were characterized by particle size, zeta potential, and encapsulation.

TABLE 38
Formulations

| Formulation # | NPA-030-2 | NPA-060-1 |
|---|---|---|
| Modified mRNA | G-CSF | EPO |
| Mean size | 84 nm | 85 nm |
| | PDI: 0.04 | PDI: 0.03 |
| Zeta at pH 7.4 | 0.8 mV | 1.5 mV |
| Encapsulation | 95% | 98% |
| (RiboGreen) | | |

### Example 18. Lipid Nanoparticle In Vivo Studies with Modified mRNA

[1330] LNP formulations, shown in Table 38 (above), were administered to rats (n=5) intravenously (IV), intramuscularly (IM) or subcutaneously (SC) at a single modified mRNA dose of 0.05 mg/kg. A control group of rats (n=4) was untreated. The rats were bled at 2 hours, 8 hours, 24 hours, 48 hours and 96 hours and after they were administered with G-CSF or EPO modified mRNA formulations to determine protein expression using ELISA. The rats administered EPO modified mRNA intravenously were also bled at 7 days.

[1331] As shown in Table 39, EPO protein expression in the rats intravenously administered modified EPO mRNA was detectable out to 5 days. G-CSF in the rats intravenously administered modified G-CSF mRNA was detectable to 7 days. Subcutaneous and intramuscular administration of EPO modified mRNA was detectable to at least 24 hours and G-CSF modified mRNA was detectable to at least 8 hours. In Table 39, “OSC” refers to values that were outside the standard curve and “NT” means not tested.

TABLE 39
G-CSF and EPO Protein Expression

| | | | EPO Serum | G-CSF Serum |
|---|---|---|---|---|
| | | | Concentration | Concentration |
| Route | Time | | (pg/ml) | (pg/ml) |
| IV | 2 | hours | 36,981.0 | 31,331.9 |
| IV | 8 | hours | 62,053.3 | 70,532.4 |
| IV | 24 | hours | 42,077.0 | 5,738.6 |
| IV | 48 | hours | 5,561.5 | 233.8 |
| IV | 5 | days | 0.0 | 60.4 |
| IV | 7 | days | 0.0 | NT |
| IM | 2 | hours | 1395.4 | 1620.4 |
| IM | 8 | hours | 8974.6 | 7910.4 |
| IM | 24 | hours | 4678.3 | 893.3 |
| IM | 48 | hours | NT | OSC |
| IM | 5 | days | NT | OSC |
| SC | 2 | hours | 386.2 | 80.3 |
| SC | 8 | hours | 985.6 | 164.2 |
| SC | 24 | hours | 544.2 | OSC |
| SC | 48 | hours | NT | OSC |
| SC | 5 | days | NT | OSC |

| | | | |
|---|---|---|---|
| Untreated | All bleeds | 0 | 0 |

[1332] LNP formulations, shown in Table 38 (above), were administered to mice (n=5) intravenously (IV) at a single modified mRNA dose of 0.5, 0.05 or 0.005 mg/kg. The mice were bled at 8 hours, 24 hours, 72 hours and 6 days after they were administered with G-CSF or EPO modified mRNA formulations to determine protein expression using ELISA.

[1333] As shown in Table 40, EPO and G-CSF protein expression in the mice administered with the modified mRNA intravenously was detectable out to 72 hours for the mice dosed with 0.005 mg/kg and 0.05 mg/kg of modified mRNA and out to 6 days for the mice administered the EPO modified mRNA. In Table 40, “>” means greater than and “ND” means not detected.

TABLE 40
Protein Expression

| | | | EPO Serum | G-CSF Serum |
|---|---|---|---|---|
| | | | Concentration | Concentration |
| Dose (mg/kg) | Time | | (pg/ml) | (pg/ml) |
| 0.005 | 8 | hours | 12,508.3 | 11,550.6 |
| 0.005 | 24 | hours | 6,803.0 | 5,068.9 |
| 0.005 | 72 | hours | ND | ND |
| 0.005 | 6 | days | ND | ND |
| 0.05 | 8 | hours | 92,139.9 | 462,312.5 |
| 0.05 | 24 | hours | 54,389.4 | 80,903.8 |
| 0.05 | 72 | hours | ND | ND |
| 0.05 | 6 | days | ND | ND |
| 0.5 | 8 | hours | 498,515.3 | >1,250,000 |
| 0.5 | 24 | hours | 160,566.3 | 495,812.5 |
| 0.5 | 72 | hours | 3,492.5 | 1,325.6 |
| 0.5 | 6 | days | 21.2 | ND |

### Example 20. LNP Formulations In Vivo Study in Rodents

### A. LNP Formulations in Mice

[1334] LNP formulations, shown in Table 38 (above), were administered to mice (n=4) intravenously (IV) at a single modified mRNA dose 0.05 mg/kg or 0.005 mg/kg. There was also 3 control groups of mice (n=4) that were untreated. The mice were bled at 2 hours, 8 hours, 24 hours, 48 hours and 72 hours after they were administered with G-CSF or EPO modified mRNA formulations to determine the protein expression. Protein expression of G-CSF and EPO were determined using ELISA.

[1335] As shown in Table 41, EPO and G-CSF protein expression in the mice was detectable at least out to 48 hours for the mice that received a dose of 0.005 mg/kg modified RNA and 72 hours for the mice that received a dose of 0.05 mg/kg modified RNA. In Table 41, “OSC” refers to values that were outside the standard curve and “NT” means not tested.

TABLE 41
Protein Expression in Mice

| | | | EPO Serum | G-CSF Serum |
|---|---|---|---|---|
| | | | Concentration | Concentration |
| Dose (mg/kg) | Time | | (pg/ml) | (pg/ml) |
| 0.005 | 2 | hours | OSC | 3,447.8 |
| 0.005 | 8 | hours | 1,632.8 | 11,454.0 |
| 0.005 | 24 | hours | 1,141.0 | 4,960.2 |
| 0.005 | 48 | hours | 137.4 | 686.4 |
| 0.005 | 72 | hours | 0 | NT |
| 0.05 | 2 | hours | 10,027.3 | 20,951.4 |
| 0.05 | 8 | hours | 56,547.2 | 70,012.8 |
| 0.05 | 24 | hours | 25,027.3 | 19,356.2 |
| 0.05 | 48 | hours | 1,432.3 | 1,963.0 |
| 0.05 | 72 | hours | 82.2 | 47.3 |

### B. LNP Formulations in Rodents

[1336] LNP formulations, shown in Table 38 (above), are administered to rats (n=4) intravenously (IV) at a single modified mRNA dose 0.05 mg/kg. There is also a control group of rats (n=4) that are untreated. The rats are bled at 2 hours, 8 hours, 24 hours, 48 hours, 72 hours, 7 days and 14 days after they were administered with G-CSF or EPO modified mRNA formulations to determine the protein expression. Protein expression of G-CSF and EPO are determined using ELISA.

### Example 21. Early Time Course Study of LNPs

[1337] LNP formulations, shown in Table 38 (above), are administered to mammals intravenously (IV), intramuscularly (IM) or subcutaneously (SC) at a single modified mRNA dose of 0.5 mg/kg, 0.05 mg/kg or 0.005 mg/kg. A control group of mammals are not treated. The mammals are bled at 5 minutes, 10 minutes, 20 minutes, 30 minutes, 45 minutes, 1 hour, 1.5 hours and/or 2 hours after they are administered with the modified mRNA LNP formulations to determine protein expression using ELISA. The mammals are also bled to determine the complete blood count such as the granulocyte levels and red blood cell count.

### Example 22. Non-Human Primate In Vivo Study

[1338] LNP formulations, shown in Table 38 (above), were administered to non-human primates (NHP) (cynomolgus monkey) (n=2) as a bolus intravenous injection (IV) over approximately 30 seconds using a hypodermic needle, which may be attached to a syringe/abbocath or butterfly if needed. The NHP were administered a single modified mRNA IV dose of 0.05 mg/kg of EPO or G-CSF or 0.005 mg/kg of EPO in a dose volume of 0.5 mL/kg. The NHPs were bled 5-6 days before dosing with the modified mRNA LNP formulations to determine protein expression in the serum and a baseline complete blood count. After administration with the modified mRNA formulation the NHP were bled at 8, 24, 48 and 72 hours to determined protein expression. At 24 and 72 hours after administration the complete blood count of the NHP was also determined. Protein expression of G-CSF and EPO was determined by ELISA. Urine from the NHPs was collected over the course of the entire experiment and analyzed to evaluate clinical safety. Samples were collected from the NHPs after they were administered with G-CSF or EPO modified mRNA formulations to determine protein expression using ELISA. Clinical chemistry, hematology, urinalysis and cytokines of the non-human primates were also analyzed.

[1339] As shown in Table 42, EPO protein expression in the NHPs administered 0.05 mg/kg is detectable out to 72 hours and the 0.005 mg/kg dosing of the EPO formulation is detectable out to 48 hours. In Table 42, the “<” means less than a given value. G-CSF protein expression was seen out to 24 hours after administration with the modified mRNA formulation. Preliminarily, there was an increase in granulocytes and reticulocytes levels seen in the NHP after administration with the modified mRNA formulations.

TABLE 42
Protein Expression in Non-Human Primates

| | | | Female NHP | Male NHP | Average |
|---|---|---|---|---|---|
| | | | Serum | Serum | Serum |
| | | | Concen- | Concen- | Conen- |
| Modified | Dose | | tration | tration | tration |
| mRNA | (mg/kg) | Time | (pg/ml) | (pg/ml) | (pg/ml) |
| G-CSF | 0.05 | Pre-bleed | 0 | 0 | 0 |

| | | | | |
|---|---|---|---|---|
| 8 | hours | 3289 | 1722 | 2,506 |
| 24 | hours | 722 | 307 | 515 |
| 48 | hours | 0 | 0 | 0 |
| 72 | hours | 0 | 0 | 0 |

| | | | | | |
|---|---|---|---|---|---|
| EPO | 0.05 | Pre-bleed | 0 | 0 | 0 |

| | | | | |
|---|---|---|---|---|
| 8 | hours | 19,858 | 7,072 | 13,465 |
| 24 | hours | 18,178 | 4,913 | 11,546 |
| 48 | hours | 5,291 | 498 | 2,895 |
| 72 | hours | 744 | 60 | 402 |

| | | | | | |
|---|---|---|---|---|---|
| EPO | 0.005 | Pre-bleed | 0 | 0 | 0 |

| | | | | |
|---|---|---|---|---|
| 8 | hours | 523 | 250 | 387 |
| 24 | hours | 302 | 113 | 208 |
| 48 | hours | <7.8 | <7.8 | <7.8 |
| 72 | hours | 0 | 0 | 0 |

### Example 23. Non-Human Primate In Vivo Study for G-CSF and EPO

[1340] LNP formulations, shown in Table 38 (above), were administered to non-human primates (NHP) (cynomolgus monkey) (n=2) as intravenous injection (IV). The NHP were administered a single modified mRNA IV dose of 0.5 mg/kg, 0.05 mg/kg or 0.005 mg/kg of G-CSF or EPO in a dose volume of 0.5 mL/kg. The NHPs were bled before dosing with the modified mRNA LNP formulations to determine protein expression in the serum and a baseline complete blood count. After administration with the G-CSF modified mRNA formulation the NHP were bled at 8, 24, 48 and 72 hours to determined protein expression. After administration with the EPO modified mRNA formulation the NHP were bled at 8, 24, 48, 72 hours and 7 days to determined protein expression.

[1341] Samples collected from the NHPs after they were administered with G-CSF or EPO modified mRNA formulations were analyzed by ELISA to determine protein expression. Neutrophil and reticulocyte count was also determined pre-dose, 24 hours, 3 days, 7 days, 14 days and 18 days after administration of the modified G-CSF or EPO formulation.

[1342] As shown in Table 43, G-CSF protein expression was not detected beyond 72 hours. In Table 43, “<39” refers to a value below the lower limit of detection of 39 pg/ml.

TABLE 43
G-CSF Protein Expression

| | | | Female NHP | Male NHP |
|---|---|---|---|---|
| | | | Serum G-CSF | Serum G-CSF |
| Modified | Dose | | Concentration | Concentration |
| mRNA | (mg/kg) | Time | (pg/ml) | (pg/ml) |
| G-CSF | 0.5 | Pre-bleed | <39 | <39 |

| | | | |
|---|---|---|---|
| 8 | hours | 43,525 | 43,594 |
| 24 | hours | 11,374 | 3,628 |
| 48 | hours | 1,100 | 833 |
| 72 | hours | <39 | 306 |

| | | | | |
|---|---|---|---|---|
| G-CSF | 0.05 | Pre-bleed | <39 | <39 |

| | | | |
|---|---|---|---|
| 8 | hours | 3,289 | 1,722 |
| 24 | hours | 722 | 307 |
| 48 | hours | <39 | <39 |
| 72 | hours | <39 | <39 |

| | | | | |
|---|---|---|---|---|
| G-CSF | 0.005 | Pre-bleed | <39 | <39 |

| | | | |
|---|---|---|---|
| 8 | hours | 559 | 700 |
| 24 | hours | 155 | <39 |
| 48 | hours | <39 | <39 |
| 72 | hours | <39 | <39 |

[1343] As shown in Table 44, EPO protein expression was not detected beyond 7 days. In Table 44, “<7.8” refers to a value below the lower limit of detection of 7.8 pg/ml.

TABLE 44
EPO Protein Expression

| | | | Female NHP | Male NHP |
|---|---|---|---|---|
| | | | Serum EPO | Serum EPO |
| Modified | Dose | | Concentration | Concentration |
| mRNA | (mg/kg) | Time | (pg/ml) | (pg/ml) |
| EPO | 0.5 | Pre-bleed | <7.8 | <7.8 |

| | | | |
|---|---|---|---|
| 8 | hours | 158,771 | 119,086 |
| 24 | hours | 133,978 | 85,825 |
| 48 | hours | 45,250 | 64,793 |
| 72 | hours | 15,097 | 20,407 |
| 7 | days | <7.8 | <7.8 |

| | | | | |
|---|---|---|---|---|
| EPO | 0.05 | Pre-bleed | <7.8 | <7.8 |

| | | | |
|---|---|---|---|
| 8 | hours | 19,858 | 7,072 |
| 24 | hours | 18,187 | 4,913 |
| 48 | hours | 5,291 | 498 |
| 72 | hours | 744 | 60 |
| 7 | days | <7.8 | <7.8 |

| | | | | |
|---|---|---|---|---|
| EPO | 0.005 | Pre-bleed | <7.8 | <7.8 |

| | | | |
|---|---|---|---|
| 8 | hours | 523 | 250 |
| 24 | hours | 302 | 113 |
| 48 | hours | 11 | 29 |
| 72 | hours | <7.8 | <7.8 |
| 7 | days | <7.8 | <7.8 |

[1344] As shown in Table 45, there was an increase in neutrophils in all G-CSF groups relative to pre-dose levels.

TABLE 45
Pharmacologic Effect of G-CSF mRNA in NHP

| | | | Male | Female | Male | Female |
|---|---|---|---|---|---|---|
| | | | NHP | NHP | NHP | NHP |
| | | | (G-CSF) | (G-CSF) | (EPO) | (EPO) |
| | | | Neutro- | Neutro- | Neutro- | Neutro- |
| Dose | | | phils | phils | phils | phils |
| (mg/kg) | Time | | (10⁹/L) | (10⁹/L) | (10⁹/L) | (10⁹/L) |
| 0.5 | Pre-dose | | 1.53 | 1.27 | 9.72 | 1.82 |
| | 24 | hours | 14.92 | 13.96 | 7.5 | 11.85 |
| | 3 | days | 9.76 | 13.7 | 11.07 | 5.22 |
| | 7 | days | 2.74 | 3.81 | 11.8 | 2.85 |
| | 14/18 | days | 2.58 | 1.98 | 7.16 | 2.36 |
| 0.05 | Pre-dose | | 13.74 | 3.05 | 0.97 | 2.15 |
| | 24 | hours | 19.92 | 29.91 | 2.51 | 2.63 |
| | 3 | days | 7.49 | 10.77 | 1.73 | 4.08 |
| | 7 | days | 4.13 | 3.8 | 1.23 | 2.77 |
| | 14/18 | days | 3.59 | 1.82 | 1.53 | 1.27 |
| 0.005 | Pre-dose | | 1.52 | 2.54 | 5.46 | 5.96 |
| | 24 | hours | 16.44 | 8.6 | 5.37 | 2.59 |
| | 3 | days | 3.74 | 1.78 | 6.08 | 2.83 |
| | 7 | days | 7.28 | 2.27 | 3.51 | 2.23 |
| | 14/18 | days | 4.31 | 2.28 | 1.52 | 2.54 |

[1345] As shown in Table 46, there was an increase in reticulocytes in all EPO groups 3 days to 14/18 days after dosing relative to reticulocyte levels 24 hours after dosing.

TABLE 46
Pharmacologic Effect of EPO mRNA on Neutrophil Count

| | | | Male | Female | Male | Female |
|---|---|---|---|---|---|---|
| | | | NHP | NHP | NHP | NHP |
| | | | (G-CSF) | (G-CSF) | (EPO) | (EPO) |
| | | | Neutro- | Neutro- | Neutro- | Neutro- |
| Dose | | | phils | phils | phils | phils |
| (mg/kg) | Time | | (10¹²/L) | (10¹²/L) | (10¹²/L) | (10¹²/L) |
| 0.5 | Pre-dose | | 0.067 | 0.055 | 0.107 | 0.06 |
| | 24 | hours | 0.032 | 0.046 | 0.049 | 0.045 |
| | 3 | days | 0.041 | 0.017 | 0.09 | 0.064 |
| | 7 | days | 0.009 | 0.021 | 0.35 | 0.367 |
| | 14/18 | days | 0.029 | 0.071 | 0.066 | 0.071 |
| 0.05 | Pre-dose | | 0.055 | 0.049 | 0.054 | 0.032 |
| | 24 | hours | 0.048 | 0.046 | 0.071 | 0.04 |
| | 3 | days | 0.101 | 0.061 | 0.102 | 0.105 |
| | 7 | days | 0.157 | 0.094 | 0.15 | 0.241 |
| | 14/18 | days | 0.107 | 0.06 | 0.067 | 0.055 |
| 0.005 | Pre-dose | | 0.037 | 0.06 | 0.036 | 0.052 |
| | 24 | hours | 0.037 | 0.07 | 0.034 | 0.061 |
| | 3 | days | 0.037 | 0.054 | 0.079 | 0.118 |
| | 7 | days | 0.046 | 0.066 | 0.049 | 0.087 |
| | 14/18 | days | 0.069 | 0.057 | 0.037 | 0.06 |

[1346] As shown in Tables 47-49, the administration of EPO modified RNA had an effect on other erythropoetic parameters including hemoglobin (HGB), hematocrit (HCT) and red blood cell (RBC) count.

TABLE 47
Pharmacologic Effect of EPO mRNA on Hemoglobin

| | | | Male | Female | Male | Female |
|---|---|---|---|---|---|---|
| | | | NHP | NHP | NHP | NHP |
| | | | (G-CSF) | (G-CSF) | (EPO) | (EPO) |
| Dose | | | HGB | HGB | HGB | HGB |
| (mg/kg) | Time | | (g/L) | (g/L) | (g/L) | (g/L) |
| 0.5 | Pre-dose | | 133 | 129 | 134 | 123 |
| | 24 | hours | 113 | 112 | 127 | 108 |
| | 3 | days | 118 | 114 | 126 | 120 |
| | 7 | days | 115 | 116 | 140 | 134 |
| | 14/18 | days | 98 | 113 | 146 | 133 |
| 0.05 | Pre-dose | | 137 | 129 | 133 | 133 |
| | 24 | hours | 122 | 117 | 123 | 116 |
| | 3 | days | 126 | 115 | 116 | 120 |
| | 7 | days | 126 | 116 | 126 | 121 |
| | 14/18 | days | 134 | 123 | 133 | 129 |
| 0.005 | Pre-dose | | 128 | 129 | 132 | 136 |
| | 24 | hours | 117 | 127 | 122 | 128 |
| | 3 | days | 116 | 127 | 125 | 130 |
| | 7 | days | 116 | 129 | 119 | 127 |
| | 14/18 | days | 118 | 129 | 128 | 129 |

TABLE 48
Pharmacologic Effect of EPO mRNA on Hematocrit

| | | | Male | Female | Male | Female |
|---|---|---|---|---|---|---|
| | | | NHP | NHP | NHP | NHP |
| | | | (G-CSF) | (G-CSF) | (EPO) | (EPO) |
| Dose | | | HCT | HCT | HCT | HCT |
| (mg/kg) | Time | | (L/L) | (L/L) | (L/L) | (L/L) |
| 0.5 | Pre-dose | | 0.46 | 0.43 | 0.44 | 0.4 |
| | 24 | hours | 0.37 | 0.38 | 0.4 | 0.36 |
| | 3 | days | 0.39 | 0.38 | 0.41 | 0.39 |
| | 7 | days | 0.39 | 0.38 | 0.45 | 0.45 |
| | 14/18 | days | 0.34 | 0.37 | 0.48 | 0.46 |
| 0.05 | Pre-dose | | 0.44 | 0.44 | 0.45 | 0.43 |
| | 24 | hours | 0.39 | 0.4 | 0.43 | 0.39 |
| | 3 | days | 0.41 | 0.39 | 0.38 | 0.4 |
| | 7 | days | 0.42 | 0.4 | 0.45 | 0.41 |
| | 14/18 | days | 0.44 | 0.4 | 0.46 | 0.43 |
| 0.005 | Pre-dose | | 0.42 | 0.42 | 0.48 | 0.45 |
| | 24 | hours | 0.4 | 0.42 | 0.42 | 0.43 |
| | 3 | days | 0.4 | 0.41 | 0.44 | 0.42 |
| | 7 | days | 0.39 | 0.42 | 0.41 | 0.42 |
| | 14/18 | days | 0.41 | 0.42 | 0.42 | 0.42 |

TABLE 49
Pharmacologic Effect of EPO mRNA on Red Blood Cells

| | | | Male | Female | Male | Female |
|---|---|---|---|---|---|---|
| | | | NHP | NHP | NHP | NHP |
| | | | (G-CSF) | (G-CSF) | (EPO) | (EPO) |
| Dose | | | RBC | RBC | RBC | RBC |
| (mg/kg) | Time | | (10¹²/L) | (10¹²/L) | (10¹²/L) | (10¹²/L) |
| 0.5 | Pre-dose | | 5.57 | 5.57 | 5.43 | 5.26 |
| | 24 | hours | 4.66 | 4.96 | 5.12 | 4.69 |
| | 3 | days | 4.91 | 4.97 | 5.13 | 5.15 |
| | 7 | days | 4.8 | 5.04 | 5.55 | 5.68 |
| | 14/18 | days | 4.21 | 4.92 | 5.83 | 5.72 |
| 0.05 | Pre-dose | | 5.68 | 5.64 | 5.57 | 5.84 |
| | 24 | hours | 4.96 | 5.08 | 5.25 | 5.18 |
| | 3 | days | 5.13 | 5.04 | 4.81 | 5.16 |
| | 7 | days | 5.17 | 5.05 | 5.37 | 5.31 |
| | 14/18 | days | 5.43 | 5.26 | 5.57 | 5.57 |
| 0.005 | Pre-dose | | 5.67 | 5.36 | 6.15 | 5.72 |
| | 24 | hours | 5.34 | 5.35 | 5.63 | 5.35 |
| | 3 | days | 5.32 | 5.24 | 5.77 | 5.42 |
| | 7 | days | 5.25 | 5.34 | 5.49 | 5.35 |
| | 14/18 | days | 5.37 | 5.34 | 5.67 | 5.36 |

[1347] As shown in Tables 50 and 51, the administration of modified RNA had an effect on serum chemistry parameters including alanine transaminase (ALT) and aspartate transaminase (AST).

TABLE 50
Pharmacologic Effect of EPO mRNA on Alanine Transaminase

| | | Male NHP | Female | Male NHP | Female |
|---|---|---|---|---|---|
| | | (G-CSF) | NHP | (EPO) | NHP |
| Dose | | ALT | (G-CSF) | ALT | (EPO) ALT |
| (mg/kg) | Time | (U/L) | ALT (U/L) | (U/L) | (U/L) |
| 0.5 | Pre-dose | 29 | 216 | 50 | 31 |
| | 2 days | 63 | 209 | 98 | 77 |
| | 4 days | 70 | 98 | 94 | 87 |
| | 7 days | 41 | 149 | 60 | 59 |
| | 14 days | 43 | 145 | 88 | 44 |
| 0.05 | Pre-dose | 58 | 53 | 56 | 160 |
| | 2 days | 82 | 39 | 95 | 254 |
| | 4 days | 88 | 56 | 70 | 200 |
| | 7 days | 73 | 73 | 64 | 187 |
| | 14 days | 50 | 31 | 29 | 216 |
| 0.005 | Pre-dose | 43 | 51 | 45 | 45 |
| | 2 days | 39 | 32 | 62 | 48 |
| | 4 days | 48 | 58 | 48 | 50 |
| | 7 days | 29 | 55 | 21 | 48 |
| | 14 days | 44 | 46 | 43 | 51 |

TABLE 51
Pharmacologic Effect of EPO mRNA on Aspartate Transaminase

| | | Male NHP | Female | Male NHP | Female |
|---|---|---|---|---|---|
| | | (G-CSF) | NHP | (EPO) | NHP |
| Dose | | AST | (G-CSF) | AST | (EPO) AST |
| (mg/kg) | Time | (U/L) | AST (U/L) | (U/L) | (U/L) |
| 0.5 | Pre-dose | 32 | 47 | 59 | 20 |
| | 2 days | 196 | 294 | 125 | 141 |
| | 4 days | 67 | 63 | 71 | 60 |
| | 7 days | 53 | 68 | 56 | 47 |
| | 14 days | 47 | 67 | 82 | 44 |
| 0.05 | Pre-dose | 99 | 33 | 74 | 58 |
| | 2 days | 95 | 34 | 61 | 80 |
| | 4 days | 69 | 42 | 48 | 94 |
| | 7 days | 62 | 52 | 53 | 78 |
| | 14 days | 59 | 20 | 32 | 47 |
| 0.005 | Pre-dose | 35 | 54 | 39 | 40 |
| | 2 days | 70 | 34 | 29 | 25 |
| | 4 days | 39 | 36 | 43 | 55 |
| | 7 days | 28 | 31 | 55 | 31 |
| | 14 days | 39 | 20 | 35 | 54 |

[1348] As shown in Table 52, the administration of lipid nanoparticle-formulated modified RNA at high doses (0.5 mg/kg) caused an increase in cytokines, interferon-alpha (TFN-alpha) after administration of modified mRNA.

TABLE 52
Pharmacologic Effect of EPO mRNA on Alanine Transaminase

| | | | | | Female |
|---|---|---|---|---|---|
| | | Male NHP | Female NHP | Male NHP | NHP |
| | | (G-CSF) | (G-CSF) | (EPO) | (EPO) |
| Dose | | IFN-alpha | IFN-alpha | IFN-alpha | IFN-alpha |
| (mg/kg) | Time | (pg/mL) | (pg/mL) | (pg/mL) | (pg/mL) |
| 0.5 | Pre-dose | 0 | 0 | 0 | 0 |
| | Day 1 + 8 hr | 503.8 | 529.2 | 16.79 | 217.5 |
| | 4 days | 0 | 0 | 0 | 0 |
| 0.05 | Pre-dose | 0 | 0 | 0 | 0 |
| | Day 1 + 8 hr | 0 | 0 | 0 | 0 |
| | 4 days | 0 | 0 | 0 | 0 |
| 0.005 | Pre-dose | 0 | 0 | 0 | 0 |
| | Day 1 + 8 hr | 0 | 0 | 0 | 0 |
| | 4 days | 0 | 0 | 0 | 0 |

### Example 24. Study of Intramuscular and/or Subcutaneous Administration in Non-Human Primates

[1349] Formulations containing modified EPO mRNA (mRNA sequence shown in SEQ ID NO: 1638; polyA tail of approximately 160 nucleotides not shown in sequence; 5′cap, Cap1; fully modified with 5-methylcytosine and pseudouridine) or G-CSF mRNA (mRNA sequence shown in SEQ ID NO: 21438; polyA tail of approximately 160 nucleotides not shown in sequence; 5′cap, Cap1; fully modified with 5-methylcytosine and pseudouridine) in saline were administered to non-human primates (Cynomolgus monkey) (NHP) intramuscularly (IM) or subcutaneously (SC). The single modified mRNA dose of 0.05 mg/kg or 0.005 mg/kg was in a dose volume of 0.5 mL/kg. The non-human primates are bled 5-6 days prior to dosing to determine serum protein concentration and a baseline complete blood count. After administration with the modified mRNA formulation the NHP are bled at 8 hours, 24 hours, 48 hours, 72 hours, 7 days and 14 days to determined protein expression. Protein expression of G-CSF and EPO is determined by ELISA. At 24 hours, 72 hours, 7 days and 14 days after administration the complete blood count of the NHP is also determined. Urine from the NHPs is collected over the course of the entire experiment and analyzed to evaluate clinical safety. Tissue near the injection site is also collected and analyzed to determine protein expression.

### Example 25. Modified mRNA Trafficking

[1350] In order to determine localization and/or trafficking of the modified mRNA, studies may be performed as follows.

[1351] LNP formulations of siRNA and modified mRNA are formulated according to methods known in the art and/or described herein. The LNP formulations may include at least one modified mRNA which may encode a protein such as G-CSF, EPO, Factor VII, and/or any protein described herein. The formulations may be administered locally into muscle of mammals using intramuscular or subcutaneous injection. The dose of modified mRNA and the size of the LNP may be varied to determine the effect on trafficking in the body of the mammal and/or to assess the impact on a biologic reaction such as, but not limited to, inflammation. The mammal may be bled at different time points to determine the expression of protein encoded by the modified mRNA administered present in the serum and/or to determine the complete blood count in the mammal.

[1352] For example, modified mRNA encoding Factor VII, expressed in the liver and secreted into the serum, may be administered intramuscularly and/or subcutaneously. Coincident or prior to modified mRNA administration, siRNA is administered to knock out endogenous Factor VII. Factor VII arising from the intramuscular and/or subcutaneous injection of modified mRNA is administered is measured in the blood. Also, the levels of Factor VII is measured in the tissues near the injection site. If Factor VII is expressed in blood then there is trafficking of the modified mRNA. If Factor VII is expressed in tissue and not in the blood than there is only local expression of Factor VII.

### Example 26. Formulations of Multiple Modified mRNA

[1353] LNP formulations of modified mRNA are formulated according to methods known in the art and/or described herein or known in the art. The LNP formulations may include at least one modified mRNA which may encode a protein such as G-CSF, EPO, thrombopoietin and/or any protein described herein. The at least one modified mRNA may include 1, 2, 3, 4 or 5 modified mRNA molecules. The formulations containing at least one modified mRNA may be administered intravenously, intramuscularly or subcutaneously in a single or multiple dosing regimens. Biological samples such as, but not limited to, blood and/or serum may be collected and analyzed at different time points before and/or after administration of the at least one modified mRNA formulation. An expression of a protein in a biological sample of 50-200 pg/ml after the mammal has been administered a formulation containing at least one modified mRNA encoding said protein would be considered biologically effective.

### Example 27. Polyethylene Glycol Ratio Studies

### A. Formulation and Characterization of PEG LNPs

[1354] Lipid nanoparticles (LNPs) were formulated using the syringe pump method. The LNPs were formulated at a 20:1 weight ratio of total lipid to modified G-CSF mRNA (mRNA sequence shown in SEQ ID NO: 21438; polyA tail of approximately 160 nucleotides not shown in sequence; 5′cap, Cap1; fully modified with 5-methylcytosine and pseudouridine). The molar ratio ranges of the formulations are shown in Table 53.

TABLE 53
Molar Ratios

| | DLin-KC2-DMA | DSPC | Cholesterol | PEG-c-DOMG |
|---|---|---|---|---|
| Mole Percent | 50.0 | 10.0 | 37-38.5 | 1.5-3 |
| (mol %) | | | | |

[1355] Two types of PEG lipid, 1,2-Dimyristoyl-sn-glycerol, methoxypolyethylene Glycol (PEG-DMG, NOF Cat #SUNBRIGHT® GM-020) and 1,2-Distearoyl-sn-glycerol, methoxypolyethylene Glycol (PEG-DSG, NOF Cat #SUNBRIGHT® GS-020), were tested at 1.5 or 3.0 mol %. After the formation of the LNPs and the encapsulation of the modified G-CSF mRNA, the LNP formulations were characterized by particle size, zeta potential and encapsulation percentage and the results are shown in Table 54.

TABLE 54
Characterization of LNP Formulations

| | Formulation No. | | | |
|---|---|---|---|---|
| | NPA-071-1 | NPA-072-1 | NPA-073-1 | NPA-074-1 |
| Lipid | PEG-DMG | PEG-DMG | PEG-DSA | PEG-DSA |
| | 1.5% | 3% | 1.5% | 3% |
| Mean Size | 95 nm | 85 nm | 95 nm | 75 nm |
| | PDI: 0.01 | PDI: 0.06 | PDI: 0.08 | PDI: 0.08 |
| Zeta at pH 7.4 | −1.1 mV | −2.6 mV | 1.7 mV | 0.7 mV |
| Encapsulation | 88% | 89% | 98% | 95% |
| (RiboGreen) | | | | |

### B. In Vivo Screening of PEG LNPs

[1356] Formulations of the PEG LNPs described in Table 55 were administered to mice (n=5) intravenously at a dose of 0.5 mg/kg. Serum was collected from the mice at 2 hours, 8 hours, 24 hours, 48 hours, 72 hours and 8 days after administration of the formulation. The serum was analyzed by ELISA to determine the protein expression of G-CSF and the expression levels are shown in Table 55. LNP formulations using PEG-DMG gave substantially higher levels of protein expression than LNP formulations with PEG-DSA.

TABLE 55
Protein Expression

| | Formulation | | | Protein Expression |
|---|---|---|---|---|
| Lipid | No. | Time | | (pg/ml) |
| PEG-DMG, | NPA-071-1 | 2 | hours | 114,102 |
| 1.5% | | 8 | hours | 357,944 |
| | | 24 | hours | 104,832 |
| | | 48 | hours | 6,697 |
| | | 72 | hours | 980 |
| | | 8 | days | 0 |
| PEG-DMG, 3% | NPA-072-1 | 2 | hours | 154,079 |
| | | 8 | hours | 354,994 |
| | | 24 | hours | 164,311 |
| | | 48 | hours | 13,048 |
| | | 72 | hours | 1,182 |
| | | 8 | days | 13 |
| PEG-DSA, 1.5% | NPA-073-1 | 2 | hours | 3,193 |
| | | 8 | hours | 6,162 |
| | | 24 | hours | 446 |
| | | 48 | hours | 197 |
| | | 72 | hours | 124 |
| | | 8 | days | 5 |
| PEG-DSA, 3% | NPA-074-1 | 2 | hours | 259 |
| | | 8 | hours | 567 |
| | | 24 | hours | 258 |
| | | 48 | hours | 160 |
| | | 72 | hours | 328 |
| | | 8 | days | 33 |

### Example 28. Cationic Lipid Formulation Studies

### A. Formulation and Characterization of Cationic Lipid Nanoparticles

[1357] Lipid nanoparticles (LNPs) were formulated using the syringe pump method. The LNPs were formulated at a 20:1 weight ratio of total lipid to modified mRNA. The final lipid molar ratio ranges of cationic lipid, DSPC, cholesterol and PEG-c-DOMG are outlined in Table 56.

TABLE 56
Molar Ratios

| | Cationic Lipid | DSPC | Cholesterol | PEG-c-DOMG |
|---|---|---|---|---|
| Mole Percent | 50.0 | 10.0 | 38.5 | 1.5 |
| (mol %) | | | | |

[1358] A 25 mM lipid solution in ethanol and modified RNA in 50 mM citrate at a pH of 3 were mixed to create spontaneous vesicle formation. The vesicles were stabilized in ethanol before the ethanol was removed and there was a buffer exchange by dialysis. The LNPs were then characterized by particle size, zeta potential, and encapsulation percentage. Table 57 describes the characterization of LNPs encapsulating EPO modified mRNA (mRNA sequence shown in SEQ ID NO: 1638 polyA tail of approximately 160 nucleotides not shown in sequence; 5′cap, Cap1; fully modified with 5-methylcytosine and pseudouridine) or G-CSF modified mRNA (mRNA sequence shown in SEQ ID NO: 21438; polyA tail of approximately 160 nucleotdies not shown in sequence; 5′cap, Cap1; fully modified with 5-methylcytosine and pseudouridine) using DLin-MC3-DMA, DLin-DMA or C12-200 as the cationic lipid.

TABLE 57
Characterization of Cationic Lipid Formulations

| | Formulation No. | | | | | |
|---|---|---|---|---|---|---|
| | NPA- | NPA- | NPA- | NPA- | NPA- | NPA- |
| | 071-1 | 072-1 | 073-1 | 074-1 | 075-1 | 076-1 |
| Lipid | DLin-MC3- | DLin-MC3- | DLin- | DLin- | C12- | C12- |
| | DMA | DMA | DMA | DMA | 200 | 200 |
| Modified RNA | EPO | G-CSF | EPO | G-CSF | EPO | G-CSF |
| Mean Size | 89 nm | 96 nm | 70 nm | 73 nm | 97 nm | 103 nm |
| | PDI: 0.07 | PDI: 0.08 | PDI: 0.04 | PDI: 0.06 | PDI: 0.05 | PDI: 0.09 |
| Zeta at pH 7.4 | −1.1 mV | −1.4 mV | −1.6 mV | −0.4 mV | 1.4 mV | 0.9 mV |
| Encapsulation | 100% | 100% | 99% | 100% | 88% | 98% |
| (RiboGreen) | | | | | | |

### B. In Vivo Screening of Cationic LNP Formulations

[1359] Formulations of the cationic lipid formulations described in Table 57 were administered to mice (n=5) intravenously at a dose of 0.5 mg/kg. Serum was collected from the mice at 2 hours, 24 hours, 72 hours and/or 7 days after administration of the formulation. The serum was analyzed by ELISA to determine the protein expression of EPO or G-CSF and the expression levels are shown in Table 58.

TABLE 58
Protein Expression

| | | | Protein |
|---|---|---|---|
| Modified | Formulation | | Expression |
| mRNA | No. | Time | (pg/ml) |
| EPO | NPA-071-1 | 2 hours | 304,190.0 |
| | | 24 hours | 166,811.5 |
| | | 72 hours | 1,356.1 |
| | | 7 days | 20.3 |
| EPO | NPA-073-1 | 2 hours | 73,852.0 |
| | | 24 hours | 75,559.7 |
| | | 72 hours | 130.8 |
| EPO | NPA-075-1 | 2 hours | 413,010.2 |
| | | 24 hours | 56,463.8 |
| G-CSF | NPA-072-1 | 2 hours | 62,113.1 |
| | | 24 hours | 53,206.6 |
| G-CSF | NPA-074-1 | 24 hours | 25,059.3 |
| G-CSF | NPA-076-1 | 2 hours | 219,198.1 |
| | | 24 hours | 8,470.0 |

[1360] Toxcity was seen in the mice administered the LNPs formulations with the cationic lipid C12-200 (NPA-075-1 and NPA-076-1) and they were sacrificed at 24 hours because they showed symptoms such as scrubby fur, cowering behavior and weight loss of greater than 10%. C12-200 was expected to be more toxic but also had a high level of expression over a short period. The cationic lipid DLin-DMA (NPA-073-1 and NPA-074-1) had the lowest expression out of the three cationic lipids tested. DLin-MC3-DMA (NPA-071-1 and NPA-072-1) showed good expression up to day three and was above the background sample out to day 7 for EPO formulations.

### Example 29. Method of Screening for Protein Expression

### A. Electrospray Ionization

[1361] A biological sample which may contain proteins encoded by modified RNA administered to the subject is prepared and analyzed according to the manufacturer protocol for electrospray ionization (ESI) using 1, 2, 3 or 4 mass analyzers. A biologic sample may also be analyzed using a tandem ESI mass spectrometry system.

[1362] Patterns of protein fragments, or whole proteins, are compared to known controls for a given protein and identity is determined by comparison.

### B. Matrix-Assisted Laser Desorption/Ionization

[1363] A biological sample which may contain proteins encoded by modified RNA administered to the subject is prepared and analyzed according to the manufacturer protocol for matrix-assisted laser desorption/ionization (MALDI).

[1364] Patterns of protein fragments, or whole proteins, are compared to known controls for a given protein and identity is determined by comparison.

### C. Liquid Chromatography-Mass Spectrometry-Mass Spectrometry

[1365] A biological sample, which may contain proteins encoded by modified RNA, may be treated with a trypsin enzyme to digest the proteins contained within. The resulting peptides are analyzed by liquid chromatography-mass spectrometry-mass spectrometry (LC/MS/MS). The peptides are fragmented in the mass spectrometer to yield diagnostic patterns that can be matched to protein sequence databases via computer algorithms. The digested sample may be diluted to achieve 1 ng or less starting material for a given protein. Biological samples containing a simple buffer background (e.g. water or volatile salts) are amenable to direct in-solution digest; more complex backgrounds (e.g. detergent, non-volatile salts, glycerol) require an additional clean-up step to facilitate the sample analysis.

[1366] Patterns of protein fragments, or whole proteins, are compared to known controls for a given protein and identity is determined by comparison.

### Example 30. Lipid Nanoparticle In Vivo Studies

[1367] mCherry mRNA (mRNA sequence shown in SEQ ID NO: 21444; polyA tail of approximately 160 nucleotides not shown in sequence; 5′cap, Cap1; fully modified with 5-methylcytosine and pseudouridine) was formulated as a lipid nanoparticle (LNP) using the syringe pump method. The LNP was formulated at a 20:1 weight ratio of total lipid to modified mRNA with a final lipid molar ratio of 50:10:38.5:1.5 (DLin-KC2-DMA: DSPC: Cholesterol: PEG-c-DOMG). The mCherry formulation, listed in Table 59, was characterized by particle size, zeta potential, and encapsulation.

TABLE 59
mCherry Formulation

| | Formulation # |
|---|---|
| | NPA-003-5 |
| Modified mRNA | mCherry |
| Mean size | 105 nm |
| | PDI: 0.09 |
| Zeta at pH 7.4 | 1.8 mV |
| Encaps. | 100% |
| (RiboGr) | |

[1368] The LNP formulation was administered to mice (n=5) intravenously at a modified mRNA dose of 100 ug. Mice were sacrificed at 24 hrs after dosing. The liver and spleen from the mice administered with mCherry modified mRNA formulations were analyzed by immunohistochemistry (IHC), western blot, or fluorescence-activated cell sorting (FACS).

[1369] Histology of the liver showed uniform mCherry expression throughout the section, while untreated animals did not express mCherry. Western blots were also used to confirm mCherry expression in the treated animals, whereas mCherry was not detected in the untreated animals. Tubulin was used as a control marker and was detected in both treated and untreated mice, indicating that normal protein expression in hepatocytes was unaffected.

[1370] FACS and IHC were also performed on the spleens of mCherry and untreated mice. All leukocyte cell populations were negative for mCherry expression by FACS analysis. By IHC, there were also no observable differences in the spleen in the spleen between mCherry treated and untreated mice.

### Example 31. Syringe Pump In Vivo Studies

[1371] mCherry modified mRNA (mRNA sequence shown in SEQ ID NO: 21439; polyA tail of approximately 160 nucleotides not shown in sequence; 5′cap, Cap1) is formulated as a lipid nanoparticle (LNP) using the syringe pump method. The LNP is formulated at a 20:1 weight ratio of total lipid to modified mRNA with a final lipid molar ratio of 50:10:38.5:1.5 (DLin-KC2-DMA: DSPC: Cholesterol: PEG-c-DOMG). The mCherry formulation is characterized by particle size, zeta potential, and encapsulation.

[1372] The LNP formulation is administered to mice (n=5) intravenously at a modified mRNA dose of 10 or 100 ug. Mice are sacrificed at 24 hrs after dosing. The liver and spleen from the mice administered with mCherry modified mRNA formulations are analyzed by immunohistochemistry (IHC), western blot, and/or fluorescence-activated cell sorting (FACS).

### Example 32. In Vitro and In Vivo Expression

A. In vitro Expression in Human Cells Using Lipidoid Formulations

[1373] The ratio of mmRNA to lipidoid used to test for in vitro transfection is tested empirically at different lipidoid:mmRNA ratios. Previous work using siRNA and lipidoids have utilized 2.5:1, 5:1, 10:1, and 15:1 lipidoid:siRNA wt:wt ratios. Given the longer length of mmRNA relative to siRNA, a lower wt:wt ratio of lipidoid to mmRNA may be effective. In addition, for comparison mmRNA were also formulated using RNAIMAX™ (Invitrogen, Carlsbad, CA) or TRANSIT-mRNA (Mirus Bio, Madison, WI) cationic lipid delivery vehicles.

[1374] The ability of lipidoid-formulated Luciferase (IVT cDNA sequence as shown in SEQ ID NO: 21445; mRNA sequence shown in SEQ ID NO: 21446, polyA tail of approximately 160 nucleotides not shown in sequence, 5′cap, Cap1, fully modified with 5-methylcytosine at each cytosine and pseudouridine replacement at each uridine site), green fluorescent protein (GFP) (IVT cDNA sequence as shown in SEQ ID NO: 21447; mRNA sequence shown in SEQ ID NO: 21448, polyA tail of approximately 160 nucleotides not shown in sequence, 5′cap, Cap1, fully modified with 5-methylcytosine at each cytosine and pseudouridine replacement at each uridine site), G-CSF mRNA (mRNA sequence shown in SEQ ID NO: 21439; polyA tail of approximately 160 nucleotides not shown in sequence; 5′cap, Cap1), and EPO mRNA (mRNA sequence shown in SEQ ID NO: 1638; polyA tail of approximately 160 nucleotides not shown in sequence; 5′cap, Cap1) to express the desired protein product can be confirmed by luminescence for luciferase expression, flow cytometry for GFP expression, and by ELISA for G-CSF and Erythropoietin (EPO) secretion.

### B. In Vivo Expression Following Intravenous Injection

[1375] Systemic intravenous administration of the formulations are created using various different lipidoids including, but not limited to, 98N12-5, C12-200, and MD1.

[1376] Lipidoid formulations containing mmRNA are injected intravenously into animals. The expression of the modified mRNA (mmRNA)-encoded proteins are assessed in blood and/or other organs samples such as, but not limited to, the liver and spleen collected from the animal. Conducting single dose intravenous studies will also allow an assessment of the magnitude, dose responsiveness, and longevity of expression of the desired product.

[1377] In one embodiment, lipidoid based formulations of 98N12-5, C12-200, MD1 and other lipidoids, are used to deliver luciferase, green fluorescent protein (GFP), mCherry fluorescent protein, secreted alkaline phosphatase (sAP), human G-CSF, human Factor IX, or human Erythropoietin (EPO) mmRNA into the animal. After formulating mmRNA with a lipid, as described previously, animals are divided into groups to receive either a saline formulation, or a lipidoid-formulation which contains one of a different mmRNA selected from luciferase, GFP, mCherry, sAP, human G-CSF, human Factor IX, and human EPO. Prior to injection into the animal, mmRNA-containing lipidoid formulations are diluted in PBS. Animals are then administered a single dose of formulated mmRNA ranging from a dose of 10 mg/kg to doses as low as 1 ng/kg, with a preferred range to be 10 mg/kg to 100 ng/kg, where the dose of mmRNA depends on the animal body weight such as a 20 gram mouse receiving a maximum formulation of 0.2 ml (dosing is based no mmRNA per kg body weight). After the administration of the mmRNA-lipidoid formulation, serum, tissues, and/or tissue lysates are obtained and the level of the mmRNA-encoded product is determined at a single and/or a range of time intervals. The ability of lipidoid-formulated Luciferase, GFP, mCherry, sAP, G-CSF, Factor IX, and EPO mmRNA to express the desired protein product is confirmed by luminescence for the expression of Luciferase, flow cytometry for the expression of GFP and mCherry expression, by enzymatic activity for sAP, or by ELISA for the section of G-CSF, Factor IX and/or EPO.

[1378] Further studies for a multi-dose regimen are also performed to determine the maximal expression of mmRNA, to evaluate the saturability of the mmRNA-driven expression (by giving a control and active mmRNA formulation in parallel or in sequence), and to determine the feasibility of repeat drug administration (by giving mmRNA in doses separated by weeks or months and then determining whether expression level is affected by factors such as immunogenicity). An assessment of the physiological function of proteins such as G-CSF and EPO are also determined through analyzing samples from the animal tested and detecting increases in granulocyte and red blood cell counts, respectively. Activity of an expressed protein product such as Factor IX, in animals can also be assessed through analysis of Factor IX enzymatic activity (such as an activated partial thromboplastin time assay) and effect of clotting times.

C. In Vitro Expression Following Intramuscular and/or Subcutaneous Injection

[1379] The use of lipidoid formulations to deliver oligonucleotides, including mRNA, via an intramuscular route or a subcutaneous route of injection needs to be evaluated as it has not been previously reported. Intramuscular and/or subcutaneous injection of mmRNA are evaluated to determine if mmRNA-containing lipidoid formulations are capabable to produce both localized and systemic expression of a desired portiens.

[1380] Lipidoid formulations of 98N12-5, C12-200, and MD1 containing mmRNA selected from luciferase, green fluorescent protein (GFP), mCherry fluorescent protein, secreted alkaline phosphatase (sAP), human G-CSF, human factor IX, or human Erythropoietin (EPO) mmRNA are injected intramuscularly and/or subcutaneously into animals. The expression of mmRNA-encoded proteins are assessed both within the muscle or subcutaneous tissue and systemically in blood and other organs such as the liver and spleen. Single dose studies allow an assessment of the magnitude, dose responsiveness, and longevity of expression of the desired product.

[1381] Animals are divided into groups to receive either a saline formulation or a formulation containing modified mRNA. Prior to injection mmRNA-containing lipidoid formulations are diluted in PBS. Animals are administered a single intramuscular dose of formulated mmRNA ranging from 50 mg/kg to doses as low as 1 ng/kg with a preferred range to be 10 mg/kg to 100 ng/kg. A maximum dose for intramuscular administration, for a mouse, is roughly 1 mg mmRNA or as low as 0.02 ng mmRNA for an intramuscular injection into the hind limb of the mouse. For subcutaneous administration, the animals are administered a single subcutaneous dose of formulated mmRNA ranging from 400 mg/kg to doses as low as 1 ng/kg with a preferred range to be 80 mg/kg to 100 ng/kg. A maximum dose for subcutaneous administration, for a mouse, is roughly 8 mg mmRNA or as low as 0.02 ng mmRNA.

[1382] For a 20 gram mouse the volume of a single intramuscular injection is maximally 0.025 ml and a single subcutaneous injection is maximally 0.2 ml. The optimal dose of mmRNA administered is calculated from the body weight of the animal. At various points in time points following the administration of the mmRNA-lipidoid, serum, tissues, and tissue lysates is obtained and the level of the mmRNA-encoded product is determined. The ability of lipidoid-formulated luciferase, green fluorescent protein (GFP), mCherry fluorescent protein, secreted alkaline phosphatase (sAP), human G-CSF, human factor IX, or human Erythropoietin (EPO) mmRNA to express the desired protein product is confirmed by luminescence for luciferase expression, flow cytometry for GFP and mCherry expression, by enzymatic activity for sAP, and by ELISA for G-CSF, Factor IX and Erythropoietin (EPO) secretion.

[1383] Additional studies for a multi-dose regimen are also performed to determine the maximal expression using mmRNA, to evaluate the saturability of the mmRNA-driven expression (achieved by giving a control and active mmRNA formulation in parallel or in sequence), and to determine the feasibility of repeat drug administration (by giving mmRNA in doses separated by weeks or months and then determining whether expression level is affected by factors such as immunogenicity). Studies utilizing multiple subcutaneous or intramuscular injection sites at one time point, are also utilized to further increase mmRNA drug exposure and improve protein production. An assessment of the physiological function of proteins, such as GFP, mCherry, sAP, human G-CSF, human factor IX, and human EPO, are determined through analyzing samples from the tested animals and detecting a change in granulocyte and/or red blood cell counts. Activity of an expressed protein product such as Factor IX, in animals can also be assessed through analysis of Factor IX enzymatic activity (such as an activated partial thromboplastin time assay) and effect of clotting times.

### Example 33. Bifunctional mmRNA

[1384] Using the teachings and synthesis methods described herein, modified RNAs are designed and synthesized to be bifunctional, thereby encoding one or more cytotoxic protein molecules as well as be synthesized using cytotoxic nucleosides.

[1385] Administration of the bifunctional modified mRNAs is effected using either saline or a lipid carrier. Once administered, the bifunctional modified mRNA is translated to produce the encoded cytotoxic peptide. Upon degradation of the delivered modified mRNA, the cytotoxic nucleosides are released which also effect therapeutic benefit to the subject.

### Example 34. Modified mRNA Transfection

### A. Reverse Transfection

[1386] For experiments performed in a 24-well collagen-coated tissue culture plate, Keratinocytes are seeded at a cell density of 1×10⁵. For experiments performed in a 96-well collagen-coated tissue culture plate, Keratinocytes are seeded at a cell density of 0.5×10⁵. For each modified mRNA (mmRNA) to be transfected, modified mRNA: RNAIMAX™ is prepared as described and mixed with the cells in the multi-well plate within a period of time, e.g., 6 hours, of cell seeding before cells had adhered to the tissue culture plate.

### B. Forward Transfection

[1387] In a 24-well collagen-coated tissue culture plate, Keratinocytes are seeded at a cell density of 0.7×10⁵. For experiments performed in a 96-well collagen-coated tissue culture plate, Keratinocytes are seeded at a cell density of 0.3×10⁵. Keratinocytes are grown to a confluency of >70% for over 24 hours. For each modified mRNA (mmRNA) to be transfected, modified mRNA: RNAIMAX™ is prepared as described and transfected onto the cells in the multi-well plate over 24 hours after cell seeding and adherence to the tissue culture plate.

C. Modified mRNA Translation Screen: G-CSF ELISA

[1388] Keratinocytes are grown in EPILIFE medium with Supplement S7 from Invitrogen (Carlsbad, CA) at a confluence of >70%. One set of keratinocytes were reverse transfected with 300 ng of the chemically modified mRNA (mmRNA) complexed with RNAIMAX™ from Invitrogen. Another set of keratinocytes are forward transfected with 300 ng modified mRNA complexed with RNAIMAX™ from Invitrogen. The modified mRNA: RNAIMAX™ complex is formed by first incubating the RNA with Supplement-free EPILIFE® media in a 5× volumetric dilution for 10 minutes at room temperature.

[1389] In a second vial, RNAIMAX™ reagent was incubated with Supplement-free EPILIFE® Media in 10× volumetric dilution for 10 minutes at room temperature. The RNA vial was then mixed with the RNAIMAX™ vial and incubated for 20-30 minutes at room temperature before being added to the cells in a drop-wise fashion. Secreted human Granulocyte-Colony Stimulating Factor (G-CSF) concentration in the culture medium is measured at 18 hours post-transfection for each of the chemically modified mRNA in triplicate.

[1390] Secretion of Human G-CSF from transfected human keratinocytes is quantified using an ELISA kit from Invitrogen or R&D Systems (Minneapolis, MN) following the manufacturers recommended instructions.

D. Modified mRNA Dose and Duration: G-CSF ELISA

[1391] Keratinocytes are grown in EPILIFE® medium with Supplement S7 from Invitrogen at a confluence of >70%. Keratinocytes are reverse transfected with either 0 ng, 46.875 ng, 93.75 ng, 187.5 ng, 375 ng, 750 ng, or 1500 ng modified mRNA complexed with the RNAIMAX™ from Invitrogen (Carlsbad, CA). The modified mRNA:RNAIMAX™ complex is formed as described. Secreted human G-CSF concentration in the culture medium is measured at 0, 6, 12, 24, and 48 hours post-transfection for each concentration of each modified mRNA in triplicate. Secretion of human G-CSF from transfected human keratinocytes is quantified using an ELISA kit from Invitrogen or R&D Systems following the manufacturers recommended instructions.

### Example 35. Split Dose Studies

[1392] Studies utilizing multiple subcutaneous or intramuscular injection sites at one time point were designed and performed to investigate ways to increase mmRNA drug exposure and improve protein production. In addition to detection of the expressed protein product, an assessment of the physiological function of proteins was also determined through analyzing samples from the animal tested.

[1393] Surprisingly, it has been determined that split dosing of mmRNA produces greater protein production and phenotypic responses than those produced by single unit dosing or multi-dosing schemes.

[1394] The design of a single unit dose, multi-dose and split dose experiment involved using human erythropoietin (EPO) mmRNA (mRNA shown in SEQ ID NO: 1638; polyA tail of approximately 160 nucleotides not shown in sequence; 5′cap, Cap1) administered in buffer alone. The dosing vehicle (F. buffer) consisted of 150 mM NaCl, 2 mM CaCl₂, 2 mM Na*-phosphate (1.4 mM monobasic sodium phosphate; 0.6 mM dibasic sodium phosphate), and 0.5 mM EDTA, pH 6.5. The pH was adjusted using sodium hydroxide and the final solution was filter sterilized. The mmRNA was modified with 5meC at each cytosine and pseudouridine replacement at each uridine site.

[1395] Animals (n=5) were injected IM (intramuscular) for the single unit dose of 100 ug. For multi-dosing, two schedules were used, 3 doses of 100 ug and 6 doses of 100 ug. For the split dosing scheme, two schedules were used, 3 doses at 33.3 ug and 6 doses of 16.5 ug mmRNA. Control dosing involved use of buffer only at 6 doses. Control mmRNA involved the use of luciferase mmRNA (IVT cDNA sequence shown in SEQ ID NO: 21445; mRNA sequence shown in SEQ ID NO: 21446, polyA tail of approximately 160 nucleotides not shown in sequence, 5′cap, Cap1, fully modified with 5-methylcytosine at each cytosine and pseudouridine replacement at each uridine site) dosed 6 times at 100 ug. Blood and muscle tissue were evaluated 13 hrs post injection.

[1396] Human EPO protein was measured in mouse serum 13 h post I.M. single, multi- or split dosing of the EPO mmRNA in buffer. Seven groups of mice (n=5 mice per group) were treated and evaluated. The results are shown in Table 60.

TABLE 60
Split dose study

| | | | | | Avg. | Polypeptide | Dose |
|---|---|---|---|---|---|---|---|
| | | Dose of | | Total | pmol/mL | per unit drug | Splitting |
| Group | Treatment | mmRNA | | Dose | human EPO | (pmol/ug) | Factor |
| 1 | Human EPO mmRNA | 1 × 100 | ug | 100 ug | 14.3 | .14 | 1 |
| 2 | Human EPO mmRNA | 3 × 100 | ug | 300 ug | 82.5 | .28 | 2 |
| 3 | Human EPO mmRNA | 6 × 100 | ug | 600 ug | 273.0 | .46 | 3.3 |
| 4 | Human EPO mmRNA | 3 × 33.3 | ug | 100 ug | 104.7 | 1.1 | 7.9 |
| 5 | Human EPO mmRNA | 6 × 16.5 | ug | 100 ug | 127.9 | 1.3 | 9.3 |
| 6 | Luciferase mmRNA | 6 × 100 | ug | 600 ug | 0 | — | — |

| | | | | | | |
|---|---|---|---|---|---|---|
| 7 | Buffer Alone | — | — | 0 | — | — |

[1397] The splitting factor is defined as the product per unit drug divided by the single dose product per unit drug (PUD). For example for treatment group 2 the value 0.28 or product (EPO) per unit drug (mmRNA) is divided by the single dose product per unit drug of 0.14. The result is 2. Likewise, for treatment group 4, the value 1.1 or product (EPO) per unit drug (mmRNA) is divided by the single dose product per unit drug of 0.14. The result is 7.9. Consequently, the dose splitting factor (DSF) may be used as an indicator of the efficacy of a split dose regimen. For any single administration of a total daily dose, the DSF should be equal to 1. Therefore any DSF greater than this value in a split dose regimen is an indication of increased efficacy.

[1398] To determine the dose response trends, impact of injection site and impact of injection timing, studies are performed. In these studies, varied doses of 1 ug, 5 ug, 10 ug, 25 ug, 50 ug, and values in between are used to determine dose response outcomes. Split dosing for a 100 ug total dose includes three or six doses of 1.6 ug, 4.2 ug, 8.3 ug, 16.6 ug, or values and total doses equal to administration of the total dose selected.

[1399] Injection sites are chosen from the limbs or any body surface presenting enough area suitable for injection. This may also include a selection of injection depth to target the dermis (Intradermal), epidermis (Epidermal), subcutaneous tissue (SC) or muscle (IM). Injection angle will vary based on targeted delivery site with injections targeting the intradermal site to be 10-15 degree angles from the plane of the surface of the skin, between 20-45 degrees from the plane of the surface of the skin for subcutaneous injections and angles of between 60-90 degrees for injections substantially into the muscle.

### Example 36. Quantification in Exosomes

[1400] The quantity and localization of the mmRNA of the present invention can be determined by measuring the amounts (initial, timecourse, or residual basis) in isolated exosomes. In this study, since the mmRNA are typically codon-optimized and distinct in sequence from endogenous mRNA, the levels of mmRNA are quantitated as compared to endogenous levels of native or wild type mRNA by using the methods of Gibbings, PCT/IB2009/005878, the contents of which are incorporated herein by reference in their entirety.

[1401] In these studies, the method is performed by first isolating exosomes or vesicles preferably from a bodily fluid of a patient previously treated with a polynucleotide, primary construct or mmRNA of the invention, then measuring, in said exosomes, the polynucleotide, primary construct or mmRNA levels by one of mRNA microarray, qRT-PCR, or other means for measuring RNA in the art including by suitable antibody or immunohistochemical methods.

### Example 37. Effect of Modified mRNA on Cellular Viability, Cytotoxicity and Apoptosis

[1402] This experiment demonstrates cellular viability, cytotoxicity and apoptosis for distinct modified mRNA in-vitro transfected Human Keratinocyte cells. Keratinocytes are grown in EPILIFE® medium with Human Keratinocyte Growth Supplement in the absence of hydrocortisone from Invitrogen (Carlsbad, CA) at a confluence of >70%. Keratinocytes are reverse transfected with 0 ng, 46.875 ng, 93.75 ng, 187.5 ng, 375 ng, 750 ng, 1500 ng, 3000 ng, or 6000 ng of modified mRNA complexed with RNAIMAX™ from Invitrogen. The modified mRNA:RNAIMAX™ complex is formed. Secreted human G-CSF concentration in the culture medium is measured at 0, 6, 12, 24, and 48 hours post-transfection for each concentration of each modified m RNA in triplicate. Secretion of human G-CSF from transfected human keratinocytes is quantified using an ELISA kit from Invitrogen or R&D Systems following the manufacturers recommended instructions.

[1403] Cellular viability, cytotoxicity and apoptosis is measured at 0, 12, 48, 96, and 192 hours post-transfection using the APOTOX-GLO™ kit from Promega (Madison, WI) according to manufacturer instructions.

### Example 38. Detection of a Cellular Innate Immune Response to Modified mRNA Using an ELISA Assay

[1404] An enzyme-linked immunosorbent assay (ELISA) for Human Tumor Necrosis Factor-α (TNF-α), Human Interferon-β (IFN-β) and Human Granulocyte-Colony Stimulating Factor (G-CSF) secreted from in vitro-transfected Human Keratinocyte cells is tested for the detection of a cellular innate immune response. Keratinocytes are grown in EPILIFE® medium with Human Keratinocyte Growth Supplement in the absence of hydrocortisone from Invitrogen (Carlsbad, CA) at a confluence of >70%. Secreted TNF-α keratinocytes are reverse transfected with 0 ng, 93.75 ng, 1 87.5 ng, 375 ng, 750 ng, 1500 ng or 3000 ng of the chemically modified mRNA (mmRNA) complexed with RNAIMAX™ from Invitrogen as described in triplicate. Secreted TNF-α in the culture medium is measured 24 hours post-transfection for each of the chemically modified mRNA using an ELISA kit from Invitrogen according to the manufacturer protocols.

[1405] Secreted IFN-β in the same culture medium is measured 24 hours post-transfection for each of the chemically modified mRNA using an ELISA kit from Invitrogen according to the manufacturer protocols. Secreted human G-CSF concentration in the same culture medium is measured at 24 hours post-transfection for each of the chemically modified mRNA. Secretion of human G-CSF from transfected human keratinocytes is quantified using an ELISA kit from Invitrogen or R&D Systems (Minneapolis, MN) following the manufacturers recommended instructions. These data indicate which modified mRNA (mmRNA) are capable eliciting a reduced cellular innate immune response in comparison to natural and other chemically modified polynucleotides or reference compounds by measuring exemplary type 1 cytokines TNF-α and IFN-β.

### Example 39. Human Granulocyte—Colony Stimulating Factor (G-CSF) Modified mRNA-Induced Cell Proliferation Assay

[1406] Human keratinocytes are grown in EPILIFE® medium with Supplement S7 from Invitrogen at a confluence of >70% in a 24-well collagen-coated TRANSWELL® (Corning, Lowell, MA) co-culture tissue culture plate. Keratinocytes are reverse transfected with 750 ng of the indicated chemically modified mRNA (mmRNA) complexed with RNAIMAX from Invitrogen as described in triplicate. The modified mRNA:RNAIMAX complex is formed as described. Keratinocyte media is exchanged 6-8 hours post-transfection. 42-hours post-transfection, the 24-well TRANSWELL® plate insert with a 0.4 μm-pore semi-permeable polyester membrane is placed into the human G-CSF modified mRNA-transfected keratinocyte containing culture plate

[1407] Human myeloblast cells, Kasumi-1 cells or KG-1 (0.2×10⁵ cells), are seeded into the insert well and cell proliferation is quantified 42 hours post-co-culture initiation using the CyQuant Direct Cell Proliferation Assay (Invitrogen, Carlsbad, CA) in a 100-120 μl volume in a 96-well plate. Modified mRNA-encoding human G-CSF-induced myeloblast cell proliferation is expressed as a percent cell proliferation normalized to untransfected keratinocyte/myeloblast co-culture control wells. Secreted human G-CSF concentration in both the keratinocyte and myeloblast insert co-culture wells is measured at 42 hours post-co-culture initiation for each modified mRNA in duplicate. Secretion of human G-CSF is quantified using an ELISA kit from Invitrogen following the manufacturer recommended instructions.

[1408] Transfected human G-CSF modified mRNA in human keratinocyte feeder cells and untransfected human myeloblast cells are detected by RT-PCR. Total RNA from sample cells is extracted and lysed using RNEASY® kit (Qiagen, Valencia, CA) according to the manufacturer instructions. Extracted total RNA is submitted to RT-PCR for specific amplification of modified mRNA-G-CSF using PROTOSCRIPT® M-MuLV Taq RT-PCR kit (New England BioLabs, Ipswich, MA) according to the manufacturer instructions with human G-CSF-specific primers. RT-PCR products are visualized by 1.2% agarose gel electrophoresis.

### Example 40: Co-Culture Assay

[1409] Modified mRNA comprised of chemically-distinct modified nucleotides encoding human Granulocyte-Colony Stimulating Factor (G-CSF) may stimulate the cellular proliferation of a transfection incompetent cell in a co-culture environment. The co-culture includes a highly transfectable cell type such as a human keratinocyte and a transfection incompetent cell type such as a white blood cell (WBC). The modified mRNA encoding G-CSF are transfected into the highly transfectable cell allowing for the production and secretion of G-CSF protein into the extracellular environment where G-CSF acts in a paracrine-like manner to stimulate the white blood cell expressing the G-CSF receptor to proliferate. The expanded WBC population may be used to treat immune-compromised patients or partially reconstitute the WBC population of an immunosuppressed patient and thus reduce the risk of opportunistic infections.

[1410] In another example, a highly transfectable cell such as a fibroblast are transfected with certain growth factors support and simulate the growth, maintenance, or differentiation of poorly transfectable embryonic stem cells or induced pluripotent stem cells.

### Example 41: Detection Assays of Human IgG Antibodies

### A. ELISA Detection of Human IgG Antibodies

[1411] This example describes an ELISA for Human IgG from Chinese Hamster Ovary's (CHO) and Human Embryonic Kidney (HEK, HER-2 Negative) 293 cells transfected with human IgG modified mRNA (mmRNA). The Human Embryonic Embryonic Kidney (HEK) 293 are grown in CD 293 Medium with Supplement of L-Glutamine from Invitrogen until they reach a confluence of 80-90%. The CHO cells are grown in CD CHO Medium with Supplement of L-Glutamine, Hypoxanthine and Thymidine. In one aspect, 2×106 cells are transfected with 24 μg modified mRNA complexed with RNAIMAX™ from Invitrogen in a 75 cm2 culture flask from Corning in 7 ml of medium. In another aspect, 80,000 cells are transfected with 1 μg modified mRNA complexed with RNAIMAX™ from Invitrogen in a 24-well plate. The modified mRNA:RNAIMAX™ complex is formed by incubating in a vial the mmRNA with either the CD 293 or CD CHO medium in a 5× volumetric dilution for 10 minutes at room temperature. In a second vial, RNAIMAX™ reagent is incubated with CD 293 medium or CD CHO medium in a 10× volumetric dilution for 10 minutes at room temperature. The mmRNA vial is then mixed with the RNAIMAX™ vial and incubated for 20-30 minutes at room temperature before it is added to the CHO or HEK cells in a drop-wise fashion. The culture supernatants are stored at 4 degrees celsius. The concentration of the secreted human IgG in the culture medium in the 24 μg mmRNA transfections is measured at 12, 24, 36 hours post-transfection and the 1 μg mmRNA transfection is measured at 36 hours. Secretion of Trastuzumab from transfected HEK 293 cells is quantified using an ELISA kit from Abcam (Cambridge, MA) following the manufacturers recommended instructions. The data shows that a Humanized IgG antibody (such as Trastuzumab) mmRNA is capable of being translated in HEK Cells and that Trastuzumab is secreted out of the cells and released into the extracellular environment. Furthermore, the data demonstrate that transfection of cells with mmRNA encoding Trastuzumab for the production of secreted protein can be scaled up to a bioreactor or large cell culture conditions.

B. Western Detection of Modified mRNA Produced Human IgG Antibody

[1412] A Western Blot of CHO-K1 cells is co-transfected with 1 μg each of Heavy and Light Chain of Trastuzumab modified mRNA (mmRNA). CHO cells are grown using standard protocols in 24-well plates. The cell supernatants or cell lysates are collected 24 hours post-transfection, separated on a 12% SDS-Page gel and transferred onto a nitrocellulose membrane using the IBOT® by Invitrogen (Carlsbad, CA). The cells are incubated with a first conjugation of a rabbit polyclonal antibody to Human IgG conjugated to DYLIGHT594 (ab96904, abcam, Cambridge, MA) and a second conjugation of a goat polyclonal antibody to Rb IgG which is conjugated to alkaline phosphatase. After incubation, the antibody is detected using Novex® alkaline phosphatase chromogenic substrate by Invitrogen (Carlsbad, CA).

C. Cell Immuno Staining of Modified mRNA Produced Trastuzumab and Rituximab

[1413] CHO-K1 cells are co-transfected with 500 ng each of Heavy and Light Chain of either Trastuzumab or Rituximab. Cells are grown in F-12K Medium from GIBCO® (Grand Island, NY) and 10% FBS. Cells are fixed with 4% paraformaldehyde in PBS, permeabilized with 0.1% Triton X-100 in PBS for 5-10 minutes at room temperature and cells are washed 3 times with room temperature PBS. Trastuzumab and Rituximab staining is performed using rabbit polyclonal antibody to Human IgG conjugated to DYLIGHT®594 (ab96904, abcam, Cambridge, MA) according to the manufacture's recommended dilutions. Nuclear DNA staining is performed with DAPI dye from Invitrogen (Carlsbad, CA). The protein for Trastuzumab and Rituximab is translated and localized to the cytoplasm upon modified mRNA transfections. Pictures are taken 13 hours post-transfection.

D. Binding Immunoblot Assay for Modified mRNA Produced Trastuzumab and Rituximab

[1414] Trastuzumab and Rituximab are detected using a binding immunoblot detection assay. Varying concentrations (100 ng/ul to 0 ng/ul) of the ErB2 peptide (ab40048, abeam, Cambridge, MA), antigen for Trastuzumab and the CD20 peptide (ab97360, abeam, Cambridge, MA), antigen for Rituximab are run on a 12% SDS-Page gel and transferred onto a membrane using the iBlot from Invitrogen. The membranes are incubated for 1 hour with their respective cell supernatants from CHO-K1 cells which are co-transfected with 500 ng each of Heavy and Light Chain of either Trastuzumab or Rituximab. The membranes are blocked with 1% BSA and a secondary anti-human IgG antibody conjugated to alkaline phosphatase (abcam, Cambridge, MA) is added. Antibody detection is conducted using the NOVEX alkaline phosphatase chromogenic substrate by Invitrogen (Carlsbad, CA). The data shows that a humanized IgG antibodies generated from modified mRNA is capable of recognizing and binding to their respective antigens.

### E. Cell Proliferation Assay

[1415] The SK-BR-3 cell line, an adherent cell line derived from a human breast adenocarcinoma, which overexpresses the HER2/neu receptor can be used to compare the anti-proliferative properties of modified mRNA (mmRNA) generated Trastuzumab. Varying concentrations of purified Trastuzumab generated from modified mRNA and trastuzumab are be added to cell cultures, and their effects on cell growth are be assessed in triplicate cytotoxicity and viability assays.

### Example 42: Bulk Transfection of Modified mRNA into Cell Culture

### A. Cationic Lipid Delivery Vehicles

[1416] RNA transfections are carried out using RNAIMAX™ (Invitrogen, Carlsbad, CA) or TRANSIT-mRNA (Mirus Bio, Madison, WI) cationic lipid delivery vehicles. RNA and reagent are first diluted in Opti-MEM basal media (Invitrogen, Carlsbad, CA). 100 ng/uL RNA is diluted 5× and 5 μL of RNAIMax per g of RNA is diluted 10×. The diluted components are pooled and incubated 15 minutes at room temperature before they are dispensed to culture media. For TRANSIT-mRNA transfections, 100 ng/uL RNA is diluted 10× in Opti-MEM and BOOST reagent is added (at a concentration of 2 μL per g of RNA), TRANSIT-mRNA is added (at a concentration of 2 μL per g of RNA), and then the RNA-lipid complexes are delivered to the culture media after a 2-minute incubation at room temperature. RNA transfections are performed in Nutristem xenofree hES media (Stemgent, Cambridge, MA) for RiPS derivations, Dermal Cell Basal Medium plus Keratinocyte Growth Kit (ATCC) for keratinocyte experiments, and Opti-MEM plus 2% FBS for all other experiments. Successful introduction of a modified mRNA (mmRNA) into host cells can be monitored using various known methods, such as a fluorescent marker, such as Green Fluorescent Protein (GFP). Successful transfection of a modified mRNA can also be determined by measuring the protein expression level of the target polypeptide by e.g., Western Blotting or immunocytochemistry. Similar methods may be followed for large volume scale-up to multi-liter (5-10,000L) culture format following similar RNA-lipid complex ratios.

B. Electroporation Delivery of Exogenous Synthetic mRNA Transcripts

[1417] Electroporation parameters are optimized by transfecting MRC-5 fibroblasts with in vitro synthetic modified mRNA (mmRNA) transcripts and measuring transfection efficiency by quantitative RT-PCR with primers designed to specifically detect the exogenous transcripts. Discharging a 150 uF capacitor charged to F into 2.5×10⁶ cells suspended in 50 μl of Opti-MEM (Invitrogen, Carlsbad, CA) in a standard electroporation cuvette with a 2 mm gap is sufficient for repeated delivery in excess of 10,000 copies of modified mRNA transcripts per cell, as determined using the standard curve method, while maintaining high viability (>70%). Further experiments may reveal that the voltage required to efficiently transfect cells with mmRNA transcripts can depend on the cell density during electroporation. Cell density may vary from 1×10⁶ cell/50 μl to a density of 2.5×10⁶ cells/50 μl and require from 110V to 145V to transfect cells with similar efficiencies measured in transcript copies per cell. Large multi-liter (5-10,000 L) electroporation may be performed similar to large volume flow electroporation strategies similar to methods described with the above described constraints (Li et al., 2002; Geng et al., 2010).

### Example 43: In Vivo Delivery Using Lipoplexes

### A. Human EPO Modified RNA Lipoplex

[1418] A formulation containing 100 μg of modified human erythropoietin mRNA(mRNA shown in SEQ ID NO: 1638; polyA tail of approximately 160 nucleotides not shown in sequence; 5′cap, Cap1) (EPO; fully modified 5-methylcytosine; N1-methyl-pseudouridine) was lipoplexed with 30% by volume of RNAIMAX™ (Lipoplex-h-Epo-46; Generation 2 or Gen2) in 50-70 uL delivered intramuscularly to four C57/BL6 mice. Other groups consisted of mice receiving an injection of the lipoplexed modified luciferase mRNA (Lipoplex-luc) (IVT cDNA sequence shown in SEQ ID NO: 21445; mRNA sequence shown in SEQ ID NO: 21446, polyA tail of approximately 160 nucleotides not shown in sequence, 5′cap, Cap1, fully modified with 5-methylcytosine at each cytosine and pseudouridine replacement at each uridine site) which served as a control containing 100 μg of modified luciferase mRNA was lipoplexed with 30% by volume of RNAiMAX™ or mice receiving an injection of the formulation buffer as negative control at a dose volume of 65 ul. 13 hours after the intramuscular injection, serum was collected from each mouse to measure the amount of human EPO protein in the mouse serum by human EPO ELISA and the results are shown in Table 61.

TABLE 61
Human EPO Production (IM Injection Route)

| Formualtion | Average |
|---|---|
| Lipoplex-h-Epo-46 | 251.95 |
| Lipoplex-Luc | 0 |
| Formulation Buffer | 0 |

### B. Human G-CSF Modified RNA Lipoplex

[1419] A formulation containing 100 μg of one of two versions of modified human G-CSF mRNA(mRNA sequence shown in SEQ ID NO: 21438; polyA tail of approximately 160 nucleotides not shown in sequence; 5′cap, Cap1) (G-CSF fully modified with 5-methylcytosine and pseudouridine (G-CSF) or G-CSF fully modified with 5-methylcytosine and N1-methyl-pseudouridine (G-CSF-N1) lipoplexed with 30% by volume of RNAIMAX™ and delivered in 150 uL intramuscularly (IM), in 150 uL subcutaneously (S.C) and in 225 uL intravenously (IV) to C57/BL6 mice.

[1420] Three control groups were administered either 100 μg of modified luciferase mRNA (IVT cDNA sequence shown in SEQ ID NO: 21445; mRNA sequence shown in SEQ ID NO: 21446, polyA tail of approximately 160 nucleotides not shown in sequence, 5′cap, Cap1, fully modified with 5-methylcytosine at each cytosine and pseudouridine replacement at each uridine site) intramuscularly (Luc-unsp I.M.) or 150 μg of modified luciferase mRNA intravenously (Luc-unsp IV.) or 150 uL of the formulation buffer intramuscularly (Buffer I.M.). 6 hours after administration of a formulation, serum was collected from each mouse to measure the amount of human G-CSF protein in the mouse serum by human G-CSF ELISA and the results are shown in Table 62.

[1421] These results demonstrate that both 5-methylcytosine/pseudouridine and 5-methylcytosine/N1-methyl-pseudouridine modified human G-CSF mRNA can result in specific human G-CSF protein expression in serum when delivered via IV. or I.M. route of administration in a lipoplex formulation.

TABLE 62
Human G-CSF in Serum (I.M., I.V., S.C. Injection Route)

| Formulation | Route | G-CSF (pg/ml) |
|---|---|---|
| G-CSF | I.M. | 85.6 |
| G-CSF N1 | I.M. | 40.1 |
| G-CSF | S.C. | 3.9 |
| G-CSF N1 | S.C. | 0.0 |
| G-CSF | I.V. | 31.0 |
| G-CSF N1 | I.V. | 6.1 |
| Luc-unsp | I.M. | 0.0 |
| Luc-unsp | I.V. | 0.0 |
| Buffer | I.M. | 0.0 |

### C. Human G-CSF Modified RNA Lipoplex Comparison

[1422] A formulation containing 100 μg of either modified human G-CSF mRNA lipoplexed with 30% by volume of RNAIMAX™ with a 5-methylcytosine (5 mc) and a pseudouridine (ψ) modification (G-CSF-Gen1-Lipoplex), modified human G-CSF mRNA with a 5 mc and ψ modification in saline (G-CSF-Gen1-Saline), modified human G-CSF mRNA with a N1-5-methylcytosine (N1-5me) and a ψ modification lipoplexed with 30% by volume of RNAIMAX™ (G-CSF-Gen2-Lipoplex), modified human G-CSF mRNA with a N1-5 mc and ψ modification in saline (G-CSF-Gen2-Saline), modified luciferase with a 5 mc and ψ modification lipoplexed with 30% by volume of RNAIMAX™ (Luc-Lipoplex), or modified luciferase mRNA with a a 5 mc and ψ modification in saline (Luc-Saline) was delivered intramuscularly (IM.) or subcutaneously (S.C.) and a control group for each method of administration was giving a dose of 80 uL of the formulation buffer (F. Buffer) to C57/BL6 mice. 13 hours post injection serum and tissue from the site of injection were collected from each mouse and analyzed by G-CSF ELISA to compare human G-CSF protein levels. The results of the human G-CSF protein in mouse serum from the intramuscular administration, and the subcutaneous administration results are shown in Table 63.

[1423] These results demonstrate that 5-methylcytosine/pseudouridine and 5-methylcytosine/N1-methyl-pseudouridine modified human G-CSF mRNA can result in specific human G-CSF protein expression in serum when delivered via I.M. or S.C. route of administration whether in a saline formulation or in a lipoplex formulation. As shown in Table 63, 5-methylcytosine/N1-methyl-pseudouridine modified human G-CSF mRNA generally demonstrates increased human G-CSF protein production relative to 5-methylcytosine/pseudouridine modified human G-CSF mRNA.

TABLE 63
Human G-CSF Protein in Mouse Serum

| | G-CSF (pg/ml) | |
|---|---|---|
| Formulation | I.M. Injection Route | S.C. Injenction Route |
| G-CSF-Gen1-Lipoplex | 13.988 | 42.855 |
| G-CSF-Gen1-saline | 9.375 | 4.614 |
| G-CSF-Gen2-lipoplex | 75.572 | 32.107 |
| G-CSF-Gen2-saline | 20.190 | 45.024 |
| Luc lipoplex | 0 | 3.754 |
| Luc saline | 0.0748 | 0 |
| F. Buffer | 4.977 | 2.156 |

D. mCherry Modified RNA Lipoplex Comparison

### Intramuscular and Subcutaneous Administration

[1424] A formulation containing 100 μg of either modified mCherry mRNA (mRNA sequence shown in SEQ ID NO: 21439; polyA tail of approximately 160 nucleotides not shown in sequence; 5′cap, Cap1) lipoplexed with 30% by volume of RNAIMAX™ or modified mCherry mRNA in saline is delivered intramuscularly and subcutaneously to mice. A formulation buffer is also administered to a control group of mice either intramuscularly or subcutaneously. The site of injection on the mice may be collected 17 hours post injection for sectioning to determine the cell type(s) responsible for producing protein.

### Intravitreal Administration

[1425] A formulation containing 10 μg of either modified mCherry mRNA lipoplexed with RNAIMAX™, modified mCherry mRNA in a formulation buffer, modified luciferase mRNA lipoplexed with RNAMAX™, modified luciferase mRNA in a formulation buffer can be administered by intravitreal injection (IVT) in rats in a dose volume of 5 μl/eye. A formulation buffer is also administrered by IVT to a control group of rats in a dose volume of 5 μl/eye. Eyes from treated rats can be collected after 18 hours post injection for sectioning and lysating to determine whether mmRNA can be effectively delivered in vivo to the eye and result in protein production, and to also determine the cell type(s) responsible for producing protein in vivo.

### Intranasal Administration

[1426] A formulation containing 100 μg of either modified mCherry mRNA lipoplexed with 30% by volume of RNAIMAX™, modified mCherry mRNA in saline, modified luciferase mRNA lipoplexed with 30% by volume of RNAIMAX™ or modified luciferase mRNA in saline is delivered intranasally. A formulation buffer is also administered to a control group intranasally. Lungs may be collected about 13 hours post instillation for sectioning (for those receiving mCherry mRNA) or homogenization (for those receiving luciferase mRNA). These samples will be used to determine whether mmRNA can be effectively delivered in vivo to the lungs and result in protein production, and to also determine the cell type(s) responsible for producing protein in vivo.

### Example 44: In Vivo Delivery Using Varying Lipid Ratios

[1427] Modified mRNA was delivered to C57/BL6 mice to evaluate varying lipid ratios and the resulting protein expression. Formulations of 100 μg modified human EPO mRNA (mRNA shown in SEQ ID NO: 1638; polyA tail of approximately 160 nucleotides not shown in sequence; 5′cap, Cap1; fully modified with 5-methylcytosine and pseudouridine) lipoplexed with 10%, 30% or 50% RNAIMAX™, 100 μg modified luciferase mRNA (IVT cDNA sequence shown in SEQ ID NO: 21445; mRNA sequence shown in SEQ ID NO: 21446, polyA tail of approximately 160 nucleotides not shown in sequence, 5′cap, Cap1, fully modified with 5-methylcytosine at each cytosine and pseudouridine replacement at each uridine site) lipoplexed with 10%, 30% or 50% RNAIMAX™ or a formulation buffer were administered intramuscularly to mice in a single 70 μl dose. Serum was collected 13 hours post injection to undergo a human EPO ELISA to determine the human EPO protein level in each mouse. The results of the human EPO ELISA, shown in Table 64, show that modified human EPO expressed in the muscle is secreted into the serum for each of the different percentage of RNAIMAX™

TABLE 64
Human EPO Protein in Mouse Serum (IM Injection Route)

| Formulation | EPO (pg/ml) |
|---|---|
| Epo + 10% RNAiMAX | 11.4 |
| Luc + 10% RNAiMAX | 0 |
| Epo + 30% RNAiMAX | 27.1 |
| Luc + 30% RNAiMAX | 0 |
| Epo + 50% RNAiMAX | 19.7 |
| Luc + 50% RNAiMAX | 0 |
| F. Buffer | 0 |

### Example 45: Intramuscular and Subcutaneous In Vivo Delivery in Mammals

[1428] Modified human EPO mRNA (mRNA sequence shown in SEQ ID NO: 1638; polyA tail of approximately 160 nucleotides not shown in sequence; 5′cap, Cap1; fully modified with 5-methylcytosine and pseudouridine) formulated in formulation buffer was delivered to either C57/BL6 mice or Sprague-Dawley rats to evaluate the dose dependency on human EPO production. Rats were intramuscularlly injected with 50 μl of the modified human EPO mRNA (h-EPO), modified luciferase mRNA (Luc) (IVT cDNA sequence shown in SEQ ID NO: 21445; mRNA sequence shown in SEQ ID NO: 21446, polyA tail of approximately 160 nucleotides not shown in sequence, 5′cap, Cap1, fully modified with 5-methylcytosine at each cytosine and pseudouridine replacement at each uridine site) or the formulation buffer (F. Buffer) as described in the dosing chart Table 65.

[1429] Mice were intramuscularly or subcutaneously injected with 50 μl of the modified human EPO mRNA (h-EPO), modified luciferase mRNA (Luc) or the formulation buffer (F. Buffer) as described in the dosing chart Table 66. 13 hours post injection blood was collected and serum was analyzed to determine the amount human EPO for each mouse or rat. The average and geometric mean in pg/ml for the rat study are also shown in Table 65.

TABLE 65
Rat Study

| | | | | Geometric- |
|---|---|---|---|---|
| | | | | mean |
| | Group | Dose (ug) | Avg. pg/ml | pg/ml |
| h-EPO | G#1 | 150 | 67.7 | 67.1 |
| h-EPO | G#2 | 100 | 79.4 | 66.9 |
| h-EPO | G#3 | 50 | 101.5 | 85.4 |
| h-EPO | G#4 | 10 | 46.3 | 31.2 |
| h-EPO | G#5 | 1 | 28.7 | 25.4 |
| Luc | G#6 | 100 | 24.5 | 22.4 |
| F. Buffer | G#7 | — | 18.7 | 18.5 |

TABLE 66
Mouse Study

| | | | | Average |
|---|---|---|---|---|
| | | | | Level in |
| | | | | serum |
| Route | Treatment | Group | Dose | pg/ml |
| IM | h-EPO | 1 | 100 μg | 96.2 |
| IM | h-EPO | 2 | 50 μg | 63.5 |
| IM | h-EPO | 3 | 25 μg | 18.7 |
| IM | h-EPO | 4 | 10 μg | 25.9 |
| IM | h-EPO | 5 | 1 μg | 2.6 |
| IM | Luc | 6 | 100 μg | 0 |
| IM | F. Buffer | 7 | — | 1.0 |
| SC | h-EPO | 1 | 100 μg | 72.0 |
| SC | Luc | 2 | 100 μg | 26.7 |
| SC | F. Buffer | 3 | — | 17.4 |

### Example 46: Duration of Activity after Intramuscular In Vivo Delivery

[1430] Modified human EPO mRNA (mRNA sequence shown in SEQ ID NO: 1638; polyA tail of approximately 160 nucleotides not shown in sequence; 5′cap, Cap1; fully modified with 5-methylcytosine and pseudouridine) formulated in formulation buffer was delivered to Sprague-Dawley rats to determine the duration of the dose response. Rats were intramuscularly injected with 50 μl of the modified human EPO mRNA (h-EPO), modified luciferase mRNA(IVT cDNA sequence shown in SEQ ID NO: 21445; mRNA sequence shown in SEQ ID NO: 21446, polyA tail of approximately 160 nucleotides not shown in sequence, 5′cap, Cap1, fully modified with 5-methylcytosine at each cytosine and pseudouridine replacement at each uridine site) (Luc) or the formulation buffer (F. Buffer) as described in the dosing chart Table 67. The rats were bled 2, 6, 12, 24, 48 and 72 hours after the intramuscular injection to determine the concentration of human EPO in serum at a given time. The average and geometric mean in pg/ml for this study are also shown in Table 67.

TABLE 67
Dosing Chart

| | | | Avg. | Geometric-mean |
|---|---|---|---|---|
| | Group | Dose (ug) | pg/ml | (pg/ml) |
| h-EPO | 2 hour | 100 | 59.6 | 58.2 |
| h-EPO | 6 hour | 100 | 68.6 | 55.8 |
| h-EPO | 12 hour | 100 | 87.4 | 84.5 |
| h-EPO | 24 hour | 100 | 108.6 | 95.3 |
| h-EPO | 48 hour | 100 | 77.9 | 77.0 |
| h-EPO | 72 hour | 100 | 80.1 | 75.8 |
| Luc | 24, 48 and 72 hour | 100 | 37.2 | 29.2 |
| F. Buffer | 24, 48 and 72 hour | — | 48.9 | 10.4 |

### Example 47: Routes of Administration

[1431] Further studies were performed to investigate dosing using different routes of administration. Following the protocol outlined in Example 35, 4 mice per group were dosed intramuscularly (IM.), intravenously (IV) or subcutaneously (S.C.) by the dosing chart outlined in Table 68. Serum was collected 13 hours post injection from all mice, tissue was collected from the site of injection from the intramuscular and subcutaneous group and the spleen, liver and kidneys were collected from the intravenous group. The results from the intramuscular group and the subcutaneous group results are shown in Table 69.

TABLE 68
Dosing Chart

| | | | | Total | Dosing |
|---|---|---|---|---|---|
| Group | Treatment | Route | Dose of mmRNA | Dose | Vehicle |
| 1 | Lipoplex-human EPO | I.M. | 4 × 100 ug + 30% | 4 × 70 ul | Lipoplex |
| | mmRNA | | Lipoplex | | |
| 2 | Lipoplex-human EPO | I.M. | 4 × 100 ug | 4 × 70 ul | Buffer |
| | mmRNA | | | | |
| 3 | Lipoplex-human EPO | S.C. | 4 × 100 ug + 30% | 4 × 70 ul | Lipoplex |
| | mmRNA | | Lipoplex | | |
| 4 | Lipoplex-human EPO | S.C. | 4 × 100 ug | 4 × 70 ul | Buffer |
| | mmRNA | | | | |
| 5 | Lipoplex-human EPO | I.V. | 200 ug + 30% | 140 ul | Lipoplex |
| | mmRNA | | Lipoplex | | |
| 6 | Lipoplexed-Luciferase | I.M. | 100 ug + 30% | 4 × 70 ul | Lipoplex |
| | mmRNA | | Lipoplex | | |
| 7 | Lipoplexed-Luciferase | I.M. | 100 ug | 4 × 70 ul | Buffer |
| | mmRNA | | | | |
| 8 | Lipoplexed-Luciferase | S.C. | 100 ug + 30% | 4 × 70 ul | Lipoplex |
| | mmRNA | | Lipoplex | | |
| 9 | Lipoplexed-Luciferase | S.C. | 100 ug | 4 × 70 ul | Buffer |
| | mmRNA | | | | |
| 10 | Lipoplexed-human EPO | I.V. | 200 ug + 30% | 140 ul | Lipoplex |
| | mmRNA | | Lipoplex | | |
| 11 | Formulation Buffer | I.M. | 4x multi dosing | 4 × 70 ul | Buffer |

TABLE 69
Human EPO Protein in Mouse Serum (I.M. Injection Route)

| | EPO (pg/ml) | |
|---|---|---|
| Formulation | I.M. Injection Route | S.C. Injection Route |
| Epo-Lipoplex | 67.115 | 2.154 |
| Luc-Lipoplex | 0 | 0 |
| Epo-Saline | 100.891 | 11.37 |
| Luc-Saline | 0 | 0 |
| Formulation Buffer | 0 | 0 |

### Example 48. Rapidly Eliminated Livid Nanoparticle (reLNP) Studies

A. Formulation of Modified RNA reLNPs

[1432] Solutions of synthesized lipid, 1,2-distearoyl-3-phosphatidylcholine (DSPC) (Avanti Polar Lipids, Alabaster, AL), cholesterol (Sigma-Aldrich, Taufkirchen, Germany), and α-[3′-(1,2-dimyristoyl-3-propanoxy)-carboxamide-propyl]-ω-methoxy-polyoxyethylene (PEG-c-DOMG) (NOF, Bouwelven, Belgium) are prepared and stored at −20° C. The synthesized lipid is selected from DLin-DMA with an internal ester, DLin-DMA with a terminal ester, DLin-MC3-D3MA-internal ester, and DLin-MC3-D3MA with a terminal ester. The reLNPs are combined to yield a molar ratio of 50:10:38.5:1.5 (reLNP: DSPC: Cholesterol: PEG-c-DOMG). Formulations of the reLNPs and modified mRNA are prepared by combining the lipid solution with the modified mRNA solution at total lipid to modified mRNA weight ratio of 10:1, 15:1, 20:1 and 30:1.

### B. Characterization of Formulations

[1433] A Zetasizer Nano ZS (Malvern Instruments Ltd, Malvern, Worcestershire, UK) is used to determine the particle size, the polydispersity index (PDI) and the zeta potential of the modified mRNA nanoparticles in 1×PBS in determining particle size and 15 mM PBS in determining zeta potential.

[1434] Ultraviolet-visible spectroscopy is used to determine the concentration of modified mRNA nanoparticle formulation. After mixing, the absorbance spectrum of the solution is recorded between 230 nm and 330 nm on a DU 800 spectrophotometer (Beckman Coulter, Beckman Coulter, Inc., Brea, CA). The modified RNA concentration in the nanoparicle formulation is calculated based on the extinction coefficient of the modified RNA used in the formulation and on the difference between the absorbance at a wavelength of 260 nm and the baseline value at a wavelength of 330 nm.

[1435] QUANT-IT™ RIBOGREEN® RNA assay (Invitrogen Corporation Carlsbad, CA) is used to evaluate the encapsulation of modified RNA by the nanoparticle. The samples are diluted, transferred to a polystyrene 96 well plate, then either a TE buffer or a 2% Triton X-100 solution is added. The plate is incubated and the RIBOGREEN® reagent is diluted in TE buffer, and of this solution is added to each well. The fluorescence intensity is measured using a fluorescence plate reader (Wallac Victor 1420 Multilablel Counter; Perkin Elmer, Waltham, MA) The fluorescence values of the reagent blank are subtracted from each of the samples and the percentage of free modified RNA is determined by dividing the fluorescence intensity of the intact sample by the fluorescence value of the disrupted sample.

### C. In Vitro Incubation

[1436] Human embryonic kidney epithelial (HEK293) and hepatocellular carcinoma epithelial (HepG2) cells (LGC standards GmbH, Wesel, Germany) are seeded on 96-well plates (Greiner Bio-one GmbH, Frickenhausen, Germany) and plates for HEK293 cells are precoated with collagen type1. HEK293 are seeded at a density of about 30,000 and HepG2 are seeded at a density of about 35,000 cells per well in 100 μl cell culture medium. Formulations containing mCherry mRNA (mRNA sequence shown in SEQ ID NO: 21439; polyA tail of approximately 160 nucleotides not shown in sequence; 5′cap, Cap1) are added directly after seeding the cells and incubated. The mCherry cDNA with the T7 promoter, 5′untranslated region (UTR) and 3′ UTR used in in vitro transcription (IVT) is given in SEQ ID NO: 21440.

[1437] Cells are harvested by transferring the culture media supernatants to a 96-well Pro-Bind U-bottom plate (Beckton Dickinson GmbH, Heidelberg, Germany). Cells are trypsinized with ½ volume Trypsin/EDTA (Biochrom AG, Berlin, Germany), pooled with respective supernatants and fixed by adding one volume PBS/2% FCS (both Biochrom AG, Berlin, Germany)/0.5% formaldehyde (Merck, Darmstadt, Germany). Samples are then submitted to a flow cytometer measurement with an excitation laser and a filter for PE-Texas Red in a LSRII cytometer (Beckton Dickinson GmbH, Heidelberg, Germany). The mean fluorescence intensity (MFI) of all events and the standard deviation of four independent wells are presented in for samples analyzed.

### D. In Vivo Formulation Studies

[1438] Mice are administered intravenously a single dose of a formulation containing a modified mRNA and a reLNP. The modified mRNA administered to the mice is selected from G-CSF (mRNA sequence shown in SEQ ID NO: 21438; polyA tail of approximately 160 nucleotides not shown in sequence; 5′cap, Cap1), Factor IX (mRNA shown in SEQ ID NO: 1622; polyA tail of approximately 160 nucleotides not shown in sequence; 5′cap, Cap1) or mCherry (mRNA sequence shown in SEQ ID NO:21439; polyA tail of approximately 160 nucleotides not shown in sequence; 5′cap, Cap1).

[1439] The mice are injected with 100 ug, 10 ug or 1 ug of the formulated modified mRNA and are sacrificed 8 hours after they are administered the formulation. Serum from the mice administered formulations containing human G-CSF modified mRNA are measured by specific G-CSF ELISA and serum from mice administered human Factor IX modified RNA is analyzed by specific factor IX ELISA or chromogenic assay. The liver and spleen from the mice administered with mCherry modified mRNA are analyzed by immunohistochemistry (IHC) or fluorescence-activated cell sorting (FACS). As a control, a group of mice are not injected with any formulation and their serum and tissue are collected analyzed by ELISA, FACS and/or IHC.

### Example 49. In Vitro Transfection of VEGF-A

[1440] Human vascular endothelial growth factor-isoform A (VEGF-A) modified mRNA (mRNA sequence shown in SEQ ID NO: 1672; polyA tail of approximately 160 nucleotides not shown in sequence; 5′cap, Cap1) was transfected via reverse transfection in Human Keratinocyte cells in 24 multi-well plates. Human Keratinocytes cells were grown in EPILIFE® medium with Supplement S7 from Invitrogen (Carlsbad, CA) until they reached a confluence of 50-70%. The cells were transfected with 0, 46.875, 93.75, 187.5, 375, 750, and 1500 ng of modified mRNA (mmRNA) encoding VEGF-A which had been complexed with RNAIMAX™ from Invitrogen (Carlsbad, CA). The RNA:RNAIMAX™ complex was formed by first incubating the RNA with Supplement-free EPILIFE® media in a 5× volumetric dilution for 10 minutes at room temperature. In a second vial, RNAIMAX™ reagent was incubated with Supplement-free EPILIFE® Media in a 10× volumetric dilution for 10 minutes at room temperature. The RNA vial was then mixed with the RNAIMAX™ vial and incubated for 20-30 minutes at room temperature before being added to the cells in a drop-wise fashion.

[1441] The fully optimized mRNA encoding VEGF-A (mRNA sequence shown in SEQ ID NO: 1672; polyA tail of approximately 160 nucleotides not shown in sequence; 5′cap, Cap1) transfected with the Human Keratinocyte cells included modifications during translation such as natural nucleoside triphosphates (NTP), pseudouridine at each uridine site and 5-methylcytosine at each cytosine site (pseudo-U/5 mC), and N1-methyl-pseudouridine at each uridine site and 5-methylcytosine at each cytosine site (N1-methyl-Pseudo-U/5 mC). Cells were transfected with the mmRNA encoding VEGF-A and secreted VEGF-A concentration (pg/ml) in the culture medium was measured at 6, 12, 24, and 48 hours post-transfection for each of the concentrations using an ELISA kit from Invitrogen (Carlsbad, CA) following the manufacturers recommended instructions. These data, shown in Table 70 and FIGS. 6A, 6B and 6C, show that modified mRNA encoding VEGF-A is capable of being translated in Human Keratinocyte cells and that VEGF-A is transported out of the cells and released into the extracellular environment.

TABLE 70
VEGF-A Dosing and Protein Secretion

| | | | | |
|---|---|---|---|---|
| | 6 hours | 12 hours | 24 hours | 48 hours |
| Dose (ng) | (pg/ml) | (pg/ml) | (pg/ml) | (pg/ml) |

VEGF-A Dose Containing Natural NTPs

| | | | | |
|---|---|---|---|---|
| 46.875 | 10.37 | 18.07 | 33.90 | 67.02 |
| 93.75 | 9.79 | 20.54 | 41.95 | 65.75 |
| 187.5 | 14.07 | 24.56 | 45.25 | 64.39 |
| 375 | 19.16 | 37.53 | 53.61 | 88.28 |
| 750 | 21.51 | 38.90 | 51.44 | 61.79 |
| 1500 | 36.11 | 61.90 | 76.70 | 86.54 |

VEGF-A Dose Containing Pseudo-U/5mC

| | | | | |
|---|---|---|---|---|
| 46.875 | 10.13 | 16.67 | 33.99 | 72.88 |
| 93.75 | 11.00 | 20.00 | 46.47 | 145.61 |
| 187.5 | 16.04 | 34.07 | 83.00 | 120.77 |
| 375 | 69.15 | 188.10 | 448.50 | 392.44 |
| 750 | 133.95 | 304.30 | 524.02 | 526.58 |
| 1500 | 198.96 | 345.65 | 426.97 | 505.41 |

VEGF-A Dose Containing N1-methyl-Pseudo-U/5mC

| | | | | |
|---|---|---|---|---|
| 46.875 | 0.03 | 6.02 | 27.65 | 100.42 |
| 93.75 | 12.37 | 46.38 | 121.23 | 167.56 |
| 187.5 | 104.55 | 365.71 | 1025.41 | 1056.91 |
| 375 | 605.89 | 1201.23 | 1653.63 | 1889.23 |
| 750 | 445.41 | 1036.45 | 1522.86 | 1954.81 |
| 1500 | 261.61 | 714.68 | 1053.12 | 1513.39 |

### Example 50. In Vivo Studies of Factor IX

[1442] Human Factor IX mmRNA (Gen1; fully modified 5-methycytosine and pseudouridine) formulated in formulation buffer was delivered to mice via intramuscular injection. The results demonstrate that Factor IX protein was elevated in serum as measured 13 hours after administration.

[1443] In this study, mice (N=5 for Factor IX, N=3 for Luciferase or Buffer controls) were intramuscularly injected with 50 μl of the Factor IX mmRNA (mRNA sequence shown in SEQ ID NO: 1622; polyA tail of approximately 160 nucleotides not shown in sequence; 5′cap, Cap1), Luciferase (IVT cDNA sequence shown in SEQ ID NO: 21445; mRNA sequence shown in SEQ ID NO: 21446, polyA tail of approximately 160 nucleotides not shown in sequence, 5′cap, Cap1, fully modified with 5-methylcytosine at each cytosine and pseudouridine replacement at each uridine site) or the formulation buffer (F. Buffer) at 2×100 ug/mouse. The mice were bled at 13 hours after the intramuscular injection to determine the concentration of human the polypeptide in serum in pg/mL. The results revealed that administration of Factor IX mmRNA resulted in levels of 1600 pg/mL at 13 hours as compared to less than 100 pg/mL of Factor IX for either Luciferase or buffer control administration.

### Example 51. Multi-Site Administration: Intramuscular and Subcutaneous

[1444] Human G-CSF modified mRNA (mRNA sequence shown in SEQ ID NO: 21438; polyA tail of approximately 160 nucleotides not shown in sequence; 5′cap, Cap1) modified as either Gen1 or Gen2 (5-methylcytosine (5 mc) and a pseudouridine (ψ) modification, G-CSF-Gen1; or N1-5-methylcytosine (N1-5 mc) and a ψ modification, G-CSF-Gen2) and formulated in formulation buffer were delivered to mice via intramuscular (IM) or subcutaneous (SC) injection. Injection of four doses or 2×50 ug (two sites) daily for three days (24 hrs interval) was performed. The fourth dose was administered 6 hrs before blood collection and CBC analysis. Controls included Luciferase (IVT cDNA sequence shown in SEQ ID NO: 21445; mRNA sequence shown in SEQ ID NO: 21446, polyA tail of approximately 160 nucleotides not shown in sequence, 5′cap, Cap1, fully modified with 5-methylcytosine at each cytosine and pseudouridine replacement at each uridine site) or the formulation buffer (F. Buffer). The mice were bled at 72 hours after the first mRNA injection (6 hours after the last modified mRNA dose) to determine the effect of mRNA-encoded human G-CSF on the neutrophil count. The dosing regimen is shown in Table 71 as are the resulting neutrophil counts (thousands/uL). In Table 71, an asterisk(*) indicates statistical significance at p<0.05.

[1445] For intramuscular administration, the data reveal a four fold increase in neutrophil count above control at day 3 for the Gen1 G-CSF mRNA and a two fold increase for the Gen2 G-CSF mmRNA. For subcutaneous administration, the data reveal a two fold increase in neutrophil count above control at day 3 for the Gen2 G-CSF mRNA.

[1446] These data demonstrate that both 5-methylcytidine/pseudouridine and 5-methylcytidine/N1-methyl-pseudouridine-modified mRNA can be biologically active, as evidenced by specific increases in blood neutrophil counts.

TABLE 71
Dosing Regimen

| | | | | Dose | Dose Vol. | Dosing | Neutrophil |
|---|---|---|---|---|---|---|---|
| Gr. | Treatment | Route | N= | (μg/mouse) | (μl/mouse) | Vehicle | Thous/uL |
| 1 | G-CSF (Gen1) | I.M | 5 | 2 × 50 ug (four doses) | 50 | F. buffer | 840* |
| 2 | G-CSF (Gen1) | S.C | 5 | 2 × 50 ug (four doses) | 50 | F. buffer | 430 |
| 3 | G-CSF (Gen2) | I.M | 5 | 2 × 50 ug (four doses) | 50 | F. buffer | 746* |
| 4 | G-CSF (Gen2) | S.C | 5 | 2 × 50 ug (four doses) | 50 | F. buffer | 683 |
| 5 | Luc (Gen1) | I.M. | 5 | 2 × 50 ug (four doses) | 50 | F. buffer | 201 |
| 6 | Luc (Gen1) | S.C. | 5 | 2 × 50 ug (four doses) | 50 | F. buffer | 307 |
| 7 | Luc (Gen2) | I.M | 5 | 2 × 50 ug (four doses) | 50 | F. buffer | 336 |
| 8 | Luc (Gen2) | S.C | 5 | 2 × 50 ug (four doses) | 50 | F. buffer | 357 |
| 9 | F. Buffer | I.M | 4 | 0 (four doses) | 50 | F. buffer | 245 |
| 10 | F. Buffer | S.C. | 4 | 0 (four doses) | 50 | F. buffer | 509 |
| 11 | Untreated | — | 4 | | | — | 312 |

### Example 52. Intravenous Administration

[1447] Human G-CSF modified mRNA (mRNA sequence shown in SEQ ID NO: 21438; polyA tail of approximately 160 nucleotides not shown in sequence; 5′cap, Cap1) modified with 5-methylcytosine (5 mc) and a pseudouridine (ψ) modification (Gen 1); or having no modifications and formulated in 10% lipoplex (RNAiMax) were delivered to mice at a dose of 50 ug RNA and in a volume of 100 ul via intravenous (IV) injection at days 0, 2 and 4. Neutrophils were measured at days 1, 5 and 8. Controls included non-specific mammalian RNA or the formulation buffer alone (F. Buffer). The mice were bled at days 1, 5 and 8 to determine the effect of modified mRNA-encoded human G-CSF to increase neutrophil count. The dosing regimen is shown in Table 72 as are the resulting neutrophil counts (thousands/uL; K/uL).

[1448] For intravenous administration, the data reveal a four to five fold increase in neutrophil count above control at day 5 with G-CSF modified mRNA but not with unmodified G-CSF mRNA or non-specific controls. Blood count returned to baseline four days after the final injection. No other changes in leukocyte populations were observed.

[1449] In Table 72, an asterisk(*) indicates statistical significance at p<0.001 compared to buffer.

[1450] These data demonstrate that lipoplex-formulated 5-methylcytidine/pseudouridine-modified mRNA can be biologically active, when delivered through an IV. route of administration as evidenced by specific increases in blood neutrophil counts. No other cell subsets were significantly altered. Unmodified G-CSF mRNA similarly administered showed no pharmacologic effect on neutrophil counts.

TABLE 72
Dosing Regimen

| | | | | Dose Vol. | Dosing | Neutrophil |
|---|---|---|---|---|---|---|
| Gr. | Day | Treatment | N= | (μl/mouse) | Vehicle | K/uL |
| 1 | 1 | G-CSF (Gen1) | 5 | 100 | 10% lipoplex | 2.91 |
| 2 | 5 | G-CSF (Gen1) | 5 | 100 | 10% lipoplex | 5.32* |
| 3 | 8 | G-CSF (Gen1) | 5 | 100 | 10% lipoplex | 2.06 |
| 4 | 1 | G-CSF (no | 5 | 100 | 10% lipoplex | 1.88 |
| | | modification) | | | | |
| 5 | 5 | G-CSF (no | 5 | 100 | 10% lipoplex | 1.95 |
| | | modification) | | | | |
| 6 | 8 | G-CSF (no | 5 | 100 | 10% lipoplex | 2.09 |
| | | modification) | | | | |
| 7 | 1 | RNA control | 5 | 100 | 10% lipoplex | 2.90 |
| 8 | 5 | RNA control | 5 | 100 | 10% lipoplex | 1.68 |
| 9 | 8 | RNA control | 4 | 100 | 10% lipoplex | 1.72 |
| 10 | 1 | F. Buffer | 4 | 100 | 10% lipoplex | 2.51 |
| 11 | 5 | F. Buffer | 4 | 100 | 10% lipoplex | 1.31 |
| 12 | 8 | F. Buffer | 4 | 100 | 10% lipoplex | 1.92 |

### Example 53. Saline Formulation: Intramuscular Administration

### A. Protein Expression

[1451] Human G-CSF modified mRNA (mRNA sequence shown in SEQ ID NO: 21438; polyA tail of approximately 160 nucleotides not shown in sequence; 5′cap, Cap1) and human EPO mmRNA (mRNA sequence shown in SEQ ID NO: 1638; polyA tail of approximately 160 nucleotides not shown in sequence; 5′cap, Cap1); G-CSF modified mRNA (modified with 5-methylcytosine (5 mc) and pseudouridine (ψ)) and EPO modified mRNA (modified with N1-5-methylcytosine (N1-5 mc) and ψ modification), were formulated in formulation buffer (150 mM sodium chloride, 2 mM calcium chloride, 2 mM phosphate, 0.5 mM EDTA at a pH of 6.5) and delivered to mice via intramuscular (IM) injection at a dose of 100 ug.

[1452] Controls included Luciferase (IVT cDNA sequence shown in SEQ ID NO: 21445; mRNA sequence shown in SEQ ID NO: 21446, polyA tail of approximately 160 nucleotides not shown in sequence, 5′cap, Cap1, fully modified with 5-methylcytosine at each cytosine and pseudouridine replacement at each uridine site) or the formulation buffer (F. Buffer). The mice were bled at 13 hours after the injection to determine the concentration of the human polypeptide in serum in pg/mL. (G-CSF groups measured human G-CSF in mouse serum and EPO groups measured human EPO in mouse serum). The data are shown in Table 73.

TABLE 73
Dosing Regimen

| | | | | | Average |
|---|---|---|---|---|---|
| | | | | | Protein |
| | | | Dose | | Product |
| | | | Vol. | Dosing | pg/mL, |
| Group | Treatment | N = | (μl/mouse) | Vehicle | serum |
| G-CSF | G-CSF | 5 | 50 | Saline | 19.8 |
| G-CSF | Luciferase | 5 | 50 | Saline | 0.5 |
| G-CSF | F. buffer | 5 | 50 | F. buffer | 0.5 |
| EPO | EPO | 5 | 50 | Saline | 191.5 |
| EPO | Luciferase | 5 | 50 | Saline | 15.0 |
| EPO | F. buffer | | | F. buffer | 4.8 |

### B. Dose Response

[1453] Human EPO modified mRNA (mRNA sequence shown in SEQ ID NO: 1638; polyA tail of approximately 160 nucleotides not shown in sequence; 5′cap, Cap1; fully modified with 5-methylcytosine and pseudouridine) were formulated in formulation buffer and delivered to mice via intramuscular (IM) injection.

[1454] Controls included Luciferase (mRNA sequence shown in SEQ ID NO: 21446, polyA tail of approximately 160 nucleotides not shown in sequence, 5′cap, Cap1, fully modified with 5-methylcytosine and pseudouridine) or the formulation buffer (F. Buffer). The mice were bled at 13 hours after the injection to determine the concentration of the human polypeptide in serum in pg/mL. The dose and expression are shown in Table 74.

TABLE 74
Dosing Regimen and Expression

| | | Average |
|---|---|---|
| | | Protein |
| | Dose | Product |
| | Vol. | pg/mL, |
| Treatment | (μl/mouse) | serum |
| EPO | 100 | 96.2 |
| EPO | 50 | 63.5 |
| EPO | 25 | 18.7 |
| EPO | 10 | 25.9 |
| EPO | 1 | 2.6 |
| Luciferase | 100 | 0.0 |
| F. buffer | 100 | 1.0 |

### Example 54. EPO Multi-Dose/Multi-Administration

[1455] Studies utilizing multiple intramuscular injection sites at one time point were designed and performed.

[1456] The design of a single multi-dose experiment involved using human erythropoietin (EPO) mmRNA (mRNA sequence shown in SEQ ID NO: 1638; polyA tail of approximately 160 nucleotides not shown in sequence; 5′cap, Cap1) or G-CSF mmRNA (mRNA sequence shown in SEQ ID NO: 21438; polyA tail of approximately 160 nucleotides not shown in sequence; 5′cap, Cap1) administered in formulation buffer. The dosing vehicle (F. buffer) was used as a control. The EPO and G-CSF modified mRNA were modified with 5-methylcytosine at each cytosine and pseudouridine replacement at each uridine site.

[1457] Animals (n=5), Sprague-Dawley rats, were injected IM (intramuscular) for the single unit dose of 100 ug (delivered to one thigh). For multi-dosing 6 doses of 100 ug (delivered to two thighs) were used for both EPO and G-CSF mmRNA. Control dosing involved use of buffer at a single dose. Human EPO blood levels were evaluated 13 hrs post injection.

[1458] Human EPO protein was measured in rat serum 13 hrs post intramuscular injection. Five groups of rats were treated and evaluated. The results are shown in Table 75.

TABLE 75
Multi-dose study

| | | | | Avg. |
|---|---|---|---|---|
| | | | | Pg/mL |
| | | | | human |
| | | Dose of | Total | EPO, |
| Group | Treatment | mmRNA | Dose | serum |
| 1 | Human EPO mmRNA | 1 × 100 ug | 100 ug | 143 |
| 2 | Human EPO mmRNA | 6 × 100 ug | 600 ug | 256 |
| 3 | G-CSF mmRNA | 1 × 100 ug | 100 ug | 43 |
| 4 | G-CSF mmRNA | 6 × 100 ug | 600 ug | 58 |
| 5 | Buffer Alone | — | — | 20 |

### Example 55. Signal Sequence Exchange Study

[1459] Several variants of mmRNAs encoding human Granulocyte colony stimulating factor (G-CSF) (mRNA sequence shown in SEQ ID NO: 21438; polyA tail of approximately 160 nucleotides not shown in sequence; 5′cap, Cap1) were synthesized using modified nucleotides pseudouridine and 5-methylcytosine (pseudo-U/5 mC). These variants included the G-CSF constructs encoding either the wild-type N terminal secretory signal peptide sequence (MAGPATQSPMKLMALQLLLWHSALWTVQEA; SEQ ID NO: 95), no secretory signal peptide sequence, or secretory signal peptide sequences taken from other mRNAs. These included sequences where the wild type G-CSF signal peptide sequence was replaced with the signal peptide sequence of either: human α-1-anti trypsin (AAT) (MMPSSVSWGILLLAGLCCLVPVSLA; SEQ ID NO: 94), human Factor IX (FIX) (MQRVNMIMAESPSLITICLLGYLLSAECTVFLDHENANKILNRPKR; SEQ ID NO: 96), human Prolactin (Prolac) (MKGSLLLLLVSNLLLCQSVAP; SEQ ID NO: 97), or human Albumin (Alb) (MKWVTFISLLFLFSSAYSRGVFRR; SEQ ID NO: 98).

[1460] 250 ng of modified mRNA encoding each G-CSF variant was transfected into HEK293A (293A in the table), mouse myoblast (MM in the table) (C2C12, CRL-1772, ATCC) and rat myoblast (RM in the table) (L6 line, CRL-1458, ATCC) cell lines in a 24 well plate using 1 ul of Lipofectamine 2000 (Life Technologies), each well containing 300,000 cells. The supernatants were harvested after 24 hrs and the secreted G-CSF protein was analyzed by ELISA using the Human G-CSF ELISA kit (Life Technologies). The data shown in Table 76 reveal that cells transfected with G-CSF mmRNA encoding the Albumin signal peptide secrete at least 12 fold more G-CSF protein than its wild type counterpart.

TABLE 76
Signal Peptide Exchange

| | 293A | MM | RM |
|---|---|---|---|
| Signal peptides | (pg/ml) | (pg/ml) | (pg/ml) |
| G-CSF Natural | 9650 | 3450 | 6050 |
| α-1-anti trypsin | 9950 | 5000 | 8475 |
| Factor IX | 11675 | 6175 | 11675 |
| Prolactin | 7875 | 1525 | 9800 |
| Albumin | 122050 | 81050 | 173300 |
| No Signal peptide | 0 | 0 | 0 |

### Example 56. Cytokine Study: PBMC

A. PBMC isolation and Culture

[1461] 50 mL of human blood from two donors was received from Research Blood Components (lots KP30928 and KP30931) in sodium heparin tubes. For each donor, the blood was pooled and diluted to 70 mL with DPBS (SAFC Bioscience 59331C, lot 071M8408) and split evenly between two 50 mL conical tubes. 10 mL of Ficoll Paque (GE Healthcare 17-5442-03, lot 10074400) was gently dispensed below the blood layer. The tubes were centrifuged at 2000 rpm for 30 minutes with low acceleration and braking. The tubes were removed and the buffy coat PBMC layers were gently transferred to a fresh 50 mL conical and washed with DPBS. The tubes were centrifuged at 1450 rpm for 10 minutes.

[1462] The supernatant was aspirated and the PBMC pellets were resuspended and washed in 50 mL of DPBS. The tubes were centrifuged at 1250 rpm for 10 minutes. This wash step was repeated, and the PBMC pellets were resuspended in 19 mL of Optimem I (Gibco 11058, lot 1072088) and counted. The cell suspensions were adjusted to a concentration of 3.0×10\hat{ }6 cells/mL live cells.

[1463] These cells were then plated on five 96 well tissue culture treated round bottom plates (Costar 3799) per donor at 50 uL per well. Within 30 minutes, transfection mixtures were added to each well at a volume of 50 uL per well. After 4 hours post transfection, the media was supplemented with 10 uL of Fetal Bovine Serum (Gibco 10082, lot 1012368)

### B. Transfection Preparation

[1464] mmRNA encoding human G-CSF (mRNA sequence shown in SEQ ID NO: 21438; polyA tail of approximately 160 nucleotides not shown in sequence; 5′cap, Cap1) (containing either (1) natural NTPs, (2) 100% substitution with 5-methyl cytidine and pseudouridine, or (3) 100% substitution with 5-methyl cytidine and N1-methyl-pseudouridine; mmRNA encoding luciferase (IVT cDNA sequence shown in SEQ ID NO: 21445; mRNA sequence shown in SEQ ID NO: 21446, polyA tail of approximately 160 nucleotides not shown in sequence, 5′cap, Cap1, fully modified with 5-methylcytosine at each cytosine and pseudouridine replacement at each uridine site) (containing either (1) natural NTPs or (2) 100% substitution with 5-methyl cytidine and pseudouridine) and TLR agonist R848 (Invivogen tlrl-r848) were diluted to 38.4 ng/uL in a final volume of 2500 uL Optimem I.

[1465] Separately, 432 uL of Lipofectamine 2000 (Invitrogen 11668-027, lot 1070962) was diluted with 13.1 mL Optimem I. In a 96 well plate nine aliquots of 135 uL of each mmRNA, positive control (R-848) or negative control (Optimem I) was added to 135 uL of the diluted Lipofectamine 2000. The plate containing the material to be transfected was incubated for 20 minutes. The transfection mixtures were then transferred to each of the human PBMC plates at 50 uL per well. The plates were then incubated at 37 C. At 2, 4, 8, 20, and 44 hours each plate was removed from the incubator, and the supernatants were frozen.

[1466] After the last plate was removed, the supernatants were assayed using a human G-CSF ELISA kit (Invitrogen KHC2032) and human IFN-alpha ELISA kit (Thermo Scientific 41105-2). Each condition was done in duplicate.

### C. Results

[1467] The ability of unmodified and modified mRNA (mmRNAs) to produce the encoded protein was assessed (G-CSF production) over time as was the ability of the mRNA to trigger innate immune recognition as measured by interferon-alpha production. Use of in vitro PBMC cultures is an accepted way to measure the immunostimulatory potential of oligonucleotides (Robbins et al., Oligonucleotides 2009 19:89-102; herein incorporated by reference in its entirety).

[1468] Results were interpolated against the standard curve of each ELISA plate using a four parameter logistic curve fit. Shown in Tables 77 and 78 are the average from 2 separate PBMC donors of the G-CSF and IFN-alpha production over time as measured by specific ELISA.

[1469] In the G-CSF ELISA, background signal from the Lipofectamine 2000 untreated condition was subtracted at each timepoint. The data demonstrated specific production of human G-CSF protein by human peripheral blood mononuclear is seen with G-CSF mRNA containing natural NTPs, 100% substitution with 5-methyl cytidine and pseudouridine, or 100% substitution with 5-methyl cytidine and N1-methyl-pseudouridine. Production of G-CSF was significantly increased through the use of modified mRNA relative to unmodified mRNA, with the 5-methyl cytidine and N1-methyl-pseudouridine containing G-CSF mmRNA showing the highest level of G-CSF production. With regards to innate immune recognition, unmodified mRNA resulted in substantial IFN-alpha production, while the modified mRNA largely prevented interferon-alpha production. G-CSF mRNA fully modified with 5-methyl cytidine and N1-methyl-pseudouridine did not significantly increase cytokines whereas G-CSF mRNA fully modified with 5-methyl cytidine and pseudouridine induced IFN-alpha, TNF-alpha and IP10. Many other cytokines were not affected by either modification.

TABLE 77
G-CSF Signal
G-CSF signal - 2 Donor Average

| pg/mL | 2 Hr | 4 Hr | 8 Hr | 20 Hr | 44 Hr |
|---|---|---|---|---|---|
| G-CSF (5mC/pseudouridine) | 120.3 | 136.8 | 421.0 | 346.1 | 431.8 |
| G-CSF (5mC/N1-methyl- | 256.3 | 273.7 | 919.3 | 1603.3 | 1843.3 |
| pseudouridine) | | | | | |
| G-CSF(Natural-no | 63.5 | 92.6 | 129.6 | 258.3 | 242.4 |
| modification) | | | | | |
| Luciferase | 4.5 | 153.7 | 33.0 | 186.5 | 58.0 |
| (5mC/pseudouridine) | | | | | |

TABLE 78
IFN-alpha signal
IFN-alpha signal - 2 donor average

| pg/mL | 2 Hr | 4 Hr | 8 Hr | 20 Hr | 44 Hr |
|---|---|---|---|---|---|
| G-CSF (5mC/pseudouridine) | 21.1 | 2.9 | 3.7 | 22.7 | 4.3 |
| G-CSF (5mC/N1-methyl- | 0.5 | 0.4 | 3.0 | 2.3 | 2.1 |
| pseudouridine) | | | | | |
| G-CSF(Natural) | 0.0 | 2.1 | 23.3 | 74.9 | 119.7 |
| Luciferase (5mC/pseudouridine) | 0.4 | 0.4 | 4.7 | 1.0 | 2.4 |
| R-848 | 39.1 | 151.3 | 278.4 | 362.2 | 208.1 |
| Lpf. 2000 control | 0.8 | 17.2 | 16.5 | 0.7 | 3.1 |

### Example 57. Chemical Modification Ranges of Modified mRNA

[1470] Modified nucleotides such as, but not limited to, the chemical modifications 5-methylcytosine and pseudouridine have been shown to lower the innate immune response and increase expression of RNA in mammalian cells. Surprisingly, and not previously known, the effects manifested by the chemical modifications can be titrated when the amount of chemical modification is less than 100%. Previously, it was believed that full modification was necessary and sufficient to elicit the beneficial effects of the chemical modifications and that less than 100% modification of an mRNA had little effect. However, it has now been shown that the benefits of chemical modification can be derived using less than complete modification and that the effects are target, concentration and modification dependent.

A. Modified RNA transfected in PBMC

[1471] 960 ng of G-CSF mRNA modified with 5-methylcytosine (5 mC) and pseudouridine (pseudoU) or unmodified G-CSF mRNA was transfected with 0.8 uL of Lipofectamine 2000 into peripheral blood mononuclear cells (PBMC) from three normal blood donors (D1, D2, D3). The G-CSF mRNA (mRNA sequence shown in SEQ ID NO: 21438; polyA tail of approximately 160 nucleotides not shown in sequence; 5′cap, Cap1) was completely modified with 5 mC and pseudoU (100% modification), not modified with 5 mC and pseudoU (0% modification) or was partially modified with 5 mC and pseudoU so the mRNA would contain 50% modification, 25% modification, 10% modification, %5 modification, 1% modification or 0.1% modification. A control sample of Luciferase (mRNA sequence shown in SEQ ID NO: 21446; polyA tail of approximately 160 nucleotides not shown in sequence; 5′cap, Cap1; fully modified 5meC and pseudoU) was also analyzed for G-CSF expression. For TNF-alpha and IFN-alpha control samples of Lipofectamine2000, LPS, R-848, Luciferase (mRNA sequence shown in SEQ ID NO: 21446; polyA tail of approximately 160 nucleotides not shown in sequence; 5′cap, Cap1; fully modified 5 mC and pseudo), and P(I)P(C) were also analyzed. The supernatant was harvested and run by ELISA 22 hours after transfection to determine the protein expression. The expression of G-CSF is shown in Table 79 and the expression of IFN-alpha and TNF-alpha is shown in Table 80. The expression of IFN-alpha and TNF-alpha may be a secondary effect from the transfection of the G-CSF mRNA. Tables 79 and 80 show that the amount of chemical modification of G-CSF, IFN-alpha and TNF-alpha is titratable when the mRNA is not fully modified and the titratable trend is not the same for each target.

TABLE 79
G-CSF Expression

| | G-CSF Expression (pg/ml) | | |
|---|---|---|---|
| | D1 | D2 | D3 |
| 100% modification | 270.3 | 151.6 | 162.2 |
| 50% modification | 45.6 | 19.8 | 26.3 |
| 25% modification | 23.6 | 10.8 | 8.9 |
| 10% modification | 39.4 | 12.9 | 12.9 |
| 5% modification | 70.9 | 26.8 | 26.3 |
| 1% modification | 70.3 | 26.9 | 66.9 |
| 0.1% modification | 67.5 | 25.2 | 28.7 |
| Luciferase | 14.5 | 3.1 | 10.0 |

TABLE 80
IFN-alpha and TNF-alpha Expression

| | IFN-alpha Expression | | | TNF-alpha Expression | | |
|---|---|---|---|---|---|---|
| | (pg/ml) | | | (pg/ml) | | |
| | D1 | D2 | D3 | D1 | D2 | D3 |
| 100% modification | 76.8 | 6.8 | 15.1 | 5.6 | 1.4 | 21.4 |
| 50% modification | 22.0 | 5.5 | 257.3 | 4.7 | 1.7 | 12.1 |
| 25% modification | 64.1 | 14.9 | 549.7 | 3.9 | 0.7 | 10.1 |
| 10% modification | 150.2 | 18.8 | 787.8 | 6.6 | 0.9 | 13.4 |
| 5% modification | 143.9 | 41.3 | 1009.6 | 2.5 | 1.8 | 12.0 |
| 1% modification | 189.1 | 40.5 | 375.2 | 9.1 | 1.2 | 25.7 |
| 0.1% modification | 261.2 | 37.8 | 392.8 | 9.0 | 2. | 13.7 |
| 0% modification | 230.3 | 45.1 | 558.3 | 10.9 | 1.4 | 10.9 |
| LF 200 | 0 | 0 | 1.5 | 45.8 | 2.8 | 53.6 |
| LPS | 0 | 0 | 1.0 | 114.5 | 70.0 | 227.0 |
| R-848 | 39.5 | 11.9 | 183.5 | 389.3 | 256.6 | 410.6 |
| Luciferase | 9.1 | 0 | 3.9 | 4.5 | 2.7 | 13.6 |
| P(I)P(C) | 1498.1 | 216.8 | 238.8 | 61.2 | 4.4 | 69.1 |

### B. Modified RNA Transfected in HEK293

[1472] Human embryonic kidney epithelial (HEK293) cells were seeded on 96-well plates at a density of 30,000 cells per well in 100 ul cell culture medium. 250 ng of modified G-CSF mRNA (mRNA sequence shown in SEQ ID NO: 21438; polyA tail of approximately 160 nucleotides not shown in sequence; 5′cap, Cap1) formulated with RNAiMAX™ (Invitrogen, Carlsbad, CA) was added to a well. The G-CSF was completely modified with 5 mC and pseudoU (100% modification), not modified with 5 mC and pseudoU (0% modification) or was partially modified with 5 mC and pseudoU so the mRNA would contain 75% modification, 50% modification or 25% modification. Control samples (AK 5/2, mCherry (SEQ ID NO: 21439; polyA tail of approximately 160 nucleotides not shown in sequence; 5′cap, Cap1; fully modified 5 mC and pseudoU) and untreated) were also analyzed. The half-life of G-CSF mRNA fully modified with 5-methylcytosine and pseudouridine is approximately 8-10 hours. The supernatants were harvested after 16 hours and the secreted G-CSF protein was analyzed by ELISA. Table 81 shows that the amount of chemical modification of G-CSF is titratable when the mRNA is not fully modified.

TABLE 81
G-CSF Expression

| | G-CSF Expression |
|---|---|
| | (ng/ml) |
| 100% modification | 118.4 |
| 75% modification | 101.9 |
| 50% modification | 105.7 |
| 25% modification | 231.1 |
| 0% modification | 270.9 |
| AK 5/2 | 166.8 |
| mCherry | 0 |
| Untreated | 0 |

### Example 58: In Vivo Delivery of Modified mRNA (mmRNA)

[1473] Modified RNA was delivered to C57/BL6 mice intramuscularly, subcutaneously, or intravenously to evaluate the bio-distribution of modified RNA using luciferase. A formulation buffer used with all delivery methods contained 150 mM sodium chloride, 2 mM calcium chloride, 2 mM Na+-phosphate which included 1.4 mM monobasic sodium phosphate and 0.6 mM of dibasic sodium phosphate, and 0.5 mM ethylenediaminetetraacetic acid (EDTA) was adjusted using sodium hydroxide to reach a final pH of 6.5 before being filtered and sterilized. A 1× concentration was used as the delivery buffer. To create the lipoplexed solution delivered to the mice, in one vial 50 μg of RNA was equilibrated for 10 minutes at room temperature in the delivery buffer and in a second vial 10 μl RNAiMAX™ was equilibrated for 10 minutes at room temperature in the delivery buffer. After equilibrium, the vials were combined and delivery buffer was added to reach a final volume of 100 μl which was then incubated for 20 minutes at room temperature. Luciferin was administered by intraperitoneal injection (IP) at 150 mg/kg to each mouse prior to imaging during the plateau phase of the luciferin exposure curve which was between 15 and 30 minutes. To create luciferin, 1 g of D-luciferin potassium or sodium salt was dissolved in 66.6 ml of distilled phosphate buffer solution (DPBS), not containing Mg2+ or Ca2+, to make a 15 mg/ml solution. The solution was gently mixed and passed through a 0.2 μm syringe filter, before being purged with nitrogen, aliquoted and frozen at −80° C. while being protected from light as much as possible. The solution was thawed using a waterbath if luciferin was not dissolved, gently mixed and kept on ice on the day of dosing.

[1474] Whole body images were taken of each mouse 2, 8 and 24 hours after dosing. Tissue images and serum was collected from each mouse 24 hours after dosing. Mice administered doses intravenously had their liver, spleen, kidneys, lungs, heart, peri-renal adipose tissue and thymus imaged. Mice administered doses intramuscularly or subcutaneously had their liver, spleen, kidneys, lungs, peri-renal adipose tissue, and muscle at the injection site. From the whole body images the bioluminescence was measured in photon per second for each route of administration and dosing regimen.

### A. Intramuscular Administration

[1475] Mice were intramuscularly (IM.) administered either modified luciferase mRNA fully modified with 5-methylcytosine and pseudouridine (Naked-Luc), lipoplexed modified luciferase mRNA fully modified with 5-methylcytosine and pseudouridine (Lipoplex-luc) (IVT cDNA sequence shown in SEQ ID NO: 21445; mRNA sequence shown in SEQ ID NO: 21446, polyA tail of approximately 160 nucleotides not shown in sequence, 5′cap, Cap1, fully modified with 5-methylcytosine at each cytosine and pseudouridine replacement at each uridine site), lipoplexed modified granulocyte colony-stimulating factor (G-CSF) mRNA (mRNA sequence shown in SEQ ID NO: 21438; polyA tail of approximately 160 nucleotides not shown in sequence; 5′cap, Cap1; fully modified with 5-methylcytosine and pseudouridine) (Lipoplex-Cytokine) or the formation buffer at a single dose of 50 μg of modified RNA in an injection volume of 50p for each formulation in the right hind limb and a single dose of 5 μg of modified RNA in an injection volume of 50 μl in the left hind limb. The bioluminescence average for the luciferase expression signals for each group at 2, 8 and 24 hours after dosing are shown in Table 82. The bioluminescence showed a positive signal at the injection site of the 5 μg and 50 μg modified RNA formulations containing and not containing lipoplex.

TABLE 82
In vivo Biophotoic Imaging (I.M. Injection Route)

| | | Bioluminescence (photon/sec) | | |
|---|---|---|---|---|
| Formulation | Dose (ug) | 2 hours | 8 hours | 24 hours |
| Naked-Luc | 5 | 224,000 | 683,000 | 927,000 |
| Lipolplex-Luc | 5 | 579,000 | 639,000 | 186,000 |
| Lipoplex-G-CSF | 5 | 64,600 | 85,600 | 75,100 |
| Formulation Buffer | 5 | 102,000 | 86,000 | 90,700 |
| Naked-Luc | 50 | 446,000 | 766,000 | 509,000 |
| Lipolplex-Luc | 50 | 374,000 | 501,000 | 332,000 |
| Lipoplex-G-CSF | 50 | 49,400 | 74,800 | 74,200 |
| Formulation Buffer | 50 | 59,300 | 69,200 | 63,600 |

### B. Subcutaneous Administration

[1476] Mice were subcutaneously (S.C.) administered either modified luciferase mRNA (Naked-Luc), lipoplexed modified luciferase mRNA (Lipoplex-luc), lipoplexed modified G-CSF mRNA (Lipoplex-G-CSF) or the formation buffer at a single dose of 50 μg of modified mRNA in an injection volume of 100 μl for each formulation. The bioluminescence average for the luciferase expression signals for each group at 2, 8 and 24 hours after dosing are shown in Table 83. The bioluminescence showed a positive signal at the injection site of the 50 μg modified mRNA formulations containing and not containing lipoplex.

TABLE 83
In vivo Biophotoic Imaging (S.C. Injection Route)

| | Bioluminescence (photon/sec) | | |
|---|---|---|---|
| Formulation | 2 hours | 8 hours | 24 hours |
| Naked-Luc | 3,700,000 | 8,060,000 | 2,080,000 |
| Lipolplex-Luc | 3,960,000 | 1,700,000 | 1,290,000 |
| Lipoplex-G-CSF | 123,000 | 121,000 | 117,000 |
| Formulation Buffer | 116,000 | 127,000 | 123,000 |

### C. Intravenous Administration

[1477] Mice were intravenously (IV.) administered either modified luciferase mRNA (Naked-Luc), lipoplexed modified luciferase mRNA (Lipoplex-luc), lipoplexed modified G-CSF mRNA (Lipoplex-G-CSF) or the formation buffer at a single dose of 50 μg of modified mRNA in an injection volume of 100 μl for each formulation. The bioluminescence average for the luciferase expression signal in the spleen from each group at 2 hours after dosing is shown in Table 84. The bioluminescence showed a positive signal in the spleen of the 50 μg modified mRNA formulations containing lipoplex.

TABLE 84
In vivo Biophotoic Imaging (I.V. Injection Route)

| | Bioluminescence |
|---|---|
| | (photon/sec) |
| Formulation | of the Spleen |
| Naked-Luc | 58,400 |
| Lipolplex-Luc | 65,000 |
| Lipoplex-G-CSF | 57,100 |
| Formulation Buffer | 58,300 |

### Example 59. Buffer Formulation Studies

[1478] G-CSF modified mRNA (mRNA sequence shown in SEQ ID NO: 21438; polyA tail of approximately 160 nucleotides not shown in sequence; 5′cap, Cap1; fully modified with N1-pseudouridine and 5-methylcytosine) or Factor IX modified mRNA (mRNA sequence shown in SEQ ID NO: 1622; polyA tail of approximately 160 nucleotides not shown in sequence; 5′cap, Cap1; fully modified with N1-pseudouridine and 5-methylcytosine) in a buffer solution is administered intramuscularly to rats in an injection volume of 50 μl (n=5) at a modified mRNA dose of 200 ug per rat as described in Table 85. The modified mRNA is lyophilized in water for 1-2 days. It is then reconstituted in the buffers listed below to a target concentration of 6 mg/ml. Concentration is determined by OD 260. Samples are diluted to 4 mg/ml in the appropriate buffer before dosing.

[1479] To precipitate the modified mRNA, 3M sodium acetate, pH 5.5 and pure ethanol are added at 1/10^{th} the total volume and 4 times the total volume of modified mRNA, respectively. The material is placed at −80C for a minimum of 1 hour. The material is then centrifuged for 30 minutes at 4000 rpm, 4C. The supernatant is removed and the pellet is centrifuged and washed 3× with 75% ethanol. Finally, the pellet is reconstituted with buffer to a target concentration of 6 mg/ml. Concentration is determined by OD 260. Samples are diluted to 4 mg/ml in the appropriate buffer before dosing. All samples are prepared by lyophilization unless noted below.

TABLE 85
Buffer Dosing Groups

| Group | Treatment | Buffer | Dose (ug/rat) |
|---|---|---|---|
| 1 | G-CSF | 0.9% Saline | 200 |
| | Factor IX | 0.9% Saline | 200 |
| 2 | G-CSF | 0.9% Saline + 2 mM | 200 |
| | | Calcium | |
| | Factor IX | 0.9% Saline + 2 mM | 200 |
| | | Calcium | |
| 3 | G-CSF | Lactated Ringer's | 200 |
| | Factor IX | Lactated Ringer's | 200 |
| 4 | G-CSF | 5% Sucrose | 200 |
| | Factor IX | 5% Sucrose | 200 |
| 5 | G-CSF | 5% Sucrose + 2 mM | 200 |
| | | Calcium | |
| | Factor IX | 5% Sucrose + 2 mM | 200 |
| | | Calcium | |
| 6 | G-CSF | 5% Mannitol | 200 |
| | Factor IX | 5% Mannitol | 200 |
| 7 | G-CSF | 5% Mannitol + 2 mM | 200 |
| | | Calcium | |
| | Factor IX | 5% Mannitol + 2 mM | 200 |
| | | Calcium | |
| 8 | G-CSF | 0.9% saline (precipitation) | 200 |
| | Factor IX | 0.9% saline (precipitation) | 200 |

[1480] Serum samples are collected from the rats at various time intervals and analyzed for G-CSF or Factor IX protein expression using G-CSF or Factor IX ELISA.

### Example 60. Multi-Dose Study

[1481] Sprague-Dawley rats (n=8) are injected intravenously eight times (twice a week) over 28 days. The rats are injected with 0.5 mg/kg, 0.05 mg/kg, 0.005 mg/kg or 0.0005 mg/kg of human G-CSF modified mRNA of luciferase modified mRNA formulated in a lipid nanoparticle, 0.5 mg/kg of human G-CSF modified mRNA in saline, 0.2 mg/kg of the human G-CSF protein Neupogen or non-translatable human G-CSF modified mRNA formulated in a lipid nanoparticle. Serum is collected during predetermined time intervals to evaluate G-CSF protein expression (8, 24 and 72 hours after the first dose of the week), complete blood count and white blood count (24 and 72 hours after the first dose of the week) and clinical chemistry (24 and 72 hours after the first dose of the week). The rats are sacrificed at day 29, 4 days after the final dosing, to determine the complete blood count, white blood count, clinical chemistry, protein expression and to evaluate the effect on the major organs by histopathology and necropsy. Further, an antibody assay is performed on the rats on day 29.

### Example 61. LNP In Vivo Study

[1482] Luciferase modified mRNA (mRNA sequence shown in SEQ ID NO: 21446; polyA tail of approximately 160 nucleotides not shown in sequence, 5′ cap, Cap1; fully modified with 5-methylcytosine and pseudouridine was formulated as a lipid nanoparticle (LNP) using the syringe pump method. The LNP was formulated at a 20:1 weight ratio of total lipid to modified mRNA with a final lipid molar ratio of 50:10:38.5:1.5 (DLin-KC2-DMA: DSPC: Cholesterol: PEG-DMG). As shown in Table 86, the luciferase LNP formulation was characterized by particle size, zeta potential, and encapsulation.

TABLE 86
Luciferase Formulation

| | Formulation |
|---|---|
| | NPA-098-1 |
| Modified mRNA | Luciferase |
| Mean size | 135 nm |
| | PDI: 0.08 |
| Zeta at pH 7.4 | −0.6 mV |
| Encaps. | 91% |
| (RiboGr) | |

[1483] As outlined in Table 87, the luciferase LNP formulation was administered to Balb-C mice (n=3) intramuscularly, intravenously and subcutaneously and a luciferase modified RNA formulated in PBS was administered to mice intravenously.

TABLE 87
Luciferase Formulations

| | | | Concen- | Injection | Amount of | |
|---|---|---|---|---|---|---|
| | | | tration | Volume | modified | Dose |
| Formulation | Vehicle | Route | (mg/ml) | (ul) | RNA (ug) | (mg/kg) |
| Luc-LNP | PBS | IV | 0.20 | 50 | 10 | 0.50 |
| Luc-LNP | PBS | IM | 0.20 | 50 | 10 | 0.50 |
| Luc-LNP | PBS | SC | 0.20 | 50 | 10 | 0.50 |
| Luc-PBS | PBS | IV | 0.20 | 50 | 10 | 0.50 |

[1484] The mice administered the luciferase LNP formulation intravenously and intramuscularly were imaged at 2, 8, 24, 48, 120 and 192 hours and the mice administered the luciferase LNP formulation subcutaneously were imaged at 2, 8, 24, 48 and 120 hours to determine the luciferase expression as shown in Table 88. In Table 88, “NT” means not tested. Twenty minutes prior to imaging, mice were injected intraperitoneally with a D-luciferin solution at 150 mg/kg. Animals were then anesthetized and images were acquired with an IVIS Lumina II imaging system (Perkin Elmer). Bioluminescence was measured as total flux (photons/second) of the entire mouse.

TABLE 88
Luciferase Expression

| | Route of | Average Expression (photon/second) | | | | | |
|---|---|---|---|---|---|---|---|
| Form. | Administration | 2 hours | 8 hours | 24 hours | 48 hours | 120 hours | 192 hours |
| Luc- | IV | 1.62E+08 | 3.00E+09 | 7.77E+08 | 4.98E+08 | 1.89E+08 | 6.08E+07 |
| LNP | | | | | | | |
| Luc- | IM | 4.85E+07 | 4.92E+08 | 9.02E+07 | 3.17E+07 | 1.22E+07 | 2.38E+06 |
| LNP | | | | | | | |
| Luc- | SC | 1.85E+07 | 9.79E+08 | 3.09E+08 | 4.94E+07 | 1.98E+06 | NT |
| LNP | | | | | | | |
| Luc- | IV | 3.61E+05 | 5.64E+05 | 3.19E+05 | NT | NT | NT |
| PBS | | | | | | | |

[1485] One mouse administered the LNP formulation intravenously was sacrificed at 8 hours to determine the luciferase expression in the liver and spleen. Also, one mouse administered the LNP formulation intramuscular was sacrificed at 8 hours to determine the luciferase expression of the muscle around the injection site and in the liver and spleen. As shown in Table 89, expression was seen in the both the liver and spleen after intravenous and intramuscular administration and in the muscle around the intramuscular injection site.

TABLE 89
Luciferase Expression in Tissue

| | Expression |
|---|---|
| | (photon/second) |
| Luciferase LNP: IV | |
| Administration | |
| Liver | 7.984E+08 |
| Spleen | 3.951E+08 |
| Luciferase LNP: IM | |
| Administration | |
| Muscle around the | 3.688E+07 |
| injection site | |
| Liver | 1.507E+08 |
| Spleen | 1.096E+07 |

### Example 62. Cytokine Study: PBMC

### A. PBMC Isolation and Culture

[1486] 50 mL of human blood from two donors was received from Research Blood Components (lots KP30928 and KP30931) in sodium heparin tubes. For each donor, the blood was pooled and diluted to 70 mL with DPBS (SAFC Bioscience 59331C, lot 071M8408) and split evenly between two 50 mL conical tubes. 10 mL of Ficoll Paque (GE Healthcare 17-5442-03, lot 10074400) was gently dispensed below the blood layer. The tubes were centrifuged at 2000 rpm for 30 minutes with low acceleration and braking. The tubes were removed and the buffy coat PBMC layers were gently transferred to a fresh 50 mL conical and washed with DPBS. The tubes were centrifuged at 1450 rpm for 10 minutes.

[1487] The supernatant was aspirated and the PBMC pellets were resuspended and washed in 50 mL of DPBS. The tubes were centrifuged at 1250 rpm for 10 minutes. This wash step was repeated, and the PBMC pellets were resuspended in 19 mL of Optimem I (Gibco 11058, lot 1072088) and counted. The cell suspensions were adjusted to a concentration of 3.0×10\hat{ }6 cells/mL live cells.

[1488] These cells were then plated on five 96 well tissue culture treated round bottom plates (Costar 3799) per donor at 50 uL per well. Within 30 minutes, transfection mixtures were added to each well at a volume of 50 uL per well. After 4 hours post transfection, the media was supplemented with 10 uL of Fetal Bovine Serum (Gibco 10082, lot 1012368).

### B. Transfection Preparation

[1489] Modified mRNA encoding human G-CSF (mRNA sequence shown in SEQ ID NO: 21438; polyA tail of approximately 160 nucleotides not shown in sequence; 5′cap, Cap1) (containing either (1) natural NTPs, (2) 100% substitution with 5-methyl cytidine and pseudouridine, or (3) 100% substitution with 5-methyl cytidine and N1-methyl-pseudouridine; mRNA encoding luciferase (IVT cDNA sequence shown in SEQ ID NO: 21445; mRNA sequence shown in SEQ ID NO: 21446, polyA tail of approximately 160 nucleotides not shown in sequence, 5′cap, Cap1, fully modified with 5-methylcytosine at each cytosine and pseudouridine replacement at each uridine site) (containing either (1) natural NTPs or (2) 100% substitution with 5-methyl cytidine and pseudouridine) and TLR agonist R848 (Invivogen tlrl-r848) were diluted to 38.4 ng/uL in a final volume of 2500 uL Optimem I.

[1490] Separately, 110 uL of Lipofectamine 2000 (Invitrogen 11668-027, lot 1070962) was diluted with 6.76 mL Optimem I. In a 96 well plate nine aliquots of 135 uL of each mRNA, positive control (R-848) or negative control (Optimem I) was added to 135 uL of the diluted Lipofectamine 2000. The plate containing the material to be transfected was incubated for 20 minutes. The transfection mixtures were then transferred to each of the human PBMC plates at 50 uL per well. The plates were then incubated at 37° C. At 2, 4, 8, 20, and 44 hours each plate was removed from the incubator, and the supernatants were frozen.

[1491] After the last plate was removed, the supernatants were assayed using a human G-CSF ELISA kit (Invitrogen KHC2032) and human IFN-alpha ELISA kit (Thermo Scientific 41105-2). Each condition was done in duplicate.

### C. Protein and Innate Immune Response Analysis

[1492] The ability of unmodified and modified mRNA to produce the encoded protein was assessed (G-CSF production) over time as was the ability of the mRNA to trigger innate immune recognition as measured by interferon-alpha production. Use of in vitro PBMC cultures is an accepted way to measure the immunostimulatory potential of oligonucleotides (Robbins et al., Oligonucleotides 2009 19:89-102).

[1493] Results were interpolated against the standard curve of each ELISA plate using a four parameter logistic curve fit. Shown in Tables 90 and 91 are the average from 3 separate PBMC donors of the G-CSF, interferon-alpha (IFN-alpha) and tumor necrosis factor alpha (TNF-alpha) production over time as measured by specific ELISA.

[1494] In the G-CSF ELISA, background signal from the Lipofectamine 2000 (LF2000) untreated condition was subtracted at each time point. The data demonstrated specific production of human G-CSF protein by human peripheral blood mononuclear is seen with G-CSF mRNA containing natural NTPs, 100% substitution with 5-methyl cytidine and pseudouridine, or 100% substitution with 5-methyl cytidine and N1-methyl-pseudouridine. Production of G-CSF was significantly increased through the use of 5-methyl cytidine and N1-methyl-pseudouridine modified mRNA relative to 5-methyl cytidine and pseudouridine modified mRNA.

[1495] With regards to innate immune recognition, while both modified mRNA chemistries largely prevented IFN-alpha and TNF-alpha production relative to positive controls (R848, p(I)p(C)), significant differences did exist between the chemistries. 5-methyl cytidine and pseudouridine modified mRNA resulted in low but detectable levels of IFN-alpha and TNF-alpha production, while 5-methyl cytidine and N1-methyl-pseudouridine modified mRNA resulted in no detectable IFN-alpha and TNF-alpha production.

[1496] Consequently, it has been determined that, in addition to the need to review more than one cytokine marker of the activation of the innate immune response, it has surprisingly been found that combinations of modifications provide differing levels of cellular response (protein production and immune activation). The modification, N1-methyl-pseudouridine, in this study has been shown to convey added protection over the standard combination of 5-methylcytidine/pseudouridine explored by others resulting in twice as much protein and almost 150 fold reduction in immune activation (TNF-alpha).

[1497] Given that PBMC contain a large array of innate immune RNA recognition sensors and are also capable of protein translation, it offers a useful system to test the interdependency of these two pathways. It is known that mRNA translation can be negatively affected by activation of such innate immune pathways (Kariko et a1. Immunity (2005) 23:165-175; Warren et a1. Cell Stem Cell (2010) 7:618-630). Using PBMC as an in vitro assay system it is possible to establish a correlation between translation (in this case G-CSF protein production) and cytokine production (in this case exemplified by IFN-alpha and TNF-alpha protein production). Better protein production is correlated with lower induction of innate immune activation pathway, and new chemistries can be judged favorably based on this ratio (Table 92).

[1498] In this study, the PC Ratio for the two chemical modifications, pseudouridine and N1-methyl-pseudouridine, both with 5-methy cytosine was 4742/141=34 as compared to 9944/1=9944 for the cytokine IFN-alpha. For the cytokine, TNF-alpha, the two chemistries had PC Ratios of 153 and 1243, respectively suggesting that for either cytokine, the N1-methyl-pseudouridine is the superior modification. In Tables 90 and 91, “NT” means not tested.

TABLE 90
G-CSF
G-CSF: 3 Donor Average (pg/ml)

| | |
|---|---|
| G-CSF | 4742 |
| 5-methylcytosine/ | |
| pseudouridine | |
| G-CSF | 9944 |
| 5-methylcytosine/ | |
| N1-methyl-pseudouridine | |
| Luciferase | 18 |
| LF2000 | 16 |

TABLE 91
IFN-alpha and TNF-alpha

| | IFN-alpha: 3 | TNF-alpha: 3 |
|---|---|---|
| | Donor Average | Donor Average |
| | (pg/ml) | (pg/ml) |
| G-CSF | 141 | 31 |
| 5-methylcytosine/pseudouridine | | |
| G-CSF | 1 | 8 |
| 5-methylcytosine/ | | |
| N1-methyl-pseudouridine | | |
| P(I)P(C) | 1104 | NT |
| R-848 | NT | 1477 |
| LF2000 | 17 | 25 |

TABLE 92
G-CSF to Cytokine Ratios

| | G-CSF/IFN-alpha (ratio) | | G-CSF/TNF-alpha (ratio) | |
|---|---|---|---|---|
| | | 5- | | 5- |
| | 5-methyl | methylcytosine/ | 5-methyl | methylcytosine/ |
| | cytosine/ | N1-methyl- | cytosine/ | N1-methyl- |
| | pseudouridine | pseudouridine | pseudouridine | pseudouridine |
| PC | 34 | 9944 | 153 | 1243 |
| Ratio | | | | |

### Example 63. In Vitro PBMC Studies: Percent Modification

[1499] 480 ng of G-CSF mRNA modified with 5-methylcytosine (5 mC) and pseudouridine (pseudoU) or unmodified G-CSF mRNA was transfected with 0.4 uL of Lipofectamine 2000 into peripheral blood mononuclear cells (PBMC) from three normal blood donors (D1, D2, and D3). The G-CSF mRNA (mRNA sequence shown in SEQ ID NO: 21438; polyA tail of approximately 160 nucleotides not shown in sequence; 5′cap, Cap1) was completely modified with 5 mC and pseudoU (100% modification), not modified with 5 mC and pseudoU (0% modification) or was partially modified with 5 mC and pseudoU so the mRNA would contain 75% modification, 50% modification or 25% modification. A control sample of Luciferase (mRNA sequence shown in SEQ ID NO: 21446; polyA tail of approximately 160 nucleotides not shown in sequence; 5′cap, Cap1; fully modified 5meC and pseudoU) was also analyzed for G-CSF expression. For TNF-alpha and IFN-alpha control samples of Lipofectamine2000, LPS, R-848, Luciferase (mRNA sequence shown in SEQ ID NO: 21446; polyA tail of approximately 160 nucleotides not shown in sequence; 5′cap, Cap1; fully modified 5 mC and pseudo), and P(I)P(C) were also analyzed. The supernatant was harvested and run by ELISA 22 hours after transfection to determine the protein expression. The expression of G-CSF is shown in Table 93 and the expression of IFN-alpha and TNF-alpha is shown in Table 94. The expression of IFN-alpha and TNF-alpha may be a secondary effect from the transfection of the G-CSF mRNA. Tables 93 and 94 show that the amount of chemical modification of G-CSF, interferon alpha (IFN-alpha) and tumor necrosis factor-alpha (TNF-alpha) is titratable when the mRNA is not fully modified and the titratable trend is not the same for each target.

[1500] By using PBMC as an in vitro assay system it is possible to establish a correlation between translation (in this case G-CSF protein production) and cytokine production (in this case exemplified by IFN-alpha protein production). Better protein production is correlated with lower induction of innate immune activation pathway, and the percentage modification of a chemistry can be judged favorably based on this ratio (Table 95). As calculated from Tables 93 and 94 and shown in Table 95, full modification with 5-methylcytidine and pseudouridine shows a much better ratio of protein/cytokine production than without any modification (natural G-CSF mRNA) (100-fold for IFN-alpha and 27-fold for TNF-alpha). Partial modification shows a linear relationship with increasingly less modification resulting in a lower protein/cytokine ratio.

TABLE 93
G-CSF Expression

| | G-CSF Expression (pg/ml) | | |
|---|---|---|---|
| | D1 | D2 | D3 |
| 100% modification | 1968.9 | 2595.6 | 2835.7 |
| 75% modification | 566.7 | 631.4 | 659.5 |
| 50% modification | 188.9 | 187.2 | 191.9 |
| 25% modification | 139.3 | 126.9 | 102.0 |
| 0% modification | 194.8 | 182.0 | 183.3 |
| Luciferase | 90.2 | 0.0 | 22.1 |

TABLE 94
IFN-alpha and TNF-alpha Expression

| | IFN-alpha | | | TNF-alpha | | |
|---|---|---|---|---|---|---|
| | Expression (pg/ml) | | | Expression (pg/ml) | | |
| | D1 | D2 | D3 | D1 | D2 | D3 |
| 100% modification | 336.5 | 78.0 | 46.4 | 115.0 | 15.0 | 11.1 |
| 75% modification | 339.6 | 107.6 | 160.9 | 107.4 | 21.7 | 11.8 |
| 50% modification | 478.9 | 261.1 | 389.7 | 49.6 | 24.1 | 10.4 |
| 25% modification | 564.3 | 400.4 | 670.7 | 85.6 | 26.6 | 19.8 |
| 0% modification | 1421.6 | 810.5 | 1260.5 | 154.6 | 96.8 | 45.9 |
| LPS | 0.0 | 0.6 | 0.0 | 0.0 | 12.6 | 4.3 |
| R-848 | 0.5 | 3.0 | 14.1 | 655.2 | 989.9 | 420.4 |
| P(I)P(C) | 130.8 | 297.1 | 585.2 | 765.8 | 2362.7 | 1874.4 |
| Lipid only | 1952.2 | 866.6 | 855.8 | 248.5 | 82.0 | 60.7 |

TABLE 95
PC Ratio and Effect of Percentage of Modification

| | Average | Average | Average | G-CSF/IFN- | G-CSF/TNF- |
|---|---|---|---|---|---|
| | G-CSF | IFN-a | TNF-a | alpha | alpha |
| % Modification | (pg/ml) | (pg/ml) | (pg/ml) | (PC ratio) | (PC ratio) |
| 100 | 2466 | 153 | 47 | 16 | 52 |
| 75 | 619 | 202 | 47 | 3.1 | 13 |
| 50 | 189 | 376 | 28 | 0.5 | 6.8 |
| 25 | 122 | 545 | 44 | 0.2 | 2.8 |
| 0 | 186 | 1164 | 99 | 0.16 | 1.9 |

### Example 64. Modified RNA Transfected in PBMC

[1501] 500 ng of G-CSF mRNA modified with 5-methylcytosine (5 mC) and pseudouridine (pseudoU) or unmodified G-CSF mRNA was transfected with 0.4 uL of Lipofectamine 2000 into peripheral blood mononuclear cells (PBMC) from three normal blood donors (D1, D2, and D3). The G-CSF mRNA (mRNA sequence shown in SEQ ID NO: 21438; polyA tail of approximately 160 nucleotides not shown in sequence; 5′cap, Cap1) was completely modified with 5 mC and pseudoU (100% modification), not modified with 5 mC and pseudoU (0% modification) or was partially modified with 5 mC and pseudoU so the mRNA would contain 50% modification, 25% modification, 10% modification, %5 modification, 1% modification or 0.1% modification. A control sample of mCherry (mRNA sequence shown in SEQ ID NO: 21439; polyA tail of approximately 160 nucleotides not shown in sequence; 5′cap, Cap1; fully modified 5meC and pseudouridine), G-CSF fully modified with 5-methylcytosine and pseudouridine (Control G-CSF) and an untreated control was also analyzed for expression of G-CSF, tumor necrosis factor-alpha (TNF-alpha) and interferon-alpha (IFN-alpha). The supernatant was harvested 6 hours and 18 hours after transfection and run by ELISA to determine the protein expression. The expression of G-CSF, IFN-alpha, and TNF-alpha for Donor 1 is shown in Table 96, Donor 2 is shown in Table 97 and Donor 3 is shown in Table 98.

[1502] Full 100% modification with 5-methylcytidine and pseudouridine resulted in the most protein translation (G-CSF) and the least amount of cytokine produced across all three human PBMC donors. Decreasing amounts of modification results in more cytokine production (IFN-alpha and TNF-alpha), thus further highlighting the importance of fully modification to reduce cytokines and to improve protein translation (as evidenced here by G-CSF production).

TABLE 96
Donor 1

| | | G-CSF (pg/mL) | | IFN-alpha (pg/mL) | | TNF-alpha (pg/mL) | |
|---|---|---|---|---|---|---|---|
| | | 6 hours | 18 hours | 6 hours | 18 hours | 6 hours | 18 hours |
| 100% | Mod | 1815 | 2224 | 1 | 13 | 0 | 0 |
| 75% | Mod | 591 | 614 | 0 | 89 | 0 | 0 |
| 50% | Mod | 172 | 147 | 0 | 193 | 0 | 0 |
| 25% | Mod | 111 | 92 | 2 | 219 | 0 | 0 |
| 10% | Mod | 138 | 138 | 7 | 536 | 18 | 0 |
| 1% | Mod | 199 | 214 | 9 | 660 | 18 | 3 |
| 0.1% | Mod | 222 | 208 | 10 | 597 | 0 | 6 |
| 0% | Mod | 273 | 299 | 10 | 501 | 10 | 0 |

| | | | | | | |
|---|---|---|---|---|---|---|
| Control G-CSF | 957 | 1274 | 3 | 123 | 18633 | 1620 |
| mCherry | 0 | 0 | 0 | 10 | 0 | 0 |
| Untreated | N/A | N/A | 0 | 0 | 1 | 1 |

TABLE 97
Donor 2

| | | G-CSF (pg/mL) | | IFN-alpha (pg/mL) | | TNF-alpha (pg/mL) | |
|---|---|---|---|---|---|---|---|
| | | 6 hours | 18 hours | 6 hours | 18 hours | 6 hours | 18 hours |
| 100% | Mod | 2184 | 2432 | 0 | 7 | 0 | 11 |
| 75% | Mod | 935 | 958 | 3 | 130 | 0 | 0 |
| 50% | Mod | 192 | 253 | 2 | 625 | 7 | 23 |
| 25% | Mod | 153 | 158 | 7 | 464 | 6 | 6 |
| 10% | Mod | 203 | 223 | 25 | 700 | 22 | 39 |
| 1% | Mod | 288 | 275 | 27 | 962 | 51 | 66 |
| 0.1% | Mod | 318 | 288 | 33 | 635 | 28 | 5 |
| 0% | Mod | 389 | 413 | 26 | 748 | 1 | 253 |

| | | | | | | |
|---|---|---|---|---|---|---|
| Control G-CSF | 1461 | 1634 | 1 | 59 | 481 | 814 |
| mCherry | 0 | 7 | 0 | 1 | 0 | 0 |
| Untreated | N/A | N/A | 1 | 0 | 0 | 0 |

TABLE 98
Donor 3

| | | G-CSF (pg/mL) | | IFN-alpha (pg/mL) | | TNF-alpha (pg/mL) | |
|---|---|---|---|---|---|---|---|
| | | 6 hours | 18 hours | 6 hours | 18 hours | 6 hours | 18 hours |
| 100% | Mod | 6086 | 7549 | 7 | 658 | 11 | 11 |
| 75% | Mod | 2479 | 2378 | 23 | 752 | 4 | 35 |
| 50% | Mod | 667 | 774 | 24 | 896 | 22 | 18 |
| 25% | Mod | 480 | 541 | 57 | 1557 | 43 | 115 |
| 10% | Mod | 838 | 956 | 159 | 2755 | 144 | 123 |
| 1% | Mod | 1108 | 1197 | 235 | 3415 | 88 | 270 |
| 0.1% | Mod | 1338 | 1177 | 191 | 2873 | 37 | 363 |
| 0% | Mod | 1463 | 1666 | 215 | 3793 | 74 | 429 |

| | | | | | | |
|---|---|---|---|---|---|---|
| Control G-CSF | 3272 | 3603 | 16 | 1557 | 731 | 9066 |
| mCherry | 0 | 0 | 2 | 645 | 0 | 0 |
| Untreated | N/A | N/A | 1 | 1 | 0 | 8 |

### Example 65. Innate Immune Response Study in BJ Fibroblasts

### A. Single Transfection

[1503] Human primary foreskin fibroblasts (BJ fibroblasts) were obtained from American Type Culture Collection (ATCC) (catalog #CRL-2522) and grown in Eagle's Minimum Essential Medium (ATCC, catalog #30-2003) supplemented with 10% fetal bovine serum at 37° C., under 5% CO₂. BJ fibroblasts were seeded on a 24-well plate at a density of 300,000 cells per well in 0.5 ml of culture medium. 250 ng of modified G-CSF mRNA (mRNA sequence shown in SEQ ID NO: 21438; polyA tail of approximately 140 nucleotides not shown in sequence; 5′cap, Cap1) fully modified with 5-methylcytosine and pseudouridine (Gen1) or fully modified with 5-methylcytosine and N1-methyl-pseudouridine (Gen2) having Cap0, Cap1 or no cap was transfected using Lipofectamine 2000 (Invitrogen, catalog #11668-019), following manufacturer's protocol. Control samples of poly I:C (PIC), Lipofectamine 2000 (Lipo), natural luciferase mRNA (mRNA sequence shown in SEQ ID NO: 21446; polyA tail of approximately 160 nucleotides not shown in sequence; 5′cap, Cap1) and natural G-CSF mRNA were also transfected. The cells were harvested after 18 hours, the total RNA was isolated and DNASE® treated using the RNeasy micro kit (catalog #74004) following the manufacturer's protocol. 100 ng of total RNA was used for cDNA synthesis using High Capacity cDNA Reverse Transcription kit (catalog #4368814) following the manufacturer's protocol. The cDNA was then analyzed for the expression of innate immune response genes by quantitative real time PCR using SybrGreen in a Biorad CFX 384 instrument following manufacturer's protocol. Table 99 shows the expression level of innate immune response transcripts relative to house-keeping gene HPRT (hypoxanthine phosphoribosytransferase) and is expressed as fold-induction relative to HPRT. In the table, the panel of standard metrics includes: RIG-I is retinoic acid inducible gene 1, IL6 is interleukin-6, OAS-1 is oligoadenylate synthetase 1, IFNb is interferon-beta, AIM2 is absent in melanoma-2, IFIT-1 is interferon-induced protein with tetratricopeptide repeats 1, PKR is protein kinase R, TNFa is tumor necrosis factor alpha and IFNa is interferon alpha.

TABLE 99
Innate Immune Response Transcript Levels

| Form. | RIG-I | IL6 | OAS-1 | IFNb | AIM2 | IFIT-1 | PKR | TNFa | IFNa |
|---|---|---|---|---|---|---|---|---|---|
| Natural | 71.5 | 20.6 | 20.778 | 11.404 | 0.251 | 151.218 | 16.001 | 0.526 | 0.067 |
| Luciferase | | | | | | | | | |
| Natural | 73.3 | 47.1 | 19.359 | 13.615 | 0.264 | 142.011 | 11.667 | 1.185 | 0.153 |
| G-CSF | | | | | | | | | |
| PIC | 30.0 | 2.8 | 8.628 | 1.523 | 0.100 | 71.914 | 10.326 | 0.264 | 0.063 |
| G-CSF | 0.81 | 0.22 | 0.080 | 0.009 | 0.008 | 2.220 | 1.592 | 0.090 | 0.027 |
| Gen1-UC | | | | | | | | | |
| G-CSF | 0.54 | 0.26 | 0.042 | 0.005 | 0.008 | 1.314 | 1.568 | 0.088 | 0.038 |
| Gen1- | | | | | | | | | |
| Cap0 | | | | | | | | | |
| G-CSF | 0.58 | 0.30 | 0.035 | 0.007 | 0.006 | 1.510 | 1.371 | 0.090 | 0.040 |
| Gen1- | | | | | | | | | |
| Cap1 | | | | | | | | | |
| G-CSF | 0.21 | 0.20 | 0.002 | 0.007 | 0.007 | 0.603 | 0.969 | 0.129 | 0.005 |
| Gen2-UC | | | | | | | | | |
| G-CSF | 0.23 | 0.21 | 0.002 | 0.0014 | 0.007 | 0.648 | 1.547 | 0.121 | 0.035 |
| Gen2- | | | | | | | | | |
| Cap0 | | | | | | | | | |
| G-CSF | 0.27 | 0.26 | 0.011 | 0.004 | 0.005 | 0.678 | 1.557 | 0.099 | 0.037 |
| Gen2- | | | | | | | | | |
| Cap1 | | | | | | | | | |
| Lipo | 0.27 | 0.53 | 0.001 | 0 | 0.007 | 0.954 | 1.536 | 0.158 | 0.064 |

### B. Repeat Transfection

[1504] Human primary foreskin fibroblasts (BJ fibroblasts) were obtained from American Type Culture Collection (ATCC) (catalog #CRL-2522) and grown in Eagle's Minimum Essential Medium (ATCC, catalog #30-2003) supplemented with 1000 fetal bovine serum at 37° C., under 500 CO₂. BJ fibroblasts were seeded on a 24-well plate at a density of 300,000 cells per well in 0.5 ml of culture medium. 250 ng of modified G-CSF mRNA (mRNA sequence shown in SEQ ID NO: 21438; polyA tail of approximately 140 nucleotides not shown in sequence; 5′cap, Cap1) unmodified, fully modified with 5-methylcytosine and pseudouridine (Gen1) or fully modified with 5-methylcytosine and N1-methyl-pseudouridine (Gen2) was transfected daily for 5 days following manufacturer's protocol. Control samples of Lipofectamine 2000 (L2000) and mCherry mRNA (mRNA sequence shown in SEQ ID NO: 21439; polyA tail of approximately 160 nucleotides not shown in sequence; 5′ cap, Cap 1; fully modified with 5-methylcytidine and pseudouridine) were also transfected daily for 5 days. The results are shown in Table 100.

[1505] Unmodified mRNA showed a cytokine response in interferon-beta (IFN-beta) and interleukin-6 (IL-6) after one day. mRNA modified with at least pseudouridine showed a cytokine response after 2-3 days whereas mRNA modified with 5-methylcytosine and N1-methyl-pseudouridine showed a reduced response after 3-5 days.

TABLE 100
Cytokine Response

| Formulation | Transfection | IFN-beta (pg/ml) | IL-6 (pg/ml) |
|---|---|---|---|
| G-CSF unmodified | 6 hours | 0 | 3596 |
| | Day 1 | 1363 | 15207 |
| | Day 2 | 238 | 12415 |
| | Day 3 | 225 | 5017 |
| | Day 4 | 363 | 4267 |
| | Day 5 | 225 | 3094 |
| G-CSF Gen 1 | 6 hours | 0 | 3396 |
| | Day 1 | 38 | 3870 |
| | Day 2 | 1125 | 16341 |
| | Day 3 | 100 | 25983 |
| | Day 4 | 75 | 18922 |
| | Day 5 | 213 | 15928 |
| G-CSF Gen 2 | 6 hours | 0 | 3337 |
| | Day 1 | 0 | 3733 |
| | Day 2 | 150 | 974 |
| | Day 3 | 213 | 4972 |
| | Day 4 | 1400 | 4122 |
| | Day 5 | 350 | 2906 |
| mCherry | 6 hours | 0 | 3278 |
| | Day 1 | 238 | 3893 |
| | Day 2 | 113 | 1833 |
| | Day 3 | 413 | 25539 |
| | Day 4 | 413 | 29233 |
| | Day 5 | 213 | 20178 |
| L2000 | 6 hours | 0 | 3270 |
| | Day 1 | 13 | 3933 |
| | Day 2 | 388 | 567 |
| | Day 3 | 338 | 1517 |
| | Day 4 | 475 | 1594 |
| | Day 5 | 263 | 1561 |

### Example 66. In Vivo Detection of Innate Immune Response

[1506] In an effort to distringuish the importance of different chemical modification of mRNA on in vivo protein production and cytokine response in vivo, female BALB/C mice (n=5) are injected intramuscularly with G-CSF mRNA (G-CSF mRNA unmod) (mRNA sequence shown in SEQ ID NO: 21438; polyA tail of approximately 160 nucleotides not shown in sequence;) with a 5′cap of Cap1, G-CSF mRNA fully modified with 5-methylcytosine and pseudouridine (G-CSF mRNA 5 mc/pU), G-CSF mRNA fully modified with 5-methylcytosine and N1-methyl-pseudouridine with (G-CSF mRNA 5 mc/N1pU) or without a 5′ cap (G-CSF mRNA 5 mc/N1 pU no cap) or a control of either R848 or 5% sucrose as described in Table 101.

TABLE 101
Dosing Chart

| Formulation | Route | Dose (ug/mouse) | Dose (ul) |
|---|---|---|---|
| G-CSF mRNA unmod | I.M. | 200 | 50 |
| G-CSF mRNA 5mc/pU | I.M. | 200 | 50 |
| G-CSF mRNA | I.M. | 200 | 50 |
| 5mc/N1pU | | | |
| G-CSF mRNA | I.M. | 200 | 50 |
| 5mc/N1pU no cap | | | |
| R848 | I.M. | 75 | 50 |
| 5% sucrose | I.M. | — | 50 |
| Untreated | I.M. | — | — |

[1507] Blood is collected at 8 hours after dosing. Using ELISA the protein levels of G-CSF, TNF-alpha and IFN-alpha is determined by ELISA. 8 hours after dosing, muscle is collected from the injection site and quantitative real time polymerase chain reaction (QPCR) is used to determine the mRNA levels of RIG-I, PKR, AIM-2, IFIT-1, OAS-2, MDA-5, IFN-beta, TNF-alpha, TL-6, G-CSF, CD45 in the muscle.

### Example 67. In Vivo Detection of Innate Immune Response Study

[1508] Female BALB/C mice (n=5) were injected intramuscularly with G-CSF mRNA (G-CSF mRNA unmod) (mRNA sequence shown in SEQ ID NO: 21438; polyA tail of approximately 160 nucleotides not shown in sequence;) with a 5′cap of Cap1, G-CSF mRNA fully modified with 5-methylcytosine and pseudouridine (G-CSF mRNA 5 mc/pU), G-CSF mRNA fully modified with 5-methylcytosine and N1-methyl-pseudouridine with (G-CSF mRNA 5 mc/N1pU) or without a 5′ cap (G-CSF mRNA 5 mc/N1 pU no cap) or a control of either R848 or 5% sucrose as described in Table 102. Blood is collected at 8 hours after dosing and using ELISA the protein levels of G-CSF and interferon-alpha (IFN-alpha) is determined by ELISA and are shown in Table 102.

[1509] As shown in Table 102, unmodified, 5 mc/pU, and 5 mc/N1pU modified G-CSF mRNA resulted in human G-CSF expression in mouse serum. The uncapped 5 mC/N1pU modified G-CSF mRNA showed no human G-CSF expression in serum, highlighting the importance of having a 5′ cap structure for protein translation.

[1510] As expected, no human G-CSF protein was expressed in the R848, 5% sucrose only, and untreated groups. Importantly, significant differences were seen in cytokine production as measured by mouse IFN-alpha in the serum. As expected, unmodified G-CSF mRNA demonstrated a robust cytokine response in vivo (greater than the R848 positive control). The 5 mc/pU modified G-CSF mRNA did show a low but detectable cytokine response in vivo, while the 5 mc/N1pU modified mRNA showed no detectable IFN-alpha in the serum (and same as vehicle or untreated animals).

[1511] Also, the response of 5 mc/N1pU modified mRNA was the same regardless of whether it was capped or not. These in vivo results reinforce the conclusion that 1) that unmodified mRNA produce a robust innate immune response, 2) that this is reduced, but not abolished, through 100% incorporation of 5 mc/pU modification, and 3) that incorporation of 5 mc/N1pU modifications results in no detectable cytokine response.

[1512] Lastly, given that these injections are in 5% sucrose (which has no effect by itself), these result should accurately reflect the immunostimulatory potential of these modifications.

[1513] From the data it is evident that N1pU modified molecules produce more protein while concomitantly having little or no effect on IFN-alpha expression. It is also evident that capping is required for protein production for this chemical modification. The Protein: Cytokine Ratio of 748 as compared to the PC Ratio for the unmodified mRNA (PC=9) means that this chemical modification is far superior as related to the effects or biological implications associated with IFN-alpha.

TABLE 102
Human G-CSF and Mouse IFN-alpha in serum

| | | Dose | | G-CSF | IFN-alpha | |
|---|---|---|---|---|---|---|
| | | (ug/ | Dose | protein | expression | PC |
| Formulation | Route | mouse) | (ul) | (pg/ml) | (pg/ml) | Ratio |
| G-CSF mRNA | I.M. | 200 | 50 | 605.6 | 67.01 | 9 |
| unmod | | | | | | |
| G-CSF mRNA | I.M. | 200 | 50 | 356.5 | 8.87 | 40 |
| 5 mc/pU | | | | | | |
| G-CSF mRNA | I.M. | 200 | 50 | 748.1 | 0 | 748 |
| 5 mc/N1pU | | | | | | |
| G-CSF mRNA | I.M. | 200 | 50 | 6.5 | 0 | 6.5 |
| 5 mc/N1pU | | | | | | |
| no cap | | | | | | |
| R848 | I.M. | 75 | 50 | 3.4 | 40.97 | .08 |
| 5% sucrose | I.M. | — | 50 | 0 | 1.49 | 0 |
| Untreated | I.M. | — | — | 0 | 0 | 0 |

### Example 68: In Vivo Delivery of Modified RNA

[1514] Protein production of modified mRNA was evaluated by delivering modified G-CSF mRNA or modified Factor IX mRNA to female Sprague Dawley rats (n=6). Rats were injected with 400 ug in 100 ul of G-CSF mRNA (mRNA sequence shown in SEQ ID NO: 21438; polyA tail of approximately 160 nucleotides not shown in sequence; 5′cap, Cap1) fully modified with 5-methylcytosine and pseudouridine (G-CSF Gen1), G-CSF mRNA fully modified with 5-methylcytosine and N1-methyl-pseudouridine (G-CSF Gen2) or Factor IX mRNA (mRNA sequence shown in SEQ ID NO: 1622; polyA tail of approximately 160 nucleotides not shown in sequence; 5′cap, Cap1) fully modified with 5-methylcytosine and pseudouridine (Factor IX Gen1) reconstituted from the lyophilized form in 5% sucrose. Blood was collected 8 hours after injection and the G-CSF protein level in serum was measured by ELISA. Table 103 shows the G-CSF protein levels in serum after 8 hours.

[1515] These results demonstrate that both G-CSF Gen 1 and G-CSF Gen 2 modified mRNA can produce human G-CSF protein in a rat following a single intramuscular injection, and that human G-CSF protein production is improved when using Gen 2 chemistry over Gen 1 chemistry.

TABLE 103
G-CSF Protein in Rat Serum (I.M. Injection Route)

| Formulation | G-CSF protein (pg/ml) |
|---|---|
| G-CSF Gen1 | 19.37 |
| G-CSF Gen2 | 64.72 |
| Factor IX Gen 1 | 2.25 |

### Example 69. Chemical Modification: In Vitro Studies

### A. In Vitro Screening in PBMC

[1516] 500 ng of G-CSF (mRNA sequence shown in SEQ ID NO: 21438; polyA tail of approximately 160 nucleotides not shown in sequence; 5′cap, Cap1) mRNA fully modified with the chemical modification outlined Tables 104 and 105 was transfected with 0.4 uL Lipofectamine 2000 into peripheral blood mononuclear cells (PBMC) from three normal blood donors. Control samples of LPS, R848, P(I)P(C) and mCherry (mRNA sequence shown in SEQ ID NO: 21439; polyA tail of approximately 160 nucleotides not shown in sequence, 5′cap, Cap1; fully modified with 5-methylcytosine and pseudouridine) were also analyzed. The supernatant was harvested and stored frozen until analyzed by ELISA to determine the G-CSF protein expression, and the induction of the cytokines interferon-alpha (IFN-α) and tumor necrosis factor alpha (TNF-α). The protein expression of G-CSF is shown in Table 104, the expression of IFN-α and TNF-α is shown in Table 105.

[1517] The data in Table 104 demonstrates that many, but not all, chemical modifications can be used to productively produce human G-CSF in PBMC. Of note, 100% N1-methyl-pseudouridine substitution demonstrates the highest level of human G-CSF production (almost 10-fold higher than pseudouridine itself). When N1-methyl-pseudouridine is used in combination with 5-methylcytidine a high level of human G-CSF protein is also produced (this is also higher than when pseudouridine is used in combination with 5 methylcytidine).

[1518] Given the inverse relationship between protein production and cytokine production in PBMC, a similar trend is also seen in Table 105, where 100% substitution with N1-methyl-pseudouridine results no cytokine induction (similar to transfection only controls) and pseudouridine shows detectable cytokine induction which is above background.

[1519] Other modifications such as N6-methyladenosine and alpha-thiocytidine appear to increase cytokine stimulation.

TABLE 104
Chemical Modifications and G-CSF Protein Expression

| | G-CSF Protein Expression | | |
|---|---|---|---|
| | (pg/ml) | | |
| Chemical Modifications | Donor 1 | Donor 2 | Donor 3 |
| Pseudouridine | 2477 | 1,909 | 1,498 |
| 5-methyluridine | 318 | 359 | 345 |
| N1-methyl-pseudouridine | 21,495 | 16,550 | 12,441 |
| 2-thiouridine | 932 | 1,000 | 600 |
| 4-thiouridine | 5 | 391 | 218 |
| 5-methoxyuridine | 2,964 | 1,832 | 1,800 |
| 5-methylcytosine and pseudouridine (1^{st} set) | 2,632 | 1,955 | 1,373 |
| 5-methylcytosine and N1-methyl- | 10,232 | 7,245 | 6,214 |
| pseudouridine (1^{st} set) | | | |
| 2′Fluoroguanosine | 59 | 186 | 177 |
| 2′Fluorouridine | 118 | 209 | 191 |
| 5-methylcytosine and pseudouridine (2^{nd} set) | 1,682 | 1,382 | 1,036 |
| 5-methylcytosine and N1-methyl- | 9,564 | 8,509 | 7,141 |
| pseudouridine (2^{nd} set) | | | |
| 5-bromouridine | 314 | 482 | 291 |
| 5-(2-carbomethoxyvinyl)uridine | 77 | 286 | 177 |
| 5-[3(1-E-propenylamino)uridine | 541 | 491 | 550 |
| α-thiocytidine | 105 | 264 | 245 |
| 5-methylcytosine and pseudouridine (3^{rd} set) | 1,595 | 1,432 | 955 |
| N1-methyladenosine | 182 | 177 | 191 |
| N6-methyladenosine | 100 | 168 | 200 |
| 5-methylcytidine | 291 | 277 | 359 |
| N4-acetylcytidine | 50 | 136 | 36 |
| 5-formylcytidine | 18 | 205 | 23 |
| 5-methylcytosine and pseudouridine (4^{th} set) | 264 | 350 | 182 |
| 5-methylcytosine and N1-methyl- | 9,505 | 6,927 | 5,405 |
| pseudouridine (4^{th} set) | | | |
| LPS | 1,209 | 786 | 636 |
| mCherry | 5 | 168 | 164 |
| R848 | 709 | 732 | 636 |
| P(I)P(C) | 5 | 186 | 182 |

TABLE 105
Chemical Modifications and Cytokine Expression

| Chemical | IFN-α Expression (pg/ml) | | | TNF-α Expression (pg/ml) | | |
|---|---|---|---|---|---|---|
| Modifications | Donor 1 | Donor 2 | Donor 3 | Donor 1 | Donor 2 | Donor 3 |
| Pseudouridine | 120 | 77 | 171 | 36 | 81 | 126 |
| 5-methyluridine | 245 | 135 | 334 | 94 | 100 | 157 |
| N1-methyl- | 26 | 75 | 138 | 101 | 106 | 134 |
| pseudouridine | | | | | | |
| 2-thiouridine | 100 | 108 | 154 | 133 | 133 | 141 |
| 4-thiouridine | 463 | 258 | 659 | 169 | 126 | 254 |
| 5-methoxyuridine | 0 | 64 | 133 | 39 | 74 | 111 |
| 5-methylcytosine | 88 | 94 | 148 | 64 | 89 | 121 |
| and pseudouridine (1^{st} set) | | | | | | |
| 5-methylcytosine | 0 | 60 | 136 | 54 | 79 | 126 |
| and N1-methyl- | | | | | | |
| pseudouridine (1^{st} set) | | | | | | |
| 2′Fluoroguanosine | 107 | 97 | 194 | 91 | 94 | 141 |
| 2′Fluorouridine | 158 | 103 | 178 | 164 | 121 | 156 |
| 5-methylcytosine | 133 | 92 | 167 | 99 | 111 | 150 |
| and pseudouridine | | | | | | |
| (2^{nd} set) | | | | | | |
| 5-methylcytosine | 0 | 66 | 140 | 54 | 97 | 149 |
| and N1-methyl- | | | | | | |
| pseudouridine (2^{nd} set) | | | | | | |
| 5-bromouridine | 95 | 86 | 181 | 87 | 106 | 157 |
| 5-(2- | 0 | 61 | 130 | 40 | 81 | 116 |
| carbomethoxyvinyl)uridine | | | | | | |
| 5-[3(1-E-propenylamino) | 0 | 58 | 132 | 71 | 90 | 119 |
| uridine | | | | | | |
| α-thiocytidine | 1,138 | 565 | 695 | 300 | 273 | 277 |
| 5-methylcytosine | 88 | 75 | 150 | 84 | 89 | 130 |
| and pseudouridine (3^{rd} set) | | | | | | |
| N1-methyladenosine | 322 | 255 | 377 | 256 | 157 | 294 |
| N6-methyladenosine | 1,935 | 1,065 | 1,492 | 1,080 | 630 | 857 |
| 5-methylcytidine | 643 | 359 | 529 | 176 | 136 | 193 |
| N4-acetylcytidine | 789 | 593 | 431 | 263 | 67 | 207 |
| 5-formylcytidine | 180 | 93 | 88 | 136 | 30 | 40 |
| 5-methylcytosine | 131 | 28 | 18 | 53 | 24 | 29 |
| and pseudouridine (4^{th} set) | | | | | | |
| 5-methylcytosine | 0 | 0 | 0 | 36 | 14 | 13 |
| and N1-methyl- | | | | | | |
| pseudouridine (4^{th} set) | | | | | | |
| LPS | 0 | 67 | 146 | 7,004 | 3,974 | 4,020 |
| mCherry | 100 | 75 | 143 | 67 | 100 | 133 |
| R848 | 674 | 619 | 562 | 11,179 | 8,546 | 9,907 |
| P(I)P(C) | 470 | 117 | 362 | 249 | 177 | 197 |

B. In vitro Screening in HeLa Cells

[1520] The day before transfection, 20,000 HeLa cells (ATCC no. CCL-2; Manassas, VA) were harvested by treatment with Trypsin-EDTA solution (LifeTechnologies, Grand Island, NY) and seeded in a total volume of 100 ul EMEM medium (supplemented with 10% FCS and 1× Glutamax) per well in a 96-well cell culture plate (Corning, Manassas, VA). The cells were grown at 37oG in 5% CO₂ atmosphere overnight. Next day, 83 ng of Luciferase modified RNA (mRNA sequence shown in SEQ ID NO: 21446; polyA tail of approximately 160 nucleotides not shown in sequence; 5′cap, Cap1) with the chemical modification described in Table 106, were diluted in 10 ul final volume of OPTI-MEM (LifeTechnologies, Grand Island, NY).

[1521] Lipofectamine 2000 (LifeTechnologies, Grand Island, NY) was used as transfection reagent and 0.2 ul were diluted in 10 ul final volume of OPTI-MEM. After 5 minutes of incubation at room temperature, both solutions were combined and incubated an additional 15 minute at room temperature. Then the 20 ul combined solution was added to the 100 ul cell culture medium containing the HeLa cells and incubated at room temperature.

[1522] After 18 to 22 hours of incubation cells expressing luciferase were lysed with 100 ul of Passive Lysis Buffer (Promega, Madison, WI) according to manufacturer instructions. Aliquots of the lysates were transferred to white opaque polystyrene 96-well plates (Corning, Manassas, VA) and combined with 100 ul complete luciferase assay solution (Promega, Madison, WI). The lysate volumes were adjusted or diluted until no more than 2 mio relative light units (RLU) per well were detected for the strongest signal producing samples and the RLUs for each chemistry tested are shown in Table 106. The plate reader was a BioTek Synergy H1 (BioTek, Winooski, VT). The background signal of the plates without reagent was about 200 relative light units per well.

[1523] These results demonstrate that many, but not all, chemical modifications can be used to productively produce human G-CSF in HeLa cells. Of note, 100% N1-methyl-pseudouridine substitution demonstrates the highest level of human G-CSF production.

TABLE 106
Relative Light Units of Luciferase

| Chemical Modification | RLU |
|---|---|
| N6-methyladenosine (m6a) | 534 |
| 5-methylcytidine (m5c) | 138,428 |
| N4-acetylcytidine (ac4c) | 235,412 |
| 5-formylcytidine (f5c) | 436 |
| 5-methylcytosine/pseudouridine, test A1 | 48,659 |
| 5-methylcytosine/N1-methyl-pseudouridine, test A1 | 190,924 |
| Pseudouridine | 655,632 |
| 1-methylpseudouridine (m1u) | 1,517,998 |
| 2-thiouridine (s2u) | 3387 |
| 5-methoxyuridine (mo5u) | 253,719 |
| 5-methylcytosine/pseudouridine, test B1 | 317,744 |
| 5-methylcytosine/N1-methyl-pseudouridine, test B1 | 265,871 |
| 5-Bromo-uridine | 43,276 |
| 5 (2 carbovinyl) uridine | 531 |
| 5 (3-1E propenyl Amino) uridine | 446 |
| 5-methylcytosine/pseudouridine, test A2 | 295,824 |
| 5-methylcytosine/N1-methyl-pseudouridine, test A2 | 233,921 |
| 5-methyluridine | 50,932 |
| α-Thio-cytidine | 26,358 |
| 5-methylcytosine/pseudouridine, test B2 | 481,477 |
| 5-methylcytosine/N1-methyl-pseudouridine, test B2 | 271,989 |
| 5-methylcytosine/pseudouridine, test A3 | 438,831 |
| 5-methylcytosine/N1-methyl-pseudouridine, test A3 | 277,499 |
| Unmodified Luciferase | 234,802 |

### C. In Vitro Screening in Rabbit Reticulocyte Lysates

[1524] Luciferase mRNA (mRNA sequence shown in SEQ ID NO: 21446; polyA tail of approximately 160 nucleotides not shown in sequence; 5′cap, Cap1) was modified with the chemical modification listed in Table 107 and were diluted in sterile nuclease-free water to a final amount of 250 ng in 10 ul. The diluted luciferase was added to 40 ul of freshly prepared Rabbit Reticulocyte Lysate and the in vitro translation reaction was done in a standard 1.5 mL polypropylene reaction tube (Thermo Fisher Scientific, Waltham, MA) at 30° C. in a dry heating block. The translation assay was done with the Rabbit Reticulocyte Lysate (nuclease-treated) kit (Promega, Madison, WI) according to the manufacturer's instructions. The reaction buffer was supplemented with a one-to-one blend of provided amino acid stock solutions devoid of either Leucine or Methionine resulting in a reaction mix containing sufficient amounts of both amino acids to allow effective in vitro translation.

[1525] After 60 minutes of incubation, the reaction was stopped by placing the reaction tubes on ice. Aliquots of the in vitro translation reaction containing luciferase modified RNA were transferred to white opaque polystyrene 96-well plates (Corning, Manassas, VA) and combined with 100 ul complete luciferase assay solution (Promega, Madison, WI). The volumes of the in vitro translation reactions were adjusted or diluted until no more than 2 mio relative light units (RLUs) per well were detected for the strongest signal producing samples and the RLUs for each chemistry tested are shown in Table 107. The plate reader was a BioTek Synergy H1 (BioTek, Winooski, VT). The background signal of the plates without reagent was about 200 relative light units per well.

[1526] These cell-free translation results very nicely correlate with the protein production results in HeLa, with the same modifications generally working or not working in both systems. One notable exception is 5-formylcytidine modified luciferase mRNA which worked in the cell-free translation system, but not in the HeLa cell-based transfection system. A similar difference between the two assays was also seen with 5-formylcytidine modified G-CSF mRNA.

TABLE 107
Relative Light Units of Luciferase

| Chemical Modification | RLU |
|---|---|
| N6-methyladenosine (m6a) | 398 |
| 5-methylcytidine (m5c) | 152,989 |
| N4-acetylcytidine (ac4c) | 60,879 |
| 5-formylcytidine (f5c) | 55,208 |
| 5-methylcytosine/pseudouridine, test A1 | 349,398 |
| 5-methylcytosine/N1-methyl-pseudouridine, test A1 | 205,465 |
| Pseudouridine | 587,795 |
| 1-methylpseudouridine (m1u) | 589,758 |
| 2-thiouridine (s2u) | 708 |
| 5-methoxyuridine (mo5u) | 288,647 |
| 5-methylcytosine/pseudouridine, test B1 | 454,662 |
| 5-methylcytosine/N1-methyl-pseudouridine, test B1 | 223,732 |
| 5-Bromo-uridine | 221,879 |
| 5 (2 carbovinyl) uridine | 225 |
| 5 (3-1E propenyl Amino) uridine | 211 |
| 5-methylcytosine/pseudouridine, test A2 | 558,779 |
| 5-methylcytosine/N1-methyl-pseudouridine, test A2 | 333,082 |
| 5-methyluridine | 214,680 |
| α-Thio-cytidine | 123,878 |
| 5-methylcytosine/pseudouridine, test B2 | 487,805 |
| 5-methylcytosine/N1-methyl-pseudouridine, test B2 | 154,096 |
| 5-methylcytosine/pseudouridine, test A3 | 413,535 |
| 5-methylcytosine/N1-methyl-pseudouridine, test A3 | 292,954 |
| Unmodified Luciferase | 225,986 |

### Example 70. Chemical Modification: In Vivo Studies

A. In Vivo Screening of G-CSF Modified mRNA

[1527] Balb-C mice (n=4) are intramuscularly injected in each leg with modified G-CSF mRNA (mRNA sequence shown in SEQ ID NO: 21438; polyA tail of approximately 160 nucleotides not shown in sequence; 5′cap, Cap1), fully modified with the chemical modifications outlined in Table 108, is formulated in 1×PBS. A control of luciferase modified mRNA (mRNA sequence shown in SEQ ID NO: 21446; polyA tail of approximately 160 nucleotides not shown in sequence; 5′cap, Cap1; fully modified with pseudouridine and 5-methylcytosine) and a control of PBS are also tested. After 8 hours serum is collected to determine G-CSF protein levels cytokine levels by ELISA.

TABLE 108
G-CSF

| mRNA | Chemical Modifications |
|---|---|
| G-CSF | Pseudouridine |
| G-CSF | 5-methyluridine |
| G-CSF | 2-thiouridine |
| G-CSF | 4-thiouridine |
| G-CSF | 5-methoxyuridine |
| G-CSF | 2′-fluorouridine |
| G-CSF | 5-bromouridine |
| G-CSF | 5-[3(1-E-propenylamino)uridine) |
| G-CSF | alpha-thio-cytidine |
| G-CSF | 5-methylcytidine |
| G-CSF | N4-acetylcytidine |
| G-CSF | Pseudouridine and 5-methylcytosine |
| G-CSF | N1-methyl-pseudouridine and 5-methylcytosine |
| Luciferase | Pseudouridine and 5-methylcytosine |
| PBS | None |

B. In Vivo Screening of Luciferase Modified mRNA

[1528] Balb-C mice (n=4) were subcutaneously injected with 200 ul containing 42 to 103 ug of modified luciferase mRNA (mRNA sequence shown in SEQ ID NO: 21446; polyA tail of approximately 160 nucleotides not shown in sequence; 5′cap, Cap1), fully modified with the chemical modifications outlined in Table 109, was formulated in 1×PBS. A control of PBS was also tested. The dosages of the modified luciferase mRNA is also outlined in Table 109. 8 hours after dosing the mice were imaged to determine luciferase expression. Twenty minutes prior to imaging, mice were injected intraperitoneally with a D-luciferin solution at 150 mg/kg. Animals were then anesthetized and images were acquired with an IVIS Lumina II imaging system (Perkin Elmer). Bioluminescence was measured as total flux (photons/second) of the entire mouse.

[1529] As demonstrated in Table 109, all luciferase mRNA modified chemistries demonstrated in vivo activity, with the exception of 2′-fluorouridine. In addition 1-methylpseudouridine modified mRNA demonstrated very high expression of luciferase (5-fold greater expression than pseudouridine containing mRNA).

TABLE 109
Luciferase Screening

| | | Dose | Dose | Luciferase |
|---|---|---|---|---|
| | Chemical | (ug) of | volume | expression |
| mRNA | Modifications | mRNA | (ml) | (photon/second) |
| Luciferase | 5-methylcytidine | 83 | 0.72 | 1.94E+07 |
| Luciferase | N4-acetylcytidine | 76 | 0.72 | 1.11E07 |
| Luciferase | Pseudouridine | 95 | 1.20 | 1.36E+07 |
| Luciferase | 1-methylpseudouridine | 103 | 0.72 | 7.40E+07 |
| Luciferase | 5-methoxyuridine | 95 | 1.22 | 3.32+07 |
| Luciferase | 5-methyluridine | 94 | 0.86 | 7.42E+06 |
| Luciferase | 5-bromouridine | 89 | 1.49 | 3.75E+07 |
| Luciferase | 2′-fluoroguanosine | 42 | 0.72 | 5.88E+05 |
| Luciferase | 2′-fluorocytidine | 47 | 0.72 | 4.21E+05 |
| Luciferase | 2′-flurorouridine | 59 | 0.72 | 3.47E+05 |
| PBS | None | — | 0.72 | 3.16E+05 |

### Example 71. In Vivo Screening of Combination Luciferase Modified mRNA

[1530] Balb-C mice (n=4) were subcutaneously injected with 200 ul of 100 ug of modified luciferase mRNA (mRNA sequence shown in SEQ ID NO: 21446; polyA tail of approximately 160 nucleotides not shown in sequence; 5′cap, Cap1), fully modified with the chemical modifications outlined in Table 110, was formulated in 1× PBS. A control of PBS was also tested. 8 hours after dosing the mice were imaged to determine luciferase expression. Twenty minutes prior to imaging, mice were injected intraperitoneally with a D-luciferin solution at 150 mg/kg. Animals were then anesthetized and images were acquired with an IVIS Lumina II imaging system (Perkin Elmer). Bioluminescence was measured as total flux (photons/second) of the entire mouse.

[1531] As demonstrated in Table 110, all luciferase mRNA modified chemistries (in combination) demonstrated in vivo activity. In addition the presence of N1-methyl-pseudouridine in the modified mRNA (with N4-acetylcytidine or 5 methylcytidine) demonstrated higher expression than when the same combinations where tested using with pseudouridine. Taken together, these data demonstrate that N1-methyl-pseudouridine containing luciferase mRNA results in improved protein expression in vivo whether used alone (Table 109) or when used in combination with other modified nulceotides (Table 110).

TABLE 110
Luciferase Screening Combinations

| | | Luciferase |
|---|---|---|
| | | expression |
| | | (photon/ |
| mRNA | Chemical Modifications | second) |
| Luciferase | N4-acetylcytidine/pseudouridine | 4.18E+06 |
| Luciferase | N4-acetylcytidine/N1-methyl-pseudouridine | 2.88E+07 |
| Luciferase | 5-methylcytidine/5-methoxyuridine | 3.48E+07 |
| Luciferase | 5-methylcytidine/5-methyluridine | 1.44E+07 |
| Luciferase | 5-methylcytidine/where 50% of the uridine is | 2.39E+06 |
| | replaced with 2-thiouridine | |
| Luciferase | 5-methylcytidine/pseudouridine | 2.36E+07 |
| Luciferase | 5-methylcytidine/N1-methyl-pseudouridine | 4.15E+07 |
| PBS | None | 3.59E+05 |

### Example 72. Innate Immune Response in BJ Fibroblasts

[1532] Human primary foreskin fibroblasts (BJ fibroblasts) are obtained from American Type Culture Collection (ATCC) (catalog #CRL-2522) and grown in Eagle's Minimum Essential Medium (ATCC, cat #30-2003) supplemented with 10% fetal bovine serum at 37° C., under 5% CO2. BJ fibroblasts are seeded on a 24-well plate at a density of 130,000 cells per well in 0.5 ml of culture medium. 250 ng of modified G-CSF mRNA (mRNA sequence shown in SEQ ID NO: 21438; polyA tail of approximately 160 nucleotides not shown in sequence; 5′cap, Cap1) fully modified with 5-methylcytosine and pseudouridine (Gen1) or fully modified with 5-methylcytosine and N1-methyl-pseudouridine (Gen2) is transfected using Lipofectamine 2000 (Invitrogen, cat #11668-019), following manufacturer's protocol. Control samples of Lipofectamine 2000 and unmodified G-CSF mRNA (natural G-CSF) are also transfected. The cells are transfected for five consecutive days. The transfection complexes are removed four hours after each round of transfection.

[1533] The culture supernatant is assayed for secreted G-CSF (R&D Systems, catalog #DCS50), tumor necrosis factor-alpha (TNF-alpha) and interferon alpha (IFN-alpha by ELISA every day after transfection following manufacturer's protocols. The cells are analyzed for viability using CELL TITER GLO® (Promega, catalog #G7570) 6 hrs and 18 hrs after the first round of transfection and every alternate day following that. At the same time from the harvested cells, total RNA is isolated and treated with DNASE® using the RNAEASY micro kit (catalog #74004) following the manufacturer's protocol. 100 ng of total RNA is used for cDNA synthesis using the High Capacity cDNA Reverse Transcription kit (Applied Biosystems, cat #4368814) following the manufacturer's protocol. The cDNA is then analyzed for the expression of innate immune response genes by quantitative real time PCR using SybrGreen in a Biorad CFX 384 instrument following the manufacturer's protocol.

### Example 73. In Vitro Transcription with Wild-Type T7 Polymerase

[1534] Luciferase mRNA (mRNA sequence shown in SEQ ID NO: 21446; polyA tail of approximately 160 nucleotides not shown in sequence; 5′cap, Cap1) and G-CSF mRNA (mRNA sequence shown in SEQ ID NO: 21438; polyA tail of approximately 160 nucleotides not shown in sequence; 5′cap, Cap1) were fully modified with different chemistries and chemistry combinations listed in Tables 111-114 using wild-type T7 polymerase as previously described.

[1535] The yield of the translation reactions was determined by spectrophometric measurement (OD260) and the yield for Luciferase is shown in Table 111 and G-CSF is shown in Table 113.

[1536] The luciferase and G-CSF modified mRNA were also subjected to an enzymatic capping reaction and each modified mRNA capping reaction was evaluated for yield by spectrophometic measurement (OD260) and correct size assessed using bioanalyzer. The yield from the capping reaction for luciferase is shown in Table 112 and G-CSF is shown in Table 114.

TABLE 111
In vitro transcription chemistry for Luciferase

| | Yield |
|---|---|
| Chemical Modification | (mg) |
| N6-methyladenosine | 0.99 |
| 5-methylcytidine | 1.29 |
| N4-acetylcytidine | 1.0 |
| 5-formylcytidine | 0.55 |
| Pseudouridine | 2.0 |
| N1-methyl-pseudouridine | 1.43 |
| 2-thiouridine | 1.56 |
| 5-methoxyuridine | 2.35 |
| 5-methyluridine | 1.01 |
| α-Thio-cytidine | 0.83 |
| 5-Br-uridine (5Bru) | 1.96 |
| 5 (2 carbomethoxyvinyl) uridine | 0.89 |
| 5 (3-1E propenyl Amino) uridine | 2.01 |
| N4-acetylcytidine/pseudouridine | 1.34 |
| N4-acetylcytidine/N1-methyl-pseudouridine | 1.26 |
| 5-methylcytidine/5-methoxyuridine | 1.38 |
| 5-methylcytidine/5-bromouridine | 0.12 |
| 5-methylcytidine/5-methyluridine | 2.97 |
| 5-methylcytidine/half of the uridines are modified | 1.59 |
| with 2-thiouridine | |
| 5-methylcytidine/2-thiouridine | 0.90 |
| 5-methylcytidine/pseudouridine | 1.83 |
| 5-methylcytidine/N1-methyl-pseudouridine | 1.33 |

TABLE 112
Capping chemistry and yield for Luciferase modified mRNA

| | Yield |
|---|---|
| Chemical Modification | (mg) |
| 5-methylcytidine | 1.02 |
| N4-acetylcytidine | 0.93 |
| 5-formylcytidine | 0.55 |
| Pseudouridine | 2.07 |
| N1-methyl-pseudouridine | 1.27 |
| 2-thiouridine | 1.44 |
| 5-methoxyuridine | 2 |
| 5-methyluridine | 0.8 |
| α-Thio-cytidine | 0.74 |
| 5-Br-uridine (5Bru) | 1.29 |
| 5 (2 carbomethoxyvinyl) uridine | 0.54 |
| 5 (3-1E propenyl Amino) uridine | 1.39 |
| N4-acetylcytidine/pseudouridine | 0.99 |
| N4-acetylcytidine/N1-methyl-pseudouridine | 1.08 |
| 5-methylcytidine/5-methoxyuridine | 1.13 |
| 5-methylcytidine/5-methyluridine | 1.08 |
| 5-methylcytidine/half of the uridines are modified | 1.2 |
| with 2-thiouridine | |
| 5-methylcytidine/2-thiouridine | 1.27 |
| 5-methylcytidine/pseudouridine | 1.19 |
| 5-methylcytidine/N1-methyl-pseudouridine | 1.04 |

TABLE 113
In vitro transcription chemistry and yield for G-CSF modified mRNA

| | Yield |
|---|---|
| Chemical Modification | (mg) |
| N6-methyladenosine | 1.57 |
| 5-methylcytidine | 2.05 |
| N4-acetylcytidine | 3.13 |
| 5-formylcytidine | 1.41 |
| Pseudouridine | 4.1 |
| N1-methyl-pseudouridine | 3.24 |
| 2-thiouridine | 3.46 |
| 5-methoxyuridine | 2.57 |
| 5-methyluridine | 4.27 |
| 4-thiouridine | 1.45 |
| 2′-F-uridine | 0.96 |
| α-Thio-cytidine | 2.29 |
| 2′-F-guanosine | 0.6 |
| N-1-methyladenosine | 0.63 |
| 5-Br-uridine (5Bru) | 1.08 |
| 5 (2 carbomethoxyvinyl) uridine | 1.8 |
| 5 (3-1E propenyl Amino) uridine | 2.09 |
| N4-acetylcytidine/pseudouridine | 1.72 |
| N4-acetylcytidine/N1-methyl-pseudouridine | 1.37 |
| 5-methylcytidine/5-methoxyuridine | 1.85 |
| 5-methylcytidine/5-methyluridine | 1.56 |
| 5-methylcytidine/half of the uridines are modified | 1.84 |
| with 2-thiouridine | |
| 5-methylcytidine/2-thiouridine | 2.53 |
| 5-methylcytidine/pseudouridine | 0.63 |
| N4-acetylcytidine/2-thiouridine | 1.3 |
| N4-acetylcytidine/5-bromouridine | 1.37 |
| 5-methylcytidine/N1-methyl-pseudouridine | 1.25 |
| N4-acetylcytidine/pseudouridine | 2.24 |

TABLE 114
Capping chemistry and yield for G-CSF modified mRNA

| Chemical Modification | Yield (mg) |
|---|---|
| N6-methyladenosine | 1.04 |
| 5-methylcytidine | 1.08 |
| N4-acetylcytidine | 2.73 |
| 5-formylcytidine | 0.95 |
| Pseudouridine | 3.88 |
| N1-methyl-pseudouridine | 2.58 |
| 2-thiouridine | 2.57 |
| 5-methoxyuridine | 2.05 |
| 5-methyluridine | 3.56 |
| 4-thiouridine | 0.91 |
| 2′-F-uridine | 0.54 |
| α-Thio-cytidine | 1.79 |
| 2′-F-guanosine | 0.14 |
| 5-Br-uridine (5Bru) | 0.79 |
| 5 (2 carbomethoxyvinyl) uridine | 1.28 |
| 5 (3-1E propenyl Amino) uridine | 1.78 |
| N4-acetylcytidine/pseudouridine | 0.29 |
| N4-acetylcytidine/N1-methyl-pseudouridine | 0.33 |
| 5-methylcytidine/5-methoxyuridine | 0.91 |
| 5-methylcytidine/5-methyluridine | 0.61 |
| 5-methylcytidine/half of the uridines are modified | 1.24 |
| with 2-thiouridine | |
| 5-methylcytidine/pseudouridine | 1.08 |
| N4-acetylcytidine/2-thiouridine | 1.34 |
| N4-acetylcytidine/5-bromouridine | 1.22 |
| 5-methylcytidine/N1-methyl-pseudouridine | 1.56 |

### Example 74. In Vitro Transcription with Mutant T7 Polymerase

[1537] Luciferase mRNA (mRNA sequence shown in SEQ ID NO: 21446; polyA tail of approximately 160 nucleotides not shown in sequence; 5′cap, Cap1) and G-CSF mRNA (mRNA sequence shown in SEQ ID NO: 21438; polyA tail of approximately 160 nucleotides not shown in sequence; 5′cap, Cap1) were fully modified with different chemistries and chemistry combinations listed in Tables 115-118 using a mutant T7 polymerase (Durascribe® T7 Transcription kit (Cat. No. DS010925) (Epicentre®, Madison, WI).

[1538] The yield of the translation reactions was determined by spectrophometric measurement (OD260) and the yield for Luciferase is shown in Tables 115 and G-CSF is shown in Tables 117.

[1539] The luciferase and G-CSF modified mRNA were also subjected to an enzymatic capping reaction and each modified mRNA capping reaction was evaluated for yield by spectrophometic measurement (OD260) and correct size assessed using bioanalyzer. The yield from the capping reaction for luciferase is shown in Table 116 and G-CSF is shown in Table 118.

TABLE 115
In vitro transcription chemistry and yield for Luciferase modified mRNA

| Chemical Modification | Yield (ug) |
|---|---|
| 2′Fluorocytosine | 71.4 |
| 2′Fluorouridine | 57.5 |
| 5-methylcytosine/pseudouridine, test A | 26.4 |
| 5-methylcytosine/N1-methyl-pseudouridine, test A | 73.3 |
| N1-acetylcytidine/2-fluorouridine | 202.2 |
| 5-methylcytidine/2-fluorouridine | 131.9 |
| 2-fluorocytosine/pseudouridine | 119.3 |
| 2-fluorocytosine/N1-methyl-pseudouridine | 107.0 |
| 2-fluorocytosine/2-thiouridine | 34.7 |
| 2-fluorocytosine/5-bromouridine | 81.0 |
| 2-fluorocytosine/2-fluorouridine | 80.4 |
| 2-fluoroguanine/5-methylcytosine | 61.2 |
| 2-fluoroguanine/5-methylcytosine/pseudouridine | 65.0 |
| 2-fluoroguanine/5-methylcytidine/N1-methyl-pseudouridine | 41.2 |
| 2-fluoroguanine/pseudouridine | 79.1 |
| 2-fluoroguanine/N1-methyl-pseudouridine | 74.6 |
| 5-methylcytidine/pseudouridine, test B | 91.8 |
| 5-methylcytidine/N1-methyl-pseudouridine, test B | 72.4 |
| 2′fluoroadenosine | 190.98 |

TABLE 116
Capping chemistry and yield for Luciferase modified mRNA

| Chemical Modification | Yield (ug) |
|---|---|
| 2′Fluorocytosine | 19.2 |
| 2′Fluorouridine | 16.7 |
| 5-methylcytosine/pseudouridine, test A | 7.0 |
| 5-methylcytosine/N1-methyl-pseudouridine, test A | 21.5 |
| N1-acetylcytidine/2-fluorouridine | 47.5 |
| 5-methylcytidine/2-fluorouridine | 53.2 |
| 2-fluorocytosine/pseudouridine | 58.4 |
| 2-fluorocytosine/N1-methyl-pseudouridine | 26.2 |
| 2-fluorocytosine/2-thiouridine | 12.9 |
| 2-fluorocytosine/5-bromouridine | 26.5 |
| 2-fluorocytosine/2-fluorouridine | 35.7 |
| 2-fluoroguanine/5-methylcytosine | 24.7 |
| 2-fluoroguanine/5-methylcytosine/pseudouridine | 32.3 |
| 2-fluoroguanine/5-methylcytidine/N1-methyl-pseudouridine | 31.3 |
| 2-fluoroguanine/pseudouridine | 20.9 |
| 2-fluoroguanine/N1-methyl-pseudouridine | 29.8 |
| 5-methylcytidine/pseudouridine, test B | 58.2 |
| 5-methylcytidine/N1-methyl-pseudouridine, test B | 44.4 |

TABLE 117
In vitro transcription chemistry and yield for G-CSF modified mRNA

| Chemical Modification | Yield (ug) |
|---|---|
| 2′Fluorocytosine | 56.5 |
| 2′Fluorouridine | 79.4 |
| 5-methylcytosine/pseudouridine, test A | 21.2 |
| 5-methylcytosine/N1-methyl-pseudouridine, test A | 77.1 |
| N1-acetylcytidine/2-fluorouridine | 168.6 |
| 5-methylcytidine/2-fluorouridine | 134.7 |
| 2-fluorocytosine/pseudouridine | 97.8 |
| 2-fluorocytosine/N1-methyl-pseudouridine | 103.1 |
| 2-fluorocytosine/2-thiouridine | 58.8 |
| 2-fluorocytosine/5-bromouridine | 88.8 |
| 2-fluorocytosine/2-fluorouridine | 93.9 |
| 2-fluoroguanine/5-methylcytosine | 97.3 |
| 2-fluoroguanine/5-methylcytosine/pseudouridine | 96.0 |
| 2-fluoroguanine/5-methylcytidine/N1-methyl-pseudouridine | 82.0 |
| 2-fluoroguanine/pseudouridine | 68.0 |
| 2-fluoroguanine/N1-methyl-pseudouridine | 59.3 |
| 5-methylcytidine/pseudouridine, test B | 58.7 |
| 5-methylcytidine/N1-methyl-pseudouridine, test B | 78.0 |

TABLE 118
Capping chemistry and yield for G-CSF modified mRNA

| Chemical Modification | Yield (ug) |
|---|---|
| 2′Fluorocytosine | 16.9 |
| 2′Fluorouridine | 17.0 |
| 5-methylcytosine/pseudouridine, test A | 10.6 |
| 5-methylcytosine/N1-methyl-pseudouridine, test A | 22.7 |
| N1-acetylcytidine/2-fluorouridine | 19.9 |
| 5-methylcytidine/2-fluorouridine | 21.3 |
| 2-fluorocytosine/pseudouridine | 65.2 |
| 2-fluorocytosine/N1-methyl-pseudouridine | 58.9 |
| 2-fluorocytosine/2-thiouridine | 41.2 |
| 2-fluorocytosine/5-bromouridine | 35.8 |
| 2-fluorocytosine/2-fluorouridine | 36.7 |
| 2-fluoroguanine/5-methylcytosine | 36.6 |
| 2-fluoroguanine/5-methylcytosine/pseudouridine | 37.3 |
| 2-fluoroguanine/5-methylcytidine/N1-methyl-pseudouridine | 30.7 |
| 2-fluoroguanine/pseudouridine | 29.0 |
| 2-fluoroguanine/N1-methyl-pseudouridine | 22.7 |
| 5-methylcytidine/pseudouridine, test B | 60.4 |
| 5-methylcytidine/N1-methyl-pseudouridine, test B | 33.0 |

### Example 75. 2′O-Methyl and 2′Fluoro Compounds

[1540] Luciferase mRNA (mRNA sequence shown in SEQ ID NO: 21446; polyA tail of approximately 160 nucleotides not shown in sequence; 5′cap, Cap1) were produced as fully modified versions with the chemistries in Table 119 and transcribed using mutant T7 polymerase (Durascribe® T7 Transcription kit (Cat. No. DS010925) (Epicentre®, Madison, WI). 2′ fluoro-containing mRNA were made using Durascribe T7, however, 2′Omethyl-containing mRNA could not be transcribed using Durascribe T7.

[1541] Incorporation of 2′Omethyl modified mRNA might possibly be accomplished using other mutant T7 polymerases (Nat Biotechnol. (2004) 22:1155-1160; Nucleic Acids Res. (2002) 30: e138) or U.S. Pat. No. 7,309,570, the contents of each of which are incorporated herein by reference in their entirety. Alternatively, 2′OMe modifications could be introduced post-transcriptionally using enzymatic means.

[1542] Introduction of modifications on the 2′ group of the sugar has many potential advantages. 2′OMe substitutions, like 2′ fluoro substitutions are known to protect against nucleases and also have been shown to abolish innate immune recognition when incorporated into other nucleic acids such as siRNA and anti-sense (incorporated in its entirety, Crooke, ed. Antisense Drug Technology, 2^{nd} edition; Boca Raton: CRC press).

[1543] The 2′Fluoro-modified mRNA were then transfected into HeLa cells to assess protein production in a cell context and the same mRNA were also assessed in a cell-free rabbit reticulocyte system. A control of unmodified luciferase (natural luciferase) was used for both transcription experiments, a control of untreated and mock transfected (Lipofectamine 2000 alone) were also analyzed for the HeLa transfection and a control of no RNA was analyzed for the rabbit reticulysates.

[1544] For the HeLa transfection experiments, the day before transfection, 20,000 HeLa cells (ATCC no. CCL-2; Manassas, VA) were harvested by treatment with Trypsin-EDTA solution (LifeTechnologies, Grand Island, NY) and seeded in a total volume of 100 ul EMEM medium (supplemented with 10% FCS and 1× Glutamax) per well in a 96-well cell culture plate (Corning, Manassas, VA). The cells were grown at 37oG in 5% CO₂ atmosphere overnight. Next day, 83 ng of the 2′fluoro-containing luciferase modified RNA (mRNA sequence shown in SEQ ID NO: 21446; polyA tail of approximately 160 nucleotides not shown in sequence; 5′cap, Cap1) with the chemical modification described in Table 119, were diluted in 10 ul final volume of OPTI-MEM (LifeTechnologies, Grand Island, NY). Lipofectamine 2000 (LifeTechnologies, Grand Island, NY) was used as transfection reagent and 0.2 ul were diluted in 10 ul final volume of OPTI-MEM. After 5 minutes of incubation at room temperature, both solutions were combined and incubated an additional 15 minute at room temperature. Then the 20 ul combined solution was added to the 100 ul cell culture medium containing the HeLa cells and incubated at room temperature. After 18 to 22 hours of incubation cells expressing luciferase were lysed with 100 ul of Passive Lysis Buffer (Promega, Madison, WI) according to manufacturer instructions. Aliquots of the lysates were transferred to white opaque polystyrene 96-well plates (Corning, Manassas, VA) and combined with 100 ul complete luciferase assay solution (Promega, Madison, WI). The lysate volumes were adjusted or diluted until no more than 2 mio relative light units (RLU) per well were detected for the strongest signal producing samples and the RLUs for each chemistry tested are shown in Table 119. The plate reader was a BioTek Synergy H1 (BioTek, Winooski, VT). The background signal of the plates without reagent was about 200 relative light units per well.

[1545] For the rabbit reticulocyte lysate assay, 2′-fluoro-containing luciferase mRNA were diluted in sterile nuclease-free water to a final amount of 250 ng in 10 ul and added to 40 ul of freshly prepared Rabbit Reticulocyte Lysate and the in vitro translation reaction was done in a standard 1.5 mL polypropylene reaction tube (Thermo Fisher Scientific, Waltham, MA) at 30° C. in a dry heating block. The translation assay was done with the Rabbit Reticulocyte Lysate (nuclease-treated) kit (Promega, Madison, WI) according to the manufacturer's instructions. The reaction buffer was supplemented with a one-to-one blend of provided amino acid stock solutions devoid of either Leucine or Methionine resulting in a reaction mix containing sufficient amounts of both amino acids to allow effective in vitro translation. After 60 minutes of incubation, the reaction was stopped by placing the reaction tubes on ice.

[1546] Aliquots of the in vitro translation reaction containing luciferase modified RNA were transferred to white opaque polystyrene 96-well plates (Corning, Manassas, VA) and combined with 100 ul complete luciferase assay solution (Promega, Madison, WI). The volumes of the in vitro translation reactions were adjusted or diluted until no more than 2 mio relative light units (RLUs) per well were detected for the strongest signal producing samples and the RLUs for each chemistry tested are shown in Table 120. The plate reader was a BioTek Synergy H1 (BioTek, Winooski, VT). The background signal of the plates without reagent was about 160 relative light units per well.

[1547] As can be seen in Table 119 and 120, multiple 2′Fluoro-containing compounds are active in vitro and produce luciferase protein.

TABLE 119
HeLa Cells

| Chemical | Concentration | | | |
|---|---|---|---|---|
| Modification | (ug/ml) | Volume (ul) | Yield (ug) | RLU |
| 2′Fluoroadenosine | 381.96 | 500 | 190.98 | 388.5 |
| 2′Fluorocytosine | 654.56 | 500 | 327.28 | 2420 |
| 2′Fluoroguanine | 541,795 | 500 | 270.90 | 11,705.5 |
| 2′Flurorouridine | 944.005 | 500 | 472.00 | 6767.5 |
| Natural luciferase | N/A | N/A | N/A | 133,853.5 |
| Mock | N/A | N/A | N/A | 340 |
| Untreated | N/A | N/A | N/A | 238 |

TABLE 120
Rabbit Reticulysates

| Chemical Modification | RLU |
|---|---|
| 2′Fluoroadenosine | 162 |
| 2′Fluorocytosine | 208 |
| 2′Fluoroguanine | 371,509 |
| 2′Flurorouridine | 258 |
| Natural luciferase | 2,159,968 |
| No RNA | 156 |

### Example 76. Luciferase in HeLa Cells Using a Combination of Modifications

[1548] To evaluate using of 2′fluoro-modified mRNA in combination with other modification a series of mRNA were transcribed using either wild-type T7 polymerase (non-fluoro-containing compounds) or using mutant T7 polymerases (fluyoro-containing compounds) as described in Example 75. All modified mRNA were tested by in vitro transfection in HeLa cells.

[1549] The day before transfection, 20,000 HeLa cells (ATCC no. CCL-2; Manassas, VA) were harvested by treatment with Trypsin-EDTA solution (LifeTechnologies, Grand Island, NY) and seeded in a total volume of 100 ul EMEM medium (supplemented with 10% FCS and 1× Glutamax) per well in a 96-well cell culture plate (Corning, Manassas, VA). The cells were grown at 37oG in 5% CO₂ atmosphere overnight. Next day, 83 ng of Luciferase modified RNA (mRNA sequence shown in SEQ ID NO: 21446; polyA tail of approximately 160 nucleotides not shown in sequence; 5′cap, Cap1) with the chemical modification described in Table 121, were diluted in 10 ul final volume of OPTI-MEM (LifeTechnologies, Grand Island, NY). Lipofectamine 2000 (LifeTechnologies, Grand Island, NY) was used as transfection reagent and 0.2 ul were diluted in 10 ul final volume of OPTI-MEM. After 5 minutes of incubation at room temperature, both solutions were combined and incubated an additional 15 minute at room temperature. Then the 20 ul combined solution was added to the 100 ul cell culture medium containing the HeLa cells and incubated at room temperature.

[1550] After 18 to 22 hours of incubation cells expressing luciferase were lysed with 100 ul of Passive Lysis Buffer (Promega, Madison, WI) according to manufacturer instructions. Aliquots of the lysates were transferred to white opaque polystyrene 96-well plates (Corning, Manassas, VA) and combined with 100 ul complete luciferase assay solution (Promega, Madison, WI). The lysate volumes were adjusted or diluted until no more than 2 mio relative light units (RLU) per well were detected for the strongest signal producing samples and the RLUs for each chemistry tested are shown in Table 121. The plate reader was a BioTek Synergy H1 (BioTek, Winooski, VT). The background signal of the plates without reagent was about 200 relative light units per well.

[1551] As evidenced in Table 121, most combinations of modifications resulted in mRNA which produced functional luciferase protein, including all the non-flouro containing compounds and many of the combinations containing 2′fluro modifications.

TABLE 121
Luciferase

| Chemical Modification | RLU |
|---|---|
| N4-acetylcytidine/pseudouridine | 113,796 |
| N4-acetylcytidine/N1-methyl-pseudouridine | 316,326 |
| 5-methylcytidine/5-methoxyuridine | 24,948 |
| 5-methylcytidine/5-methyluridine | 43,675 |
| 5-methylcytidine/half of the uridines modified with 50% | 41,601 |
| 2-thiouridine | |
| 5-methylcytidine/2-thiouridine | 1,102 |
| 5-methylcytidine/pseudouridine | 51,035 |
| 5-methylcytidine/N1-methyl-pseudouridine | 152,151 |
| N4-acetylcytidine/2′Fluorouridine triphosphate | 288 |
| 5-methylcytidine/2′Fluorouridine triphosphate | 269 |
| 2′Fluorocytosine triphosphate/pseudouridine | 260 |
| 2′Fluorocytosine triphosphate/N1-methyl-pseudouridine | 412 |
| 2′Fluorocytosine triphosphate/2-thiouridine | 427 |
| 2′Fluorocytosine triphosphate/5-bromouridine | 253 |
| 2′Fluorocytosine triphosphate/2′Fluorouridine triphosphate | 184 |
| 2′Fluoroguanine triphosphate/5-methylcytidine | 321 |
| 2′Fluoroguanine triphosphate/5-methylcytidine/Pseudouridine | 207 |
| 2′Fluoroguanine/5-methylcytidine/N1-methyl-psuedouridine | 235 |
| 2′Fluoroguanine/pseudouridine | 218 |
| 2′Fluoroguanine/N1-methyl-psuedouridine | 247 |
| 5-methylcytidine/pseudouridine, test A | 13,833 |
| 5-methylcytidine/N1-methyl-pseudouridine, test A | 598 |
| 2′Fluorocytosine triphosphate | 201 |
| 2′Fluorouridine triphosphate | 305 |
| 5-methylcytidine/pseudouridine, test B | 115,401 |
| 5-methylcytidine/N1-methyl-pseudouridine, test B | 21,034 |
| Natural luciferase | 30,801 |
| Untreated | 344 |
| Mock | 262 |

### Example 77. G-CSF In Vitro Transcription

[1552] To assess the activity of all our different chemical modifications in the context of a second open reading frame, we replicated experiments previously conducted using luciferase mRNA, with human G-CSF mRNA. G-CSF mRNA (mRNA sequence shown in SEQ ID NO: 21438; polyA tail of approximately 160 nucleotides not shown in sequence; 5′cap, Cap1) were fully modified with the chemistries in Tables 122 and 123 using wild-type T7 polymerase (for all non-fluoro-containing compounds) or mutant T7 polymerase (for all fluoro-containing compounds). The mutant T7 polymerase was obtained commercially (Durascribe® T7 Transcription kit (Cat. No. DS010925) (Epicentre®, Madison, WI).

[1553] The modified RNA in Tables 122 and 123 were transfected in vitro in HeLa cells or added to rabbit reticulysates (250 ng of modified mRNA) as indicated. A control of untreated, mock transfected (transfection reagent alone), G-CSF fully modified with 5-methylcytosine and N1-methyl-pseudouridine or luciferase control (mRNA sequence shown in SEQ ID NO: 21446; polyA tail of approximately 160 nucleotides not shown in sequence; 5′cap, Cap1) fully modified with 5-methylcytosine and N1-methyl-pseudouridine were also analyzed. The expression of G-CSF protein was determined by ELISA and the values are shown in Tables 122 and 123. In Table 122, “NT” means not tested.

[1554] As shown in Table 123, many, but not all, chemical modifications resulted in human G-CSF protein production. These results from cell-based and cell-free translation systems correlate very nicely with the same modifications generally working or not working in both systems. One notable exception is 5-formylcytidine modified G-CSF mRNA which worked in the cell-free translation system, but not in the HeLa cell-based transfection system. A similar difference between the two assays was also seen with 5-formylcytidine modified luciferase mRNA.

[1555] As demonstrated in Table 123, many, but not all, G-CSF mRNA modified chemistries (when used in combination) demonstrated in vivo activity. In addition the presence of N1-methyl-pseudouridine in the modified mRNA (with N4-acetylcytidine or 5 methylcytidine) demonstrated higher expression than when the same combinations where tested using with pseudouridine. Taken together, these data demonstrate that N1-methyl-pseudouridine containing G-CSF mRNA results in improved protein expression in vitro.

TABLE 122
G-CSF Expression

| | | G-CSF protein |
|---|---|---|
| | G-CSF | (pg/ml) |
| | protein | Rabbit |
| | (pg/ml) | reticulysates |
| Chemical Modification | HeLa cells | cells |
| Pseudouridine | 1,150,909 | 147,875 |
| 5-methyluridine | 347,045 | 147,250 |
| 2-thiouridine | 417,273 | 18,375 |
| N1-methyl-pseudouridine | NT | 230,000 |
| 4-thiouridine | 107,273 | 52,375 |
| 5-methoxyuridine | 1,715,909 | 201,750 |
| 5-methylcytosine/pseudouridine, Test A | 609,545 | 119,750 |
| 5-methylcytosine/N1-methyl-pseudouridine, | 1,534,318 | 110,500 |
| Test A | | |
| 2′-Fluoro-guanosine | 11,818 | 0 |
| 2′-Fluoro-uridine | 60,455 | 0 |
| 5-methylcytosine/pseudouridine, Test B | 358,182 | 57,875 |
| 5-methylcytosine/N1-methyl-pseudouridine, | 1,568,636 | 76,750 |
| Test B | | |
| 5-Bromo-uridine | 186,591 | 72,000 |
| 5-(2carbomethoxyvinyl) uridine | 1,364 | 0 |
| 5-[3(1-E-propenylamino) uridine | 27,955 | 32,625 |
| α-thio-cytidine | 120,455 | 42,625 |
| 5-methylcytosine/pseudouridine, Test C | 882,500 | 49,250 |
| N1-methyl-adenosine | 4,773 | 0 |
| N6-methyl-adenosine | 1,591 | 0 |
| 5-methyl-cytidine | 646,591 | 79,375 |
| N4-acetylcytidine | 39,545 | 8,000 |
| 5-formyl-cytidine | 0 | 24,000 |
| 5-methylcytosine/pseudouridine, Test D | 87,045 | 47,750 |
| 5-methylcytosine/N1-methyl-pseudouridine, | 1,168,864 | 97,125 |
| Test D | | |
| Mock | 909 | 682 |
| Untreated | 0 | 0 |
| 5-methylcytosine/N1-methyl-pseudouridine, | 1,106,591 | NT |
| Control | | |
| Luciferase control | NT | 0 |

TABLE 123
Combination Chemistries in HeLa cells

| | G-CSF |
|---|---|
| | protein |
| | (pg/ml) |
| Chemical Modification | HeLa cells |
| N4-acetylcytidine/pseudouridine | 537,273 |
| N4-acetylcytidine/N1-methyl-pseudouridine | 1,091,818 |
| 5-methylcytidine/5-methoxyuridine | 516,136 |
| 5-methylcytidine/5-bromouridine | 48,864 |
| 5-methylcytidine/5-methyluridine | 207,500 |
| 5-methylcytidine/2-thiouridine | 33,409 |
| N4-acetylcytidine/5-bromouridine | 211,591 |
| N4-acetylcytidine/2-thiouridine | 46,136 |
| 5-methylcytosine/pseudouridine | 301,364 |
| 5-methylcytosine/N1-methyl-pseudouridine | 1,017,727 |
| N4-acetylcytidine/2′Fluorouridine triphosphate | 62,273 |
| 5-methylcytidine/2′Fluorouridine triphosphate | 49,318 |
| 2′Fluorocytosine triphosphate/pseudouridine | 7,955 |
| 2′Fluorocytosine triphosphate/N1-methyl-pseudouridine | 1,364 |
| 2′Fluorocytosine triphosphate/2-thiouridine | 0 |
| 2′Fluorocytosine triphosphate/5-bromouridine | 1,818 |
| 2′Fluorocytosine triphosphate/2′Fluorouridine triphosphate | 909 |
| 2′Fluoroguanine triphosphate/5-methylcytidine | 0 |
| 2′Fluoroguanine triphosphate/5-methylcytidine/pseudouridine | 0 |
| 2′Fluoroguanine triphosphate/5-methylcytidine/N1 | 1,818 |
| methylpseudouridine | |
| 2′Fluoroguanine triphosphate/pseudouridine | 1,136 |
| 2′Fluoroguanine triphosphate/2′Fluorocytosine | 0 |
| triphosphate/N1-methyl-pseudouridine | |
| 5-methylcytidine/pseudouridine | 617,727 |
| 5-methylcytidine/N1-methyl-pseudouridine | 747,045 |
| 5-methylcytidine/pseudouridine | 475,455 |
| 5-methylcytidine/N1-methyl-pseudouridine | 689,091 |
| 5-methylcytosine/N1-methyl-pseudouridine, Control 1 | 848,409 |
| 5-methylcytosine/N1-methyl-pseudouridine, Control 2 | 581,818 |
| Mock | 682 |
| Untreated | 0 |
| Luciferase 2′Fluorocytosine triphosphate | 0 |
| Luciferase 2′Fluorouridine triphosphate | 0 |

### Example 78. Screening of Chemistries

[1556] The tables listed in below (Tables 124-126) summarize much of the in vitro and in vitro screening data with the different compounds presented in the previous examples. A good correlation exists between cell-based and cell-free translation assays. The same chemistry substitutions generally show good concordance whether tested in the context of luciferase or G-CSF mRNA. Lastly, N1-methyl-pseudouridine containing mRNA show a very high level of protein expression with little to no detectable cytokine stimulation in vitro and in vivo, and is superior to mRNA containing pseudouridine both in vitro and in vivo.

[1557] Luciferase mRNA (mRNA sequence shown in SEQ ID NO: 21446; polyA tail of approximately 160 nucleotides not shown in sequence; 5′cap, Cap1) and G-CSF mRNA (mRNA sequence shown in SEQ ID NO: 21438; polyA tail of approximately 160 nucleotides not shown in sequence; 5′cap, Cap1) were modified with naturally and non-naturally occurring chemistries described in Tables 124 and 125 or combination chemistries described in Table 126 and tested using methods described herein.

[1558] In Tables 125 and 126, “*” refers to in vitro transcription reaction using a mutant T7 polymerase (Durascribe® T7 Transcription kit (Cat. No. DS010925) (Epicentre®, Madison, WI); “**” refers to the second result in vitro transcription reaction using a mutant T7 polymerase (Durascribe® T7 Transcription kit (Cat. No. DS010925) (Epicentre®, Madison, WI); “***” refers to production seen in cell free translations (rabbit reticulocyte lysates); the protein production of HeLa is judged by “+,” “+/−” and “−”; when referring to G-CSF PBMC “++++” means greater than 6,000 pg/ml G-CSF, “+++” means greater than 3,000 pg/ml G-CSF, “++” means greater than 1,500 pg/ml G-CSF, “+” means greater than 300 pg/ml G-CSF, “+/−” means 150-300 pg/ml G-CSF and the background was about 110 pg/ml; when referring to cytokine PBMC “++++” means greater than 1,000 pg/ml interferon-alpha (IFN-alpha), “+++” means greater than 600 pg/ml IFN-alpha, “++” means greater than 300 pg/ml IFN-alpha, “+” means greater than 100 pg/ml IFN-alpha, “−” means less than 100 pg/ml and the background was about 70 pg/ml; and “NT” means not tested. In Table 125, the protein production was evaluated using a mutant T7 polymerase (Durascribe® T7 Transcription kit (Cat. No. DS010925) (Epicentre®, Madison, WI).

TABLE 124
Naturally Occurring

| | | | | Protein | Protein | Cytokines | In | In |
|---|---|---|---|---|---|---|---|---|
| | | IVT | Protein | (G- | (G- | (G- | Vivo | Vivo |
| Common Name | IVT | (G- | (Luc; | CSF; | CSF; | CSF; | Protein | Protein |
| (symbol) | (Luc) | CSF) | HeLa) | HeLa) | PBMC) | PBMC) | (Luc) | (G-CSF) |
| 1-methyladenosine | Fail | Pass | NT | − | +/− | ++ | NT | NT |
| (m¹A) | | | | | | | | |
| N⁶-methyladenosine | Pass | Pass | − | − | +/− | ++++ | NT | NT |
| (m⁶A) | | | | | | | | |
| 2′-O-methyladenosine | Fail* | Not | NT | NT | NT | NT | NT | NT |
| (Am) | | Done | | | | | | |
| 5-methylcytidine | Pass | Pass | + | + | + | ++ | + | NT |
| (m⁵C) | | | | | | | | |
| 2′-O- | Fail* | Not | NT | NT | NT | NT | NT | NT |
| methylcytidine | | Done | | | | | | |
| (Cm) | | | | | | | | |
| 2-thiocytidine (s²C) | Fail | Fail | NT | NT | NT | NT | NT | NT |
| N⁴-acetylcytidine | Pass | Pass | + | + | +/− | +++ | + | NT |
| (ac⁴C) | | | | | | | | |
| 5-formylcytidine (f⁵C) | Pass | Pass | −*** | −*** | − | + | NT | NT |
| 2′-O- | Fail* | Not | NT | NT | NT | NT | NT | NT |
| methylguanosine | | Done | | | | | | |
| (Gm) | | | | | | | | |
| inosine (I) | Fail | Fail | NT | NT | NT | NT | NT | NT |
| pseudouridine (Y) | Pass | Pass | + | + | ++ | + | + | NT |
| 5-methyluridine | Pass | Pass | + | + | +/− | + | NT | NT |
| (m⁵U) | | | | | | | | |
| 2′-O-methyluridine | Fail* | Not | NT | NT | NT | NT | NT | NT |
| (Um) | | Done | | | | | | |
| 1- | Pass | Pass | + | Not | ++++ | − | + | NT |
| methylpseudouridine | | | | Done | | | | |
| (m¹Y) | | | | | | | | |
| 2-thiouridine (s²U) | Pass | Pass | − | + | + | + | NT | NT |
| 4-thiouridine (s⁴U) | Fail | Pass | | + | +/− | ++ | NT | NT |
| 5-methoxyuridine | Pass | Pass | + | + | ++ | − | + | NT |
| (mo⁵U) | | | | | | | | |
| 3-methyluridine | Fail | Fail | NT | NT | NT | NT | NT | NT |
| (m³U) | | | | | | | | |

TABLE 125
Non-Naturally Occurring

| | | | | Protein | | Cytokines | | In Vivo |
|---|---|---|---|---|---|---|---|---|
| | | IVT | Protein | (G- | Protein | (G- | In Vivo | Protein |
| Common | IVT | (G- | (Luc; | CSF; | (G-CSF; | CSF; | Protein | (G- |
| Name | (Luc) | CSF) | HeLa) | HeLa) | PBMC) | PBMC) | (Luc) | CSF) |
| 2′-F-ara-guanosine | Fail | Fail | NT | NT | NT | NT | NT | NT |
| 2′-F-ara-adenosine | Fail | Fail | NT | NT | NT | NT | NT | NT |
| 2′-F-ara-cytidine | Fail | Fail | NT | NT | NT | NT | NT | NT |
| 2′-F-ara-uridine | Fail | Fail | NT | NT | NT | NT | NT | NT |
| 2′-F-guanosine | Fail/ | Pass/ | +** | +/− | − | + | + | NT |
| | Pass** | Fail** | | | | | | |
| 2′-F-adenosine | Fail/ | Fail/ | −** | NT | NT | NT | NT | NT |
| | Pass** | Fail** | | | | | | |
| 2′-F-cytidine | Fail/ | Fail/ | +** | NT | NT | NT | + | NT |
| | Pass** | Pass** | | | | | | |
| 2′-F-uridine | Fail/ | Pass/ | +** | + | +/− | + | − | NT |
| | Pass** | Pass** | | | | | | |
| 2′-OH-ara-guanosine | Fail | Fail | NT | NT | NT | NT | NT | NT |
| 2′-OH-ara-adenosine | Not | Not | NT | NT | NT | NT | NT | NT |
| | Done | Done | | | | | | |
| 2′-OH-ara-cytidine | Fail | Fail | NT | NT | NT | NT | NT | NT |
| 2′-OH-ara-uridine | Fail | Fail | NT | NT | NT | NT | NT | NT |
| 5-Br-Uridine | Pass | Pass | + | + | + | + | + | |
| 5-(2- | Pass | Pass | − | − | +/− | − | | |
| carbomethoxyvinyl) | | | | | | | | |
| Uridine | | | | | | | | |
| 5-[3-(1-E- | Pass | Pass | − | + | + | − | | |
| Propenylamino)Uridine | | | | | | | | |
| (aka Chem 5) | | | | | | | | |
| N6-(19-Amino- | Fail | Fail | NT | NT | NT | NT | NT | NT |
| pentaoxanonadecyl) A | | | | | | | | |
| 2-Dimethylamino | Fail | Fail | NT | NT | NT | NT | NT | NT |
| guanosine | | | | | | | | |
| 6-Aza-cytidine | Fail | Fail | NT | NT | NT | NT | NT | NT |
| a-Thio-cytidine | Pass | Pass | + | + | +/− | +++ | NT | NT |
| Pseudo-isocytidine | NT | NT | NT | NT | NT | NT | NT | NT |
| 5-Iodo-uridine | NT | NT | NT | NT | NT | NT | NT | NT |
| a-Thio-uridine | NT | NT | NT | NT | NT | NT | NT | NT |
| 6-Aza-uridine | NT | NT | NT | NT | NT | NT | NT | NT |
| Deoxy-thymidine | NT | NT | NT | NT | NT | NT | NT | NT |
| a-Thioguanosine | NT | NT | NT | NT | NT | NT | NT | NT |
| 8-Oxo-guanosine | NT | NT | NT | NT | NT | NT | NT | NT |
| O6-Methyl-guanosine | NT | NT | NT | NT | NT | NT | NT | NT |
| 7-Deaza-guanosine | NT | NT | NT | NT | NT | NT | NT | NT |
| 6-Chloro-purine | NT | NT | NT | NT | NT | NT | NT | NT |
| a-Thio-adenosine | NT | NT | NT | NT | NT | NT | NT | NT |
| 7-Deaza-adenosine | NT | NT | NT | NT | NT | NT | NT | NT |
| 5-iodo-cytidine | NT | NT | NT | NT | NT | NT | NT | NT |

[1559] In Table 126, the protein production of HeLa is judged by “+” and “−”; when referring to G-CSF PBMC “++++” means greater than 6,000 pg/ml G-CSF, “+++” means greater than 3,000 pg/ml G-CSF, “++” means greater than 1,500 pg/ml G-CSF, “+” means greater than 300 pg/ml G-CSF, “+S-” means 150-300 pg/ml G-CSF and the background was about 110 pg/ml; when referring to cytokine PBMC “++++” means greater than 1,000 pg/ml interferon-alpha (IFN-alpha), “+++” means greater than 600 pg/ml IFN-alpha, “++” means greater than 300 pg/ml TFN-alpha, “+” means greater than 100 pg/ml TFN-alpha, “−” means less than 100 pg/ml and the background was about 70 pg/ml; “WT” refers to the wild type T7 polymerase, “MT” refers to mutant T7 polymerase (Durascribe® T7 Transcription kit (Cat. No. DS010925) (Epicentre®, Madison, WI) and “NT” means not tested.

TABLE 126
Combination Chemistry

| | | | | | | Protein | Protein | | In |
|---|---|---|---|---|---|---|---|---|---|
| | | | | IVT | Protein | (G- | (G- | Cytokines | Vivo |
| Cytidine | Uridine | | IVT | (G- | (Luc; | CSF; | CSF; | (G-CSF; | Protein |
| analog | analog | Purine | Luc | CSF) | HeLa) | HeLa) | PBMC) | PBMC) | (Luc) |
| N4- | pseudouridine | A, G | Pass | Pass | + | + | NT | NT | + |
| acetylcytidine | | | WT | WT | | | | | |
| N4- | N1-methyl- | A, G | Pass | Pass | + | + | NT | NT | + |
| acetylcytidine | pseudouridine | | WT | WT | | | | | |
| 5- | 5- | A, G | Pass | Pass | + | + | NT | NT | + |
| methylcytidine | methoxyuridine | | WT | WT | | | | | |
| 5- | 5- | A, G | Pass | Pass | Not | + | NT | NT | |
| methylcytidine | bromouridine | | WT | WT | Done | | | | |
| 5- | 5- | A, G | Pass | Pass | + | + | NT | NT | + |
| methylcytidine | methyluridine | | WT | WT | | | | | |
| 5- | 50% 2- | A, G | Pass | Pass | + | NT | NT | NT | + |
| methylcytidine | thiouridine; | | WT | WT | | | | | |
| | 50% | | | | | | | | |
| | uridine | | | | | | | | |
| 5- | 100% 2- | A, G | Pass | Pass | − | + | NT | NT | |
| methylcytidine | thiouridine | | WT | WT | | | | | |
| 5- | pseudouridine | A, G | Pass | Pass | + | + | ++ | + | + |
| methylcytidine | | | WT | WT | | | | | |
| 5- | N1- | A, G | Pass | Pass | + | + | ++++ | − | + |
| methylcytidine | methyl- | | WT | WT | | | | | |
| | pseudouridine | | | | | | | | |
| N4- | 2- | A, G | Not | Pass | Not | + | NT | NT | NT |
| acetylcytidine | thiouridine | | Done | WT | Done | | | | |
| N4- | 5- | A, G | Not | Pass | Not | + | NT | NT | NT |
| acetylcytidine | bromouridine | | Done | WT | Done | | | | |
| N4- | 2 | A, G | Pass | Pass | − | + | NT | NT | NT |
| acetylcytidine | Fluorouridine | | | | | | | | |
| | triphosphate | | | | | | | | |
| 5- | 2 | A, G | Pass | Pass | − | + | NT | NT | NT |
| methylcytidine | Fluorouridine | | | | | | | | |
| | triphosphate | | | | | | | | |
| 2 | pseudouridine | A, G | Pass | Pass | − | + | NT | NT | NT |
| Fluorocytosine | | | | | | | | | |
| triphosphate | | | | | | | | | |
| 2 | N1- | A, G | Pass | Pass | − | +/− | NT | NT | NT |
| Fluorocytosine | methyl- | | | | | | | | |
| triphosphate | pseudouridine | | | | | | | | |
| 2 | 2- | A, G | Pass | Pass | − | − | NT | NT | NT |
| Fluorocytosine | thiouridine | | | | | | | | |
| triphosphate | | | | | | | | | |
| 2 | 5- | A, G | Pass | Pass | − | +/− | NT | NT | NT |
| Fluorocytosine | bromouridine | | | | | | | | |
| triphosphate | | | | | | | | | |
| 2 | 2 | A, G | Pass | Pass | − | +/− | NT | NT | NT |
| Fluorocytosine | Fluorouridine | | | | | | | | |
| triphosphate | triphosphate | | | | | | | | |
| 5- | uridine | A, 2 | Pass | Pass | − | − | NT | NT | NT |
| methylcytidine | | Fluoro | | | | | | | |
| | | GTP | | | | | | | |
| 5- | pseudouridine | A, 2 | Pass | Pass | − | − | NT | NT | NT |
| methylcytidine | | Fluoro | | | | | | | |
| | | GTP | | | | | | | |
| 5- | N1- | A, 2 | Pass | Pass | − | +/− | NT | NT | NT |
| methylcytidine | methyl- | Fluoro | | | | | | | |
| | pseudouridine | GTP | | | | | | | |
| 2 | pseudouridine | A, 2 | Pass | Pass | − | +/− | NT | NT | NT |
| Fluorocytosine | | Fluoro | | | | | | | |
| triphosphate | | GTP | | | | | | | |
| 2 | N1- | A, 2 | Pass | Pass | − | − | NT | NT | NT |
| Fluorocytosine | methyl- | Fluoro | | | | | | | |
| triphosphate | pseudouridine | GTP | | | | | | | |

### Example 79. 2′Fluoro Chemistries in PBMC

[1560] The ability of G-CSF modified mRNA (mRNA sequence shown in SEQ ID NO: 21438; polyA tail of approximately 160 nucleotides not shown in sequence; 5′cap, Cap1) to trigger innate an immune response was determined by measuring interferon-alpha (IFN-alpha) and tumor necrosis factor-alpha (TNF-alpha) production. Use of in vitro PBMC cultures is an accepted way to measure the immunostimulatory potential of oligonucleotides (Robbins et al., Oligonucleotides 2009 19:89-102) and transfection methods are described herein. Shown in Table 127 are the average from 2 or 3 separate PBMC donors of the interferon-alpha (IFN-alpha) and tumor necrosis factor alpha (TNF-alpha) production over time as measured by specific ELISA. Controls of R848, P(I)P(C), LPS and Lipofectamine 2000 (L2000) were also analyzed.

[1561] With regards to innate immune recognition, while both modified mRNA chemistries largely prevented IFN-alpha and TNF-alpha production relative to positive controls (R848, P(I)P(C)), 2′fluoro compounds reduce IFN-alpha and TNF-alpha production even lower than other combinations and N4-acetylcytidine combinations raised the cytokine profile.

TABLE 127
IFN-alpha and TNF-alpha

| | IFN-alpha: | TNF-alpha: |
|---|---|---|
| | 3 Donor | 2 Donor |
| | Average | Average |
| | (pg/ml) | (pg/ml) |
| L2000 | 1 | 361 |
| P(I)P(C) | 482 | 544 |
| R848 | 45 | 8,235 |
| LPS | 0 | 6,889 |
| N4-acetylcytidine/pseudouridine | 694 | 528 |
| N4-acetylcytidine/N1-methyl-pseudouridine | 307 | 283 |
| 5-methylcytidine/5-methoxyuridine | 0 | 411 |
| 5-methylcytidine/5-bromouridine | 0 | 270 |
| 5-methylcytidine/5-methyluridine | 456 | 428 |
| 5-methylcytidine/2-thiouridine | 274 | 277 |
| N4-acetylcytidine/2-thiouridine | 0 | 285 |
| N4-acetylcytidine/5-bromouridine | 44 | 403 |
| 5-methylcytidine/pseudouridine | 73 | 332 |
| 5-methylcytidine/N1-methyl-pseudouridine | 31 | 280 |
| N4-acetylcytidine/2′fluorouridine triphosphate | 35 | 32 |
| 5-methylcytodine/2′fluorouridine triphosphate | 24 | 0 |
| 2′fluorocytidine triphosphate/N1-methyl- | 0 | 11 |
| pseudouridine | | |
| 2′fluorocytidine triphosphate/2-thiouridine | 0 | 0 |
| 2′fluorocytidine/triphosphate5-bromouridine | 12 | 2 |
| 2′fluorocytidine triphosphate/2′fluorouridine | 11 | 0 |
| triphosphate | | |
| 2′fluorocytidine triphosphate/5-methylcytidine | 14 | 23 |
| 2′fluorocytidine triphosphate/5- | 6 | 21 |
| methylcytidine/pseudouridine | | |
| 2′fluorocytidine triphosphate/5- | 3 | 15 |
| methylcytidine/N1-methyl-pseudouridine | | |
| 2′fluorocytidine triphosphate/pseudouridine | 0 | 4 |
| 2′fluorocytidine triphosphate/N1-methyl- | 6 | 20 |
| pseudouridine | | |
| 5-methylcytidine/pseudouridine | 82 | 18 |
| 5-methylcytidine/N1-methyl-pseudouridine | 35 | 3 |

### Example 80. Modified mRNA with a Tobacco Etch Virus 5′UTR

[1562] A 5′ untranslated region (UTR) may be provided as a flanking region. Multiple 5′ UTRs may be included in the flanking region and may be the same or of different sequences. Any portion of the flanking regions, including none, may be codon optimized and any may independently contain one or more different structural or chemical modifications, before and/or after codon optimization.

[1563] The 5′ UTR may comprise the 5′UTR from the tobacco etch virus (TEV). Variants of 5′ UTRs may be utilized wherein one or more nucleotides are added or removed to the termini, including A, T, C or G.

### Example 81. Expression of PLGA Formulated mRNA

### A. Synthesis and Characterization of Luciferase PLGA Microspheres

[1564] Luciferase mRNA (mRNA sequence shown in SEQ ID NO: 21446; polyA tail of approximately 140 nucleotides not shown in sequence; 5′cap, Cap1) fully modified with 5-methylcytosine and N1-methyl-pseudouridine, modified with 25% of uridine replaced with 2-thiouridine and 25% of cytosine replaced with 5-methylcytosine, fully modified with N1-methyl-pseudouridine, or fully modified with pseudouridine was reconstituted in 1× TE buffer and then formulated in PLGA microspheres. PLGA microspheres were synthesized using the water/oil/water double emulsification methods known in the art using PLGA-ester cap (Lactel, Cat #B6010-2, inherent viscosity 0.55-0.75, 50:50 LA:GA), polyvinylalcohol (PVA) (Sigma, Cat #348406-25G, MW 13-23 k) dichloromethane and water. Briefly, 0.4 ml of mRNA in TE buffer at 4 mg/ml (W1) was added to 2 ml of PLGA dissolved in dichloromethane (DCM) (O1) at a concentration of 200 mg/ml of PLGA. The W1/01 emulsion was homogenized (IKA Ultra-Turrax Homogenizer, T18) for 30 seconds at speed 5 (˜19,000 rpm). The W1/01 emulsion was then added to 250 ml 1% PVA (W2) and homogenized for 1 minute at speed 5 (˜19,000 rpm). Formulations were left to stir for 3 hours, then passed through a 100 μm nylon mesh strainer (Fisherbrand Cell Strainer, Cat #22-363-549) to remove larger aggregates, and finally washed by centrifugation (10 min, 9,250 rpm, 4° C.). The supernatant was discarded and the PLGA pellets were resuspended in 5-10 ml of water, which was repeated 2×. After washing and resuspension with water, 100-200 μl of a PLGA microspheres sample was used to measure particle size of the formulations by laser diffraction (Malvern Mastersizer2000). The washed formulations were frozen in liquid nitrogen and then lyophilized for 2-3 days.

[1565] After lyophilization, ˜10 mg of PLGA MS were weighed out in 2 ml eppendorf tubes and deformulated by adding 1 ml of DCM and letting the samples shake for 2-6 hrs. The mRNA was extracted from the deformulated PLGA micropsheres by adding 0.5 ml of water and shaking the sample overnight. Unformulated luciferase mRNA in TE buffer (unformulated control) was spiked into DCM and went through the deformulation process (deformulation control) to be used as controls in the transfection assay. The encapsulation efficiency, weight percent loading and particle size are shown in Table 128. Encapsulation efficiency was calculated as mg of mRNA from deformulation of PLGA microspheres divided by the initial amount of mRNA added to the formulation. Weight percent loading in the formulation was calculated as mg of mRNA from deformulation of PLGA microspheres divided by the initial amount of PLGA added to the formulation.

TABLE 128
PLGA Characteristics

| | | | Theoretical | | Particle |
|---|---|---|---|---|---|
| | | | mRNA | Actual mRNA | Size |
| Chemical | Sample | Encapsulation | Loading | Loading | (D50, |
| Modifications | ID | Efficiency (%) | (wt %) | (wt %) | um) |
| Fully modified with 5- | 43-66A | 45.8 | 0.4 | 0.18 | 33.4 |
| methylcytosine and | 43-66B | 29.6 | | 0.12 | 27.7 |
| N1-methyl- | 43-66C | 25.5 | | 0.10 | 27.1 |
| pseudouridine | | | | | |
| 25% of uridine | 43-67A | 34.6 | 0.4 | 0.14 | 29.9 |
| replaced with 2- | 43-67B | 22.8 | | 0.09 | 30.2 |
| thiouridine and 25% of | 43-67C | 23.9 | | 0.10 | 25.1 |
| cytosine replaced with | | | | | |
| 5-methylcytosine | | | | | |
| Fully modified with | 43-69A | 55.8 | 0.4 | 0.22 | 40.5 |
| N1-methyl- | 43-69B | 31.2 | | 0.12 | 41.1 |
| pseudouridine | 43-69C | 24.9 | | 0.10 | 46.1 |
| Fully modified with | 43-68-1 | 49.3 | 0.4 | 0.20 | 34.8 |
| pseudouridine | 43-68-2 | 37.4 | | 0.15 | 35.9 |
| | 43-68-3 | 45.0 | | 0.18 | 36.5 |

B. Protein Expression of modified mRNA Encapsulated in PLGA Microspheres

[1566] The day before transfection, 20,000 HeLa cells (ATCC no. CCL-2; Manassas, VA) were harvested by treatment with Trypsin-EDTA solution (LifeTechnologies, Grand Island, NY) and seeded in a total volume of 100 ul EMEM medium (supplemented with 10% FCS and 1× Glutamax) per well in a 96-well cell culture plate (Corning, Manassas, VA). The cells were grown at 37° C. in a 5% CO2 atmosphere overnight. The next day, 83 ng of the deformulated luciferase mRNA PLGA microsphere samples, deformulated luciferase mRNA control (Deform control), or unformulated luciferase mRNA control (Unfomul control) was diluted in a 10 ul final volume of OPTI-MEM (LifeTechnologies, Grand Island, NY). Lipofectamine 2000 (LifeTechnologies, Grand Island, NY) was used as a transfection reagent and 0.2 ul was diluted in a 10 ul final volume of OPTI-MEM. After 5 min of incubation at room temperature, both solutions were combined and incubated an additional 15 min at room temperature. Then 20 ul of the combined solution was added to 100 ul of cell culture medium containing the HeLa cells. The plates were then incubated as described before.

[1567] After an 18 to 22 hour incubation, cells expressing luciferase were lysed with 100 ul Passive Lysis Buffer (Promega, Madison, WI) according to manufacturer instructions. Aliquots of the lysates were transferred to white opaque polystyrene 96-well plates (Corning, Manassas, VA) and combined with 100 ul complete luciferase assay solution (Promega, Madison, WI). The background signal of the plates without reagent was about 200 relative light units per well. The plate reader was a BioTek Synergy H1 (BioTek, Winooski, VT).

[1568] Cells were harvested and the bioluminescence (in relative light units, RLU) for each sample is shown in Table 129. Transfection of these samples confirmed that the varied chemistries of luciferase mRNA is still able to express luciferase protein after PLGA microsphere formulation.

TABLE 129
Chemical Modifications

| Chemical | | Biolum. |
|---|---|---|
| Modifications | Sample ID | (RLU) |
| Fully modified with | Deform contol | 164266.5 |
| 5-methylcytosine | Unformul control | 113714 |
| and N1-methyl- | 43-66A | 25174 |
| pseudouridine | 43-66B | 25359 |
| | 43-66C | 20060 |
| 25% of uridine | Deform contol | 90816.5 |
| replaced with 2- | Unformul control | 129806 |
| thiouridine and 25% | 43-67A | 38329.5 |
| of cytosine replaced | 43-67B | 8471.5 |
| with 5- | 43-67C | 10991.5 |
| methylcytosine | | |
| Fully modified with | Deform contol | 928093.5 |
| N1-methyl- | Unformul control | 1512273.5 |
| pseudouridine | 43-69A | 1240299.5 |
| | 43-69B | 748667.5 |
| | 43-69C | 1193314 |
| Fully modified with | Deform contol | 154168 |
| pseudouridine | Unformul control | 151581 |
| | 43-68-1 | 120974.5 |
| | 43-68-2 | 107669 |
| | 43-68-3 | 97226 |

### Example 82. In Vitro Studies of Factor IX

### A. Serum-Free Media

[1569] Human Factor IX mRNA (mRNA sequence shown in SEQ ID NO: 1622; polyA tail of approximately 160 nucleotides not shown in sequence; 5′cap, Cap1; fully modified with 5-methylcytosine and pseudouridine) was transfected in serum-free media. The cell culture supernatant was collected and subjected to trypsin digestion before undergoing 2-dimensional HPLC separation of the peptides. Matrix-assisted laser desorption/ionization was used to detect the peptides. 8 peptides were detected and 7 of the detected peptides are unique to Factor IX. These results indicate that the mRNA transfected in the serum-free media was able to express full-length Factor IX protein.

### B. Human Embryonic Kidney (HEK) 293A Cells

[1570] 250 ng of codon optimized Human Factor IX mRNA (mRNA sequence shown in SEQ ID NO: 1622; fully modified with 5-methylcytosine and pseudouridine; polyA tail of approximately 160 nucleotides not shown in sequence; 5′cap, Cap1) was transfected into HEK 293A cells (150,000 cells/well) using Lipofectamine 2000 in DMEM in presence of 10% FBS. The transfection complexes were removed 3 hours after transfection. Cells were harvested at 3, 6, 9, 12, 24, 48 and 72 hours after transfection. Total RNA was isolated and used for cDNA synthesis. The cDNA was subjected to analysis by quantitative Real-Time PCR using codon optimized Factor IX specific primer set. Human hypoxanthine phosphoribosyltransfersase 1 (HPRT) level was used for normalization. The data is plotted as a percent of detectable mRNA considering the mRNA level as 100% at the 3 hour time point. The half-life of Factor IX modified mRNA fully modified with 5-methylcytosine and pseudouridine in human embryonic kidney 293 (HEK293) cells is about 8-10 hours.

### Example 83. Saline Formulation: Subcutaneous Administration

[1571] Human G-CSF modified mRNA (mRNA sequence shown in SEQ ID NO: 21438; polyA tail of approximately 160 nucleotides not shown in sequence; 5′cap, Cap1; fully modified with 5-methylcytosine and pseudouridine) and human EPO modified mRNA (mRNA sequence shown in SEQ ID NO: 1638; polyA tail of approximately 160 nucleotides not shown in sequence; 5′cap, Cap1; fully modified with 5-methylcytosine and pseudouridine), were formulated in saline and delivered to mice via intramuscular (IM) injection at a dose of 100 ug.

[1572] Controls included Luciferase (mRNA sequence shown in SEQ ID NO: 21446; polyA tail of approximately 160 nucleotides not shown in sequence; 5′cap, Cap1; fully modified with 5-methylcytosine and pseudouridine)) or the formulation buffer (F. Buffer). The mice were bled at 13 hours after the injection to determine the concentration of the human polypeptide in serum in pg/mL. (G-CSF groups measured human G-CSF in mouse serum and EPO groups measured human EPO in mouse serum). The data are shown in Table 130.

[1573] mRNA degrades rapidly in serum in the absence of formulation suggesting the best method to deliver mRNA to last longer in the system is by formulating the mRNA. As shown in Table 130, mRNA can be delivered subcutaneously using only a buffer formulation.

TABLE 130
Dosing Regimen

| | | | | Average |
|---|---|---|---|---|
| | | | | Protein |
| | | Dose | | Product |
| | | Vol. | Dosing | pg/mL, |
| Group | Treatment | (μl/mouse) | Vehicle | serum |
| G-CSF | G-CSF | 100 | F. buffer | 45 |
| G-CSF | Luciferase | 100 | F. buffer | 0 |
| G-CSF | F. buffer | 100 | F. buffer | 2.2 |
| EPO | EPO | 100 | F. buffer | 72.03 |
| EPO | Luciferase | 100 | F. buffer | 26.7 |
| EPO | F. buffer | 100 | F. buffer | 13.05 |

### Example 84. Intravitreal Delivery

[1574] mCherry modified mRNA (mRNA sequence shown in SEQ ID NO: 21439; polyA tail of approximately 160 nucleotides not shown in sequence; 5′cap, Cap1; fully modified with 5-methylcytosine and pseudouridine) and luciferase modified mRNA (mRNA sequence shown in SEQ ID NO: 21446; polyA tail of approximately 160 nucleotides not shown in sequence; 5′cap, Cap1; fully modified with 5-methylcytosine and pseudouridine) formulated in saline was delivered intravitreally in rats as described in Table 131. The sample was compared against a control of saline only delivered intravitreally.

TABLE 131
Dosing Chart

| | Dose Level | Dose | Treatment | |
|---|---|---|---|---|
| | (μg modified | volume | Right Eye | Left Eye |
| Group No. | RNA/eye) | (μL/eye) | (OD) | (OS) |
| Control | 0 | 5 | Delivery | Delivery |
| | | | buffer only | buffer |
| | | | | only |
| Modified RNA in | 10 | 5 | mCherry | Luciferase |
| delivery buffer | | | | |

[1575] The formulation will be administered to the left or right eye of each animal on day 1 while the animal is anesthetized. On the day prior to administration gentamicin ophthalmic ointment or solution was applied to both eyes twice. The gentamicin ophthalmic ointment or solution was also applied immediately following the injection and on the day following the injection. Prior to dosing, mydriatic drops (1% tropicamide and/or 2.5% phenylephrine) are applied to each eye.

[1576] 18 hours post dosing the eyes receiving the dose of mCherry and delivery buffer are enucleated and each eye was separately placed in a tube containing 10 mL 4% paraformaldehyde at room temperature for overnight tissue fixation. The following day, eyes will be separately transferred to tubes containing 10 mL of 30% sucurose and stored at 21° C. until they were processed and sectioned. The slides prepared from different sections were evaluated under F-microscopy. Postive expression was seen in the slides prepared with the eyes administered mCherry modified mRNA and the control showed no expression.

### Example 85. In Vivo Cytokine Expression Study

[1577] Mice were injected intramuscularly with 200 ug of G-CSF modified mRNA (mRNA sequence shown in SEQ ID NO: 21438; polyA tail of approximately 160 nucleotides not shown in sequence) which was unmodified with a 5′cap, Cap1 (unmodified), fully modified with 5-methylcytosine and pseudouridine and a 5′cap, Cap1 (Gen1) or fully modified with 5-methylcytosine and N1-methyl-pseudouridine and a 5′cap, Cap1 (Gen2 cap) or no cap (Gen2 uncapped). Controls of R-848, 5% sucrose and untreated mice were also analyzed. After 8 hours serum was collected from the mice and analyzed for interferon-alpha (IFN-alpha) expression. The results are shown in Table 132.

TABLE 132
IFN-alpha Expression

| Formulation | IFN-alpha (pg/ml) |
|---|---|
| G-CSF unmodified | 67.012 |
| G-CSF Gen1 | 8.867 |
| G-CSF Gen2 cap | 0 |
| G-CSF Gen2 uncapped | 0 |
| R-848 | 40.971 |
| 5% sucrose | 1.493 |
| Untreated | 0 |

### Example 86. In Vitro Expression of VEGF Modified mRNA

[1578] HEK293 cells were transfected with modified mRNA (mmRNA) VEGF-A (mRNA sequence shown in SEQ ID NO: 1672; polyA tail of approximately 160 nucleotides not shown in sequence; 5′cap, Cap1; fully modified with 5-methylcytosine and pseudouridine) which had been complexed with Lipofectamine2000 from Invitrogen (Carlsbad, CA) at the concentration shown in Table 133. The protein expression was detected by ELISA and the protein (pg/ml) is shown in Table 133 and FIG. 7.

TABLE 133
Protein Expression

| | Amount Transfected | | | | | | | |
|---|---|---|---|---|---|---|---|---|
| | | | | | | 10 | | 610 |
| | 10 ng | 2.5 ng | 625 pg | 156 pg | 39 pg | pg | 2 pg | fg |
| Protein | 10495 | 10038 | 2321.23 | 189.6 | 0 | 0 | 0 | 0 |
| (pg/ml) | | | | | | | | |

### Example 87. In Vitro Screening in HeLa Cells of GFP

[1579] The day before transfection, 20,000 HeLa cells (ATCC no. CCL-2; Manassas, VA) were harvested by treatment with Trypsin-EDTA solution (LifeTechnologies, Grand Island, NY) and seeded in a total volume of 100 ul EMEM medium (supplemented with 10% FCS and 1× Glutamax) per well in a 96-well cell culture plate (Corning, Manassas, VA). The cells were grown at 37° C. in 5% CO₂ atmosphere overnight. Next day, 37.5 ng or 75 ng of Green Fluroescent protein (GFP) modified RNA (mRNA sequence shown in SEQ ID NO: 21448; polyA tail of approximately 160 nucleotides not shown in sequence; 5′cap, Cap1) with the chemical modification described in Table 134, were diluted in 10 ul final volume of OPTI-MEM (LifeTechnologies, Grand Island, NY). Lipofectamine 2000 (LifeTechnologies, Grand Island, NY) was used as transfection reagent and 0.2 ul were diluted in 10 ul final volume of OPTI-MEM. After 5 minutes of incubation at room temperature, both solutions were combined and incubated an additional 15 minute at room temperature. Then the 20 ul combined solution was added to the 100 ul cell culture medium containing the HeLa cells and incubated at room temperature.

[1580] After an 18 to 22 hour incubation cells expressing luciferase were lysed with 100 ul of Passive Lysis Buffer (Promega, Madison, WI) according to manufacturer instructions. Aliquots of the lysates were transferred to white opaque polystyrene 96-well plates (Corning, Manassas, VA) and combined with 100 ul complete luciferase assay solution (Promega, Madison, WI). The median fluorescence intensity (MFI) was determined for each chemistry and is shown in Table 134.

[1581] These results demonstrate that GFP fully modified with N1-methyl-pseudouridine and 5-methylcytosine produces more protein in HeLa cells compared to the other chemistry. Additionally the higher dose of GFP administered to the cells resulted in the highest MFI value.

TABLE 134
Mean Fluorescence Intensity

| | 37.5 ng | 75 ng |
|---|---|---|
| Chemistry | MFI | MFI |
| No modifications | 97400 | 89500 |
| 5-methylcytosine/pseudouridine | 324000 | 715000 |
| 5-methylcytosine/N1-methyl-pseudouridine | 643000 | 1990000 |

### Example 88. Homogenization

[1582] Different luciferase mRNA solutions (as described in Table 135 where “X” refers to the solution containing that component) (mRNA sequence shown in SEQ ID NO: 21446; polyA tail of approximately 160 nucleotides not shown in sequence; 5′cap, Cap1; fully modified with 5-methylcytosine and pseudouridine) were evaluated to test the percent yield of the different solutions, the integrity of the mRNA by bioanalyzer, and the protein expression of the mRNA by in vitro transfection. The mRNA solutions were prepared in water, 1× TE buffer at 4 mg/ml as indicated in Table 135, and added to either dichloromethane (DCM) or DCM containing 200 mg/ml of poly(lactic-co-glycolic acid) (PLGA) (Lactel, Cat #B6010-2, inherent viscosity 0.55-0.75, 50:50 LA:GA) to achieve a final mRNA concentration of 0.8 mg/ml. The solutions requiring homogenization were homogenized for 30 seconds at speed 5 (approximately 19,000 rpm) (IKA Ultra-Turrax Homogenizer, T18). The mRNA samples in water, dicloromethane and poly(lactic-co-glycolic acid) (PLGA) were not recoverable (NR). All samples, except the NR samples, maintained integrity of the mRNA as determined by bioanalyzer (Bio-rad Experion).

[1583] The day before transfection, 20,000 HeLa cells (ATCC no. CCL-2; Manassas, VA) were harvested by treatment with Trypsin-EDTA solution (LifeTechnologies, Grand Island, NY) and seeded in a total volume of 100 ul EMEM medium (supplemented with 10% FCS and 1× Glutamax) per well in a 96-well cell culture plate (Corning, Manassas, VA). The cells were grown at 37° C. in a 5% CO2 atmosphere overnight. The next day, 250 ng of luciferase mRNA from the recoverable samples was diluted in a 10 ul final volume of OPTI-MEM (LifeTechnologies, Grand Island, NY). Lipofectamine 2000 (LifeTechnologies, Grand Island, NY) was used as a transfection reagent and 0.2 ul was diluted in a 10 ul final volume of OPTI-MEM. After 5 minutes of incubation at room temperature, both solutions were combined and incubated an additional 15 minutes at room temperature. Then 20 ul of the combined solution was added to 100 ul of cell culture medium containing the HeLa cells. The plates were then incubated as described before. Controls luciferase mRNA (luciferase mRNA formulated in saline) (Control) and untreated cells (Untreat.) were also evaluated. Cells were harvested and the bioluminescence average (in photons/second) (biolum. (p/s)) for each signal is also shown in Table 135. The recoverable samples all showed activity of luciferase mRNA when analyzed.

[1584] After an 18 to 22 hour incubation, cells expressing luciferase were lysed with 100 ul Passive Lysis Buffer (Promega, Madison, WI) according to manufacturer instructions. Aliquots of the lysates were transferred to white opaque polystyrene 96-well plates (Corning, Manassas, VA) and combined with 100 ul complete luciferase assay solution (Promega, Madison, WI). The background signal of the plates without reagent was about 200 relative light units per well. The plate reader was a BioTek Synergy H1 (BioTek, Winooski, VT).

[1585] Cells were harvested and the bioluminescence average (in relative light units, RLU) (biolum. (RLU)) for each signal is also shown in Table 135. The recoverable samples all showed activity of luciferase mRNA when analyzed.

TABLE 135
Solutions

| Solution | | 1x TE | | DCM/ | Homo- | Yield | Biolum. |
|---|---|---|---|---|---|---|---|
| No. | Water | Buffer | DCM | PLGA | genizer | (%) | (RLU) |
| 1 | X | | | | | 96 | 5423780 |
| 2 | | X | | | X | 95 | 4911950 |
| 3 | X | | | | X | 92 | 2367230 |
| 4 | | X | | | X | 90 | 4349410 |
| 5 | X | | X | | X | 66 | 4145340 |
| 6 | | X | X | | X | 71 | 3834440 |
| 7 | X | | | X | X | NR | n/a |
| 8 | | X | | X | X | 24 | 3182080 |
| 9 | X | | | X | | NR | n/a |
| 10 | | X | | X | | 79 | 3276800 |
| 11 | X | | X | | | 79 | 5563550 |
| 12 | | X | X | | | 79 | 4919100 |
| Control | | | | | | | 2158060 |
| Untreat. | | | | | | | 3530 |

### Example 89. TE Buffer and Water Evaluation

[1586] Luciferase mRNA (mRNA sequence shown in SEQ ID NO: 21446; polyA tail of approximately 160 nucleotides not shown in sequence; 5′cap, Cap1; fully modified with 5-methylcytosine and pseudouridine) was reconstituted in water or TE buffer as outlined in Table 136 and then formulated in PLGA microspheres. PLGA microspheres were synthesized using the water/oil/water double emulsification methods known in the art using PLGA (Lactel, Cat #B6010-2, inherent viscosity 0.55-0.75, 50:50 LA:GA), polyvinylalcohol (PVA) (Sigma, Cat #348406-25G, MW 13-23 k) dichloromethane and water. Briefly, 0.2 to 0.6 ml of mRNA in water or TE buffer at a concentration of 2 to 6 mg/ml (W1) was added to 2 ml of PLGA dissolved in dichloromethane (DCM) (O1) at a concentration of 100 mg/ml of PLGA. The W1/01 emulsion was homogenized (TKA Ultra-Turrax Homogenizer, T18) for 30 seconds at speed 5 (˜19,000 rpm). The W1/01 emulsion was then added to 250 ml 1% PVA (W2) and homogenized for 1 minute at speed 5 (˜19,000 rpm).

[1587] Formulations were left to stir for 3 hours, then passed through a 100 μm nylon mesh strainer (Fisherbrand Cell Strainer, Cat #22-363-549) to remove larger aggregates, and finally washed by centrifugation (10 min, 9,250 rpm, 4° C.). The supernatant was discarded and the PLGA pellets were resuspended in 5-10 ml of water, which was repeated 2×. The washed formulations were frozen in liquid nitrogen and then lyophilized for 2-3 days. After lyophilization, ˜10 mg of PLGA MS were weighed out in 2 ml eppendorf tubes and deformulated by adding 1 ml of DCM and letting the samples shake for 2-6 hrs. mRNA was extracted from the deformulated PLGA micropsheres by adding 0.5 ml of water and shaking the sample overnight. Unformulated luciferase mRNA in water or TE buffer (deformulation controls) was spiked into DCM and went through the deformulation process to be used as controls in the transfection assay.

[1588] The day before transfection, 20,000 HeLa cells (ATCC no. CCL-2; Manassas, VA) were harvested by treatment with Trypsin-EDTA solution (LifeTechnologies, Grand Island, NY) and seeded in a total volume of 100 ul EMEM medium (supplemented with 10% FCS and 1× Glutamax) per well in a 96-well cell culture plate (Corning, Manassas, VA). The cells were grown at 37° C. in a 5% CO2 atmosphere overnight. The next day, 100 ng of the deformulated luciferase mRNA samples was diluted in a 10 ul final volume of OPTI-MEM (LifeTechnologies, Grand Island, NY). Lipofectamine 2000 (LifeTechnologies, Grand Island, NY) was used as a transfection reagent and 0.2 ul was diluted in a 10 ul final volume of OPTI-MEM. After 5 minutes of incubation at room temperature, both solutions were combined and incubated an additional 15 minutes at room temperature. Then 20 ul of the combined solution was added to 100 ul of cell culture medium containing the HeLa cells. The plates were then incubated as described before.

[1589] After 18 to 22 hour incubation, cells expressing luciferase were lysed with 100 ul Passive Lysis Buffer (Promega, Madison, WI) according to manufacturer instructions. Aliquots of the lysates were transferred to white opaque polystyrene 96-well plates (Corning, Manassas, VA) and combined with 100 ul complete luciferase assay solution (Promega, Madison, WI). The background signal of the plates without reagent was about 200 relative light units per well. The plate reader was a BioTek Synergy H1 (BioTek, Winooski, VT). To determine the activity of the luciferase mRNA from each formulation, the relative light units (RLU) for each formulation was divided by the RLU of the appropriate mRNA deformulation control (mRNA in water or TE buffer). Table 136 shows the activity of the luciferase mRNA. The activity of the luciferase mRNA in the PLGA microsphere formulations (Form.) was substantitally improved by formulating in TE buffer versus water.

TABLE 136
Formulations

| | | W1 | | Theoretical | Actual | | |
|---|---|---|---|---|---|---|---|
| | mRNA | Solvent | Total | mRNA | mRNA | | Activity |
| | conc. | volume | mRNA | Loading | Loading | W1 | (% of deform. |
| Form. | (mg/ml) | (ul) | (ug) | (wt %) | (wt %) | Solvent | control) |
| PLGA A | 4 | 400 | 1600 | 0.80 | 0.14 | Water | 12.5% |
| PLGA B | 4 | 200 | 800 | 0.40 | 0.13 | Water | 1.3% |
| PLGA C | 4 | 600 | 2400 | 1.20 | 0.13 | Water | 12.1% |
| PLGA D | 2 | 400 | 800 | 0.40 | 0.07 | Water | 1.3% |
| PLGA E | 6 | 400 | 2400 | 1.20 | 0.18 | TE Buffer | 38.9% |
| PLGA F | 4 | 400 | 1600 | 0.80 | 0.16 | TE Buffer | 39.7% |
| PLGA G | 4 | 400 | 1600 | 0.80 | 0.10 | TE Buffer | 26.6% |

### Example 90. Chemical Modifications on mRNA

[1590] The day before transfection, 20,000 HeLa cells (ATCC no. CCL-2; Manassas, VA) were harvested by treatment with Trypsin-EDTA solution (Life Technologies, Grand Island, NY) and seeded in a total volume of 100 ul EMEM medium (supplemented with 10% FCS and 1× Glutamax) per well in a 96-well cell culture plate (Corning, Manassas, VA). The cells were grown at 37° C. in 5% CO₂ atmosphere overnight. The next day, 83 ng of Luciferase modified RNA (mRNA sequence shown SEQ ID NO: 21446; polyA tail of approximately 140 nucleotides not shown in sequence; 5′cap, Cap1) with the chemical modification described in Table 137, were diluted in 10 ul final volume of OPTI-MEM (LifeTechnologies, Grand Island, NY). Lipofectamine 2000 (LifeTechnologies, Grand Island, NY) was used as transfection reagent and 0.2 ul were diluted in 10 ul final volume of OPTI-MEM. After 5 minutes of incubation at room temperature, both solutions were combined and incubated an additional 15 minute at room temperature. Then the 20 ul combined solution was added to the 100 ul cell culture medium containing the HeLa cells and incubated at room temperature.

[1591] After 18 to 22 hours of incubation cells expressing luciferase were lysed with 100 ul of Passive Lysis Buffer (Promega, Madison, WI) according to manufacturer instructions. Aliquots of the lysates were transferred to white opaque polystyrene 96-well plates (Corning, Manassas, VA) and combined with 100 ul complete luciferase assay solution (Promega, Madison, WI). The lysate volumes were adjusted or diluted until no more than 2 mio relative light units (RLU) per well were detected for the strongest signal producing samples and the RLUs for each chemistry tested are shown in Table 137. The plate reader was a BioTek Synergy H1 (BioTek, Winooski, VT). The background signal of the plates without reagent was about 200 relative light units per well.

TABLE 137
Chemical Modifications

| Sample | RLU |
|---|---|
| Untreated | 336 |
| Unmodified Luciferase | 33980 |
| 5-methylcytosine and pseudouridine | 1601234 |
| 5-methylcytosine and N1-methyl-pseudouridine | 421189 |
| 25% cytosines replaced with 5-methylcytosine and 25% of | 222114 |
| uridines replaced with 2-thiouridine | |
| N1-methyl-pseudouridine | 3068261 |
| Pseudouridine | 140234 |
| N4-Acetylcytidine | 1073251 |
| 5-methoxyuridine | 219657 |
| 5-Bromouridine | 6787 |
| N4-Acetylcytidine and N1-methyl-pseudouridine | 976219 |
| 5-methylcytosine and 5-methoxyuridine | 66621 |
| 5-methylcytosine and 2′fluorouridine | 11333 |

### Example 91. Intramuscular and Subcutaneous Administration of Modified mRNA

[1592] Luciferase modified mRNA (mRNA sequence shown in SEQ ID NO: 21446; polyA tail of approximately 140 nucleotides not shown in sequence; 5′cap, Cap1) fully modified with 5-methylcytosine and pseudouridine (5 mC/pU), fully modified with 5-methylcytosine and N1-methyl-pseudouridine (5 mC/N1mpU), fully modified with pseudouridine (pU), fully modified with N1-methyl-pseudouridine (N1mpU) or modified where 25% of the cytosines replaced with 5-methylcytosine and 25% of the uridines replaced with 2-thiouridine (5 mC/s2U) formulated in PBS (pH 7.4) was administered to Balb-C mice intramuscularly or subcutaneously at a dose of 2.5 mg/kg. The mice were imaged at 2 hours, 8 hours, 24 hours, 48 hours, 72 hours, 96 hours, 120 hours and 144 hours for intramuscular delivery and 2 hours, 8 hours, 24 hours, 48 hours, 72 hours, 96 hours and 120 hours for subcutaneous delivery. Twenty minutes prior to imaging, mice were injected intraperitoneally with a D-luciferin solution at 150 mg/kg. Animals were then anesthetized and images were acquired with an IVIS Lumina II imaging system (Perkin Elmer). Bioluminescence was measured as total flux (photons/second) of the entire mouse. The average total flux (photons/second) for intramuscular administration is shown in Table 138 and the average total flux (photons/second) for subcutaneous administration is shown in Table 139. The background signal was 3.79 E+05 (p/s). The peak expression for intramuscular administration was seen between 24 and 48 hours for all chemistry and expression was still detected at 144 hours. For subcutaneous delivery the peak expression was seen at 2-8 hours and expression was detected at 72 hours.

TABLE 138
Intramuscular Administration

| | | 5mC/ | | | |
|---|---|---|---|---|---|
| | 5mC/pU | N1mpU | 5mC/s2U | pU | N1mpU |
| | Flux (p/s) | Flux (p/s) | Flux (p/s) | Flux (p/s) | Flux (p/s) |
| 2 hours | 1.98E+07 | 4.65E+06 | 4.68E+06 | 2.33E+06 | 3.66E+07 |
| 8 hours | 1.42E+07 | 3.64E+06 | 3.78E+06 | 8.07E+06 | 7.21E+07 |
| 24 hours | 2.92E+07 | 1.22E+07 | 3.35E+07 | 1.01E+07 | 1.75E+08 |
| 48 hours | 2.64E+07 | 1.01E+07 | 5.06E+07 | 7.46E+06 | 3.42E+08 |
| 72 hours | 2.18E+07 | 8.59E+06 | 3.42E+07 | 4.08E+06 | 5.83E+07 |
| 96 hours | 2.75E+07 | 2.70E+06 | 2.38E+07 | 4.35E+06 | 7.15E+07 |
| 120 hours | 2.19E+07 | 1.60E+06 | 1.54E+07 | 1.25E+06 | 3.87E+07 |
| 144 hours | 9.17E+06 | 2.19E+06 | 1.14E+07 | 1.86E+06 | 5.04E+07 |

TABLE 139
Subcutaneous Administration

| | | 5mC/ | | | |
|---|---|---|---|---|---|
| | 5mC/pU | N1mpU | 5mC/s2U | pU | N1mpU |
| | Flux (p/s) | Flux (p/s) | Flux (p/s) | Flux (p/s) | Flux (p/s) |
| 2 hours | 5.26E+06 | 4.54E+06 | 9.34E+06 | 2.43E+06 | 2.80E+07 |
| 8 hours | 2.32E+06 | 8.75E+05 | 8.15E+06 | 2.12E+06 | 3.09E+07 |
| 24 hours | 2.67E+06 | 5.49E+06 | 3.80E+06 | 2.24E+06 | 1.48E+07 |
| 48 hours | 1.22E+06 | 1.77E+06 | 3.07E+06 | 1.58E+06 | 1.24E+07 |
| 72 hours | 1.12E+06 | 8.00E+05 | 8.53E+05 | 4.80E+05 | 2.29E+06 |
| 96 hours | 5.16E+05 | 5.33E+05 | 4.30E+05 | 4.30E+05 | 6.62E+05 |
| 120 hours | 3.80E+05 | 4.09E+05 | 3.21E+05 | 6.82E+05 | 5.05E+05 |

### Example 92. Osmotic Pump Study

[1593] Prior to implantation, an osmotic pump (ALZETO Osmotic Pump 2001D, DURECT Corp. Cupertino, CA) is loaded with the 0.2 ml of 1× PBS (pH 7.4) (PBS loaded pump) or 0.2 ml of luciferase modified mRNA (mRNA sequence shown in SEQ ID NO: 21446; polyA tail of approximately 140 nucleotides not shown in sequence; 5′cap, Cap1; fully modified with 5-methylcytosine and N1-methyl-pseudouridine) at 1 mg/ml in 1× PBS (pH 7.4) (Luciferase loaded pump) and incubated overnight in 1× PBS (pH 7.4) at 37° C.

[1594] Balb-C mice (n=3) are implanted subcutaneously with either the PBS loaded pump or the luciferase loaded pump and imaged at 2 hours, 8 hours and 24 hours. As a control a PBS loaded pump is implanted subcutaneously and the mice are injected subcutaneously with luciferase modified mRNA in 1× PBS (PBS loaded pump; SC Luciferase) or an osmotic pump is not implanted and the mice are injected subcutaneously with luciferase modified mRNA in 1× PBS (SC Luciferase). The luciferase formulations are outlined in Table 140.

TABLE 140
Luciferase Formulations

| | | Conc | Inj. Vol. | Amt | Dose |
|---|---|---|---|---|---|
| Group | Vehicle | (mg/ml) | (ul) | (ug) | (mg/kg) |
| PBS loaded pump; SC | PBS | 1.00 | 50 | 50 | 2.5 |
| Luciferase | | | | | |
| Luciferase loaded pump | PBS | 1.00 | — | 200 | 10.0 |
| PBS loaded pump | PBS | — | — | — | — |
| SC Luciferase | PBS | 1.00 | 50 | 50 | 2.5 |

### Example 93. External Osmotic Pump Study

[1595] An external osmotic pump (ALZET® Osmotic Pump 2001D, DURECT Corp. Cupertino, CA) is loaded with the 0.2 ml of 1×PBS (pH 7.4) (PBS loaded pump) or 0.2 ml of luciferase modified mRNA (mRNA sequence shown in SEQ ID NO: 21446; polyA tail of approximately 140 nucleotides not shown in sequence; 5′cap, Cap1; fully modified with 5-methylcytosine and N1-methyl-pseudouridine) at 1 mg/ml in 1× PBS (pH 7.4) (luciferase loaded pump) and incubated overnight in 1× PBS (pH 7.4) at 37° C.

[1596] Using a catheter connected to the external PBS loaded pump or the luciferase loaded pump Balb-C mice (n=3) are administered the formulation. The mice are imaged at 2 hours, 8 hours and 24 hours. As a control an external PBS loaded pump is used and the mice are injected subcutaneously with luciferase modified mRNA in 1× PBS (PBS loaded pump; SC Luciferase) or the external pump is not used and the mice are only injected subcutaneously with luciferase modified mRNA in 1× PBS (SC Luciferase). Twenty minutes prior to imaging, mice are injected intraperitoneally with a D-luciferin solution at 150 mg/kg. Animals are then anesthetized and images are acquired with an IVIS Lumina II imaging system (Perkin Elmer). Bioluminescence is measured as total flux (photons/second) of the entire mouse. The luciferase formulations are outlined in Table 141 and the average total flux (photons/second).

TABLE 141
Luciferase Formulations

| | | Conc | Inj. Vol. | Amt | Dose |
|---|---|---|---|---|---|
| Group | Vehicle | (mg/ml) | (ul) | (ug) | (mg/kg) |
| PBS loaded pump; SC | PBS | 1.00 | 50 | 50 | 2.5 |
| Luciferase | | | | | |
| Luciferase loaded pump | PBS | 1.00 | — | 200 | 10.0 |
| PBS loaded pump | PBS | — | — | — | — |
| SC Luciferase | PBS | 1.00 | 50 | 50 | 2.5 |

### Example 94. Fibrin Sealant Study

[1597] Fibrin sealant, such as Tisseel (Baxter Healthcare Corp., Deerfield, IL), is composed of fibrinogen and thrombin in a dual-barreled syringe. Upon mixing, fibrinogen is converted to fibrin to form a fibrin clot in about 10 to 30 seconds. This clot can mimic the natural clotting mechanism of the body. Additionally a fibrin hydrogel is a three dimensional structure that can potentially be used in sustained release delivery. Currently, fibrin sealant is approved for application in hemostasis and sealing to replace conventional surgical techniques such as suture, ligature and cautery.

[1598] The thrombin and fibrinogen components were loaded separately into a dual barreled syringe. Balb-C mice (n=3) were injected subcutaneously with 50 ul of fibrinogen, 50 ul of thrombin and they were also injected at the same site with modified luciferase mRNA (mRNA sequence shown in SEQ ID NO: 21446; polyA tail of approximately 140 nucleotides not shown in sequence; 5′cap, Cap1; fully modified with 5-methylcytosine and N1-methyl-pseudouridine) (Tisseel+Luciferase), 50 ul of fibrinogen and 50 ul thrombin (Tisseel) or modified luciferase mRNA (Luciferase). The injection of fibrinogen and thrombin was done simultaneously using the dual-barreled syringe. The SC injection of luciferase was done 15 minutes after the fibrinogen/thrombin injection to allow the fibrin hydrogel to polymerize (Tisseel+Luciferase group). A control group of untreated mice were also evaluated. The mice were imaged at 5 hours and 24 hours. Twenty minutes prior to imaging, mice were injected intraperitoneally with a D-luciferin solution at 150 mg/kg. Animals were then anesthetized and images were acquired with an IVIS Lumina II imaging system (Perkin Elmer). Bioluminescence was measured as total flux (photons/second) of the entire mouse. The luciferase formulations are outlined in Table 142 and the average total flux (photons/second) is shown in Table 143. The fibrin sealant was found to not interfere with imaging and the injection of luciferase and Tisseel showed expression of luciferase.

TABLE 142
Luciferase Formulations

| | | Conc | Inj. Vol. | Amt | Dose |
|---|---|---|---|---|---|
| Group | Vehicle | (mg/ml) | (ul) | (ug) | (mg/kg) |
| Tisseel + Luciferase | PBS | 1.00 | 50 | 50 | 2.5 |
| Tisseel | — | — | — | — | — |
| Luciferase | PBS | 1.00 | 50 | 50 | 2.5 |
| Untreated | — | — | — | — | — |

TABLE 143
Total Flux

| | 5 Hours | 24 Hours |
|---|---|---|
| Group | Flux (p/s) | Flux (p/s) |
| Tisseel + Luciferase | 4.59E+05 | 3.39E+05 |
| Tisseel | 1.99E+06 | 1.06E+06 |
| Luciferase | 9.94E+05 | 7.44E+05 |
| Untreated | 3.90E+05 | 3.79E+05 |

### Example 95. Fibrin Containing mRNA Sealant Study

A. Modified mRNA and Calcium Chloride

[1599] Prior to reconstitution, luciferase mRNA (mRNA sequence shown in SEQ ID NO: 21446; polyA tail of approximately 140 nucleotides not shown in sequence; 5′cap, Cap1) fully modified with 5-methylcytosine and N1-methyl-pseudouridine or fully modified with N1-methyl-pseudouridine is added to calcium chloride. The calcium chloride is then used to reconstitute thrombin. Fibrinogen is reconstituted with fibrinolysis inhibitor solution per the manufacturer's instructions. The reconstituted thrombin containing modified mRNA and fibrinogen is loaded into a dual barreled syringe. Mice are injected subcutaneously with 50 ul of fibrinogen and 50 ul of thrombin containing modified mRNA or they were injected with 50 ul of PBS containing an equivalent dose of modified luciferase mRNA. A control group of untreated mice is also evaluated. The mice are imaged at predetermined intervals to determine the average total flux (photons/second).

B. Lipid Nanoparticle Formulated Modified mRNA and Calcium Chloride

[1600] Prior to reconstitution, luciferase mRNA (mRNA sequence shown in SEQ ID NO: 21446; polyA tail of approximately 140 nucleotides not shown in sequence; 5′cap, Cap1) fully modified with 5-methylcytosine and N1-methyl-pseudouridine or fully modified with N1-methyl-pseudouridine is formulated in a lipid nanoparticle is added to calcium chloride. The calcium chloride is then used to reconstitute thrombin. Fibrinogen is reconstituted with fibrinolysis inhibitor solution per the manufacturer's instructions. The reconstituted thrombin containing modified mRNA and fibrinogen is loaded into a dual barreled syringe. Mice are injected subcutaneously with 50 ul of fibrinogen and 50 ul of thrombin containing modified mRNA or they were injected with 50 ul of PBS containing an equivalent dose of modified luciferase mRNA. A control group of untreated mice is also evaluated. The mice are imaged at predetermined intervals to determine the average total flux (photons/second).

C. Modified mRNA and Fibrinogen

[1601] Prior to reconstitution, luciferase mRNA (mRNA sequence shown in SEQ ID NO: 21446; polyA tail of approximately 140 nucleotides not shown in sequence; 5′cap, Cap1) fully modified with 5-methylcytosine and N1-methyl-pseudouridine or fully modified with N1-methyl-pseudouridine is added to the fibrinolysis inhibitor solution. The fibrinolysis inhibitor solution is then used to reconstitute fibrinogen. Thrombin is reconstituted with the calcium chloride solution per the manufacturer's instructions. The reconstituted fibrinogen containing modified mRNA and thrombin is loaded into a dual barreled syringe. Mice are injected subcutaneously with 50 ul of thrombin and 50 ul of fibrinogen containing modified mRNA or they were injected with 50 ul of PBS containing an equivalent dose of modified luciferase mRNA. A control group of untreated mice is also evaluated. The mice are imaged at predetermined intervals to determine the average total flux (photons/second).

D. Lipid Nanoparticle Formualted Modified mRNA and Fibrinogen

[1602] Prior to reconstitution, luciferase mRNA (mRNA sequence shown in SEQ ID NO: 21446; polyA tail of approximately 140 nucleotides not shown in sequence; 5′cap, Cap1) fully modified with 5-methylcytosine and N1-methyl-pseudouridine or fully modified with N1-methyl-pseudouridine is formulated in a lipid nanoparticle is added to the fibrinolysis inhibitor solution. The fibrinolysis inhibitor solution is then used to reconstitute fibrinogen. Thrombin is reconstituted with the calcium chloride solution per the manufacturer's instructions. The reconstituted fibrinogen containing modified mRNA and thrombin is loaded into a dual barreled syringe. Mice are injected subcutaneously with 50 ul of thrombin and 50 ul of fibrinogen containing modified mRNA or they were injected with 50 ul of PBS containing an equivalent dose of modified luciferase mRNA. A control group of untreated mice is also evaluated. The mice are imaged at predetermined intervals to determine the average total flux (photons/second).

E. Modified mRNA and Thrombin

[1603] Prior to reconstitution, luciferase mRNA (mRNA sequence shown in SEQ ID NO: 21446; polyA tail of approximately 140 nucleotides not shown in sequence; 5′cap, Cap1) fully modified with 5-methylcytosine and N1-methyl-pseudouridine or fully modified with N1-methyl-pseudouridine is added to the reconstituted thrombin after it is reconstituted with the calcium chloride per the manufactuer's instructions. The fibrinolysis inhibitor solution is then used to reconstitute fibrinogen per the manufacturer's instructions. The reconstituted fibrinogen and thrombin containing modified mRNA is loaded into a dual barreled syringe. Mice are injected subcutaneously with 50 ul of thrombin containing modified mRNA and 50 ul of fibrinogen or they were injected with 50 ul of PBS containing an equivalent dose of modified luciferase mRNA. A control group of untreated mice is also evaluated. The mice are imaged at predetermined intervals to determine the average total flux (photons/second).

F. Lipid Nanoparticle Formualted Modified mRNA and Thrombin

[1604] Prior to reconstitution, luciferase mRNA (mRNA sequence shown in SEQ ID NO: 21446; polyA tail of approximately 140 nucleotides not shown in sequence; 5′cap, Cap1) fully modified with 5-methylcytosine and N1-methyl-pseudouridine or fully modified with N1-methyl-pseudouridine is formulated in a lipid nanoparticle is added to the reconstituted thrombin after it is reconstituted with the calcium chloride per the manufactuer's instructions. The fibrinolysis inhibitor solution is then used to reconstitute fibrinogen per the manufacturer's instructions. The reconstituted fibrinogen and thrombin containing modified mRNA is loaded into a dual barreled syringe. Mice are injected subcutaneously with 50 ul of thrombin containing modified mRNA and 50 ul of fibrinogen or they were injected with 50 ul of PBS containing an equivalent dose of modified luciferase mRNA. A control group of untreated mice is also evaluated. The mice are imaged at predetermined intervals to determine the average total flux (photons/second).

### Example 96. Cationic Lipid Formulation of 5-Methylcytosine and N1-Methyl-Pseudouridine Modified mRNA

[1605] Luciferase mRNA (mRNA sequence shown in SEQ ID NO: 21446; polyA tail of approximately 140 nucleotides not shown in sequence; 5′cap, Cap1) fully modified with 5-methylcytosine and N1-methyl-pseudouridine was formulated in the cationic lipids described in Table 144. The formulations were administered intravenously (IV.), intramuscularly (IM.) or subcutaneously (S.C.) to Balb-C mice at a dose of 0.05 mg/kg.

TABLE 144
Cationic Lipid Formulations

| | Formulation | | | | |
|---|---|---|---|---|---|
| | NPA-126-1 | NPA-127-1 | NPA-128-1 | NPA-129-1 | 111612-B |
| Lipid | DLin- | DLin- | C12-200 | DLinDMA | DODMA |
| | MC3- | KC2- | | | |
| | DMA | DMA | | | |
| Lipid/mRNA | 20:1 | 20:1 | 20:1 | 20:1 | 20:1 |
| ratio (wt/wt) | | | | | |
| Mean Size | 122 nm | 114 nm | 153 nm | 137 nm | 223.2 nm |
| | PDI: 0.13 | PDI: 0.10 | PDI: 0.17 | PDI: 0.09 | PDI: 0.142 |
| Zeta at pH | −1.4 mV | −0.5 mV | −1.4 mV | 2.0 mV | −3.09 mV |
| 7.4 | | | | | |
| Encaps. | 95% | 77% | 69% | 80% | 64% |
| (RiboGr) | | | | | |

[1606] Twenty minutes prior to imaging, mice were injected intraperitoneally with a D-luciferin solution at 150 mg/kg. Animals were then anesthetized and images were acquired with an IVIS Lumina II imaging system (Perkin Elmer). Bioluminescence was measured as total flux (photons/second) of the entire mouse. The mice were imaged at 2 hours, 8 hours and 24 hours after dosing and the average total flux (photons/second) was measured for each route of administration and cationic lipid formulation. The background flux was about 4.17 E+05 p/s. The results of the imaging are shown in Table 145. In Table 145, “NT” means not tested.

TABLE 145
Flux

| | | | DLin- | DLin- | | | |
|---|---|---|---|---|---|---|---|
| | | | MC3-DMA | KC2-DMA | C12-200 | DLinDMA | DODMA |
| Route | Time Point | | Flux (p/s) | Flux (p/s) | Flux (p/s) | Flux (p/s) | Flux (p/s) |
| I.V. | 2 | hrs | 1.92E+08 | 2.91E+08 | 1.08E+08 | 2.53E+07 | 8.40E+06 |
| I.V. | 8 | hrs | 1.47E+08 | 2.13E+08 | 3.72E+07 | 3.82E+07 | 5.62E+06 |
| I.V. | 24 | hrs | 1.32E+07 | 2.41E+07 | 5.35E+06 | 4.20E+06 | 8.97E+05 |
| I.M. | 2 | hrs | 8.29E+06 | 2.37E+07 | 1.80E+07 | 1.51E+06 | NT |
| I.M. | 8 | hrs | 5.83E+07 | 2.12E+08 | 2.60E+07 | 1.99E+07 | NT |
| I.M. | 24 | hrs | 4.30E+06 | 2.64E+07 | 3.01E+06 | 9.46E+05 | NT |
| S.C. | 2 | hrs | 1.90E+07 | 5.16E+07 | 8.91E+07 | 4.66E+06 | 9.61E+06 |
| S.C. | 8 | hrs | 7.74E+07 | 2.00E+08 | 4.58E+07 | 9.67E+07 | 1.90E+07 |
| S.C. | 24 | hrs | 7.49E+07 | 2.47E+07 | 6.96E+06 | 6.50E+06 | 1.28E+06 |

### Example 97. Lipid Nanoparticle Intravenous Study

[1607] Luciferase mRNA (mRNA sequence shown in SEQ ID NO: 21446; polyA tail of approximately 160 nucleotides not shown in sequence; 5′cap, Cap1; fully modified with 5-methylcytosine and pseudouridine) was formulated in a lipid nanoparticle containing 50% DLin-MC3-DMA OR DLin-KC2-DMA as described in Table 146, 38.5% cholesterol, 10% DSPC and 1.5% PEG. The formulation was administered intravenously (IV.) to Balb-C mice at a dose of 0.5 mg/kg, 0.05 mg/kg, 0.005 mg/kg or 0.0005 mg/kg. Twenty minutes prior to imaging, mice were injected intraperitoneally with a D-luciferin solution at 150 mg/kg. Animals were then anesthetized and images were acquired with an IVIS Lumina II imaging system (Perkin Elmer). Bioluminescence was measured as total flux (photons/second) of the entire mouse.

TABLE 146
Formulations

| | Formulation | |
|---|---|---|
| | NPA-098-1 | NPA-100-1 |
| Lipid | DLin-KC2-DMA | DLin-MC3-DMA |
| Lipid/mRNA ratio (wt/wt) | 20:1 | 20:1 |
| Mean Size | 135 nm | 152 nm |
| | PDI: 0.08 | PDI: 0.08 |
| Zeta at pH 7.4 | −0.6 mV | −1.2 mV |
| Encaps. (RiboGr) | 91% | 94% |

[1608] For DLin-KC2-DMA the mice were imaged at 2 hours, 8 hours, 24 hours, 72 hours, 96 hours and 168 hours after dosing and the average total flux (photons/second) was measured for each route of administration and cationic lipid formulation. The background flux was about 3.66 E+05 p/s. The results of the imaging are shown in Table 147. Organs were imaged at 8 hours and the average total flux (photons/second) was measured for the liver, spleen, lung and kidney. A control for each organ was also analyzed. The results are shown in Table 147. The peak signal for all dose levels was at 8 hours after administration. Also, distribution to the various organs (liver, spleen, lung, and kidney) may be able to be controlled by increasing or decreasing the LNP dose.

TABLE 147
Flux

| | 0.5 mg/kg | 0.05 mg/kg | 0.005 mg/kg | 0.0005 mg/kg |
|---|---|---|---|---|
| Time Point | Flux (p/s) | Flux (p/s) | Flux (p/s) | Flux (p/s) |
| 2 hrs | 3.54E+08 | 1.75E+07 | 2.30E+06 | 4.09E+05 |
| 8 hrs | 1.67E+09 | 1.71E+08 | 9.81E+06 | 7.84E+05 |
| 24 hrs | 2.05E+08 | 2.67E+07 | 2.49E+06 | 5.51E+05 |
| 72 hrs | 8.17E+07 | 1.43E+07 | 1.01E+06 | 3.75E+05 |
| 96 hrs | 4.10E+07 | 9.15E+06 | 9.58E+05 | 4.29E+05 |
| 168 hrs | 3.42E+07 | 9.15E+06 | 1.47E+06 | 5.29E+05 |

TABLE 148
Organ Flux

| | Liver | Spleen | Lung | Kidney |
|---|---|---|---|---|
| | Flux (p/s) | Flux (p/s) | Flux (p/s) | Flux (p/s) |
| 0.5 mg/kg | 1.42E+08 | 4.86E+07 | 1.90E+05 | 3.20E+05 |
| 0.05 mg/kg | 7.45E+06 | 4.62E+05 | 6.86E+04 | 9.11E+04 |
| 0.005 mg/kg | 3.32E+05 | 2.97E+04 | 1.42E+04 | 1.15E+04 |
| 0.0005 mg/kg | 2.34E+04 | 1.08E+04 | 1.87E+04 | 9.78E+03 |
| Untreated | 1.88E+04 | 1.02E+04 | 1.41E+04 | 9.20E+03 |

[1609] For DLin-MC3-DMA the mice were imaged at 2 hours, 8 hours, 24 hours, 48 hours, 72 hours and 144 hours after dosing and the average total flux (photons/second) was measured for each route of administration and cationic lipid formulation. The background flux was about 4.51 E+05 p/s. The results of the imaging are shown in Table 149. Organs were imaged at 8 hours and the average total flux (photons/second) was measured for the liver, spleen, lung and kidney. A control for each organ was also analyzed. The results are shown in Table 150. The peak signal for all dose levels was at 8 hours after administration. Also, distribution to the various organs (liver, spleen, lung, and kidney) may be able to be controlled by increasing or decreasing the LNP dose.

TABLE 149
Flux

| | 0.5 mg/kg | 0.05 mg/kg | 0.005 mg/kg | 0.0005 mg/kg |
|---|---|---|---|---|
| Time Point | Flux (p/s) | Flux (p/s) | Flux (p/s) | Flux (p/s) |
| 2 hrs | 1.23E+08 | 7.76E+06 | 7.66E+05 | 4.88E+05 |
| 8 hrs | 1.05E+09 | 6.79E+07 | 2.75E+06 | 5.61E+05 |
| 24 hrs | 4.44E+07 | 1.00E+07 | 1.06E+06 | 5.71E+05 |
| 48 hrs | 2.12E+07 | 4.27E+06 | 7.42E+05 | 4.84E+05 |
| 72 hrs | 1.34E+07 | 5.84E+06 | 6.90E+05 | 4.38E+05 |
| 144 hrs | 4.26E+06 | 2.25E+06 | 4.58E+05 | 3.99E+05 |

TABLE 150
Organ Flux

| | Liver | Spleen | Lung | Kidney |
|---|---|---|---|---|
| | Flux (p/s) | Flux (p/s) | Flux (p/s) | Flux (p/s) |
| 0.5 mg/kg | 1.19E+08 | 9.66E+07 | 1.19E+06 | 1.85E+05 |
| 0.05 mg/kg | 1.10E+07 | 1.79E+06 | 7.23E+04 | 5.82E+04 |
| 0.005 mg/kg | 3.58E+05 | 6.04E+04 | 1.33E+04 | 1.33E+04 |
| 0.0005 mg/kg | 2.25E+04 | 1.88E+04 | 2.05E+04 | 1.65E+04 |
| Untreated | 1.91E+04 | 1.66E+04 | 2.63E+04 | 2.14E+04 |

### Example 98. Lipid Nanoparticle Subcutaneous Study

[1610] Luciferase mRNA (mRNA sequence shown in SEQ ID NO: 21446; polyA tail of approximately 160 nucleotides not shown in sequence; 5′cap, Cap1; fully modified with 5-methylcytosine and pseudouridine) was formulated in a lipid nanoparticle containing 50% DLin-KC2-DMA as described in Table 151, 385% cholesterol, 10% DSPC and 1.5% PEG. The formulation was administered subcutaneously (S.C.) to Balb-C mice at a dose of 0.5 mg/kg, 0.05 mg/kg or 0.005 mg/kg.

TABLE 151
DLin-KC2-DMA Formulation

| | Formulation |
|---|---|
| | NPA-098-1 |
| Lipid | DLin-KC2-DMA |
| Lipid/mRNA ratio (wt/wt) | 20:1 |
| Mean Size | 135 nm |
| | PDI: 0.08 |
| Zeta at pH 7.4 | −0.6 mV |
| Encaps. (RiboGr) | 91% |

[1611] Twenty minutes prior to imaging, mice were injected intraperitoneally with a D-luciferin solution at 150 mg/kg. Animals were then anesthetized and images were acquired with an IVIS Lumina II imaging system (Perkin Elmer). Bioluminescence was measured as total flux (photons/second) of the entire mouse. The mice were imaged at 2 hours, 8 hours, 24 hours, 48 hours, 72 hours and 144 hours after dosing and the average total flux (photons/second) was measured for each route of administration and cationic lipid formulation. The lower limit of detection was about 3 E+05 p/s. The results of the imaging are shown in Table 152. Organs were imaged at 8 hours and the average total flux (photons/second) was measured for the liver, spleen, lung and kidney. A control for each organ was also analyzed. The results are shown in Table 153. The peak signal for all dose levels was at 8 hours after administration. Also, distribution to the various organs (liver, spleen, lung, and kidney) may be able to be controlled by increasing or decreasing the LNP dose. At high doses, the LNP formulations migrates outside of the subcutaneous injection site, as high levels of luciferase expression are detected in the liver, spleen, lung, and kidney.

TABLE 152
Flux

| | 0.5 mg/kg | 0.05 mg/kg | 0.005 mg/kg |
|---|---|---|---|
| Time Point | Flux (p/s) | Flux (p/s) | Flux (p/s) |
| 2 hrs | 3.18E+07 | 7.46E+06 | 8.94E+05 |
| 8 hrs | 5.15E+08 | 2.18E+08 | 1.34E+07 |
| 24 hrs | 1.56E+08 | 5.30E+07 | 7.16E+06 |
| 48 hrs | 5.22E+07 | 8.75E+06 | 9.06E+05 |
| 72 hrs | 8.87E+06 | 1.50E+06 | 2.98E+05 |
| 144 hrs | 4.55E+05 | 3.51E+05 | 2.87E+05 |

TABLE 153
Organ Flux

| | Liver | Spleen | Lung | Kidney |
|---|---|---|---|---|
| | Flux (p/s) | Flux (p/s) | Flux (p/s) | Flux (p/s) |
| 0.5 mg/kg | 1.01E+07 | 7.43E+05 | 9.75E+04 | 1.75E+05 |
| 0.05 mg/kg | 1.61E+05 | 3.94E+04 | 4.04E+04 | 3.29E+04 |
| 0.005 mg/kg | 2.84E+04 | 2.94E+04 | 2.42E+04 | 9.79E+04 |
| Untreated | 1.88E+04 | 1.02E+04 | 1.41E+04 | 9.20E+03 |

### Example 99. Cationic Lipid Nanoparticle Subcutaneous Study

[1612] Luciferase mRNA (mRNA sequence shown in SEQ ID NO: 21446; polyA tail of approximately 160 nucleotides not shown in sequence; 5′cap, Cap1; fully modified with 5-methylcytosine and pseudouridine) is formulated in a lipid nanoparticle containing 50% DLin-MC3-DMA, 38.5% cholesterol, 10% DSPC and 1.5% PEG. The formulation is administered subcutaneously (S.C.) to Balb-C mice at a dose of 0.5 mg/kg, 0.05 mg/kg or 0.005 mg/kg.

[1613] The mice are imaged at 2 hours, 8 hours, 24 hours, 48 hours, 72 hours and 144 hours after dosing and the average total flux (photons/second) was measured for each route of administration and cationic lipid formulation. Organs are imaged at 8 hours and the average total flux (photons/second) is measured for the liver, spleen, lung and kidney. A control for each organ is also analyzed.

### Example 100. Luciferase Lipoplex Study

[1614] Lipoplexed luciferase mRNA (mRNA sequence shown in SEQ ID NO: 21446; polyA tail of approximately 140 nucleotides not shown in sequence; 5′cap, Cap1) fully modified with 5-methylcytosine and pseudouridine (5 mC/pU), fully modified with 5-methylcytosine and N1-methyl-pseudouridine (5 mC/N1 mpU) or modified where 25% of the cytosines replaced with 5-methylcytosine and 25% of the uridines replaced with 2-thiouridine (5 mC/s2U). The formulation was administered intravenously (IV.), intramuscularly (IM.) or subcutaneously (S.C.) to Balb-C mice at a dose of 0.10 mg/kg.

[1615] Twenty minutes prior to imaging, mice were injected intraperitoneally with a D-luciferin solution at 150 mg/kg. Animals were then anesthetized and images were acquired with an IVIS Lumina II imaging system (Perkin Elmer). Bioluminescence was measured as total flux (photons/second) of the entire mouse. The mice were imaged at 8 hours, 24 hours and 48 hours after dosing and the average total flux (photons/second) was measured for each route of administration and chemical modification. The background signal was about 3.91 E+05 p/s. The results of the imaging are shown in Table 154. Organs were imaged at 6 hours and the average total flux (photons/second) was measured for the liver, spleen, lung and kidney. A control for each organ was also analyzed. The results are shown in Table 155.

TABLE 154
Flux

| | | 5mC/pU | 5mC/N1mpU | 5mC/s2U |
|---|---|---|---|---|
| Route | Time Point | Flux (p/s) | Flux (p/s) | Flux (p/s) |
| I.V. | 8 hrs | 5.76E+06 | 1.78E+06 | 1.88E+06 |
| I.V. | 24 hrs | 1.02E+06 | 7.13E+05 | 5.28E+05 |
| I.V. | 48 hrs | 4.53E+05 | 3.76E+05 | 4.14E+05 |
| I.M. | 8 hrs | 1.90E+06 | 2.53E+06 | 1.29E+06 |
| I.M. | 24 hrs | 9.33E+05 | 7.84E+05 | 6.48E+05 |
| I.M. | 48 hrs | 8.51E+05 | 6.59E+05 | 5.49E+05 |
| S.C. | 8 hrs | 2.85E+06 | 6.48E+06 | 1.14E+06 |
| S.C. | 24 hrs | 6.66E+05 | 7.15E+06 | 3.93E+05 |
| S.C. | 48 hrs | 3.24E+05 | 3.20E+06 | 5.45E+05 |

TABLE 155
Organ Flux

| | | Liver | Spleen | Lung | Kidney | Inj. Site |
|---|---|---|---|---|---|---|
| Route | Chemistry | Flux (p/s) | Flux (p/s) | Flux (p/s) | Flux (p/s) | Flux (p/s) |
| I.V. | 5mC/pU | 5.26E+05 | 2.04E+07 | 4.28E+06 | 1.77E+04 | n/a |
| I.V. | 5mC/N1mpU | 1.48E+05 | 5.00E+06 | 1.93E+06 | 1.77E+04 | n/a |
| I.V. | 5mC/s2U | 2.14E+04 | 3.29E+06 | 5.48E+05 | 2.16E+04 | n/a |
| I.M. | 5mC/pU | 2.46E+04 | 1.38E+04 | 1.50E+04 | 1.44E+04 | 1.15E+06 |
| I.M. | 5mC/N1mpU | 1.72E+04 | 1.76E+04 | 1.99E+04 | 1.56E+04 | 1.20E+06 |
| I.M. | 5mC/s2U | 1.28E+04 | 1.36E+04 | 1.33E+04 | 1.07E+04 | 7.60E+05 |
| S.C. | 5mC/pU | 1.55E+04 | 1.67E+04 | 1.45E+04 | 1.69E+04 | 4.46E+04 |
| S.C. | 5mC/N1mpU | 1.20E+04 | 1.46E+04 | 1.38E+04 | 1.14E+04 | 8.29E+04 |
| S.C. | 5mC/s2U | 1.22E+04 | 1.31E+04 | 1.45E+04 | 1.08E+04 | 5.62E+04 |
| | Untreated | 2.59E+04 | 1.34E+04 | 1.26E+04 | 1.22E+04 | n/a |

### Example 101. Cationic Lipid Formulation of Modified mRNA

[1616] Luciferase mRNA (mRNA sequence shown in SEQ ID NO: 21446; polyA tail of approximately 140 nucleotides not shown in sequence; 5′cap, Cap1) modified where 25% of the cytosines replaced with 5-methylcytosine and 25% of the uridines replaced with 2-thiouridine (5 mC/s2U) was formulated in the cationic lipids described in Table 156. The formulations were administered intravenously (LV.), intramuscularly (LM.) or subcutaneously (S.C.) to Balb-C mice at a dose of 0.05 mg/kg.

TABLE 156
Cationic Lipid Formulations

| | Formulation | | | | |
|---|---|---|---|---|---|
| | NPA-130-1 | NPA-131-1 | NPA-132-1 | NPA-133-1 | 111612-C |
| Lipid | DLin-MC3- | DLin-KC2- | C12-200 | DLinDMA | DODMA |
| | DMA | DMA | | | |
| Lipid/mRNA | 20:1 | 20:1 | 20:1 | 20:1 | 20:1 |
| ratio (wt/wt) | | | | | |
| Mean Size | 120 nm | 105 nm | 122 nm | 105 nm | 221.3 nm |
| | PDI: 0.10 | PDI: 0.11 | PDI: 0.13 | PDI: 0.14 | PDI: 0.063 |
| Zeta at pH 7.4 | 0.2 mV | −0.6 mV | −0.5 mV | −0.3 mV | −3.10 mV |
| Encaps. | 100% | 100% | 93% | 93% | 60% |
| (RiboGr) | | | | | |

[1617] Twenty minutes prior to imaging, mice were injected intraperitoneally with a D-luciferin solution at 150 mg/kg. Animals were then anesthetized and images were acquired with an IVIS Lumina II imaging system (Perkin Elmer). Bioluminescence was measured as total flux (photons/second) of the entire mouse. The mice were imaged at 2 hours, 8 hours and 24 hours after dosing and the average total flux (photons/second) was measured for each route of administration and cationic lipid formulation. The background flux was about 3.31 E+05 p/s. The results of the imaging are shown in Table 157. In Table 157, “NT” means not tested. Untreated mice showed an average flux of 3.14 E+05 at 2 hours, 3.33 E+05 at 8 hours and 3.46 E+05 at 24 hours. Peak expression was seen for all three routes tested at 8 hours. DLin-KC2-DMA has better expression than DLin-MC3-DMA and DODMA showed expression for all routes evaluated.

TABLE 157
Flux

| | | | DLin- | DLin- | | | |
|---|---|---|---|---|---|---|---|
| | | | MC3-DMA | KC2-DMA | C12-200 | DLinDMA | DODMA |
| Route | Time Point | | Flux (p/s) | Flux (p/s) | Flux (p/s) | Flux (p/s) | Flux (p/s) |
| I.V. | 2 | hrs | 9.88E+06 | 6.98E+07 | 9.18E+06 | 3.98E+06 | 5.79E+06 |
| I.V. | 8 | hrs | 1.21E+07 | 1.23E+08 | 1.02E+07 | 5.98E+06 | 6.14E+06 |
| I.V. | 24 | hrs | 2.02E+06 | 1.05E+07 | 1.25E+06 | 1.35E+06 | 5.72E+05 |
| I.M. | 2 | hrs | 6.72E+05 | 3.66E+06 | 3.25E+06 | 7.34E+05 | 4.42E+05 |
| I.M. | 8 | hrs | 7.78E+06 | 2.85E+07 | 4.29E+06 | 2.22E+06 | 1.38E+05 |
| I.M. | 24 | hrs | 4.22E+05 | 8.79E+05 | 5.95E+05 | 8.48E+05 | 4.80E+05 |
| S.C. | 2 | hrs | 2.37E+06 | 4.77E+06 | 4.44E+06 | 1.07E+06 | 1.05E+06 |
| S.C. | 8 | hrs | 3.65E+07 | 1.17E+08 | 3.71E+06 | 9.33E+06 | 2.57E+06 |
| S.C. | 24 | hrs | 4.47E+06 | 1.28E+07 | 6.39E+05 | 8.89E+05 | 4.27E+05 |

### Example 102. Formulation of 5-Methylcytosine and N1-Methyl-Pseudouridine Modified mRNA

[1618] Luciferase mRNA (mRNA sequence shown in SEQ ID NO: 21446; polyA tail of approximately 140 nucleotides not shown in sequence; 5′cap, Cap1) fully modified with 5-methylcytosine and N1-methyl-pseudouridine was formulated in PBS (pH of 7.4). The formulations were administered intramuscularly (IM.) or subcutaneously (S.C.) to Balb-C mice at a dose of 2.5 mg/kg.

[1619] Twenty minutes prior to imaging, mice were injected intraperitoneally with a D-luciferin solution at 150 mg/kg. Animals were then anesthetized and images were acquired with an IVIS Lumina II imaging system (Perkin Elmer). Bioluminescence was measured as total flux (photons/second) of the entire mouse. The mice were imaged at 5 minutes, 30 minutes, 60 minutes and 120 minutes after dosing and the average total flux (photons/second) was measured for each route of administration and cationic lipid formulation. The background flux was about 3.78 E+05 p/s. The results of the imaging are shown in Table 158. Expression of luciferase was already seen at 30 minutes with both routes of delivery. Peak expression from subcutaneous administration appears between 30 to 60 minutes. Intramuscular expression was still increasing at 120 minutes.

TABLE 158
Flux

| | | PBS (pH 7.4) |
|---|---|---|
| Route | Time Point | Flux (p/s) |
| I.M. | 5 min | 4.38E+05 |
| I.M. | 30 min | 1.09E+06 |
| I.M. | 60 min | 1.18E+06 |
| I.M. | 120 min | 2.86E+06 |
| S.C. | 5 min | 4.19E+05 |
| S.C. | 30 min | 6.38E+06 |
| S.C. | 60 min | 5.61E+06 |
| S.C. | 120 min | 2.66E+06 |

### Example 103. Intramuscular and Subcutaneous Administration of Chemically Modified mRNA

[1620] Luciferase modified mRNA (mRNA sequence shown in SEQ ID NO: 21446; polyA tail of approximately 140 nucleotides not shown in sequence; 5′cap, Cap1) fully modified with N4-acetylcytidine, fully modified with 5-methoxyuridine, fully modified with N4-acetylcytidine and N1-methyl-pseudouridine or fully modified 5-methylcytosine and 5-methoxyuridine formulated in PBS (pH 7.4) was administered to Balb-C mice intramuscularly or subcutaneously at a dose of 2.5 mg/kg. Twenty minutes prior to imaging, mice were injected intraperitoneally with a D-luciferin solution at 150 mg/kg. Animals were then anesthetized and images were acquired with an IVIS Lumina II imaging system (Perkin Elmer). Bioluminescence was measured as total flux (photons/second) of the entire mouse. The mice were imaged at 2 hours, 8 hours and 24 hours. The average total flux (photons/second) for intramuscular administration is shown in Table 159 and the average total flux (photons/second) for subcutaneous administration is shown in Table 160. The background signal was 3.84 E+05 (p/s). The peak expression for intramuscular administration was seen between 24 and 48 hours for all chemistry and expression was still detected at 120 hours. For subcutaneous delivery the peak expression was seen at 2-8 hours and expression was detected at 72 hours.

TABLE 159
Intramuscular Administration

| | 2 hours | 8 hours | 24 hours |
|---|---|---|---|
| | Flux (p/s) | Flux (p/s) | Flux (p/s) |
| N4-acetylcytidine | 1.32E+07 | 2.15E+07 | 4.01E+07 |
| 5-methoxyuridine | 4.93E+06 | 1.80E+07 | 4.53E+07 |
| N4-acetylcytidine/ | 2.02E+07 | 1.93E+07 | 1.63E+08 |
| N1-methyl-pseudouridine | | | |
| 5-methylcytosine/5- | 6.79E+06 | 4.55E+07 | 3.44E+07 |
| methoxyuridine | | | |

TABLE 160
Subcutaneous Administration

| | 2 hours | 8 hours | 24 hours |
|---|---|---|---|
| | Flux (p/s) | Flux (p/s) | Flux (p/s) |
| N4-acetylcytidine | 3.07E+07 | 1.23E+07 | 1.28E+07 |
| 5-methoxyuridine | 7.10E+06 | 9.38E+06 | 1.32E+07 |
| N4-acetylcytidine/ | 7.12E+06 | 3.07E+06 | 1.03E+07 |
| N1-methyl-pseudouridine | | | |
| 5-methylcytosine/5- | 7.15E+06 | 1.25E+07 | 1.11E+07 |
| methoxyuridine | | | |

### Example 104. In Vivo Study PP28T

[1621] Luciferase modified mRNA containing at least one chemical modification is formulated as a lipid nanoparticle (LNP) using the syringe pump method and characterized by particle size, zeta potential, and encapsulation.

[1622] As outlined in Table 161, the luciferase LNP formulation is administered to Balb-C mice intramuscularly (LM.), intravenously (LV.) and subcutaneously (S.C.). As a control luciferase modified RNA formulated in PBS is administered intravenously to mice.

TABLE 161
Luciferase Formulations

| | | | | | Amount of | |
|---|---|---|---|---|---|---|
| | | | Concen- | Injection | modified | |
| | | | tration | Volume | RNA | Dose |
| Formulation | Vehicle | Route | (mg/ml) | (ul) | (ug) | (mg/kg) |
| Luc-LNP | PBS | S.C. | 0.2000 | 50 | 10 | 0.5000 |
| Luc-LNP | PBS | S.C. | 0.0200 | 50 | 1 | 0.0500 |
| Luc-LNP | PBS | S.C. | 0.0020 | 50 | 0.1 | 0.0050 |
| Luc-LNP | PBS | S.C. | 0.0002 | 50 | 0.01 | 0.0005 |
| Luc-LNP | PBS | I.V. | 0.2000 | 50 | 10 | 0.5000 |
| Luc-LNP | PBS | I.V. | 0.0200 | 50 | 1 | 0.0500 |
| Luc-LNP | PBS | I.V. | 0.0020 | 50 | 0.1 | 0.0050 |
| Luc-LNP | PBS | I.V. | 0.0002 | 50 | 0.01 | 0.0005 |
| Luc-LNP | PBS | I.M. | 0.2000 | 50 | 10 | 0.5000 |
| Luc-LNP | PBS | I.M. | 0.0200 | 50 | 1 | 0.0500 |
| Luc-LNP | PBS | I.M. | 0.0020 | 50 | 0.1 | 0.0050 |
| Luc-LNP | PBS | I.M. | 0.0002 | 50 | 0.01 | 0.0005 |
| Luc-PBS | PBS | I.V. | 0.20 | 50 | 10 | 0.50 |

[1623] The mice are imaged at 2, 8, 24, 48, 120 and 192 hours to determine the bioluminescence (measured as total flux (photons/second) of the entire mouse). At 8 hours or 192 hours the liver, spleen, kidney and injection site for subcutaneous and intramuscular administration are imaged to determine the bioluminescence.

### Example 105. Cationic Lipid Formulation Studies of Chemically Modified mRNA

[1624] Luciferase mRNA (mRNA sequence shown in SEQ ID NO: 21446; polyA tail of approximately 140 nucleotides not shown in sequence; 5′cap, Cap1) fully modified with 5-methylcytosine and pseudouridine (5 mC/pU), pseudouridine (pU) or N1-methyl-pseudouridine (N1mpU) was formulated in the cationic lipids described in Table 162. The formulations were administered intravenously (IV.), intramuscularly (IM.) or subcutaneously (S.C.) to Balb-C mice at a dose of 0.05 mg/kg.

TABLE 162
Cationic Lipid Formulations

| | Formulation | | | | |
|---|---|---|---|---|---|
| | NPA-137-1 | NPA-134-1 | NPA-135-1 | NPA-136-1 | 111612-A |
| Lipid | DLin-MC3- | DLin- | DLin-KC2- | C12-200 | DODMA |
| | DMA | MC3-DMA | DMA | | |
| Lipid/mRNA | 20:1 | 20:1 | 20:1 | 20:1 | 20:1 |
| ratio (wt/wt) | | | | | |
| Mean Size | 111 nm | 104 nm | 95 nm | 143 nm | 223.2 nm |
| | PDI: 0.15 | PDI: 0.13 | PDI: 0.11 | PDI: 0.12 | PDI: 0.142 |
| Zeta at pH 7.4 | −4.1 mV | −1.9 mV | −1.0 mV | 0.2 mV | −3.09 mV |
| Encaps. | 97% | 100% | 100% | 78% | 64% |
| (RiboGr) | | | | | |
| Chemistry | pU | N1mpU | N1mpU | N1mpU | 5mC/pU |

[1625] Twenty minutes prior to imaging, mice were injected intraperitoneally with a D-luciferin solution at 150 mg/kg. Animals were then anesthetized and images were acquired with an IVIS Lumina II imaging system (Perkin Elmer). Bioluminescence was measured as total flux (photons/second) of the entire mouse. The mice were imaged at 2 hours, 8 hours and 24 hours after dosing and the average total flux (photons/second) was measured for each route of administration and cationic lipid formulation. The background flux was about 4.11 E+05 p/s. The results of the imaging are shown in Table 163. Peak expression was seen for all three routes tested at 8 hours.

TABLE 163
Flux

| | | DLin-MC3- | DLin-MC3- | DLin-KC2- | C12-200 | DODMA |
|---|---|---|---|---|---|---|
| | | DMA (pU) | DMA (N1mpU) | DMA (N1mpU) | (N1mpU) | (5mC/pU) |
| Route | Time Point | Flux (p/s) | Flux (p/s) | Flux (p/s) | Flux (p/s) | Flux (p/s) |
| I.V. | 2 hrs | 3.21E+08 | 1.24E+09 | 1.01E+09 | 9.00E+08 | 3.90E+07 |
| I.V. | 8 hrs | 1.60E+09 | 3.22E+09 | 2.38E+09 | 1.11E+09 | 1.17E+07 |
| I.V. | 24 hrs | 1.41E+08 | 3.68E+08 | 3.93E+08 | 8.06E+07 | 1.11E+07 |
| I.M. | 2 hrs | 2.09E+07 | 3.29E+07 | 8.32E+07 | 9.43E+07 | 4.66E+06 |
| I.M. | 8 hrs | 2.16E+08 | 6.14E+08 | 1.00E+09 | 8.77E+07 | 7.05E+06 |
| I.M. | 24 hrs | 1.23E+07 | 1.40E+08 | 5.09E+08 | 1.36E+07 | 1.14E+06 |
| S.C. | 2 hrs | 2.32E+07 | 3.60E+07 | 2.14E+08 | 1.01E+08 | 3.11E+07 |
| S.C. | 8 hrs | 5.55E+08 | 9.80E+08 | 4.93E+09 | 1.01E+09 | 8.04E+07 |
| S.C. | 24 hrs | 1.81E+08 | 2.74E+08 | 2.12E+09 | 4.74E+07 | 1.34E+07 |

### Example 106. Studies of Chemical Modified mRNA

[1626] Luciferase mRNA (mRNA sequence shown in SEQ ID NO: 21446; polyA tail of approximately 140 nucleotides not shown in sequence; 5′cap, Cap1) fully modified with N4-acetylcytidine (N4-acetyl), fully modified with 5-methoxyuridine (5meth), fully modified with N4-acetylcytidine and N1-methyl-pseudouridine (N4-acetyl/N1mpU) or fully modified with 5-methylcytosine and 5-methoxyuridine (5 mC/5-meth) was formulated in DLin-MC3-DMA as described in Table 164.

[1627] The formulations were administered intravenously (L.V.), intramuscularly (LM.) or subcutaneously (S.C.) to Balb-C mice at a dose of 0.05 mg/kg.

TABLE 164
Cationic Lipid Formulations

| | Formulation | | | |
|---|---|---|---|---|
| | NPA-141-1 | NPA-142-1 | NPA-143-1 | NPA-144-1 |
| Lipid | DLin- | DLin- | DLin- | DLin- |
| | MC3-DMA | MC3-DMA | MC3-DMA | MC3-DMA |
| Lipid/mRNA | 20:1 | 20:1 | 20:1 | 20:1 |
| ratio (wt/wt) | | | | |
| Mean Size | 138 nm | 116 nm | 144 nm | 131 nm |
| | PDI: 0.16 | PDI: 0.15 | PDI: 0.15 | PDI: 0.15 |
| Zeta at pH 7.4 | −2.8 mV | −2.8 mV | −4.3 mV | −5.0 mV |
| Encaps. | 97% | 100% | 75% | 72% |
| (RiboGr) | | | | |
| Chemistry | N4-acetyl | 5meth | N4-acetyl/ | 5mC/5-meth |
| | | | N1mpU | |

[1628] Twenty minutes prior to imaging, mice were injected intraperitoneally with a D-luciferin solution at 150 mg/kg. Animals were then anesthetized and images were acquired with an IVIS Lumina II imaging system (Perkin Elmer). Bioluminescence was measured as total flux (photons/second) of the entire mouse. The mice were imaged at 2 hours, 6 hours and 24 hours after dosing and the average total flux (photons/second) was measured for each route of administration and cationic lipid formulation. The background flux was about 2.70 E+05 p/s. The results of the imaging are shown in Table 165.

TABLE 165
Flux

| | | | | N4-acetyl/ | 5mC/5- |
|---|---|---|---|---|---|
| | | N4-acetyl | 5meth | N1mpU | meth |
| Route | Time Point | Flux (p/s) | Flux (p/s) | Flux (p/s) | Flux (p/s) |
| I.V. | 2 hrs | 9.17E+07 | 3.19E+06 | 4.21E+07 | 1.88E+06 |
| I.V. | 6 hrs | 7.70E+08 | 9.28E+06 | 2.34E+08 | 7.75E+06 |
| I.V. | 24 hrs | 6.84E+07 | 1.04E+06 | 3.55E+07 | 3.21E+06 |
| I.M. | 2 hrs | 8.59E+06 | 7.86E+05 | 5.30E+06 | 5.11E+05 |
| I.M. | 6 hrs | 1.27E+08 | 8.88E+06 | 3.82E+07 | 3.17E+06 |
| I.M. | 24 hrs | 4.46E+07 | 1.38E+06 | 2.00E+07 | 1.39E+06 |
| S.C. | 2 hrs | 1.83E+07 | 9.67E+05 | 4.45E+06 | 1.01E+06 |
| S.C. | 6 hrs | 2.89E+08 | 1.78E+07 | 8.91E+07 | 1.29E+07 |
| S.C. | 24 hrs | 6.09E+07 | 6.40E+06 | 2.08E+08 | 6.63E+06 |

### Example 107. Lipid Nanoparticle Containing A Plurality of Modified mRNAs

[1629] EPO mRNA (mRNA sequence shown in SEQ ID NO: 1638; polyA tail of approximately 140 nucleotides not shown in sequence; 5′cap, Cap1; fully modified with 5-methylcytosine and N1-methyl-pseudouridine), G-CSF mRNA (mRNA sequence shown in SEQ ID NO: 21438; polyA tail of approximately 140 nucleotides not shown in sequence; 5′cap, Cap1; fully modified with 5-methylcytosine and N1-methyl-pseudouridine) and Factor IX mRNA (mRNA sequence shown in SEQ ID NO: 1622; polyA tail of approximately 140 nucleotides not shown in sequence; 5′cap, Cap1; fully modified with 5-methylcytosine and N1-methyl-pseudouridine), is formulated in DLin-MC3-DMA as described in Table 166. The formulations are administered intravenously (IV.), intramuscularly (IM.) or subcutaneously (S.C.) to Balb-C mice at a dose of 0.05 mg/kg. Control LNP formulations containing only one mRNA are also admininistered at an equivalent dose.

TABLE 166
DLin-MC3-DMA Formulation

| | Formulation |
|---|---|
| | NPA-157-1 |
| Lipid | DLin-MC3-DMA |
| Lipid/mRNA | 20:1 |
| ratio (wt/wt) | |
| Mean Size | 89 nm |
| | PDI: 0.08 |
| Zeta at pH 7.4 | 1.1 mV |
| Encaps. | 97% |
| (RiboGr) | |

[1630] Serum is collected from the mice at 8 hours, 24 hours, 72 hours and/or 7 days after administration of the formulation. The serum is analyzed by ELISA to determine the protein expression of EPO, G-CSF, and Factor IX.

### Example 108. Cationic Lipid Formulation Studies of of 5-Methylcytosine and N1-Methyl-Pseudouridine Modified mRNA

[1631] EPO mRNA (mRNA sequence shown in SEQ ID NO: 1638; polyA tail of approximately 140 nucleotides not shown in sequence; 5′cap, Cap1; fully modified with 5-methylcytosine and N1-methyl-pseudouridine) or G-CSF mRNA (mRNA sequence shown in SEQ ID NO: 21438; polyA tail of approximately 140 nucleotides not shown in sequence; 5′cap, Cap1; fully modified with 5-methylcytosine and N1-methyl-pseudouridine) is formulated in DLin-MC3-DMA and DLin-KC2-DMA as described in Table 167. The formulations are administered intravenously (IV), intramuscularly (IM.) or subcutaneously (S.C.) to Balb-C mice at a dose of 0.05 mg/kg.

TABLE 167
DLin-MC3-DMA and DLin-KC2-DMA Formulations

| | Formulation | | | |
|---|---|---|---|---|
| | NPA-147-1 | NPA-148-1 | NPA-150-1 | NPA-151-1 |
| mRNA | EPO | EPO | G-CSF | G-CSF |
| Lipid | DLin-MC3- | DLin-KC2- | DLin-MC3- | DLin-KC2- |
| | DMA | DMA | DMA | DMA |
| Lipid/mRNA | 20:1 | 20:1 | 20:1 | 20:1 |
| ratio (wt/wt) | | | | |
| Mean Size | 117 nm | 82 nm | 119 nm | 88 nm |
| | PDI: 0.14 | PDI: 0.08 | PDI: 0.13 | PDI: 0.08 |
| Zeta at pH 7.4 | −1.7 mV | 0.6 mV | 3.6 mV | 2.2 mV |
| Encaps. | 100% | 96% | 100% | 100% |
| (RiboGr) | | | | |

[1632] Serum is collected from the mice at 8 hours, 24 hours, 72 hours and/or 7 days after administration of the formulation. The serum is analyzed by ELISA to determine the protein expression of EPO and G-CSF.

### Example 109. In Vitro VEGF PBMC Study

[1633] 500 ng of VEGF mRNA (mRNA sequence shown in SEQ ID NO: 1672 polyA tail of approximately 160 nucleotides not shown in sequence; 5′cap, Cap1) fully modified with 5-methylcytosine and pseudouridine (VEGF 5 mC/pU), fully modified with 5-methylcytosine and N1-methyl-pseudouridine (VEGF 5 mC/N1mpU) or unmodified (VEGF unmod) was transfected with 0.4 uL of Lipofectamine 2000 into peripheral blood mononuclear cells (PBMC) from three normal blood donors (D1, D2, and D3). Cells were also untreated for each donor as a control. The supernatant was harvested and run by ELISA 22 hours after transfection to determine the protein expression and cytokine induction. The expression of VEGF and IFN-alpha induction is shown in Table 168 and FIGS. 8A and 8B.

TABLE 168
Protein and Cytokine levels

| | VEGF Expression | | | IFN-alpha Induction | | |
|---|---|---|---|---|---|---|
| | (pg/ml) | | | (pg/ml) | | |
| | D1 | D2 | D3 | D1 | D2 | D3 |
| VEGF unmod | 2 | 0 | 0 | 5400 | 3537 | 4946 |
| VEGF 5mC/pU | 424 | 871 | 429 | 145 | 294 | 106 |
| VEGF 5mC/N1mpU | 5088 | 10331 | 6183 | 205 | 165 | 6 |

### Example 110. In Vitro Expression of Modified mRNA

[1634] HEK293 cells were transfected EPO modified mRNA (mRNA sequence shown in SEQ ID NO: 1638; polyA tail of approximately 160 nucleotides not shown in sequence; 5′cap, Cap1; fully modified with 5-methylcytosine and pseudouridine), HeLa cells were forward transfected with Transforming growth factor beta (TGF-beta) modified mRNA (mRNA sequence shown in SEQ ID NO: 1668; poly A tail of approximately 160 nucleotides not shown in sequence; 5′cap, Cap1; fully modified with 5-methylcytosine and pseudouridine) and HepG2 cells were transfected with bactericidal/permeability-increasing protein (rBPI-21) modified mRNA (SEQ ID NO: 21449; poly A tail of approximately 160 nucleotides not shown in sequence; 5′cap, Cap1; fully modified with 5-methylcytosine and pseudouridine) which had been complexed with Lipofectamine2000 from Invitrogen (Carlsbad, CA) at the concentrations shown in Table 169, 170 and 171 using the procedures described herein. The protein expression was detected by ELISA and the protein (pg/ml) is also shown in Table 169, 170 and 171. In Table 169, “>” means greater than. For TGF-beta a control of untreated cells and a mock transfection of Lipofectamine2000 was also tested.

TABLE 169
EPO Protein Expression

| | Amount Transfected | | | | | | | |
|---|---|---|---|---|---|---|---|---|
| | 5 | 1 | 200 | 40 | 8 | 1.6 | 320 | 64 |
| | ng | ng | pg | pg | pg | pg | fg | fg |
| Protein | >2000 | 609.486 | 114.676 | 0 | 0 | 0 | 0 | 0 |
| (pg/ml) | | | | | | | | |

TABLE 170
TGF-beta Protein Expression

| | Amount Transfected | | | | |
|---|---|---|---|---|---|
| | 750 ng | 250 ng | 83 ng | Mock | Untreated |
| Protein | 5058 | 4325 | 3210 | 2 | 0 |
| (pg/ml) | | | | | |

TABLE 171
rBPI-21 Protein Expression

| | Amount Transfected | | | | | | | |
|---|---|---|---|---|---|---|---|---|
| | 2 | 400 | 80 | 16 | 3.2 | 640 | 128 | 26 |
| | ug | ng | ng | ng | ng | pg | pg | pg |
| Protein | 20.683 | 9.269 | 4.768 | 0 | 0 | 0 | 0 | 0 |
| (pg/ml) | | | | | | | | |

### Example 111. Bicistronic Modified mRNA

[1635] Human embryonic kidney epithelial (HEK293) were seeded on 96-well plates (Greiner Bio-one GmbH, Frickenhausen, Germany) HEK293 were seeded at a density of 30,000 in 100 μl cell culture medium (DMEM, 10% FCS, adding 2 mM L-Glutamine, 1 mM Sodiumpyruvate and 1× non-essential amino acids (Biochrom AG, Berlin, Germany) and 1.2 mg/ml Sodiumbicarbonate (Sigma-Aldrich, Munich, Germany)) 75 ng of the bi-cistronic modified mRNA (mCherry-2A-GFP) (SEQ ID NO: 21450; polyA tail of approximately 160 nucleotides not shown in sequence; 5′cap, Cap1; fully modified with 5-methylcytosine and pseudouridine), mCherry modified mRNA (mRNA SEQ ID NO: 21439; polyA tail of approximately 160 nucleotides not shown in sequence; 5′cap, Cap1; fully modified with 5-methylcytosine and pseudouridine) or green fluorescent protein (GFP) modified mRNA (mRNA sequence shown in SEQ ID NO: 21448; polyA tail of approximately 160 nucleotides not shown in sequence; 5′cap, Cap1; fully modified with 5-methylcytosine and pseudouridine) were added after seeding the cells and incubated. A control of untreated cells was also evaluated. mCherry-2A-GFP refers to a modified mRNA sequence comprising the coding region of mCherry, the 2A peptide and the coding region of GFP.

[1636] Cells were harvested by transferring the culture media supernatants to a 96-well Pro-Bind U-bottom plate (Beckton Dickinson GmbH, Heidelberg, Germany). Cells were trypsinized with ½ volume Trypsin/EDTA (Biochrom AG, Berlin, Germany), pooled with respective supernatants and fixed by adding one volume PBS/2% FCS (both Biochrom AG, Berlin, Germany)/0.5% formaldehyde (Merck, Darmstadt, Germany). Samples then were submitted to a flow cytometer measurement with a 532 nm excitation laser and the 610/20 filter for PE-Texas Red in a LSRII cytometer (Beckton Dickinson GmbH, Heidelberg, Germany). The mean fluorescence intensity (MFI) of all events is shown in Table 172. Cells transfected with the bi-cistronic modified mRNA were able to express both mCherry and GFP.

TABLE 172
MFI of Modified mRNA

| Modified mRNA | mCherry MFI | GFP MFI |
|---|---|---|
| mCherry | 17746 | 427 |
| GFP | 427 | 20019 |
| mCherry-2A-GFP | 5742 | 6783 |
| Untreated | 427 | 219 |

### Example 112. Cationic Lipid Formulation Studies of of 5-Methylcytosine and N1-Methyl-Pseudouridine Modified mRNA to Produce an Antibody

[1637] Herceptin heavy chain (HC) mRNA (mRNA sequence shown in SEQ ID NO: 21451; polyA tail of approximately 140 nucleotides not shown in sequence; 5′cap, Cap1; fully modified with 5-methylcytosine and N1-methyl-pseudouridine) and Herceptin light chain (LC) (mRNA sequence shown in SEQ ID NO: 21452; polyA tail of approximately 140 nucleotides not shown in sequence; 5′cap, Cap1; fully modified with 5-methylcytosine and N1-methyl-pseudouridine) are formulated in DLin-MC3-DMA and DLin-KC2-DMA as described in Table 173. The formulations are administered intravenously (IV) to Balb-C mice at a dose of 0.500, 0.050, and 0.005 mg/kg.

TABLE 173
DLin-MC3-DMA and DLin-KC2-DMA Formulations

Formulation

| | NPA-158-1 | NPA-159-1 |
|---|---|---|
| Herceptin HC:LC | 2:1 | 2:1 |
| Ratio (wt/wt) | | |
| Lipid | DLin-MC3- | DLin-KC2-DMA |
| | DMA | |
| Lipid/Total mRNA | 20:1 | 20:1 |
| ratio (wt/wt) | | |
| Mean Size | 129 nm | 100 nm |
| | PDI: 0.14 | PDI: 0.10 |
| Zeta at pH 7.4 | 0.9 mV | 1.9 mV |
| Encaps. (RiboGr) | 100% | 100% |

[1638] Serum was collected from the mice at 8 hours, 24 hours, 72 hours and/or 7 days after administration of the formulation. The serum was analyzed by ELISA to determine the protein expression of Herceptin.

### Example 113. Directed SAR of Pseudouridine and N1-Methyl-Pseudouridine

[1639] With the recent focus on the pyrimidine nucleoside pseudouridine, a series of structure-activity studies were designed to investigate mRNA containing modifications to pseudouridine or N1-methyl-pseudourdine.

[1640] The study was designed to explore the effect of chain length, increased lipophilicity, presence of ring structures, and alteration of hydrophobic or hydrophilic interactions when modifications were made at the N1 position, C6 position, the 2-position, the 4-position and on the phosphate backbone. Stability is also investigated.

[1641] To this end, modifications involving alkylation, cycloalkylation, alkyl-cycloalkylation, arylation, alkyl-arylation, alkylation moieties with amino groups, alkylation moieties with carboxylic acid groups, and alkylation moieties containing amino acid charged moieties are investigated. The degree of alkylation is generally C₁-C₆. Examples of the chemistry modifications include those listed in Table 174 and Table 175.

TABLE 174
Pseudouridine and N1-methylPseudouridine SAR

| | | Naturally |
|---|---|---|
| Chemistry Modification | Compound # | occuring |
| N1-Modifications | | |
| N1-Ethyl-pseudo-UTP | 1 | N |
| N1-Propyl-pseudo-UTP | 2 | N |
| N1-iso-propyl-pseudo-UTP | 3 | N |
| N1-(2,2,2-Trifluoroethyl)-pseudo-UTP | 4 | N |
| N1-Cyclopropyl-pseudo-UTP | 5 | N |
| N1-Cyclopropylmethyl-pseudo-UTP | 6 | N |
| N1-Phenyl-pseudo-UTP | 7 | N |
| N1-Benzyl-pseudo-UTP | 8 | N |
| N1-Aminomethyl-pseudo-UTP | 9 | N |
| Pseudo-UTP-N1-2-ethanoic acid | 10 | N |
| N1-(3-Amino-3-carboxypropyl)pseudo-UTP | 11 | N |
| N1-Methyl-3-(3-amino-3- | 12 | Y |
| carboxypropyl)pseudo-UTP | | |
| C-6 Modifications | | |
| 6-Methyl-pseudo-UTP | 13 | N |
| 6-Trifluoromethyl-pseudo-UTP | 14 | N |
| 6-Methoxy-pseudo-UTP | 15 | N |
| 6-Phenyl-pseudo-UTP | 16 | N |
| 6-Iodo-pseudo-UTP | 17 | N |
| 6-Bromo-pseudo-UTP | 18 | N |
| 6-Chloro-pseudo-UTP | 19 | N |
| 6-Fluoro-pseudo-UTP | 20 | N |
| 2- or 4-position Modifications | | |
| 4-Thio-pseudo-UTP | 21 | N |
| 2-Thio-pseudo-UTP | 22 | N |
| Phosphate backbone Modifications | | |
| Alpha-thio-pseudo-UTP | 23 | N |
| N1-Me-alpha-thio-pseudo-UTP | 24 | N |

TABLE 175
Pseudouridine and N1-methyl-Pseudouridine SAR

| | | Naturally |
|---|---|---|
| Chemistry Modification | Compound # | occurring |
| N1-Methyl-pseudo-UTP | 1 | Y |
| N1-Butyl-pseudo-UTP | 2 | N |
| N1-tert-Butyl-pseudo-UTP | 3 | N |
| N1-Pentyl-pseudo-UTP | 4 | N |
| N1-Hexyl-pseudo-UTP | 5 | N |
| N1-Trifluoromethyl-pseudo-UTP | 6 | Y |
| N1-Cyclobutyl-pseudo-UTP | 7 | N |
| N1-Cyclopentyl-pseudo-UTP | 8 | N |
| N1-Cyclohexyl-pseudo-UTP | 9 | N |
| N1-Cycloheptyl-pseudo-UTP | 10 | N |
| N1-Cyclooctyl-pseudo-UTP | 11 | N |
| N1-Cyclobutylmethyl-pseudo-UTP | 12 | N |
| N1-Cyclopentylmethyl-pseudo-UTP | 13 | N |
| N1-Cyclohexylmethyl-pseudo-UTP | 14 | N |
| N1-Cycloheptylmethyl-pseudo-UTP | 15 | N |
| N1-Cyclooctylmethyl-pseudo-UTP | 16 | N |
| N1-p-tolyl-pseudo-UTP | 17 | N |
| N1-(2,4,6-Trimethyl-phenyl)pseudo-UTP | 18 | N |
| N1-(4-Methoxy-phenyl)pseudo-UTP | 19 | N |
| N1-(4-Amino-phenyl)pseudo-UTP | 20 | N |
| N1(4-Nitro-phenyl)pseudo-UTP | 21 | N |
| Pseudo-UTP-N1-p-benzoic acid | 22 | N |
| N1-(4-Methyl-benzyl)pseudo-UTP | 24 | N |
| N1-(2,4,6-Trimethyl-benzyl)pseudo-UTP | 23 | N |
| N1-(4-Methoxy-benzyl)pseudo-UTP | 25 | N |
| N1-(4-Amino-benzyl)pseudo-UTP | 26 | N |
| N1-(4-Nitro-benzyl)pseudo-UTP | 27 | N |
| Pseudo-UTP-N1-methyl-p-benzoic acid | 28 | N |
| N1-(2-Amino-ethyl)pseudo-UTP | 29 | N |
| N1-(3-Amino-propyl)pseudo-UTP | 30 | N |
| N1-(4-Amino-butyl)pseudo-UTP | 31 | N |
| N1-(5-Amino-pentyl)pseudo-UTP | 32 | N |
| N1-(6-Amino-hexyl)pseudo-UTP | 33 | N |
| Pseudo-UTP-N1-3-propionic acid | 34 | N |
| Pseudo-UTP-N1-4-butanoic acid | 35 | N |
| Pseudo-UTP-N1-5-pentanoic acid | 36 | N |
| Pseudo-UTP-N1-6-hexanoic acid | 37 | N |
| Pseudo-UTP-N1-7-heptanoic acid | 38 | N |
| N1-(2-Amino-2-carboxyethyl)pseudo-UTP | 39 | N |
| N1-(4-Amino-4-carboxybutyl)pseudo-UTP | 40 | N |
| N3-Alkyl-pseudo-UTP | 41 | N |
| 6-Ethyl-pseudo-UTP | 42 | N |
| 6-Propyl-pseudo-UTP | 43 | N |
| 6-iso-Propyl-pseudo-UTP | 44 | N |
| 6-Butyl-pseudo-UTP | 45 | N |
| 6-tert-Butyl-pseudo-UTP | 46 | N |
| 6-(2,2,2-Trifluoroethyl)-pseudo-UTP | 47 | N |
| 6-Ethoxy-pseudo-UTP | 48 | N |
| 6-Trifluoromethoxy-pseudo-UTP | 49 | N |
| 6-Phenyl-pseudo-UTP | 50 | N |
| 6-(Substituted-Phenyl)-pseudo-UTP | 51 | N |
| 6-Cyano-pseudo-UTP | 52 | N |
| 6-Azido-pseudo-UTP | 53 | N |
| 6-Amino-pseudo-UTP | 54 | N |
| 6-Ethylcarboxylate-pseudo-UTP | 54b | N |
| 6-Hydroxy-pseudo-UTP | 55 | N |
| 6-Methylamino-pseudo-UTP | 55b | N |
| 6-Dimethylamino-pseudo-UTP | 57 | N |
| 6-Hydroxyamino-pseudo-UTP | 59 | N |
| 6-Formyl-pseudo-UTP | 60 | N |
| 6-(4-Morpholino)-pseudo-UTP | 61 | N |
| 6-(4-Thiomorpholino)-pseudo-UTP | 62 | N |
| N1-Me-4-thio-pseudo-UTP | 63 | N |
| N1-Me-2-thio-pseudo-UTP | 64 | N |
| 1,6-Dimethyl-pseudo-UTP | 65 | N |
| 1-Methyl-6-trifluoromethyl-pseudo-UTP | 66 | N |
| 1-Methyl-6-ethyl-pseudo-UTP | 67 | N |
| 1-Methyl-6-propyl-pseudo-UTP | 68 | N |
| 1-Methyl-6-iso-propyl-pseudo-UTP | 69 | N |
| 1-Methyl-6-butyl-pseudo-UTP | 70 | N |
| 1-Methyl-6-tert-butyl-pseudo-UTP | 71 | N |
| 1-Methyl-6-(2,2,2-Trifluoroethyl)pseudo-UTP | 72 | N |
| 1-Methyl-6-iodo-pseudo-UTP | 73 | N |
| 1-Methyl-6-bromo-pseudo-UTP | 74 | N |
| 1-Methyl-6-chloro-pseudo-UTP | 75 | N |
| 1-Methyl-6-fluoro-pseudo-UTP | 76 | N |
| 1-Methyl-6-methoxy-pseudo-UTP | 77 | N |
| 1-Methyl-6-ethoxy-pseudo-UTP | 78 | N |
| 1-Methyl-6-trifluoromethoxy-pseudo-UTP | 79 | N |
| 1-Methyl-6-phenyl-pseudo-UTP | 80 | N |
| 1-Methyl-6-(substituted phenyl)pseudo-UTP | 81 | N |
| 1-Methyl-6-cyano-pseudo-UTP | 82 | N |
| 1-Methyl-6-azido-pseudo-UTP | 83 | N |
| 1-Methyl-6-amino-pseudo-UTP | 84 | N |
| 1-Methyl-6-ethylcarboxylate-pseudo-UTP | 85 | N |
| 1-Methyl-6-hydroxy-pseudo-UTP | 86 | N |
| 1-Methyl-6-methylamino-pseudo-UTP | 87 | N |
| 1-Methyl-6-dimethylamino-pseudo-UTP | 88 | N |
| 1-Methyl-6-hydroxyamino-pseudo-UTP | 89 | N |
| 1-Methyl-6-formyl-pseudo-UTP | 90 | N |
| 1-Methyl-6-(4-morpholino)-pseudo-UTP | 91 | N |
| 1-Methyl-6-(4-thiomorpholino)-pseudo-UTP | 92 | N |
| 1-Alkyl-6-vinyl-pseudo-UTP | 93 | N |
| 1-Alkyl-6-allyl-pseudo-UTP | 94 | N |
| 1-Alkyl-6-homoallyl-pseudo-UTP | 95 | N |
| 1-Alkyl-6-ethynyl-pseudo-UTP | 96 | N |
| 1-Alkyl-6-(2-propynyl)-pseudo-UTP | 97 | N |
| 1-Alkyl-6-(1-propynyl)-pseudo-UTP | 98 | N |

### Example 114. Incorporation of Naturally and Non-Naturally Occurring Nucleosides

[1642] Naturally and non-naturally occurring nucleosides are incorporated into mRNA encoding a polypeptide of interest. Examples of these are given in Tables 176 and 177. Certain commercially available nucleoside triphosphates (NTPs) are investigated in the polynucleotides of the invention. A selection of these are given in Table 176. The resultant mRNA are then examined for their ability to produce protein, induce cytokines, and/or produce a therapeutic outcome.

TABLE 176
Naturally and non-naturally occurring nucleosides

| | | Naturally |
|---|---|---|
| Chemistry Modification | Compound # | occuring |
| N4-Methyl-Cytosine | 1 | Y |
| N4,N4-Dimethyl-2′-OMe-Cytosine | 2 | Y |
| 5-Oxyacetic acid-methyl ester-Uridine | 3 | Y |
| N3-Methyl-pseudo-Uridine | 4 | Y |
| 5-Hydroxymethyl-Cytosine | 5 | Y |
| 5-Trifluoromethyl-Cytosine | 6 | N |
| 5-Trifluoromethyl-Uridine | 7 | N |
| 5-Methyl-amino-methyl-Uridine | 8 | Y |
| 5-Carboxy-methyl-amino-methyl-Uridine | 9 | Y |
| 5-Carboxymethylaminomethyl-2′-OMe-Uridine | 10 | Y |
| 5-Carboxymethylaminomethyl-2-thio-Uridine | 11 | Y |
| 5-Methylaminomethyl-2-thio-Uridine | 12 | Y |
| 5-Methoxy-carbonyl-methyl-Uridine | 13 | Y |
| 5-Methoxy-carbonyl-methyl-2′-OMe-Uridine | 14 | Y |
| 5-Oxyacetic acid-Uridine | 15 | Y |
| 3-(3-Amino-3-carboxypropyl)-Uridine | 16 | Y |
| 5-(carboxyhydroxymethyl)uridine methyl ester | 17 | Y |
| 5-(carboxyhydroxymethyl)uridine | 18 | Y |

TABLE 177
Non-naturally occurring nucleoside triphosphates

| | | Naturally |
|---|---|---|
| Chemistry Modification | Compound # | occuring |
| N1-Me-GTP | 1 | N |
| 2′-OMe-2-Amino-ATP | 2 | N |
| 2′-OMe-pseudo-UTP | 3 | Y |
| 2′-OMe-6-Me-UTP | 4 | N |
| 2′-Azido-2′-deoxy-ATP | 5 | N |
| 2′-Azido-2′-deoxy-GTP | 6 | N |
| 2′-Azido-2′-deoxy-UTP | 7 | N |
| 2′-Azido-2′-deoxy-CTP | 8 | N |
| 2′-Amino-2′-deoxy-ATP | 9 | N |
| 2′-Amino-2′-deoxy-GTP | 10 | N |
| 2′-Amino-2′-deoxy-UTP | 11 | N |
| 2′-Amino-2′-deoxy-CTP | 12 | N |
| 2-Amino-ATP | 13 | N |
| 8-Aza-ATP | 14 | N |
| Xanthosine-5′-TP | 15 | N |
| 5-Bromo-CTP | 16 | N |
| 2′-F-5-Methyl-2′-deoxy-UTP | 17 | N |
| 5-Aminoallyl-CTP | 18 | N |
| 2-Amino-riboside-TP | 19 | N |

### Example 115. Incorporation of Modifications to the Nucleobase and Carbohydrate (Sugar)

[1643] Naturally and non-naturally occurring nucleosides are incorporated into mRNA encoding a polypeptide of interest. Commercially available nucleosides and NTPs having modifications to both the nucleobase and carbohydrate (sugar) are examined for their ability to be incorporated into mRNA and to produce protein, induce cytokines, and/or produce a therapeutic outcome. Examples of these nucleosides are given in Tables 178 and 179.

TABLE 178
Combination modifications

| Chemistry Modification | Compound # |
|---|---|
| 5-iodo-2′-fluoro-deoxyuridine | 1 |
| 5-iodo-cytidine | 6 |
| 2′-bromo-deoxyuridine | 7 |
| 8-bromo-adenosine | 8 |
| 8-bromo-guanosine | 9 |
| 2,2′-anhydro-cytidine hydrochloride | 10 |
| 2,2′-anhydro-uridine | 11 |
| 2′-Azido-deoxyuridine | 12 |
| 2-amino-adenosine | 13 |
| N4-Benzoyl-cytidine | 14 |
| N4-Amino-cytidine | 15 |
| 2′-O-Methyl-N4-Acetyl-cytidine | 16 |
| 2′Fluoro-N4-Acetyl-cytidine | 17 |
| 2′Fluor-N4-Bz-cytidine | 18 |
| 2′O-methyl-N4-Bz-cytidine | 19 |
| 2′O-methyl-N6-Bz-deoxyadenosine | 20 |
| 2′Fluoro-N6-Bz-deoxyadenosine | 21 |
| N2-isobutyl-guanosine | 22 |
| 2′Fluro-N2-isobutyl-guanosine | 23 |
| 2′O-methyl-N2-isobutyl-guanosine | 24 |

TABLE 179
Naturally occuring combinations

| | | Naturally |
|---|---|---|
| Name | Compound # | occurring |
| 5-Methoxycarbonylmethyl-2-thiouridine TP | 1 | Y |
| 5-Methylaminomethyl-2-thiouridine TP | 2 | Y |
| 5-Crbamoylmethyluridine TP | 3 | Y |
| 5-Carbamoylmethyl-2′-O-methyluridine TP | 4 | Y |
| 1-Methyl-3-(3-amino-3-carboxypropyl) | 5 | Y |
| pseudouridine TP | | |
| 5-Methylaminomethyl-2-selenouridine TP | 6 | Y |
| 5-Carboxymethyluridine TP | 7 | Y |
| 5-Methyldihydrouridine TP | 8 | Y |
| lysidine TP | 9 | Y |
| 5-Taurinomethyluridine TP | 10 | Y |
| 5-Taurinomethyl-2-thiouridine TP | 11 | Y |
| 5-(iso-Pentenylaminomethyl)uridine TP | 12 | Y |
| 5-(iso-Pentenylaminomethyl)-2-thiouridine TP | 13 | Y |
| 5-(iso-Pentenylaminomethyl)-2′-O- | 14 | Y |
| methyluridine TP | | |
| N4-Acetyl-2′-O-methylcytidine TP | 15 | Y |
| N4,2′-O-Dimethylcytidine TP | 16 | Y |
| 5-Formyl-2′-O-methylcytidine TP | 17 | Y |
| 2′-O-Methylpseudouridine TP | 18 | Y |
| 2-Thio-2′-O-methyluridine TP | 19 | Y |
| 3,2′-O-Dimethyluridine TP | 20 | Y |

[1644] In the tables “UTP” stands for uridine triphosphate, “GTP” stands for guanosine triphosphate, “ATP” stands for adenosine triphosphate, “CTP” stands for cytosine triphosphate, “TP” stands for triphosphate and “Bz” stands for benzyl.

### Example 116. Protein Production of Vascular Endothelial Growth Factor in HeLa Cells

[1645] The day before transfection, 20,000 HeLa cells (ATCC no. CCL-2; Manassas, VA) were harvested by treatment with Trypsin-EDTA solution (LifeTechnologies, Grand Island, NY) and seeded in a total volume of 100 ul EMEM medium (supplemented with 10% FCS and 1× Glutamax) per well in a 96-well cell culture plate (Corning, Manassas, VA). The cells were grown at 37° C. in 5% CO₂ atmosphere overnight. The next day, 250 ng of vascular endothelial growth factor (VEGF) modified RNA (mRNA sequence shown in SEQ ID NO: 1672; polyA tail of approximately 160 nucleotides not shown in sequence; 5′cap, Cap1) with the chemical modification described in Table 180, was diluted in 10 ul final volume of OPTI-MEM (LifeTechnologies, Grand Island, NY). Lipofectamine 2000 (LifeTechnologies, Grand Island, NY) was used as transfection reagent and 0.2 ul of lipofectamine 2000 was diluted to 10 ul final volume of OPTI-MEM. After 5 minutes of incubation at room temperature, both solutions were combined and incubated an additional 15 minute at room temperature. Then the 20 ul combined solution was added to the 100 ul cell culture medium containing the HeLa cells and incubated at room temperature. A second set of HeLa cells was also evaluated with the VEGF mRNA according to the procedure set out above. A control of untreated cells and cells treated with just lipofecatamine 2000 was also analyzed for the first set of HeLa cells.

[1646] After an 18 to 22 hour incubation cell culture supernatants of cells expressing VEGF were collected and centrifuged at 10.000 rcf for 2 minutes. The cleared supernatants were then analyzed with a VEGF-specific ELISA kit (R & D Systems, Minneapolis, MN) according to the manufacturer instructions. All samples were diluted until the determined values were within the linear range of the ELISA standard curve. The amount of protein produced is shown in Table 180.

[1647] These results demonstrate that VEGF fully modified with 1-methylpseudouridine produced more protein in HeLa cells compared to the other chemistry.

TABLE 180
Protein Production

| | VEGF | VEGF |
|---|---|---|
| | set 1 | set 2 |
| Sample | (pg/ml) | (pg/ml) |
| 5-methylcytosine and pseudouridine (5mC and | 25,455 | 50,341 |
| pU) | | |
| 5-methylcytosine and 1-methylpsudouridine (5mC | 5,795 | 8,523 |
| and 1mpU) | | |
| 25% of uridine modified with 2-thiouridine and | 27,045 | 27,045 |
| 25% of cytosine modified with 5-methylcytosine | | |
| (s2U and 5mC) | | |
| Pseudouridine (pU) | 216,023 | 345,114 |
| 1-methylpseudouridine (1mpU) | 32,614 | 38,523 |
| Unmodified | 409,318 | 447,273 |
| Lipofectamine 2000 (L2000) | 0 | N/A |
| Untreated | 0 | N/A |

### Example 117. Comparison of Protein Production of Chemically Modified Vascular Endothelial Growth Factor in HeLa Cells

[1648] The day before transfection, 20,000 HeLa cells (ATCC no. CCL-2; Manassas, VA) were harvested by treatment with Trypsin-EDTA solution (LifeTechnologies, Grand Island, NY) and seeded in a total volume of 100 ul EMEM medium (supplemented with 10% FCS and 1× Glutamax) per well in a 96-well cell culture plate (Corning, Manassas, VA). The cells were grown at 37° C. in 5% CO₂ atmosphere overnight. Next day, 250 ng of vascular endothelial growth factor (VEGF) modified RNA (mRNA sequence shown in SEQ ID NO: 1672; polyA tail of approximately 160 nucleotides not shown in sequence; 5′cap, Cap1) with the chemical modification described in Table 181, were diluted in 10 ul final volume of OPTI-MEM (LifeTechnologies, Grand Island, NY). Lipofectamine 2000 (LifeTechnologies, Grand Island, NY) was used as transfection reagent and 0.2 ul of lipofectamine 2000 was diluted to 10 ul final volume of OPTI-MEM. After 5 minutes of incubation at room temperature, both solutions were combined and incubated an additional 15 minute at room temperature. Then the 20 ul combined solution was added to the 100 ul cell culture medium containing the HeLa cells and incubated at room temperature. A control of untreated cells was also analyzed.

[1649] After an 18 to 22 hour incubation cell culture supernatants of cells expressing VEGF were collected and centrifuged at 10.000 rcf for 2 minutes. The cleared supernatants were then analyzed with a VEGF-specific ELISA kit (R & D Systems, Minneapolis, MN) according to the manufacturer instructions. All samples were diluted until the determined values were within the linear range of the ELISA standard curve. The amount of protein produced is shown in Table 181 and FIG. 9.

[1650] These results demonstrate that VEGF fully modified with 1-methylpseudouridine produced more protein in HeLa cells compared to the other chemistry.

TABLE 181
Protein Production

| | VEGF |
|---|---|
| Sample | (pg/ml) |
| Unmodified | 121,176 |
| 5-methylcytosine and 1-methylpsudouridine (5mC and 1mpU) | 760,000 |
| 1-methylpseudouridine (1mpU) | 1,393,824 |
| Untreated | 0 |

### Example 118. Production of Vascular Endothelial Growth Factor Protein in Mammals

[1651] Lipoplexed vascular endothelial growth factor (VEGF) mRNA (mRNA sequence shown in SEQ ID NO: 1672; polyA tail of approximately 160 nucleotides not shown in sequence; 5′cap, Cap1) unmodified, fully modified with 5-methylcytosine and pseudouridine (5 mC/pU), fully modified with 5-methylcytosine and 1-methylpseudouridine (5 mC/1mpU), modified where 25% of the cytosines replaced with 5-methylcytosine and 25% of the uridines replaced with 2-thiouridine (5 mC/s2U), fully modified with 1-methylpseudouridine (1mpU) or fully modified with pseudouridine (pU). The formulation was administered intravenously to mice at a dose of 2 ug of mRNA per mouse. As a control, a group of mice were untreated. Serum from the mice is measured by specific VEGF ELISA 3 hours after administration for VEGF protein expression. The results are shown in Table 182 and FIG. 10.

TABLE 182
Protein Production

| | VEGF |
|---|---|
| Sample | (pg/ml) |
| Unmodified | 34 |
| 5-methylcytosine and pseudouridine (5mC and pU) | 40 |
| 5-methylcytosine and 1-methylpsudouridine (5mC and 1mpU) | 11 |
| 25% of uridine modified with 2-thiouridine and 25% of cytosine | 53 |
| modified with 5-methylcytosine (s2U and 5mC) | |
| Pseudouridine (pU) | 86 |
| 1-methyl-pseudouridine (1mpU) | 51 |
| Untreated | 0 |

### Example 119. Protein Production of Granulocyte Colony Stimulating Factor in HeLa Cells

[1652] The day before transfection, 20,000 HeLa cells (ATCC no. CCL-2; Manassas, VA) were harvested by treatment with Trypsin-EDTA solution (LifeTechnologies, Grand Island, NY) and seeded in a total volume of 100 ul EMEM medium (supplemented with 10% FCS and 1× Glutamax) per well in a 96-well cell culture plate (Corning, Manassas, VA). The cells were grown at 37° C. in 5% CO₂ atmosphere overnight. The next day, 250 ng of granulocyte colony stimulating factor (G-CSF) modified RNA (mRNA sequence shown in SEQ ID NO: 21438; polyA tail of approximately 160 nucleotides not shown in sequence; 5′cap, Cap1) with the chemical modification described in Table 183, was diluted in 10 ul final volume of OPTI-MEM (LifeTechnologies, Grand Island, NY). Lipofectamine 2000 (LifeTechnologies, Grand Island, NY) was used as transfection reagent and 0.2 ul of lipofectamine 2000 was diluted to 10 ul final volume of OPTI-MEM. After 5 minutes of incubation at room temperature, both solutions were combined and incubated an additional 15 minute at room temperature. Then the 20 ul combined solution was added to the 100 ul cell culture medium containing the HeLa cells and incubated at room temperature. A control of untreated cells and cells treated with just lipofecatamine 2000 was also analyzed.

[1653] After an 18 to 22 hour incubation cell culture supernatants of cells expressing G-CSF were collected and centrifuged at 10.000 rcf for 2 minutes. The cleared supernatants were then analyzed with a G-CSF-specific ELISA kit (R & D Systems, Minneapolis, MN) according to the manufacturer instructions. All samples were diluted until the determined values were within the linear range of the ELISA standard curve. The amount of protein produced is shown in Table 183 and FIG. 11.

TABLE 183
Protein Production

| | G-CSF |
|---|---|
| Sample | (pg/ml) |
| 5-methylcytosine and pseudouridine (5mC and pU) | 704,250 |
| 5-methylcytosine and 1-methylpsudouridine | 1,523,750 |
| (5mC and 1mpU) | |
| 25% of uridine modified with 2-thiouridine and | 89,000 |
| 25% of cytosine modified with 5-methylcytosine | |
| (s2U and 5mC) | |
| Pseudouridine (pU) | 408,250 |
| 1-methylpseudouridine (1mpU) | 1,391,250 |
| Lipofectamine 2000 (L2000) | 0 |
| Untreated | 0 |

### Example 120. Production of Granulocyte Colony Stimulating Factor Protein in Mammals

[1654] Granulocyte colony stimulating factor (G-CSF) mRNA (mRNA sequence shown in SEQ ID NO: 21438; polyA tail of approximately 160 nucleotides not shown in sequence; 5′cap, Cap1) fully modified with 5-methylcytosine and pseudouridine (5 mC/pU), fully modified with 5-methylcytosine and 1-methylpseudouridine (5 mC/1mpU), modified where 25% of the cytosines replaced with 5-methylcytosine and 25% of the uridines replaced with 2-thiouridine (5 mC/s2U), fully modified with 1-methylpseudouridine (1mpU) or fully modified with pseudouridine (pU). The formulation was administered intravenously to mice (CD1) (n=3) at a dose of 2 ug of mRNA and 2 ul of lipofectamine 2000 (L2000) per mouse. As a control, a group of mice were untreated. Serum from the mice is measured by specific G-CSF ELISA 6 hours after administration for G-CSF protein expression. The results are shown in Table 184 and FIG. 12.

TABLE 184
Protein Production

| | G-CSF |
|---|---|
| Sample | (pg/ml) |
| 5-methylcytosine and pseudouridine (5mC and pU) | 3,800 |
| 5-methylcytosine and 1-methylpsudouridine (5mC and 1mpU) | 22,868 |
| 25% of uridine modified with 2-thiouridine and 25% of cytosine | 1,386 |
| modified with 5-methylcytosine (s2U and 5mC) | |
| Pseudouridine (pU) | 7,579 |
| 1-methylpseudouridine (1mpU) | 25,882 |
| Untreated | 0 |

### Example 121. Protein Production of Chemically Modified Factor IX in HeLa Cell Supernatant

[1655] The day before transfection, 15,000 HeLa cells (ATCC no. CCL-2; Manassas, VA) were harvested by treatment with Trypsin-Ethylenediaminetetraacetic acid (EDTA) solution (LifeTechnologies, Grand Island, NY) and seeded in a total volume of 100 ul Eagle's minimal essential medium (EMEM) (supplemented with 10% fetal calf serum (FCS) and 1× Glutamax) per well in a 24-well cell culture plate (Corning, Manassas, VA). The cells were grown at 37° C. in 5% CO₂ atmosphere overnight. Next day, 250 ng of factor IX modified RNA (mRNA sequence shown in SEQ ID NO: 1622; polyA tail of approximately 140 nucleotides not shown in sequence; 5′cap, Cap1) fully modified with 5-methylcytosine and pseudouridine (5 mC/pU), fully modified with 5-methylcytosine and 1-methylpseudouridine (5 mC/1mpU), modified where 25% of the cytosines replaced with 5-methylcytosine and 25% of the uridines replaced with 2-thiouridine (s2U/5 mC), fully modified with 1-methylpseudouridine (1mpU) or fully modified with pseudouridine (pU) were diluted in 10 ul final volume of OPTI-MEM® (LifeTechnologies, Grand Island, NY). Lipofectamine 2000 (LifeTechnologies, Grand Island, NY) was used as transfection reagent and 0.2 ul of lipofectamine 2000 was diluted to 10 ul final volume of OPTI-MEM®. After 5 minutes of incubation at room temperature, both solutions were combined and incubated an additional 15 minute at room temperature. Then the 20 ul combined solution was added to the 100 ul cell culture medium containing the HeLa cells and incubated at room temperature. A control of untreated was also analyzed.

[1656] After an 18 hour incubation cell culture supernatants of cells expressing factor IX were collected by lysing cells with immuno-precipitation (IP) buffer from Pierce Biotechnology (Thermo Scientific, Rockford, IL) and centrifuged at 10.000 rcf for 2 minutes. The cleared supernatants were diluted 1:2 (1 ml lysate/2 wells/24 well plate) or 1:5 (1 ml lysate/5 wells/24 well plate) then analyzed with a factor IX-specific ELISA kit according to the manufacturer instructions. All samples were diluted until the determined values were within the linear range of the ELISA standard curve. The amount of protein produced in both studies is shown in Table 185 and FIG. 13.

TABLE 185
Protein Production

| | Factor IX |
|---|---|
| Sample | (ng/ml) |
| 5-methylcytosine and pseudouridine (5mC/pU) | 45.8 |
| 5-methylcytosine and 1-methylpseudouridine | 147.1 |
| (5mC/1mpU) | |
| 25% of the cytosines replaced with 5-methylcytosine | 7.4 |
| and 25% of the uridines replaced with 2-thiouridine | |
| (s2U/5mC) | |
| Pseudouridine (pU) | 17.0 |
| 1-methylpseudouridine (1mpU) | 32.0 |
| Untreated | 0 |

### Example 122. Protein Production of Apolipoprotein A-I in HeLa Cells

[1657] The day before transfection, 20,000 HeLa cells (ATCC no. CCL-2; Manassas, VA) were harvested by treatment with Trypsin-Ethylenediaminetetraacetic acid (EDTA) solution (LifeTechnologies, Grand Island, NY) and seeded in a total volume of 100 ul Eagle's minimal essential medium (EMEM) (supplemented with 10% fetal calf serum (FCS) and 1× Glutamax) per well in a 24-well cell culture plate (Corning, Manassas, VA). The cells were grown at 37° C. in 5% CO₂ atmosphere overnight. Next day, 250 ng of apolipoprotein A-I wild-type(APOA1wt) modified RNA (mRNA sequence shown in SEQ ID NO: 21453; polyA tail of approximately 160 nucleotides not shown in sequence; 5′cap, Cap1) fully modified with 5-methylcytosine and pseudouridine, apoliproprotein A1 Paris (APOA1 Paris) modified RNA (mRNA sequence shown in SEQ ID NO: 21454; polyA tail of approximately 160 nucleotides not shown in sequence; 5′cap, Cap1) fully modified with 5-methylcytosine and pseudouridine or apoliproprotein A1 Milano (APOA1 Milano) modified RNA (mRNA sequence shown in SEQ ID NO: 21455; polyA tail of approximately 160 nucleotides not shown in sequence; 5′cap, Cap1) fully modified with 5-methylcytosine and pseudouridine were diluted in 10 ul final volume of OPTI-MEM® (LifeTechnologies, Grand Island, NY). Lipofectamine 2000 (LifeTechnologies, Grand Island, NY) was used as transfection reagent and 0.2 ul of lipofectamine 2000 was diluted to 10 ul final volume of OPTI-MEM®. After 5 minutes of incubation at room temperature, both solutions were combined and incubated an additional 15 minute at room temperature. Then the 20 ul combined solution was added to the 100 ul cell culture medium containing the HeLa cells and incubated at room temperature. A control of cells treated with just lipofecatamine 2000 was also analyzed.

[1658] After an 18 hour incubation cell culture supernatants of cells expressing APOA1wt, APOA1 Paris or APOA1 Milano were collected by lysing cells with immuno-precipitation (IP) buffer from Pierce Biotechnology (Thermo Scientific, Rockford, IL) and centrifuged at 10.000 rcf for 2 minutes. The cleared supernatants were diluted 1:2 (1 ml lysate/2 wells/24 well plate) or 1:5 (1 ml lysate/5 wells/24 well plate) then analyzed with an APOA1-specific ELISA kit according to the manufacturer instructions. All samples were diluted until the determined values were within the linear range of the ELISA standard curve. The study was repeated and the amount of protein produced in both studies is shown in Table 186 and FIG. 14.

TABLE 186
Protein Production

| | Protein |
|---|---|
| Sample | (ng/ml) |
| APOA1wt 1:2 Dilution | 8 |
| APOA1wt 1:2 Dilution Repeat | 6 |
| APOA1 Milano 1:2 Dilution | 7 |
| APOA1 Milano 1:2 Dilution Repeat | 7 |
| APOA1 Paris 1:2 Dilution | 10 |
| APOA1 Paris 1:2 Dilution Repeat | 10 |
| APOA1wt 1:5 Dilution | 9 |
| APOA1wt 1:5 Dilution Repeat | 9 |
| APOA1 Milano 1:5 Dilution | 8 |
| APOA1 Milano 1:5 Dilution Repeat | 6 |
| APOA1 Paris 1:5 Dilution | 12 |
| APOA1 Paris 1:5 Dilution Repeat | 11 |
| Control 1:2 Dilution | 0 |
| Control 1:2 Dilution Repeat | 0 |
| Control 1:5 Dilution | 0 |
| Control 1:5 Dilution Repeat | 0 |

### Example 123. Detection of Apolipoprotein A-I Wild-Type Protein: Western Blot

[1659] The day before transfection, 750,000 HeLa cells (ATCC no. CCL-2; Manassas, VA) were harvested by treatment with Trypsin-Ethylenediaminetetraacetic acid (EDTA) solution (LifeTechnologies, Grand Island, NY) and seeded in a total volume of 3 ml Eagle's minimal essential medium (EMEM) (supplemented with 10% fetal calf serum (FCS) and 1× Glutamax) per well in a 6-well cell culture plate (Corning, Manassas, VA). The cells were grown at 37° C. in 5% CO2 atmosphere overnight. Next day, 1250 ng of Apoliproprotein A-I (APOA1) wild-type mRNA (mRNA sequence shown in SEQ ID NO: 21453; polyA tail of approximately 160 nucleotides not shown in sequence; 5′cap, Cap1) fully modified with 5-methylcytosine and pseudouridine (5 mC/pU), fully modified with 5-methylcytosine and 1-methylpseudouridine (5 mC/1mpU), modified where 25% of the cytosines replaced with 5-methylcytosine and 25% of the uridines replaced with 2-thiouridine (s2U/5 mC), fully modified with 1-methylpseudouridine (1mpU) or fully modified with pseudouridine (pU) was diluted in 250 ul final volume of OPTI-MEM® (LifeTechnologies, Grand Island, NY). Lipofectamine 2000 (LifeTechnologies, Grand Island, NY) was used as transfection reagent and 5.5 ul were diluted in 250 ul final volume of OPTI-MEM®. After 5 minutes of incubation at room temperature, both solutions were combined and incubated an additional 15 minutes at room temperature. Then 500 ul of the combined solution was added to the 3 ml cell culture medium containing the HeLa cells. The plates were then incubated as described before.

[1660] After an 16-18 hour incubation, the medium was removed and the cells were washed with 1 ml PBS. After complete removal of the PBS, 500 ul of fresh PBS was added. Cells were harvested by scraping with a cell scraper. Harvested cells receiving the same mRNA were then combined in one 1.5 ml Eppendorf tube.

[1661] Cells were pelleted by centrifugation at 3,000 rpm for 2 minutes. The PBS was removed and cells lysed in 250 ul radio immunoprecipitatoin assay (RIPA) buffer (containing PMSF and eukaryotic protease inhibitor mix) (all from BostonBioProducts, Ashland, MA) by gentle pipetting. Lysates were cleared by centrifugation at 10,000 rpm at 4° G for 10 minutes. Cleared lysates were transferred to Amicon filters with 10,000 kd molecular cutoff (Waters, Milford, MA) and spun at 12,000 rpm and 4° G for 20 minutes. The concentrated protein lysate was recovered by placing the inverted filter in a fresh 1.5 ml Eppendorf tube and spinning at 3,000 rpm for 1 minute. The final volume of the lysate is between 25-40 ul.

[1662] Protein concentration was determined using the BCA kit for microtiter-plates from Pierce (Thermo Fisher, Rockford, IL). The standard proteins of the titration curve were dissolved in RIPA buffer (as described for cell lysate generation) and not in dilution buffer.

[1663] Protein lysates were loaded on NuPage SDS-PAGE system (chambers and power supply) with 1.5 mm ready-to-use Bis-Tris gels and 4-12% acrylamide gradient with MOPS-buffer as running aid (all from Life Technologies, Grand Island, NY). Each lysate sample was prepared to 40 ul final volume. This sample contained 25 ug protein lysate in variable volume, RIPA buffer to make up volume to 26 ul, 4 ul of 10 × reducing agent and 10 ul 4× SDS loading buffer (both from Life Technologies, Grand Island, NY). Samples were heated at 95° C. for 5 minutes and loaded on the gel. Standard settings were chosen by the manufacturer, 200V, 120 mA and maximum 25 W. Run time was 60 minutes, but no longer than running dye reaching the lower end of the gel.

[1664] After the run was terminated, the plastic case was cracked and the encased gel transferred to a ready-to-use nitrocellulose membrane kit and power supply (iBLOT; LifeTechnologies, Grand Island, NY). Using default settings, the protein lysate was transferred by high Ampere electricity from the gel to the membrane.

[1665] After the transfer, the membranes were incubated in 5% bovine serum albumin (BSA) in 1× tris buffered saline (TBS) for 15 minutes then in 5% BSA in 1× TBS+0.1% Tween for another 15 minutes. ApoA1 rabbit polyclonal antibody (Abcam, Cambridge, MA) against APOA1 were applied in 3 ml of 5% BSA in 1× TBS solution at a 1:500 to 1:2000 dilution for 3 hours at room temperature and gentle agitation on an orbital shaker. Membranes are washed 3 times with 1× TBS/0.1% Tween, 5 minutes each time with gentle agitation. Goat anti-rabbit HRP conjugate (Abcam, Cambridge, MA) was conjugated to horse radish peroxidase and binds to the ApoA1 rabbit polyclonal antibody. The conjugated antibody was diluted of 1:1000 to 1:5000 in 5% BSA in 1× TBS and incubated for 3 hours at room temperature. The Western Blot detection of APOA1 protein from APOA1 wild-type mRNA containing various chemical modifications in HeLa cell lysates is shown in FIG. 15.

### Example 124. Detection of Apolipoprotein A-I Paris Protein: Western Blot

[1666] The day before transfection, 750,000 HeLa cells (ATCC no. CCL-2; Manassas, VA) were harvested by treatment with Trypsin-Ethylenediaminetetraacetic acid (EDTA) solution (LifeTechnologies, Grand Island, NY) and seeded in a total volume of 3 ml Eagle's minimal essential medium (EMEM) (supplemented with 10% fetal calf serum (FCS) and 1× Glutamax) per well in a 6-well cell culture plate (Corning, Manassas, VA). The cells were grown at 37° C. in 5% CO2 atmosphere overnight. Next day, 1250 ng of Apoliproprotein A-I (APOA1) Paris mRNA (mRNA sequence shown in SEQ ID NO: 21454; polyA tail of approximately 160 nucleotides not shown in sequence; 5′cap, Cap1) fully modified with 5-methylcytosine and pseudouridine (5 mC/pU), fully modified with 5-methylcytosine and 1-methylpseudouridine (5 mC/1mpU), modified where 25% of the cytosines replaced with 5-methylcytosine and 25% of the uridines replaced with 2-thiouridine (s2U/5 mC), fully modified with 1-methylpseudouridine (1mpU) or fully modified with pseudouridine (pU) was diluted in 250 ul final volume of OPTI-MEM® (LifeTechnologies, Grand Island, NY). Lipofectamine 2000 (LifeTechnologies, Grand Island, NY) was used as transfection reagent and 5.5 ul were diluted in 250 ul final volume of OPTI-MEM®. After 5 minutes of incubation at room temperature, both solutions were combined and incubated an additional 15 minutes at room temperature. Then 500 ul of the combined solution was added to the 3 ml cell culture medium containing the HeLa cells. The plates were then incubated as described before.

[1667] After an 16-18 hour incubation, the medium was removed and the cells were washed with 1 ml PBS. After complete removal of the PBS, 500 ul of fresh PBS was added. Cells were harvested by scraping with a cell scraper. Harvested cells receiving the same mRNA were then combined in one 1.5 ml Eppendorf tube.

[1668] Cells were pelleted by centrifugation at 3,000 rpm for 2 minutes. The PBS was removed and cells lysed in 250 ul radio immunoprecipitatoin assay (RIPA) buffer (containing PMSF and eukaryotic protease inhibitor mix) (all from BostonBioProducts, Ashland, MA) by gentle pipetting. Lysates were cleared by centrifugation at 10,000 rpm at 4° G for 10 minutes. Cleared lysates were transferred to Amicon filters with 10,000 kd molecular cutoff (Waters, Milford, MA) and spun at 12,000 rpm and 4° G for 20 minutes. The concentrated protein lysate was recovered by placing the inverted filter in a fresh 1.5 ml Eppendorf tube and spinning at 3,000 rpm for 1 minute. The final volume of the lysate is between 25-40 ul.

[1669] Protein concentration was determined using the BCA kit for microtiter-plates from Pierce (Thermo Fisher, Rockford, IL). The standard proteins of the titration curve were dissolved in RIPA buffer (as described for cell lysate generation) and not in dilution buffer.

[1670] Protein lysates were loaded on NuPage SDS-PAGE system (chambers and power supply) with 1.5 mm ready-to-use Bis-Tris gels and 4-12% acrylamide gradient with MOPS-buffer as running aid (all from Life Technologies, Grand Island, NY). Each lysate sample was prepared to 40 ul final volume. This sample contained 25 ug protein lysate in variable volume, RIPA buffer to make up volume to 26 ul, 4 ul of 10 × reducing agent and 10 ul 4× SDS loading buffer (both from Life Technologies, Grand Island, NY). Samples were heated at 95° C. for 5 minutes and loaded on the gel. Standard settings were chosen by the manufacturer, 200V, 120 mA and maximum 25 W. Run time was 60 minutes, but no longer than running dye reaching the lower end of the gel.

[1671] After the run was terminated, the plastic case was cracked and the encased gel transferred to a ready-to-use nitrocellulose membrane kit and power supply (iBLOT; LifeTechnologies, Grand Island, NY). Using default settings, the protein lysate was transferred by high Ampere electricity from the gel to the membrane.

[1672] After the transfer, the membranes were incubated in 5% bovine serum albumin (BSA) in 1× tris buffered saline (TBS) for 15 minutes then in 5% BSA in 1× TBS+0.1% Tween for another 15 minutes. ApoA1 rabbit polyclonal antibody (Abcam, Cambridge, MA) against APOA1 were applied in 3 ml of 5% BSA in 1× TBS solution at a 1:500 to 1:2000 dilution for 3 hours at room temperature and gentle agitation on an orbital shaker. Membranes are washed 3 times with 1× TBS/0.1% Tween, 5 minutes each time with gentle agitation. Goat anti-rabbit HRP conjugate (Abcam, Cambridge, MA) was conjugated to horse radish peroxidase and binds to the ApoA1 rabbit polyclonal antibody. The conjugated antibody was diluted of 1:1000 to 1:5000 in 5% BSA in 1× TBS and incubated for 3 hours at room temperature. The Western Blot detection of APOA1 protein from APOA1 Paris mRNA containing various chemical modifications in HeLa cell lysates is shown in FIG. 16.

### Example 125. Detection of Apolipoprotein A-I Milano Protein: Western Blot

[1673] The day before transfection, 750,000 HeLa cells (ATCC no. CCL-2; Manassas, VA) were harvested by treatment with Trypsin-Ethylenediaminetetraacetic acid (EDTA) solution (LifeTechnologies, Grand Island, NY) and seeded in a total volume of 3 ml Eagle's minimal essential medium (EMEM) (supplemented with 10% fetal calf serum (FCS) and 1× Glutamax) per well in a 6-well cell culture plate (Corning, Manassas, VA). The cells were grown at 37° C. in 5% CO2 atmosphere overnight. Next day, 1250 ng of Apoliproprotein A-I (APOA1) Milano mRNA (mRNA sequence shown in SEQ ID NO: 21455; polyA tail of approximately 160 nucleotides not shown in sequence; 5′cap, Cap1) fully modified with 5-methylcytosine and pseudouridine (5 mC/pU), fully modified with 5-methylcytosine and 1-methylpseudouridine (5 mC/1mpU), modified where 25% of the cytosines replaced with 5-methylcytosine and 25% of the uridines replaced with 2-thiouridine (s2U/5 mC), fully modified with 1-methylpseudouridine (1mpU) or fully modified with pseudouridine (pU) was diluted in 250 ul final volume of OPTI-MEM® (LifeTechnologies, Grand Island, NY). Lipofectamine 2000 (LifeTechnologies, Grand Island, NY) was used as transfection reagent and 5.5 ul were diluted in 250 ul final volume of OPTI-MEM®. After 5 minutes of incubation at room temperature, both solutions were combined and incubated an additional 15 minutes at room temperature. Then 500 ul of the combined solution was added to the 3 ml cell culture medium containing the HeLa cells. The plates were then incubated as described before.

[1674] After an 16-18 hour incubation, the medium was removed and the cells were washed with 1 ml PBS. After complete removal of the PBS, 500 ul of fresh PBS was added. Cells were harvested by scraping with a cell scraper. Harvested cells receiving the same mRNA were then combined in one 1.5 ml Eppendorf tube.

[1675] Cells were pelleted by centrifugation at 3,000 rpm for 2 minutes. The PBS was removed and cells lysed in 250 ul radio immunoprecipitatoin assay (RIPA) buffer (containing PMSF and eukaryotic protease inhibitor mix) (all from BostonBioProducts, Ashland, MA) by gentle pipetting. Lysates were cleared by centrifugation at 10,000 rpm at 4° G for 10 minutes. Cleared lysates were transferred to Amicon filters with 10,000 kd molecular cutoff (Waters, Milford, MA) and spun at 12,000 rpm and 4° G for 20 minutes. The concentrated protein lysate was recovered by placing the inverted filter in a fresh 1.5 ml Eppendorf tube and spinning at 3,000 rpm for 1 minute. The final volume of the lysate is between 25-40 ul.

[1676] Protein concentration was determined using the BCA kit for microtiter-plates from Pierce (Thermo Fisher, Rockford, IL). The standard proteins of the titration curve were dissolved in RIPA buffer (as described for cell lysate generation) and not in dilution buffer.

[1677] Protein lysates were loaded on NuPage SDS-PAGE system (chambers and power supply) with 1.5 mm ready-to-use Bis-Tris gels and 4-12% acrylamide gradient with MOPS-buffer as running aid (all from Life Technologies, Grand Island, NY). Each lysate sample was prepared to 40 ul final volume. This sample contained 25 ug protein lysate in variable volume, RIPA buffer to make up volume to 26 ul, 4 ul of 10 × reducing agent and 10 ul 4× SDS loading buffer (both from Life Technologies, Grand Island, NY). Samples were heated at 95° C. for 5 minutes and loaded on the gel. Standard settings were chosen by the manufacturer, 200V, 120 mA and maximum 25 W. Run time was 60 minutes, but no longer than running dye reaching the lower end of the gel.

[1678] After the run was terminated, the plastic case was cracked and the encased gel transferred to a ready-to-use nitrocellulose membrane kit and power supply (iBLOT; LifeTechnologies, Grand Island, NY). Using default settings, the protein lysate was transferred by high Ampere electricity from the gel to the membrane.

[1679] After the transfer, the membranes were incubated in 5% bovine serum albumin (BSA) in 1× tris buffered saline (TBS) for 15 minutes then in 5% BSA in 1× TBS+0.1% Tween for another 15 minutes. ApoA1 rabbit polyclonal antibody (Abcam, Cambridge, MA) against APOA1 were applied in 3 ml of 5% BSA in 1× TBS solution at a 1:500 to 1:2000 dilution for 3 hours at room temperature and gentle agitation on an orbital shaker. Membranes are washed 3 times with 1× TBS/0.1% Tween, 5 minutes each time with gentle agitation. Goat anti-rabbit HRP conjugate (Abcam, Cambridge, MA) was conjugated to horse radish peroxidase and binds to the ApoA1 rabbit polyclonal antibody. The conjugated antibody was diluted of 1:1000 to 1:5000 in 5% BSA in 1× TBS and incubated for 3 hours at room temperature. The Western Blot detection of APOA1 protein from APOA1 Milano mRNA containing various chemical modifications in HeLa cell lysates is shown in FIG. 17.

### Example 126. Detection of Fibrinoen A Protein: Western Blot

[1680] The day before transfection, 750,000 HeLa cells (ATCC no. CCL-2; Manassas, VA) were harvested by treatment with Trypsin-Ethylenediaminetetraacetic acid (EDTA) solution (LifeTechnologies, Grand Island, NY) and seeded in a total volume of 3 ml Eagle's minimal essential medium (EMEM) (supplemented with 10% fetal calf serum (FCS) and 1× Glutamax) per well in a 6-well cell culture plate (Corning, Manassas, VA). The cells were grown at 37° C. in 5% CO2 atmosphere overnight. Next day, 1250 ng of Fibrinogen A (FGA) mRNA (mRNA sequence shown in SEQ ID NO: 21456; polyA tail of approximately 160 nucleotides not shown in sequence; 5′cap, Cap1) fully modified with 5-methylcytosine and 1-methylpseudouridine (5 mC/1mpU) was diluted in 250 ul final volume of OPTI-MEM® (LifeTechnologies, Grand Island, NY). Lipofectamine 2000 (LifeTechnologies, Grand Island, NY) was used as transfection reagent and 5.5 ul were diluted in 250 ul final volume of OPTI-MEM®. After 5 minutes of incubation at room temperature, both solutions were combined and incubated an additional 15 minutes at room temperature. Then 500 ul of the combined solution was added to the 3 ml cell culture medium containing the HeLa cells. The plates were then incubated as described before.

[1681] After an 16-18 hour incubation, the medium was removed and the cells were washed with 1 ml PBS. After complete removal of the PBS, 500 ul of fresh PBS was added. Cells were harvested by scraping with a cell scraper. Harvested cells receiving the same mRNA were then combined in one 1.5 ml Eppendorf tube.

[1682] Cells were pelleted by centrifugation at 3,000 rpm for 2 minutes. The PBS was removed and cells lysed in 250 ul radio immunoprecipitatoin assay (RIPA) buffer (containing PMSF and eukaryotic protease inhibitor mix) (all from BostonBioProducts, Ashland, MA) by gentle pipetting. Lysates were cleared by centrifugation at 10,000 rpm at 4° G for 10 minutes. Cleared lysates were transferred to Amicon filters with 10,000 kd molecular cutoff (Waters, Milford, MA) and spun at 12,000 rpm and 4° G for 20 minutes. The concentrated protein lysate was recovered by placing the inverted filter in a fresh 1.5 ml Eppendorf tube and spinning at 3,000 rpm for 1 minute. The final volume of the lysate is between 25-40 ul.

[1683] Protein concentration was determined using the BCA kit for microtiter-plates from Pierce (Thermo Fisher, Rockford, IL). The standard proteins of the titration curve were dissolved in RIPA buffer (as described for cell lysate generation) and not in dilution buffer.

[1684] Protein lysates were loaded on NuPage SDS-PAGE system (chambers and power supply) with 1.5 mm ready-to-use Bis-Tris gels and 4-12% acrylamide gradient with MOPS-buffer as running aid (all from Life Technologies, Grand Island, NY). Each lysate sample was prepared to 40 ul final volume. This sample contained 25 ug protein lysate in variable volume, RIPA buffer to make up volume to 26 ul, 4 ul of 10 × reducing agent and 10 ul 4× SDS loading buffer (both from Life Technologies, Grand Island, NY). Samples were heated at 95° C. for 5 minutes and loaded on the gel. Standard settings were chosen by the manufacturer, 200V, 120 mA and maximum 25 W. Run time was 60 minutes, but no longer than running dye reaching the lower end of the gel.

[1685] After the run was terminated, the plastic case was cracked and the encased gel transferred to a ready-to-use nitrocellulose membrane kit and power supply (iBLOT; LifeTechnologies, Grand Island, NY). Using default settings, the protein lysate was transferred by high Ampere electricity from the gel to the membrane.

[1686] After the transfer, the membranes were incubated in 5% bovine serum albumin (BSA) in 1× tris buffered saline (TBS) for 15 minutes then in 5% BSA in 1× TBS+0.1% Tween for another 15 minutes. Fibrinogen A goat polyclonal antibody (Abcam, Cambridge, MA) against fibrinogen A were applied in 3 ml of 5% BSA in 1× TBS solution at a 1:500 to 1:2000 dilution for 3 hours at room temperature and gentle agitation on an orbital shaker. Membranes are washed 3 times with 1× TBS/0.1% Tween, 5 minutes each time with gentle agitation. Donkey anti-goat HRP conjugate (Abcam, Cambridge, MA) was conjugated to horse radish peroxidase and binds to the fibrinogen A goat polyclonal antibody. The conjugated antibody was diluted of 1:1000 to 1:5000 in 5% BSA in 1× TBS and incubated for 3 hours at room temperature. As shown with the box in FIG. 18 the Western Blot detection of fibrinogen A was close to the expected size of 95 kd.

### Example 127. Protein Production of Chemically Modified Plasminogen in HeLa Cell Supernatant

[1687] The day before transfection, 20,000 HeLa cells (ATCC no. CCL-2; Manassas, VA) were harvested by treatment with Trypsin-EDTA solution (LifeTechnologies, Grand Island, NY) and seeded in a total volume of 100 ul EMEM medium (supplemented with 10% FCS and 1× Glutamax) per well in a 96-well cell culture plate (Corning, Manassas, VA). The cells were grown at 37° C. in 5% CO₂ atmosphere overnight. Next day, 250 ng of plasminogen modified RNA (mRNA sequence shown in SEQ ID NO: 21457; polyA tail of approximately 160 nucleotides not shown in sequence; 5′cap, Cap1) fully modified with 5-methylcytosine and 1-methylpseudouridine, was diluted in 10 ul final volume of OPTI-MEM (LifeTechnologies, Grand Island, NY). Lipofectamine 2000 (LifeTechnologies, Grand Island, NY) was used as transfection reagent and 0.2 ul of lipofectamine 2000 was diluted to 10 ul final volume of OPTI-MEM. After 5 minutes of incubation at room temperature, both solutions were combined and incubated an additional 15 minute at room temperature. Then the 20 ul combined solution was added to the 100 ul cell culture medium containing the HeLa cells and incubated at room temperature. A control of erythropoietin (EPO) modified mRNA (mRNA sequence shown in SEQ ID NO: 1638; polyA tail of approximately 160 nucleotides not shown in sequence; 5′cap, Cap1, fully modified with 5-methylcytosine and pseudouridine) and untreated cells were also analyzed.

[1688] After an 18 to 22 hour incubation cell culture supernatants of cells expressing plasminogen was collected and centrifuged at 10.000 rcf for 2 minutes. The cleared supernatants were then analyzed with a plasminogen-specific ELISA kit (R & D Systems, Minneapolis, MN) according to the manufacturer instructions. All samples were diluted until the determined values were within the linear range of the ELISA standard curve. The amount of protein produced is shown in Table 187 and FIG. 19.

TABLE 187
Protein Production

| | Plasminogen |
|---|---|
| Sample | (ng/ml) |
| Plasminogen | 10 |
| EPO | 1.1 |
| Untreated | 0.8 |

### Example 128. Detection of Plasminogen Protein: Western Blot

[1689] The day before transfection, 750,000 HeLa cells (ATCC no. CCL-2; Manassas, VA) were harvested by treatment with Trypsin-Ethylenediaminetetraacetic acid (EDTA) solution (LifeTechnologies, Grand Island, NY) and seeded in a total volume of 3 ml Eagle's minimal essential medium (EMEM) (supplemented with 10% fetal calf serum (FCS) and 1× Glutamax) per well in a 6-well cell culture plate (Corning, Manassas, VA). The cells were grown at 37° C. in 5% CO2 atmosphere overnight. Next day, 1250 ng of Plasminogen mRNA (mRNA sequence shown in SEQ ID NO: 21457; polyA tail of approximately 160 nucleotides not shown in sequence; 5′cap, Cap1) fully modified with 5-methylcytosine and 1-methylpseudouridine (5 mC/1mpU) was diluted in 250 ul final volume of OPTI-MEM® (LifeTechnologies, Grand Island, NY). Lipofectamine 2000 (LifeTechnologies, Grand Island, NY) was used as transfection reagent and 5.5 ul were diluted in 250 ul final volume of OPTI-MEM®. After 5 minutes of incubation at room temperature, both solutions were combined and incubated an additional 15 minutes at room temperature. Then 500 ul of the combined solution was added to the 3 ml cell culture medium containing the HeLa cells. The plates were then incubated as described before.

[1690] After an 16-18 hour incubation, the medium was removed and the cells were washed with 1 ml PBS. After complete removal of the PBS, 500 ul of fresh PBS was added. Cells were harvested by scraping with a cell scraper. Harvested cells receiving the same mRNA were then combined in one 1.5 ml Eppendorf tube.

[1691] Cells were pelleted by centrifugation at 3,000 rpm for 2 minutes. The PBS was removed and cells lysed in 250 ul radio immunoprecipitatoin assay (RIPA) buffer (containing PMSF and eukaryotic protease inhibitor mix) (all from BostonBioProducts, Ashland, MA) by gentle pipetting. Lysates were cleared by centrifugation at 10,000 rpm at 4° G for 10 minutes. Cleared lysates were transferred to Amicon filters with 10,000 kd molecular cutoff (Waters, Milford, MA) and spun at 12,000 rpm and 4° G for 20 minutes. The concentrated protein lysate was recovered by placing the inverted filter in a fresh 1.5 ml Eppendorf tube and spinning at 3,000 rpm for 1 minute. The final volume of the lysate is between 25-40 ul.

[1692] Protein concentration was determined using the BCA kit for microtiter-plates from Pierce (Thermo Fisher, Rockford, IL). The standard proteins of the titration curve were dissolved in RIPA buffer (as described for cell lysate generation) and not in dilution buffer.

[1693] Protein lysates were loaded on NuPage SDS-PAGE system (chambers and power supply) with 1.5 mm ready-to-use Bis-Tris gels and 4-12% acrylamide gradient with MOPS-buffer as running aid (all from Life Technologies, Grand Island, NY). Each lysate sample was prepared to 40 ul final volume. This sample contained 25 ug protein lysate in variable volume, RIPA buffer to make up volume to 26 ul, 4 ul of 10 × reducing agent and 10 ul 4× SDS loading buffer (both from Life Technologies, Grand Island, NY). Samples were heated at 95° C. for 5 minutes and loaded on the gel. Standard settings were chosen by the manufacturer, 200V, 120 mA and maximum 25 W. Run time was 60 minutes, but no longer than running dye reaching the lower end of the gel.

[1694] After the run was terminated, the plastic case was cracked and the encased gel transferred to a ready-to-use nitrocellulose membrane kit and power supply (iBLOT; LifeTechnologies, Grand Island, NY). Using default settings, the protein lysate was transferred by high Ampere electricity from the gel to the membrane.

[1695] After the transfer, the membranes were incubated in 5% bovine serum albumin (BSA) in 1× tris buffered saline (TBS) for 15 minutes then in 5% BSA in 1× TBS+0.1% Tween for another 15 minutes. Plasminogen goat polyclonal antibody (Abcam, Cambridge, MA) against plasminogen were applied in 3 ml of 5% BSA in 1× TBS solution at a 1:500 to 1:2000 dilution for 3 hours at room temperature and gentle agitation on an orbital shaker. Membranes are washed 3 times with 1× TBS/0.1% Tween, 5 minutes each time with gentle agitation. Donkey anti-goat HRP conjugate (Abcam, Cambridge, MA) was conjugated to horse radish peroxidase and binds to the plasminogen goat polyclonal antibody. The conjugated antibody was diluted of 1:1000 to 1:5000 in 5% BSA in 1× TBS and incubated for 3 hours at room temperature. FIG. 20 shows that Plasminogen was detected close to the expected size of 95 kd.

### Example 129. Detection of Galactose-1-phosphate Uridylyltransferase Protein: Western Blot

[1696] The day before transfection, 750,000 HeLa cells (ATCC no. CCL-2; Manassas, VA) were harvested by treatment with Trypsin-Ethylenediaminetetraacetic acid (EDTA) solution (LifeTechnologies, Grand Island, NY) and seeded in a total volume of 3 ml Eagle's minimal essential medium (EMEM) (supplemented with 10% fetal calf serum (FCS) and 1× Glutamax) per well in a 6-well cell culture plate (Corning, Manassas, VA). The cells were grown at 37° C. in 5% CO2 atmosphere overnight. Next day, 1250 ng of galactose-1-phosphate uridylyltransferase (GALT) mRNA (mRNA sequence shown in SEQ ID NO: 21458; polyA tail of approximately 160 nucleotides not shown in sequence; 5′cap, Cap1) fully modified with 5-methylcytosine and pseudouridine (5 mC/pU) was diluted in 250 ul final volume of OPTI-MEM® (LifeTechnologies, Grand Island, NY). Lipofectamine 2000 (LifeTechnologies, Grand Island, NY) was used as transfection reagent and 5.5 ul were diluted in 250 ul final volume of OPTI-MEM®. After 5 minutes of incubation at room temperature, both solutions were combined and incubated an additional 15 minutes at room temperature. Then 500 ul of the combined solution was added to the 3 ml cell culture medium containing the HeLa cells. The plates were then incubated as described before.

[1697] After an 16-18 hour incubation, the medium was removed and the cells were washed with 1 ml PBS. After complete removal of the PBS, 500 ul of fresh PBS was added. Cells were harvested by scraping with a cell scraper. Harvested cells receiving the same mRNA were then combined in one 1.5 ml Eppendorf tube.

[1698] Cells were pelleted by centrifugation at 3,000 rpm for 2 minutes. The PBS was removed and cells lysed in 250 ul radio immunoprecipitatoin assay (RIPA) buffer (containing PMSF and eukaryotic protease inhibitor mix) (all from BostonBioProducts, Ashland, MA) by gentle pipetting. Lysates were cleared by centrifugation at 10,000 rpm at 4° G for 10 minutes. Cleared lysates were transferred to Amicon filters with 10,000 kd molecular cutoff (Waters, Milford, MA) and spun at 12,000 rpm and 4° G for 20 minutes. The concentrated protein lysate was recovered by placing the inverted filter in a fresh 1.5 ml Eppendorf tube and spinning at 3,000 rpm for 1 minute. The final volume of the lysate is between 25-40 ul.

[1699] Protein concentration was determined using the BCA kit for microtiter-plates from Pierce (Thermo Fisher, Rockford, IL). The standard proteins of the titration curve were dissolved in RIPA buffer (as described for cell lysate generation) and not in dilution buffer.

[1700] Protein lysates were loaded on NuPage SDS-PAGE system (chambers and power supply) with 1.5 mm ready-to-use Bis-Tris gels and 4-12% acrylamide gradient with MOPS-buffer as running aid (all from Life Technologies, Grand Island, NY). Each lysate sample was prepared to 40 ul final volume. This sample contained 25 ug protein lysate in variable volume, RIPA buffer to make up volume to 26 ul, 4 ul of 10 × reducing agent and 10 ul 4× SDS loading buffer (both from Life Technologies, Grand Island, NY). Samples were heated at 95° C. for 5 minutes and loaded on the gel. Standard settings were chosen by the manufacturer, 200V, 120 mA and maximum 25 W. Run time was 60 minutes, but no longer than running dye reaching the lower end of the gel.

[1701] After the run was terminated, the plastic case was cracked and the encased gel transferred to a ready-to-use nitrocellulose membrane kit and power supply (iBLOT; LifeTechnologies, Grand Island, NY). Using default settings, the protein lysate was transferred by high Ampere electricity from the gel to the membrane.

[1702] After the transfer, the membranes were incubated in 5% bovine serum albumin (BSA) in 1× tris buffered saline (TBS) for 15 minutes then in 5% BSA in 1× TBS+0.1% Tween for another 15 minutes. GALT mouse monoclonal antibody (Novus biological, Littleton CO) against GALT were applied in 3 ml of 5% BSA in 1× TBS solution at a 1:500 to 1:2000 dilution for 3 hours at room temperature and gentle agitation on an orbital shaker. Membranes are washed 3 times with 1× TBS/0.1% Tween, 5 minutes each time with gentle agitation. Donkey anti-mouse HRP conjugate (Abcam, Cambridge, MA) was conjugated to horse radish peroxidase and binds to the GALT mouse monoclonal antibody. The conjugated antibody was diluted of 1:1000 to 1:5000 in 5% BSA in 1× TBS and incubated for 3 hours at room temperature. As shown with the box in FIG. 21, the Western Blot detection of GALT was about 42 kd.

### Example 130. Detection of Arininosuccinase Acid Lyase Protein: Western Blot

[1703] The day before transfection, 750,000 HeLa cells (ATCC no. CCL-2; Manassas, VA) were harvested by treatment with Trypsin-Ethylenediaminetetraacetic acid (EDTA) solution (LifeTechnologies, Grand Island, NY) and seeded in a total volume of 3 ml Eagle's minimal essential medium (EMEM) (supplemented with 10% fetal calf serum (FCS) and 1× Glutamax) per well in a 6-well cell culture plate (Corning, Manassas, VA). The cells were grown at 37° C. in 5% CO2 atmosphere overnight. Next day, 1250 ng of argininosuccinase acid lyase (ASL) mRNA (mRNA sequence shown in SEQ ID NO: 21459; polyA tail of approximately 160 nucleotides not shown in sequence; 5′cap, Cap1) fully modified with 5-methylcytosine and pseudouridine (5 mC/pU) was diluted in 250 ul final volume of OPTI-MEM® (LifeTechnologies, Grand Island, NY). Lipofectamine 2000 (LifeTechnologies, Grand Island, NY) was used as transfection reagent and 5.5 ul were diluted in 250 ul final volume of OPTI-MEM®. After 5 minutes of incubation at room temperature, both solutions were combined and incubated an additional 15 minutes at room temperature. Then 500 ul of the combined solution was added to the 3 ml cell culture medium containing the HeLa cells. The plates were then incubated as described before.

[1704] After an 16-18 hour incubation, the medium was removed and the cells were washed with 1 ml PBS. After complete removal of the PBS, 500 ul of fresh PBS was added. Cells were harvested by scraping with a cell scraper. Harvested cells receiving the same mRNA were then combined in one 1.5 ml Eppendorf tube.

[1705] Cells were pelleted by centrifugation at 3,000 rpm for 2 minutes. The PBS was removed and cells lysed in 250 ul radio immunoprecipitatoin assay (RIPA) buffer (containing PMSF and eukaryotic protease inhibitor mix) (all from BostonBioProducts, Ashland, MA) by gentle pipetting. Lysates were cleared by centrifugation at 10,000 rpm at 4° G for 10 minutes. Cleared lysates were transferred to Amicon filters with 10,000 kd molecular cutoff (Waters, Milford, MA) and spun at 12,000 rpm and 4° G for 20 minutes. The concentrated protein lysate was recovered by placing the inverted filter in a fresh 1.5 ml Eppendorf tube and spinning at 3,000 rpm for 1 minute. The final volume of the lysate is between 25-40 ul.

[1706] Protein concentration was determined using the BCA kit for microtiter-plates from Pierce (Thermo Fisher, Rockford, IL). The standard proteins of the titration curve were dissolved in RIPA buffer (as described for cell lysate generation) and not in dilution buffer.

[1707] Protein lysates were loaded on NuPage SDS-PAGE system (chambers and power supply) with 1.5 mm ready-to-use Bis-Tris gels and 4-12% acrylamide gradient with MOPS-buffer as running aid (all from Life Technologies, Grand Island, NY). Each lysate sample was prepared to 40 ul final volume. This sample contained 25 ug protein lysate in variable volume, RIPA buffer to make up volume to 26 ul, 4 ul of 10 × reducing agent and 10 ul 4× SDS loading buffer (both from Life Technologies, Grand Island, NY). Samples were heated at 95° C. for 5 minutes and loaded on the gel. Standard settings were chosen by the manufacturer, 200V, 120 mA and maximum 25 W. Run time was 60 minutes, but no longer than running dye reaching the lower end of the gel.

[1708] After the run was terminated, the plastic case was cracked and the encased gel transferred to a ready-to-use nitrocellulose membrane kit and power supply (iBLOT; LifeTechnologies, Grand Island, NY). Using default settings, the protein lysate was transferred by high Ampere electricity from the gel to the membrane.

[1709] After the transfer, the membranes were incubated in 5% bovine serum albumin (BSA) in 1× tris buffered saline (TBS) for 15 minutes then in 5% BSA in 1× TBS+0.1% Tween for another 15 minutes. ASL mouse monoclonal antibody (Novus biological, Littleton, CO) against ASL were applied in 3 ml of 5% BSA in 1× TBS solution at a 1:500 to 1:2000 dilution for 3 hours at room temperature and gentle agitation on an orbital shaker. Membranes are washed 3 times with 1× TBS/0.1% Tween, 5 minutes each time with gentle agitation. Donkey anti-mouse HRP conjugate (Abcam, Cambridge, MA) was conjugated to horse radish peroxidase and binds to the ASL mouse monoclonal antibody. The conjugated antibody was diluted of 1:1000 to 1:5000 in 5% BSA in 1× TBS and incubated for 3 hours at room temperature. As shown with the box in FIG. 22 the Western Blot detection of ASL was about 50 kd.

### Example 131. Detection of Tyrosine Aminotransferase Protein: Western Blot

[1710] The day before transfection, 750,000 HeLa cells (ATCC no. CCL-2; Manassas, VA) were harvested by treatment with Trypsin-Ethylenediaminetetraacetic acid (EDTA) solution (LifeTechnologies, Grand Island, NY) and seeded in a total volume of 3 ml Eagle's minimal essential medium (EMEM) (supplemented with 10% fetal calf serum (FCS) and 1× Glutamax) per well in a 6-well cell culture plate (Corning, Manassas, VA). The cells were grown at 37° C. in 5% CO2 atmosphere overnight. Next day, 1250 ng of tyrosine aminotransferase (TAT) mRNA (mRNA sequence shown in SEQ ID NO: 21460; polyA tail of approximately 160 nucleotides not shown in sequence; 5′cap, Cap1) fully modified with 5-methylcytosine and 1-methylpseudouridine (5 mC/1mpU) was diluted in 250 ul final volume of OPTI-MEM® (LifeTechnologies, Grand Island, NY). Lipofectamine 2000 (LifeTechnologies, Grand Island, NY) was used as transfection reagent and 5.5 ul were diluted in 250 ul final volume of OPTI-MEM®. After 5 minutes of incubation at room temperature, both solutions were combined and incubated an additional 15 minutes at room temperature. Then 500 ul of the combined solution was added to the 3 ml cell culture medium containing the HeLa cells. The plates were then incubated as described before.

[1711] After an 16-18 hour incubation, the medium was removed and the cells were washed with 1 ml PBS. After complete removal of the PBS, 500 ul of fresh PBS was added. Cells were harvested by scraping with a cell scraper. Harvested cells receiving the same mRNA were then combined in one 1.5 ml Eppendorf tube.

[1712] Cells were pelleted by centrifugation at 3,000 rpm for 2 minutes. The PBS was removed and cells lysed in 250 ul radio immunoprecipitatoin assay (RIPA) buffer (containing PMSF and eukaryotic protease inhibitor mix) (all from BostonBioProducts, Ashland, MA) by gentle pipetting. Lysates were cleared by centrifugation at 10,000 rpm at 4° G for 10 minutes. Cleared lysates were transferred to Amicon filters with 10,000 kd molecular cutoff (Waters, Milford, MA) and spun at 12,000 rpm and 4° G for 20 minutes. The concentrated protein lysate was recovered by placing the inverted filter in a fresh 1.5 ml Eppendorf tube and spinning at 3,000 rpm for 1 minute. The final volume of the lysate is between 25-40 ul.

[1713] Protein concentration was determined using the BCA kit for microtiter-plates from Pierce (Thermo Fisher, Rockford, IL). The standard proteins of the titration curve were dissolved in RIPA buffer (as described for cell lysate generation) and not in dilution buffer.

[1714] Protein lysates were loaded on NuPage SDS-PAGE system (chambers and power supply) with 1.5 mm ready-to-use Bis-Tris gels and 4-12% acrylamide gradient with MOPS-buffer as running aid (all from Life Technologies, Grand Island, NY). Each lysate sample was prepared to 40 ul final volume. This sample contained 25 ug protein lysate in variable volume, RIPA buffer to make up volume to 26 ul, 4 ul of 10 × reducing agent and 10 ul 4× SDS loading buffer (both from Life Technologies, Grand Island, NY). Samples were heated at 95° C. for 5 minutes and loaded on the gel. Standard settings were chosen by the manufacturer, 200V, 120 mA and maximum 25 W. Run time was 60 minutes, but no longer than running dye reaching the lower end of the gel.

[1715] After the run was terminated, the plastic case was cracked and the encased gel transferred to a ready-to-use nitrocellulose membrane kit and power supply (iBLOT; LifeTechnologies, Grand Island, NY). Using default settings, the protein lysate was transferred by high Ampere electricity from the gel to the membrane.

[1716] After the transfer, the membranes were incubated in 5% bovine serum albumin (BSA) in 1× tris buffered saline (TBS) for 15 minutes then in 5% BSA in 1× TBS+0.1% Tween for another 15 minutes. TAT rabbit polyclonal antibody (Novus biologicals) against TAT were applied in 3 ml of 5% BSA in 1× TBS solution at a 1:500 to 1:2000 dilution for 3 hours at room temperature and gentle agitation on an orbital shaker. Membranes are washed 3 times with 1× TBS/0.1% Tween, 5 minutes each time with gentle agitation. Goat anti-rabbit HRP conjugate (Abcam, Cambridge, MA) was conjugated to horse radish peroxidase and binds to the TAT rabbit polyclonal antibody. The conjugated antibody was diluted of 1:1000 to 1:5000 in 5% BSA in 1× TBS and incubated for 3 hours at room temperature. As shown with the box in FIG. 23 the Western Blot detection of TAT was about 50 kd with the chemoluminescence band shown in white.

### Example 132. Detection of 1,4-Alpha-Glucan-Branching Enzyme Protein: Western Blot

[1717] The day before transfection, 750,000 HeLa cells (ATCC no. CCL-2; Manassas, VA) were harvested by treatment with Trypsin-Ethylenediaminetetraacetic acid (EDTA) solution (LifeTechnologies, Grand Island, NY) and seeded in a total volume of 3 ml Eagle's minimal essential medium (EMEM) (supplemented with 10% fetal calf serum (FCS) and 1× Glutamax) per well in a 6-well cell culture plate (Corning, Manassas, VA). The cells were grown at 37° C. in 5% CO2 atmosphere overnight. Next day, 1250 ng of 1,4-alpha-glucan-branching enzyme (GBE1) mRNA (mRNA sequence shown in SEQ ID NO: 21461; polyA tail of approximately 160 nucleotides not shown in sequence; 5′cap, Cap1) fully modified with 5-methylcytosine and 1-methylpseudouridine (5 mC/1mpU) was diluted in 250 ul final volume of OPTI-MEM® (LifeTechnologies, Grand Island, NY). Lipofectamine 2000 (LifeTechnologies, Grand Island, NY) was used as transfection reagent and 5.5 ul were diluted in 250 ul final volume of OPTI-MEM®. After 5 minutes of incubation at room temperature, both solutions were combined and incubated an additional 15 minutes at room temperature. Then 500 ul of the combined solution was added to the 3 ml cell culture medium containing the HeLa cells. The plates were then incubated as described before.

[1718] After an 16-18 hour incubation, the medium was removed and the cells were washed with 1 ml PBS. After complete removal of the PBS, 500 ul of fresh PBS was added. Cells were harvested by scraping with a cell scraper. Harvested cells receiving the same mRNA were then combined in one 1.5 ml Eppendorf tube.

[1719] Cells were pelleted by centrifugation at 3,000 rpm for 2 minutes. The PBS was removed and cells lysed in 250 ul radio immunoprecipitatoin assay (RIPA) buffer (containing PMSF and eukaryotic protease inhibitor mix) (all from BostonBioProducts, Ashland, MA) by gentle pipetting. Lysates were cleared by centrifugation at 10,000 rpm at 4° G for 10 minutes. Cleared lysates were transferred to Amicon filters with 10,000 kd molecular cutoff (Waters, Milford, MA) and spun at 12,000 rpm and 4° G for 20 minutes. The concentrated protein lysate was recovered by placing the inverted filter in a fresh 1.5 ml Eppendorf tube and spinning at 3,000 rpm for 1 minute. The final volume of the lysate is between 25-40 ul.

[1720] Protein concentration was determined using the BCA kit for microtiter-plates from Pierce (Thermo Fisher, Rockford, IL). The standard proteins of the titration curve were dissolved in RIPA buffer (as described for cell lysate generation) and not in dilution buffer.

[1721] Protein lysates were loaded on NuPage SDS-PAGE system (chambers and power supply) with 1.5 mm ready-to-use Bis-Tris gels and 4-12% acrylamide gradient with MOPS-buffer as running aid (all from Life Technologies, Grand Island, NY). Each lysate sample was prepared to 40 ul final volume. This sample contained 25 ug protein lysate in variable volume, RIPA buffer to make up volume to 26 ul, 4 ul of 10 × reducing agent and 10 ul 4× SDS loading buffer (both from Life Technologies, Grand Island, NY). Samples were heated at 95° C. for 5 minutes and loaded on the gel. Standard settings were chosen by the manufacturer, 200V, 120 mA and maximum 25 W. Run time was 60 minutes, but no longer than running dye reaching the lower end of the gel.

[1722] After the run was terminated, the plastic case was cracked and the encased gel transferred to a ready-to-use nitrocellulose membrane kit and power supply (iBLOT; LifeTechnologies, Grand Island, NY). Using default settings, the protein lysate was transferred by high Ampere electricity from the gel to the membrane.

[1723] After the transfer, the membranes were incubated in 5% bovine serum albumin (BSA) in 1× tris buffered saline (TBS) for 15 minutes then in 5% BSA in 1× TBS+0.1% Tween for another 15 minutes. GBE1 rabbit polyclonal antibody (Novus biological, Littleton, CO)) against GBE1 were applied in 3 ml of 5% BSA in 1× TBS solution at a 1:500 to 1:2000 dilution for 3 hours at room temperature and gentle agitation on an orbital shaker. Membranes are washed 3 times with 1× TBS/0.1% Tween, 5 minutes each time with gentle agitation. Goat anti-rabbit HRP conjugate (Abcam, Cambridge, MA) was conjugated to horse radish peroxidase and binds to the GBE1 rabbit polyclonal antibody. The conjugated antibody was diluted of 1:1000 to 1:5000 in 5% BSA in 1× TBS and incubated for 3 hours at room temperature. As shown with the box in FIG. 24 the Western Blot detection of GBE1 was about the expected size of 70 kd.

### Example 133. Protein Production of Prothrombin in HeLa Cell Supernatant

[1724] The day before transfection, 20,000 HeLa cells (ATCC no. CCL-2; Manassas, VA) were harvested by treatment with Trypsin-EDTA solution (LifeTechnologies, Grand Island, NY) and seeded in a total volume of 100 ul EMEM medium (supplemented with 10% FCS and 1× Glutamax) per well in a 96-well cell culture plate (Corning, Manassas, VA). The cells were grown at 37° C. in 5% CO₂ atmosphere overnight. Next day, 250 ng of prothrombin modified RNA (mRNA sequence shown in SEQ ID NO: 21462; polyA tail of approximately 160 nucleotides not shown in sequence; 5′cap, Cap1) fully modified with 5-methylcytosine and 1-methylpseudouridine, was diluted in 10 ul final volume of OPTI-MEM (LifeTechnologies, Grand Island, NY). Lipofectamine 2000 (LifeTechnologies, Grand Island, NY) was used as transfection reagent and 0.2 ul of lipofectamine 2000 was diluted to 10 ul final volume of OPTI-MEM. After 5 minutes of incubation at room temperature, both solutions were combined and incubated an additional 15 minute at room temperature. Then the 20 ul combined solution was added to the 100 ul cell culture medium containing the HeLa cells and incubated at room temperature. A control of erythropoietin (EPO) modified mRNA (mRNA sequence shown in SEQ ID NO: 1638; polyA tail of approximately 160 nucleotides not shown in sequence; 5′cap, Cap1, fully modified with 5-methylcytosine and pseudouridine) and untreated cells were also analyzed.

[1725] After an 18 to 22 hour incubation cell culture supernatants of cells expressing plasminogen was collected and centrifuged at 10.000 rcf for 2 minutes. The cleared supernatants were then analyzed with a prothrombin-specific ELISA kit (R & D Systems, Minneapolis, MN) according to the manufacturer instructions. All samples were diluted until the determined values were within the linear range of the ELISA standard curve. The amount of protein produced is shown in Table 188 and FIG. 25.

TABLE 188
Protein Production

| | Prothrombin |
|---|---|
| Sample | (ng/ml) |
| Prothrombin | 31 |
| EPO | 2.5 |
| Untreated | 2 |

### Example 134. Protein Production of Chemically Modified Prothrombin in HeLa Cell Supernatant

[1726] The day before transfection, 15,000 HeLa cells (ATCC no. CCL-2; Manassas, VA) were harvested by treatment with Trypsin-Ethylenediaminetetraacetic acid (EDTA) solution (LifeTechnologies, Grand Island, NY) and seeded in a total volume of 100 ul Eagle's minimal essential medium (EMEM) (supplemented with 10% fetal calf serum (FCS) and 1× Glutamax) per well in a 24-well cell culture plate (Corning, Manassas, VA). The cells were grown at 37° C. in 5% CO₂ atmosphere overnight. Next day, 250 ng of prothrombin modified RNA (mRNA sequence shown in SEQ ID NO: 21462; polyA tail of approximately 140 nucleotides not shown in sequence; 5′cap, Cap1) fully modified with 5-methylcytosine and pseudouridine (5 mC/pU), fully modified with 5-methylcytosine and 1-methylpseudouridine (5 mC/1mpU), modified where 25% of the cytosines replaced with 5-methylcytosine and 25% of the uridines replaced with 2-thiouridine (s2U/5 mC), fully modified with 1-methylpseudouridine (1mpU) or fully modified with pseudouridine (pU) were diluted in 10 ul final volume of OPTI-MEM® (LifeTechnologies, Grand Island, NY). Lipofectamine 2000 (LifeTechnologies, Grand Island, NY) was used as transfection reagent and 0.2 ul of lipofectamine 2000 was diluted to 10 ul final volume of OPTI-MEM®. After 5 minutes of incubation at room temperature, both solutions were combined and incubated an additional 15 minute at room temperature. Then the 20 ul combined solution was added to the 100 ul cell culture medium containing the HeLa cells and incubated at room temperature. A control of untreated was also analyzed.

[1727] After an 18 hour incubation cell culture supernatants of cells expressing prothrombin were collected by lysing cells with immuno-precipitation (IP) buffer from Pierce Biotechnology (Thermo Scientific, Rockford, IL) and centrifuged at 10.000 rcf for 2 minutes. The cleared supernatants were diluted 1:2 (1 ml lysate/2 wells/24 well plate) or 1:5 (1 ml lysate/5 wells/24 well plate) then analyzed with a prothrombin-specific ELISA kit according to the manufacturer instructions. All samples were diluted until the determined values were within the linear range of the ELISA standard curve. The amount of protein produced in both studies is shown in Table 189 and FIG. 26.

TABLE 189
Protein Production

| | Prothrombin |
|---|---|
| Sample | (ng/ml) |
| 5-methylcytosine and pseudouridine (5mC/pU) | 68 |
| 5-methylcytosine and 1-methylpseudouridine (5mC/1mpU) | 210 |
| 25% of the cytosines replaced with 5-methylcytosine and | 25 |
| 25% of the uridines replaced with 2-thiouridine (s2U/5mC) | |
| 1-methylpseudouridine (1mpU) | 277 |
| pseudouridine (pU) | 30 |
| Untreated | 7.5 |

### Example 135. Detection of Ceruloplasmin Protein: Western Blot

[1728] The day before transfection, 750,000 HeLa cells (ATCC no. CCL-2; Manassas, VA) were harvested by treatment with Trypsin-Ethylenediaminetetraacetic acid (EDTA) solution (LifeTechnologies, Grand Island, NY) and seeded in a total volume of 3 ml Eagle's minimal essential medium (EMEM) (supplemented with 10% fetal calf serum (FCS) and 1× Glutamax) per well in a 6-well cell culture plate (Corning, Manassas, VA). The cells were grown at 37° C. in 5% CO2 atmosphere overnight. Next day, 1250 ng of ceruloplasmin (CP or CLP) mRNA (mRNA sequence shown in SEQ ID NO: 1621; polyA tail of approximately 160 nucleotides not shown in sequence; 5′cap, Cap1) fully modified with 5-methylcytosine and 1-methylpseudouridine (5 mC/1mpU) was diluted in 250 ul final volume of OPTI-MEM® (LifeTechnologies, Grand Island, NY). Lipofectamine 2000 (LifeTechnologies, Grand Island, NY) was used as transfection reagent and 5.5 ul were diluted in 250 ul final volume of OPTI-MEM®. After 5 minutes of incubation at room temperature, both solutions were combined and incubated an additional 15 minutes at room temperature. Then 500 ul of the combined solution was added to the 3 ml cell culture medium containing the HeLa cells. The plates were then incubated as described before.

[1729] After an 16-18 hour incubation, the medium was removed and the cells were washed with 1 ml PBS. After complete removal of the PBS, 500 ul of fresh PBS was added. Cells were harvested by scraping with a cell scraper. Harvested cells receiving the same mRNA were then combined in one 1.5 ml Eppendorf tube.

[1730] Cells were pelleted by centrifugation at 3,000 rpm for 2 minutes. The PBS was removed and cells lysed in 250 ul radio immunoprecipitatoin assay (RIPA) buffer (containing PMSF and eukaryotic protease inhibitor mix) (all from BostonBioProducts, Ashland, MA) by gentle pipetting. Lysates were cleared by centrifugation at 10,000 rpm at 4° G for 10 minutes. Cleared lysates were transferred to Amicon filters with 10,000 kd molecular cutoff (Waters, Milford, MA) and spun at 12,000 rpm and 4° G for 20 minutes. The concentrated protein lysate was recovered by placing the inverted filter in a fresh 1.5 ml Eppendorf tube and spinning at 3,000 rpm for 1 minute. The final volume of the lysate is between 25-40 ul.

[1731] Protein concentration was determined using the BCA kit for microtiter-plates from Pierce (Thermo Fisher, Rockford, IL). The standard proteins of the titration curve were dissolved in RIPA buffer (as described for cell lysate generation) and not in dilution buffer.

[1732] Protein lysates were loaded on NuPage SDS-PAGE system (chambers and power supply) with 1.5 mm ready-to-use Bis-Tris gels and 4-12% acrylamide gradient with MOPS-buffer as running aid (all from Life Technologies, Grand Island, NY). Each lysate sample was prepared to 40 ul final volume. This sample contained 25 ug protein lysate in variable volume, RIPA buffer to make up volume to 26 ul, 4 ul of 10 × reducing agent and 10 ul 4× SDS loading buffer (both from Life Technologies, Grand Island, NY). Samples were heated at 95° C. for 5 minutes and loaded on the gel. Standard settings were chosen by the manufacturer, 200V, 120 mA and maximum 25 W. Run time was 60 minutes, but no longer than running dye reaching the lower end of the gel.

[1733] After the run was terminated, the plastic case was cracked and the encased gel transferred to a ready-to-use nitrocellulose membrane kit and power supply (iBLOT; LifeTechnologies, Grand Island, NY). Using default settings, the protein lysate was transferred by high Ampere electricity from the gel to the membrane.

[1734] After the transfer, the membranes were incubated in 5% bovine serum albumin (BSA) in 1× tris buffered saline (TBS) for 15 minutes then in 5% BSA in 1× TBS+0.1% Tween for another 15 minutes. Ceruloplasmin rabbit polyclonal antibody (Novus biological, Littleton, CO) against CP proteins were applied in 3 ml of 5% BSA in 1× TBS solution at a 1:500 to 1:2000 dilution for 3 hours at room temperature and gentle agitation on an orbital shaker. Membranes are washed 3 times with 1× TBS/0.1% Tween, 5 minutes each time with gentle agitation. Goat anti-rabbit HRP conjugate (Abcam, Cambridge, MA) was conjugated to horse radish peroxidase and binds to the Ceruloplasmin rabbit polyclonal antibody. The conjugated antibody was diluted of 1:1000 to 1:5000 in 5% BSA in 1× TBS and incubated for 3 hours at room temperature. As shown with the box in FIG. 27 the Western Blot detection of ceruloplasmin (CLP) was about 148 kd.

### Example 136. Protein Production of Transforming Growth Factor Beta 1 in HeLa Cell Supernatant

[1735] The day before transfection, 20,000 HeLa cells (ATCC no. CCL-2; Manassas, VA) were harvested by treatment with Trypsin-EDTA solution (LifeTechnologies, Grand Island, NY) and seeded in a total volume of 100 ul EMEM medium (supplemented with 10% FCS and 1× Glutamax) per well in a 96-well cell culture plate (Corning, Manassas, VA). The cells were grown at 37° C. in 5% CO₂ atmosphere overnight. Next day, 83 ng, 250 ng or 750 ng of transforming growth factor beta 1 (TGF-beta1) modified RNA (mRNA sequence shown in SEQ ID NO: 1668; polyA tail of approximately 160 nucleotides not shown in sequence; 5′cap, Cap1) fully modified with 5-methylcytosine and pseudouridine, was diluted in 10 ul final volume of OPTI-MEM (LifeTechnologies, Grand Island, NY). Lipofectamine 2000 (LifeTechnologies, Grand Island, NY) was used as transfection reagent and 0.2 ul of lipofectamine 2000 was diluted to 10 ul final volume of OPTI-MEM. After 5 minutes of incubation at room temperature, both solutions were combined and incubated an additional 15 minute at room temperature. Then the 20 ul combined solution was added to the 100 ul cell culture medium containing the HeLa cells and incubated at room temperature. A control of lipofecatmine 2000 treated cells (L2000) and untreated cells was also analyzed.

[1736] After an 18 to 22 hour incubation cell culture supernatants of cells expressing TGF-beta1 was collected and centrifuged at 10.000 rcf for 2 minutes. The cleared supernatants were then analyzed with a TGF-beta1-specific ELISA kit (R & D Systems, Minneapolis, MN) according to the manufacturer instructions. All samples were diluted until the determined values were within the linear range of the ELISA standard curve. The amount of protein produced is shown in Table 190 and FIG. 28.

TABLE 190
Protein Production

| | TGF-beta1 |
|---|---|
| Sample | (pg/ml) |
| TGF-beta1 (83 ng) | 3210 |
| TGF-beta1 (250 ng) | 4325 |
| TGF-beta1 (750 ng) | 5058 |
| L2000 | 2 |
| Untreated | 0 |

### Example 137. Detection of Ornithine Transcarbamoylase Protein: Western Blot

[1737] The day before transfection, 750,000 HeLa cells (ATCC no. CCL-2; Manassas, VA) were harvested by treatment with Trypsin-Ethylenediaminetetraacetic acid (EDTA) solution (LifeTechnologies, Grand Island, NY) and seeded in a total volume of 3 ml Eagle's minimal essential medium (EMEM) (supplemented with 10% fetal calf serum (FCS) and 1× Glutamax) per well in a 6-well cell culture plate (Corning, Manassas, VA). The cells were grown at 37° C. in 5% CO2 atmosphere overnight. Next day, 1250 ng of ornithine transcarbamoylase (OTC) mRNA (mRNA sequence shown in SEQ ID NO: 1659; polyA tail of approximately 160 nucleotides not shown in sequence; 5′cap, Cap1) fully modified with 5-methylcytosine and pseudouridine (5 mC/pU) was diluted in 250 ul final volume of OPTI-MEM® (LifeTechnologies, Grand Island, NY). Lipofectamine 2000 (LifeTechnologies, Grand Island, NY) was used as transfection reagent and 5.5 ul were diluted in 250 ul final volume of OPTI-MEM®. After 5 minutes of incubation at room temperature, both solutions were combined and incubated an additional 15 minutes at room temperature. Then 500 ul of the combined solution was added to the 3 ml cell culture medium containing the HeLa cells. The plates were then incubated as described before.

[1738] After an 16-18 hour incubation, the medium was removed and the cells were washed with 1 ml PBS. After complete removal of the PBS, 500 ul of fresh PBS was added. Cells were harvested by scraping with a cell scraper. Harvested cells receiving the same mRNA were then combined in one 1.5 ml Eppendorf tube.

[1739] Cells were pelleted by centrifugation at 3,000 rpm for 2 minutes. The PBS was removed and cells lysed in 250 ul radio immunoprecipitation assay (RIPA) buffer (containing PMSF and eukaryotic protease inhibitor mix) (all from BostonBioProducts, Ashland, MA) by gentle pipetting. Lysates were cleared by centrifugation at 10,000 rpm at 4° G for 10 minutes. Cleared lysates were transferred to Amicon filters with 10,000 kd molecular cutoff (Waters, Milford, MA) and spun at 12,000 rpm and 4° G for 20 minutes. The concentrated protein lysate was recovered by placing the inverted filter in a fresh 1.5 ml Eppendorf tube and spinning at 3,000 rpm for 1 minute. The final volume of the lysate is between 25-40 ul.

[1740] Protein concentration was determined using the BCA kit for microtiter-plates from Pierce (Thermo Fisher, Rockford, IL). The standard proteins of the titration curve were dissolved in RIPA buffer (as described for cell lysate generation) and not in dilution buffer.

[1741] Protein lysates were loaded on NuPage SDS-PAGE system (chambers and power supply) with 1.5 mm ready-to-use Bis-Tris gels and 4-12% acrylamide gradient with MOPS-buffer as running aid (all from Life Technologies, Grand Island, NY). Each lysate sample was prepared to 40 ul final volume. This sample contained 25 ug protein lysate in variable volume, RIPA buffer to make up volume to 26 ul, 4 ul of 10 × reducing agent and 10 ul 4× SDS loading buffer (both from Life Technologies, Grand Island, NY). Samples were heated at 95° C. for 5 minutes and loaded on the gel. Standard settings were chosen by the manufacturer, 200V, 120 mA and maximum 25 W. Run time was 60 minutes, but no longer than running dye reaching the lower end of the gel.

[1742] After the run was terminated, the plastic case was cracked and the encased gel transferred to a ready-to-use nitrocellulose membrane kit and power supply (iBLOT; LifeTechnologies, Grand Island, NY). Using default settings, the protein lysate was transferred by high Ampere electricity from the gel to the membrane.

[1743] After the transfer, the membranes were incubated in 5% bovine serum albumin (BSA) in 1× tris buffered saline (TBS) for 15 minutes then in 5% BSA in 1× TBS+0.1% Tween for another 15 minutes. OTC rabbit polyclonal antibody (Novus biological, Littleton, CO) against OTC proteins were applied in 3 ml of 5% BSA in 1× TBS solution at a 1:500 to 1:2000 dilution for 3 hours at room temperature and gentle agitation on an orbital shaker. Membranes are washed 3 times with 1× TBS/0.1% Tween, 5 minutes each time with gentle agitation. Goat anti-rabbit HRP conjugate (Abcam, Cambridge, MA) was conjugated to horse radish peroxidase and binds to the OTC rabbit polyclonal antibody. The conjugated antibody was diluted of 1:1000 to 1:5000 in 5% BSA in 1× TBS and incubated for 3 hours at room temperature. As shown with the box in FIG. 29 the Western Blot detection of OTC was about the expected size of 40 kd.

### Example 138. LDLR In Vivo Study in Mammals

[1744] Low density lipoprotein (LDL) receptor (LDLR) mRNA (mRNA shown in SEQ ID NO: 21463; fully modified with 5-methylcytosine and pseudouridine; 5′cap, Cap1; polyA tail of 160 nucleotides not shown in the sequence) was complexed with Lipofectamine 2000 by mixing 8.0 μg mRNA with Dulbecco's modified Eagle's medium (DMEM) to a final volume of 0.2 mL.

[1745] Lipofectamine 2000 was diluted 12.5-fold with DMEM and mixed with an equivalent volume of the diluted LDL receptor mRNA solution. The samples were incubated 5 minutes at room temperature and a 0.1 mL volume of the complexed mRNA mixture was injected into the tail vein of each of three C57BL/6 mice. Each animal received a total dose of 2.0 μg of LDL receptor mRNA. After 6 hours, the animals were sacrificed and the spleens were removed. Splenocytes were isolated according to standard procedures (with no prior lysis of red blood cells) and stained with equivalent amounts of either IgG specific for the human LDL receptor or non-immune IgG as a control.

[1746] The expression of the LDL receptors was assessed by flow cytometry with gating on the CD11b+ splenocyte population. As shown in FIG. 30, the expression of LDL receptors in the CD11b+ splenocyte population in vivo was evident in each of three separate mice by the presence of rightward shifted peaks that were stained with LDL receptor IgG (LDLR IgG) as compared to cells stained with non-immune IgG (non-immune IgG).

[1747] For mice treated with Lipofectamine alone, no LDL receptor specific peak was observed and staining was similar to that observed with non-immune IgG.

### Example 139. Modified UGT1A1 mRNA Study

[1748] HEK293 cells were seeded at density of 500,000 cells per 6-well plate in DMEM containing 10% fetal bovine serum and cells were grown overnight according to standard procedures. The next day 800 ng of UDP glucuronosyltransferase 1 family, polypeptide A1 (UGT1A1) mRNA (mRNA shown in SEQ ID NO: 21464; fully modified with 5-methylcytosine and pseudouridine; 5′cap, Cap1; polyA tail of 160 nucleotides not shown in the sequence) was diluted into 0.3 mL of Optimum buffer, a 4.0 μL sample of Lipofectamine 2000 was also diluted to 0.3 mL of Optimum buffer, and the mRNA was complexed to Lipofectamine 2000 by mixing the two solutions.

[1749] After incubation at room temperature for 15 minutes, cells were transfected with the UGT1A1 mRNA/lipofectamine 2000 mixture. After incubation for 18 hours at 37° C., the media were aspirated and the cells were washed with PBS. Cells were harvested by scraping with a cell lifter and the cells were centrifuged at 3000 rpm for 3 minutes. The cell pellet was washed with PBS, centrifuged as described and the cell pellets were lysed by the addition of 0.25 mL of RIPA buffer supplemented with a protease inhibitor cocktail. Cell extracts were centrifuged for 10 minutes at 12,210 rpm and the supernatant fractions (lysates) were frozen at −80° C.

[1750] Western blotting was conducted using the Simple Simon Western capillary electrophoresis apparatus using antibodies specific for human UGT1A1. A 0.005 mg sample of lysate was run in triplicate. As shown in FIG. 31, UGT1A1 was detected as a single band of approximately 60 kDa. In contrast, no bands were detected using lysates from control cells transfected with an unrelated mRNA.

### Example 140. In Vivo Expression of LDLR in Mice

[1751] LDLR −/− mice are used to test the in vivo expression of LDLR mmRNA. LDL mmRNA is administered to LDLR −/− mice by injection. Tissues from the mice are examined for LDLR expression. Western blot analysis of mouse tissues is carried out to look for LDLR protein expression as a result of LDLR mmRNA administration. Real time RT-PCR is carried out on mouse tissues to look for LDLR gene expression.

### Example 141. Production of LDLR in Mammals

[1752] Ornithine transcarbamoylase (OTC) is a mitochondrial protein encoded in the nuclear genome. Defects in OTC are characterized by toxic accumulation of ammonia and lead to urea cycle disorders.

[1753] Modified mRNA encoding OTC are administered to the mice described in Example 140. Serum, tissue and/or organs are collected at various time points in order to determine protein expression.

[1754] Futher studies where LDLR modified mRNA are administered to the mice of Example 140 are also conducted. Serum, tissue and/or organs are collected at various time points in order to determine protein expression.

### Example 142. Production of Chemically Modified Factor XI in HEK293 Cells

[1755] Human embryonic kidney epithelial (HEK293) (LGC standards GmbH, Wesel, Germany) are seeded on 24-well plates (Greiner Bio-one GmbH, Frickenhausen, Germany) precoated with collagen type1. HEK293 are seeded at a density of about 100,000 cells per well in 100 μl cell culture medium. Formulations containing 350 ng or 750 of Factor XI mRNA (modRNA FXI) (mRNA sequence shown in SEQ ID NO: 1625; polyA tail of approximately 160 nucleotides not shown in sequence; 5′cap, Cap1) are added directly after seeding the cells and incubated. A control of untreated cells was also evaluated.

[1756] Cells are harvested by transferring the culture media supernatants to a 96-well Pro-Bind U-bottom plate (Beckton Dickinson GmbH, Heidelberg, Germany). Cells are trypsinized with ½ volume Trypsin/EDTA (Biochrom AG, Berlin, Germany), pooled with respective supernatants and fixed by adding one volume PBS/2% FCS (both Biochrom AG, Berlin, Germany)/0.5% formaldehyde (Merck, Darmstadt, Germany). After a 12 hour incubation, cell culture supernatants of cells expressing Factor XI were collected and centrifuged at 10.000 rcf for 2 minutes. The cleared supernatants were then analyzed with a Factor XI-specific ELISA kit (Innovative Research, Novi, MI) according to the manufacturer instructions. The amount of protein produced is shown in FIG. 32.

### Example 143. Detection of Aquaporin-5 Protein: Western Blot

[1757] The day before transfection, 750,000 HeLa cells (ATCC no. CCL-2; Manassas, VA) were harvested by treatment with Trypsin-Ethylenediaminetetraacetic acid (EDTA) solution (LifeTechnologies, Grand Island, NY) and seeded in a total volume of 3 ml Eagle's minimal essential medium (EMEM) (supplemented with 10% fetal calf serum (FCS) and 1× Glutamax) per well in a 6-well cell culture plate (Corning, Manassas, VA). The cells were grown at 37° C. in 5% CO2 atmosphere overnight. Next day, 1250 ng of aquaporin-5 mRNA (mRNA sequence shown in SEQ ID NO: 1617; polyA tail of approximately 160 nucleotides not shown in sequence; 5′cap, Cap1) fully modified with 5-methylcytosine and pseudouridine (5 mC/pU), fully modified with 5-methylcytosine and 1-methylpseudouridine (5 mC/1mpU), 25% of uridine modified with 2-thiouridine and 25% of cytosine modified with 5-methylcytosine (s2U and 5 mC), fully modified with pseudouridine (pU) or fully modified with 1-methylpseudouridine (1mpU) was diluted in 250 ul final volume of OPTI-MEM® (LifeTechnologies, Grand Island, NY). Lipofectamine 2000 (LifeTechnologies, Grand Island, NY) was used as transfection reagent and 5.5 ul were diluted in 250 ul final volume of OPTI-MEM®. After 5 minutes of incubation at room temperature, both solutions were combined and incubated an additional 15 minutes at room temperature. Then 500 ul of the combined solution was added to the 3 ml cell culture medium containing the HeLa cells. The plates were then incubated as described before. A control of untreated cells was also evaluated.

[1758] After an 16-18 hour incubation, the medium was removed and the cells were washed with 1 ml PBS. After complete removal of the PBS, 500 ul of fresh PBS was added. Cells were harvested by scraping with a cell scraper. Harvested cells receiving the same mRNA were then combined in one 1.5 ml Eppendorf tube.

[1759] Cells were pelleted by centrifugation at 3,000 rpm for 2 minutes. The PBS was removed and cells lysed in 250 ul radio immunoprecipitation assay (RIPA) buffer (containing PMSF and eukaryotic protease inhibitor mix) (all from BostonBioProducts, Ashland, MA) by gentle pipetting. Lysates were cleared by centrifugation at 10,000 rpm at 4° G for 10 minutes. Cleared lysates were transferred to Amicon filters with 10,000 kd molecular cutoff (Waters, Milford, MA) and spun at 12,000 rpm and 4° G for 20 minutes. The concentrated protein lysate was recovered by placing the inverted filter in a fresh 1.5 ml Eppendorf tube and spinning at 3,000 rpm for 1 minute. The final volume of the lysate is between 25-40 ul.

[1760] Protein concentration was determined using the BCA kit for microtiter-plates from Pierce (Thermo Fisher, Rockford, IL). The standard proteins of the titration curve were dissolved in RIPA buffer (as described for cell lysate generation) and not in dilution buffer.

[1761] Protein lysates were loaded on NuPage SDS-PAGE system (chambers and power supply) with 1.5 mm ready-to-use Bis-Tris gels and 4-12% acrylamide gradient with MOPS-buffer as running aid (all from Life Technologies, Grand Island, NY). Each lysate sample was prepared to 40 ul final volume. This sample contained 25 ug protein lysate in variable volume, RIPA buffer to make up volume to 26 ul, 4 ul of 10 × reducing agent and 10 ul 4× SDS loading buffer (both from Life Technologies, Grand Island, NY). Samples were heated at 95° C. for 5 minutes and loaded on the gel. Standard settings were chosen by the manufacturer, 200V, 120 mA and maximum 25 W. Run time was 60 minutes, but no longer than running dye reaching the lower end of the gel.

[1762] After the run was terminated, the plastic case was cracked and the encased gel transferred to a ready-to-use nitrocellulose membrane kit and power supply (iBLOT; LifeTechnologies, Grand Island, NY). Using default settings, the protein lysate was transferred by high Ampere electricity from the gel to the membrane.

[1763] After the transfer, the membranes were incubated in 5% bovine serum albumin (BSA) in 1× tris buffered saline (TBS) for 15 minutes then in 5% BSA in 1× TBS+0.1% Tween for another 15 minutes. Aquaporin-5 rabbit polyclonal antibody (Abcam, Cambridge, MA) against aquaporin-5 proteins were applied in 3 ml of 5% BSA in 1× TBS solution at a 1:500 to 1:2000 dilution for 3 hours at room temperature and gentle agitation on an orbital shaker. Membranes are washed 3 times with 1× TBS/0.1% Tween, 5 minutes each time with gentle agitation. Goat anti-rabbit conjugate (Abcam, Cambridge, MA) was conjugated to horse radish peroxidase and binds to the Aquaporin-5 rabbit polyclonal antibody. The conjugated antibody was diluted of 1:1000 to 1:5000 in 5% BSA in 1× TBS and incubated for 3 hours at room temperature. As shown with the box in FIG. 33 the Western Blot detected protein in each of the chemistries evaluated.

### Example 144. Protein Production of Factor VII in HeLa Cells

[1764] The day before transfection, 15,000 HeLa cells (ATCC no. CCL-2; Manassas, VA) were harvested by treatment with Trypsin-EDTA solution (LifeTechnologies, Grand Island, NY) and seeded in a total volume of 100 ul EMEM medium (supplemented with 10% FCS and 1× Glutamax) per well in a 96-well cell culture plate (Corning, Manassas, VA). The cells were grown at 37° C. in 5% CO₂ atmosphere overnight. The next day, 250 ng of Factor VII modified RNA (mRNA sequence shown in SEQ ID NO: 1623; polyA tail of approximately 140 nucleotides not shown in sequence; 5′cap, Cap1) with the chemical modification described in Table 191, was diluted in 10 ul final volume of OPTI-MEM (LifeTechnologies, Grand Island, NY). Lipofectamine 2000 (LifeTechnologies, Grand Island, NY) was used as transfection reagent and 0.2 ul of lipofectamine 2000 was diluted to 10 ul final volume of OPTI-MEM. After 5 minutes of incubation at room temperature, both solutions were combined and incubated an additional 15 minute at room temperature. Then the 20 ul combined solution was added to the 100 ul cell culture medium containing the HeLa cells and incubated at room temperature. A control of untreated cells was also analyzed.

[1765] After an 18 to 22 hour incubation cell culture supernatants of cells expressing factor VII were collected and centrifuged at 10.000 rcf for 2 minutes. The cleared supernatants were then analyzed with a Hyphen Biomed Chromogenic kit (Aniara, West Chester OH) according to the manufacturer instructions. All samples were diluted until the determined values were within the linear range of the ELISA standard curve. The amount of protein produced compared to the untreated samples is shown in Table 191 and FIG. 34.

TABLE 191
Protein Production

| | Increase over |
|---|---|
| | untreated |
| Sample | (pg/ml) |
| 5-methylcytosine and pseudouridine (5mC and pU) | 1.236 |
| 5-methylcytosine and 1-methylpsudouridine (5mC and | 1.270 |
| 1mpU) | |
| 25% of uridine modified with 2-thiouridine and 25% | 1.299 |
| of cytosine modified with 5-methylcytosine (s2U and | |
| 5mC) | |
| Pseudouridine (pU) | 1.276 |
| 1-methylpseudouridine (1mpU) | 1.224 |
| Untreated | 1 |

### Example 145. Protein Production of Chemically Modified Insulin Glargine in HeLa Cell Supernatant

[1766] The day before transfection, 15,000 HeLa cells (ATCC no. CCL-2; Manassas, VA) were harvested by treatment with Trypsin-Ethylenediaminetetraacetic acid (EDTA) solution (LifeTechnologies, Grand Island, NY) and seeded in a total volume of 100 ul Eagle's minimal essential medium (EMEM) (supplemented with 10% fetal calf serum (FCS) and 1× Glutamax) per well in a 24-well cell culture plate (Corning, Manassas, VA). The cells were grown at 37° C. in 5% CO₂ atmosphere overnight. Next day, 250 ng of insulin glargine modified RNA (mRNA sequence shown in SEQ ID NO: 21465; polyA tail of approximately 140 nucleotides not shown in sequence; 5′cap, Cap1) fully modified with 5-methylcytosine and pseudouridine (5 mC/pU), fully modified with 5-methylcytosine and 1-methylpseudouridine (5 mC/1mpU), modified where 25% of the cytosines replaced with 5-methylcytosine and 25% of the uridines replaced with 2-thiouridine (s2U/5 mC), fully modified with 1-methylpseudouridine (1mpU) or fully modified with pseudouridine (pU) were diluted in 10 ul final volume of OPTI-MEM® (LifeTechnologies, Grand Island, NY). Lipofectamine 2000 (LifeTechnologies, Grand Island, NY) was used as transfection reagent and 0.2 ul of lipofectamine 2000 was diluted to 10 ul final volume of OPTI-MEM®. After 5 minutes of incubation at room temperature, both solutions were combined and incubated an additional 15 minute at room temperature. Then the 20 ul combined solution was added to the 100 ul cell culture medium containing the HeLa cells and incubated at room temperature. A control of untreated was also analyzed.

[1767] After an 18 hour incubation cell culture supernatants of cells expressing insulin glargine were collected by lysing cells with immuno-precipitation (IP) buffer from Pierce Biotechnology (Thermo Scientific, Rockford, IL) and centrifuged at 10.000 rcf for 2 minutes. The cleared supernatants were diluted 1:2 (1 ml lysate/2 wells/24 well plate) or 1:5 (1 ml lysate/5 wells/24 well plate) then analyzed with an insulin-specific ELISA kit (Mercodia AB, Uppsala, Sweden) according to the manufacturer instructions. All samples were diluted until the determined values were within the linear range of the ELISA standard curve. The amount of protein produced in both studies is shown in Table 192 and FIG. 35. In Table 192, “>” means greater than.

TABLE 192
Protein Production

| | Insulin |
|---|---|
| | Glargine |
| Sample | (mIU/ml) |
| 5-methylcytosine and pseudouridine (5mC/pU) | 22.7 |
| 5-methylcytosine and 1-methylpseudouridine (5mC/1mpU) | 85.3 |
| 25% of the cytosines replaced with 5-methylcytosine | 44.2 |
| and 25% of the uridines replaced with 2-thiouridine | |
| (s2U/5mC) | |
| pseudouridine (pU) | 42.0 |
| 1-methylpseudouridine (1mpU) | >105 |
| Untreated | 0 |

### Example 146. Protein Production of Tissue Factor (Factor 3) in HeLa Cells

[1768] The day before transfection, 15,000 HeLa cells (ATCC no. CCL-2; Manassas, VA) were harvested by treatment with Trypsin-EDTA solution (LifeTechnologies, Grand Island, NY) and seeded in a total volume of 100 ul EMEM medium (supplemented with 10% FCS and 1× Glutamax) per well in a 96-well cell culture plate (Corning, Manassas, VA). The cells were grown at 37° C. in 5% CO₂ atmosphere overnight. The next day, 250 ng of Tissue Factor (Factor 3) modified RNA (mRNA sequence shown in SEQ ID NO: 21466; polyA tail of approximately 160 nucleotides not shown in sequence; 5′cap, Cap1) with the chemical modification described in Table 193, was diluted in 10 ul final volume of OPTI-MEM (LifeTechnologies, Grand Island, NY). Lipofectamine 2000 (LifeTechnologies, Grand Island, NY) was used as transfection reagent and 0.2 ul of lipofectamine 2000 was diluted to 10 ul final volume of OPTI-MEM. After 5 minutes of incubation at room temperature, both solutions were combined and incubated an additional 15 minute at room temperature. Then the 20 ul combined solution was added to the 100 ul cell culture medium containing the HeLa cells and incubated at room temperature. A control of untreated cells was also analyzed.

[1769] After an 18 to 22 hour incubation cell culture supernatants of cells expressing tissue factor were collected and centrifuged at 10.000 rcf for 2 minutes. The cleared supernatants were then analyzed with a Hyphen Biomed Chromogenic kit (Aniara, West Chester OH) according to the manufacturer instructions. All samples were diluted until the determined values were within the linear range of the ELISA standard curve. The amount of protein produced compared to the untreated samples is shown in Table 193 and FIG. 36. In Table 193, “>” means greater than.

TABLE 193
Protein Production

| | Tissue Factor |
|---|---|
| | Protein |
| Sample | (pg/ml) |
| 5-methylcytosine and pseudouridine (5mC and pU) | >2,500 |
| 5-methylcytosine and 1-methylpsudouridine (5mC | >2,500 |
| and 1mpU) | |
| 25% of uridine modified with 2-thiouridine and | 669 |
| 25% of cytosine modified with 5-methylcytosine | |
| (s2U and 5mC) | |
| Pseudouridine (pU) | >2,500 |
| 1-methylpseudouridine (1mpU) | >2,500 |
| Untreated | 3.1 |

### Example 147. Protein Production of Chemically Modified Factor XI in HeLa Cells

[1770] The day before transfection, 15,000 HeLa cells (ATCC no. CCL-2; Manassas, VA) were harvested by treatment with Trypsin-EDTA solution (LifeTechnologies, Grand Island, NY) and seeded in a total volume of 100 ul EMEM medium (supplemented with 10% FCS and 1× Glutamax) per well in a 96-well cell culture plate (Corning, Manassas, VA). The cells were grown at 37° C. in 5% CO₂ atmosphere overnight. The next day, 250 ng of Factor XI modified RNA (mRNA sequence shown in SEQ ID NO: 1625; polyA tail of approximately 140 nucleotides not shown in sequence; 5′cap, Cap1) with the chemical modification described in Table 194, was diluted in 10 ul final volume of OPTI-MEM (LifeTechnologies, Grand Island, NY). Lipofectamine 2000 (LifeTechnologies, Grand Island, NY) was used as transfection reagent and 0.2 ul of lipofectamine 2000 was diluted to 10 ul final volume of OPTI-MEM. After 5 minutes of incubation at room temperature, both solutions were combined and incubated an additional 15 minute at room temperature. Then the 20 ul combined solution was added to the 100 ul cell culture medium containing the HeLa cells and incubated at room temperature. A control of untreated cells was also analyzed.

[1771] After an 18 to 22 hour incubation cell culture supernatants of cells expressing factor XI were collected and centrifuged at 10.000 rcf for 2 minutes. The cleared supernatants were then analyzed with a analyzed with a Factor XI-specific ELISA kit (Innovative Research, Novi, MI) according to the manufacturer instructions. All samples were diluted until the determined values were within the linear range of the ELISA standard curve. The amount of protein produced compared to the untreated samples is shown in Table 194 and FIG. 37. In Table 194, “>” means greater than.

TABLE 194
Protein Production

| | Factor XI Protein |
|---|---|
| Sample | (ng/ml) |
| 5-methylcytosine and pseudouridine (5mC and pU) | >500 |
| 5-methylcytosine and 1-methylpsudouridine (5mC and | >500 |
| 1mpU) | |
| 25% of uridine modified with 2-thiouridine and 25% | 42 |
| of cytosine modified with 5-methylcytosine (s2U and | |
| 5mC) | |
| Pseudouridine (pU) | >500 |
| 1-methylpseudouridine (1mpU) | >500 |
| Untreated | 9 |

### Example 148. Protein Production of Factor XI in HeLa Cell Supernatant

[1772] The day before transfection, 20,000 HeLa cells (ATCC no. CCL-2; Manassas, VA) were harvested by treatment with Trypsin-EDTA solution (LifeTechnologies, Grand Island, NY) and seeded in a total volume of 100 ul EMEM medium (supplemented with 10% FCS and 1× Glutamax) per well in a 96-well cell culture plate (Corning, Manassas, VA). The cells were grown at 37° C. in 5% CO₂ atmosphere overnight. Next day, 250 ng of Factor XI modified RNA (mRNA sequence shown in SEQ ID NO: 1625; polyA tail of approximately 140 nucleotides not shown in sequence; 5′cap, Cap1) fully modified with 5-methylcytosine and 1-methylpseudouridine, was diluted in 10 ul final volume of OPTI-MEM (LifeTechnologies, Grand Island, NY). Lipofectamine 2000 (LifeTechnologies, Grand Island, NY) was used as transfection reagent and 0.2 ul of lipofectamine 2000 was diluted to 10 ul final volume of OPTI-MEM. After 5 minutes of incubation at room temperature, both solutions were combined and incubated an additional 15 minute at room temperature. Then the 20 ul combined solution was added to the 100 ul cell culture medium containing the HeLa cells and incubated at room temperature. A control of erythropoietin (EPO) modified mRNA (mRNA sequence shown in SEQ ID NO: 1638; polyA tail of approximately 160 nucleotides not shown in sequence; cap, Cap1, fully modified with 5-methylcytosine and pseudouridine) and untreated cells was also analyzed.

[1773] After an 18 to 22 hour incubation cell culture supernatants of cells expressing plasminogen was collected and centrifuged at 10.000 rcf for 2 minutes. The cleared supernatants were then analyzed with a Factor XI-specific ELISA kit (Innovative Research, Novi, MI) according to the manufacturer instructions. All samples were diluted until the determined values were within the linear range of the ELISA standard curve. The amount of protein produced is shown in Table 195 and FIG. 38.

TABLE 195
Protein Production

| | Factor XI Protein |
|---|---|
| Sample | (ng/ml) |
| Factor XI | 105 |
| EPO | 0.3 |
| Untreated | 1.2 |

### Example 149. Protein Production of Insulin Aspart in HeLa Cells

[1774] The day before transfection, 15,000 HeLa cells (ATCC no. CCL-2; Manassas, VA) were harvested by treatment with Trypsin-EDTA solution (LifeTechnologies, Grand Island, NY) and seeded in a total volume of 100 ul EMEM medium (supplemented with 10% FCS and 1× Glutamax) per well in a 96-well cell culture plate (Corning, Manassas, VA). The cells were grown at 37° C. in 5% CO₂ atmosphere overnight. The next day, 250 ng of Insulin Aspart modified RNA (mRNA sequence shown in SEQ ID NO: 21467; polyA tail of approximately 160 nucleotides not shown in sequence; 5′cap, Cap1) with the chemical modification described in Table 196, was diluted in 10 ul final volume of OPTI-MEM (LifeTechnologies, Grand Island, NY). Lipofectamine 2000 (LifeTechnologies, Grand Island, NY) was used as transfection reagent and 0.2 ul of lipofectamine 2000 was diluted to 10 ul final volume of OPTI-MEM. After 5 minutes of incubation at room temperature, both solutions were combined and incubated an additional 15 minute at room temperature. Then the 20 ul combined solution was added to the 100 ul cell culture medium containing the HeLa cells and incubated at room temperature. A control of untreated cells was also analyzed.

[1775] After an 18 to 22 hour incubation cell culture supernatants of cells expressing Insulin Apart were collected and centrifuged at 10.000 rcf for 2 minutes. The cleared supernatants were then analyzed with an Insulin-specific ELISA kit (Mercodia AB, Uppsala, Sweden) according to the manufacturer instructions. All samples were diluted until the determined values were within the linear range of the ELISA standard curve. The amount of protein produced compared to the untreated samples is shown in Table 196 and FIG. 39. In Table 196, “>” means greater than.

TABLE 196
Protein Production

| | Insulin Aspart |
|---|---|
| Sample | (mIU/ml) |
| 5-methylcytosine and pseudouridine (5mC and pU) | >500 |
| 5-methylcytosine and 1-methylpsudouridine (5mC and | >500 |
| 1mpU) | |
| 25% of uridine modified with 2-thiouridine and 25% | >500 |
| of cytosine modified with 5-methylcytosine (s2U and | |
| 5mC) | |
| Pseudouridine (pU) | >500 |
| 1-methylpseudouridine (1mpU) | >500 |
| Untreated | 0 |

### Example 150. Protein Production of Insulin Lispro in HeLa Cells

[1776] The day before transfection, 15,000 HeLa cells (ATCC no. CCL-2; Manassas, VA) were harvested by treatment with Trypsin-EDTA solution (LifeTechnologies, Grand Island, NY) and seeded in a total volume of 100 ul EMEM medium (supplemented with 10% FCS and 1× Glutamax) per well in a 96-well cell culture plate (Corning, Manassas, VA). The cells were grown at 37° C. in 5% CO₂ atmosphere overnight. The next day, 250 ng of Insulin Lispro modified RNA (mRNA sequence shown in SEQ ID NO: 21468; polyA tail of approximately 160 nucleotides not shown in sequence; 5′cap, Cap1) with the chemical modification described in Table 197, was diluted in 10 ul final volume of OPTI-MEM (LifeTechnologies, Grand Island, NY). Lipofectamine 2000 (LifeTechnologies, Grand Island, NY) was used as transfection reagent and 0.2 ul of lipofectamine 2000 was diluted to 10 ul final volume of OPTI-MEM. After 5 minutes of incubation at room temperature, both solutions were combined and incubated an additional 15 minute at room temperature. Then the 20 ul combined solution was added to the 100 ul cell culture medium containing the HeLa cells and incubated at room temperature. A control of untreated cells was also analyzed.

[1777] After an 18 to 22 hour incubation cell culture supernatants of cells expressing Insulin Lispro were collected and centrifuged at 10.000 rcf for 2 minutes. The cleared supernatants were then analyzed with an insulin-specific ELISA kit (Mercodia AB, Uppsala, Sweden) according to the manufacturer instructions. All samples were diluted until the determined values were within the linear range of the ELISA standard curve. The amount of protein produced compared to the untreated samples is shown in Table 197 and FIG. 40. In Table 197, “>” means greater than.

TABLE 197
Protein Production

| | Insulin Aspart |
|---|---|
| Sample | (mIU/ml) |
| 5-methylcytosine and pseudouridine (5mC and pU) | >500 |
| 5-methylcytosine and 1-methylpsudouridine (5mC and | >500 |
| 1mpU) | |
| 25% of uridine modified with 2-thiouridine and 25% | >500 |
| of cytosine modified with 5-methylcytosine (s2U and | |
| 5mC) | |
| Pseudouridine (pU) | >500 |
| 1-methylpseudouridine (1mpU) | >500 |
| Untreated | 0 |

### Example 151. Protein Production of Insulin Glulisine in HeLa Cells

[1778] The day before transfection, 15,000 HeLa cells (ATCC no. CCL-2; Manassas, VA) were harvested by treatment with Trypsin-EDTA solution (LifeTechnologies, Grand Island, NY) and seeded in a total volume of 100 ul EMEM medium (supplemented with 10% FCS and 1× Glutamax) per well in a 96-well cell culture plate (Corning, Manassas, VA). The cells were grown at 37° C. in 5% CO₂ atmosphere overnight. The next day, 250 ng of Insulin Glulisine modified RNA (mRNA sequence shown in SEQ ID NO: 21469; polyA tail of approximately 160 nucleotides not shown in sequence; 5′cap, Cap1) with the chemical modification described in Table 198, was diluted in 10 ul final volume of OPTI-MEM (LifeTechnologies, Grand Island, NY). Lipofectamine 2000 (LifeTechnologies, Grand Island, NY) was used as transfection reagent and 0.2 ul of lipofectamine 2000 was diluted to 10 ul final volume of OPTI-MEM. After 5 minutes of incubation at room temperature, both solutions were combined and incubated an additional 15 minute at room temperature. Then the 20 ul combined solution was added to the 100 ul cell culture medium containing the HeLa cells and incubated at room temperature. A control of untreated cells was also analyzed.

[1779] After an 18 to 22 hour incubation cell culture supernatants of cells expressing Insulin Lispro were collected and centrifuged at 10.000 rcf for 2 minutes. The cleared supernatants were then analyzed with an insulin-specific ELISA kit (Mercodia AB, Uppsala, Sweden) according to the manufacturer instructions. All samples were diluted until the determined values were within the linear range of the ELISA standard curve. The amount of protein produced compared to the untreated samples is shown in Table 198 and FIG. 41. In Table 198, “>” means greater than.

TABLE 198
Protein Production

| | |
|---|---|
| | Insulin |
| Sample | (mIU/ml) |

| | |
|---|---|
| 5-methylcytosine and pseudouridine (5mC and pU) | >500 |
| 5-methylcytosine and 1-methylpsudouridine (5mC and | >500 |
| 1 mpU) | |
| 25% of uridine modified with 2-thiouridine and 25% of | >500 |
| cytosine modified with 5-methylcytosine (s2U and 5mC) | |
| Pseudouridine (pU) | >500 |
| 1-methylpseudouridine (1 mpU) | >500 |
| Untreated | 0 |

### Example 152. Protein Production of Human Growth Hormone in HeLa Cells

[1780] The day before transfection, 15,000 HeLa cells (ATCC no. CCL-2; Manassas, VA) were harvested by treatment with Trypsin-EDTA solution (LifeTechnologies, Grand Island, NY) and seeded in a total volume of 100 ul EMEM medium (supplemented with 10% FCS and 1× Glutamax) per well in a 96-well cell culture plate (Corning, Manassas, VA). The cells were grown at 37° C. in 5% CO₂ atmosphere overnight. The next day, 250 ng of human growth hormone (hGH) modified RNA (mRNA sequence shown in SEQ ID NO: 1648; polyA tail of approximately 160 nucleotides not shown in sequence; 5′cap, Cap1) with the chemical modification described in Table 199, was diluted in 10 ul final volume of OPTI-MEM (LifeTechnologies, Grand Island, NY). Lipofectamine 2000 (LifeTechnologies, Grand Island, NY) was used as transfection reagent and 0.2 ul of lipofectamine 2000 was diluted to 10 ul final volume of OPTI-MEM. After 5 minutes of incubation at room temperature, both solutions were combined and incubated an additional 15 minute at room temperature. Then the 20 ul combined solution was added to the 100 ul cell culture medium containing the HeLa cells and incubated at room temperature. A control of untreated cells was also analyzed.

[1781] After an 18 to 22 hour incubation cell culture supernatants of cells expressing human growth hormone were collected and centrifuged at 10.000 rcf for 2 minutes. The cleared supernatants were then analyzed with a human growth hormone ELISA kit (Cat. No. DGH00; R&D SYSTEMS®, Minneapolis, MN) according to the manufacturer instructions. All samples were diluted until the determined values were within the linear range of the ELISA standard curve. The amount of protein produced compared to the untreated samples is shown in Table 199 and FIG. 42. In Table 199, “>” means greater than.

TABLE 199
Protein Production

| | |
|---|---|
| | hGH |
| Sample | (pg/ml) |

| | |
|---|---|
| 5-methylcytosine and pseudouridine (5mC and pU) | >8,000 |
| 5-methylcytosine and 1-methylpsudouridine (5mC and | >8,000 |
| 1 mpU) | |
| 25% of uridine modified with 2-thiouridine and 25% of | >8,000 |
| cytosine modified with 5-methylcytosine (s2U and 5mC) | |
| Pseudouridine (pU) | >8,000 |
| 1-methylpseudouridine (1 mpU) | >8,000 |
| Untreated | 0 |

### Example 153. Detection of Tumor Protein 53 Protein: Western Blot

[1782] CD1 mice (Harlan Laboratories, South Easton, MA) were administered intravenously lipolexed tumor protein 53 (TP53 or p53) mRNA (mRNA sequence shown in SEQ ID NO: 1670; polyA tail of approximately 140 nucleotides not shown in sequence; 5′cap, Cap1) fully modified with 5-methylcytosine and pseudouridine (5 mC/pU), fully modified with 5-methylcytosine and 1-methylpseudouridine (5 mC/1mpU), 25% of uridine modified with 2-thiouridine and 25% of cytosine modified with 5-methylcytosine (s2U and 5 mC), fully modified with pseudouridine (pU) or fully modified with 1-methylpseudouridine (1mpU). The mice were administered a dose of 2 ug of mRNA complexed with 2 ul Lipofectamine 2000 (LifeTechnologies, Grand Island, NY) in 100 ul sterile basal DMEM medium (w/o additives, LifeTechnologies, Grand Island, NY).

[1783] After 6 hours, the animals were sacrificed and serum & spleen are taken. Spleens were transferred to 6-well plates and kept on ice in presence of 1 ml PBS. One spleen was cut with a scalpel several times and with a rubber cell scraper splenocytes were squeezed out until the PBS turns turbid due to cell release.

[1784] Leaving fibrous components behind, the cells were transferred to a 100 um cell strainer (BD Biosciences, San Jose, CA) sitting on a 12-well cell culture plate. By gravity the cells passed through the cell strainer and were collected beneath in the 12-well culture dish. 1 ml of PBS was transferred with the free-floating splenocytes to an Eppendorf tube and spun for 5 min at 2000 rpm. The PBS was discarded and the cell pellet combined with 500 ul fresh PBS. The spenocytes were resuspended by brief vortexing for 5 mins at 2000 rpm. The PBS was discarded and 1 ml BD Pharmlyse was added to the cell pellet. The splenocytes were resuspended by brief vortexing. The cells were incubated at room temperature for 3 minutes and then spun at 200 rpm for 5 minutes. The cells were washed twice with 500 ul PBS and spun as described above. The cells were resuspended with 500 ul of PBS and spun as described.

[1785] 250 ul of splenocytes were combined with 1× Pharmlyse buffer and vortexed briefly or resuspended with a pipet and then spun for 2 minutes at 2000 rpm.

[1786] In one tube, resuspend cell pellet in 500 ul RIPA buffer with protease inhibitor cocktail for mammalian cells (BostonBioproducts, Ashland, MA) and freeze lysate or continue with BCA assay immediately. In a second tube, add 250 ul FACS staining kit fixation solution (4% formaldehyde; R and D Systems, Minneapolis, MN) and then incubate for 10 minutes at room temperature. The cells were washed twice with 500 ul PBS and spun as described above. The cell pellet was resuspended in 500 PBS and stored at 4° C.

[1787] Protein lysates were loaded on NuPage SDS-PAGE system (chambers and power supply) with 1.5 mm ready-to-use Bis-Tris gels and 4-12% acrylamide gradient with MOPS-buffer as running aid (all Life Technologies, Grand Island, NY). Each lysate sample was prepared to 40 ul final volume. This sample contained 25 ug protein lysate in variable volume, RIPA buffer to make up volume to 26 ul, 4 ul of 10× reducing agent and 10 ul 4× SDS loading buffer (both from Life Technologies, Grand Island, NY). Samples were heated at 95° C. for 5 min and loaded on the gel. Standard settings were chosen by the manufacturer, 200V, 120 mA and max. 25 W. Run time was 60 min, but no longer than running dye reaching the lower end of the gel.

[1788] After the run was terminated, the plastic case was cracked and the encased gel transferred to a ready-to-use nitrocellulose membrane kit and power supply (iBLOT; LifeTechnologies, Grand Island, NY). Using default settings, the protein lysate was transferred by high Ampere electricity from the gel to the membrane.

[1789] After the transfer, the membranes were incubated in 5% BSA in 1× TBS for 15 minutes then in 5% BSA in 1× TBS+0.1% Tween for another 15 minutes. Primary antibodies against target proteins were applied in 3 ml of 5% BSA in 1× TBS solution at a 1:500 to 1:2000 dilution for 3 hours at room temperature and gentle agitation on an orbital shaker. Membranes are washed 3 times with 1× TBS/0.1% Tween, 5 minutes each time with gentle agitation. The secondary antibody was conjugated to horse radish peroxidase and binds to the primary antibody antibodies. The secondary antibody was diluted of 1:1000 to 1:5000 in 5% BSA in 1× TBS and incubated for 3 hrs at RT. Primary and secondary antibodies were purchased from Abcam (Cambridge, MA), Novus Biologicals (Littleton, CO), Thermo Fisher (Rockford, IL), Millipore (Billerica, MA) or R and D systems (Minneapolis, MD).

[1790] At the end of incubation time, the membranes were washed 3 times with 1× TBS/0.1% Tween, 5 minutes each time with gentle agitation. The membranes were developed in 5 ml Pierce WestPico Chemiluminescent Subtrate (Thermo Fisher, Rockford, IL) as directed.

[1791] As shown with the box in FIGS. 43A and 43B the Western Blot detected protein around the expected size of 53 kd for each of the 2 samples evaluated for each chemistry.

### Example 154. Detection of Tuftelin 1 Protein: Western Blot

[1792] Human embryonic kidney epithelial (HEK293) were seeded on 96-well plates (Greiner Bio-one GmbH, Frickenhausen, Germany) and plates for HEK293 cells were precoated with collagen type1. HEK293 were seeded at a density of 35,000 in 100 μl cell culture medium (DMEM, 10% FCS, adding 2 mM L-Glutamine, 1 mM Sodiumpyruvate and 1× non-essential amino acids (Biochrom AG, Berlin, Germany) and 1.2 mg/ml Sodiumbicarbonate (Sigma-Aldrich, Munich, Germany)).

[1793] Transfected cells were lysed with 20 μl Sample buffer (20% Glycerol, 4% SDS, 100 mM Tris-HCl pH 6.8, 0.2% Bromphenolblue, 5% beta-Mercaptoethanol) per well. Supernatants were precipitated with 4 volumes ice-cold acetone and dissolved in sample buffer. Samples were heated to 95° C. for 5 minutes and run on SDS-polyacrylamide gels containing 10% acrylamide.

[1794] Proteins were transferred to a nitrocellulose membrane by semidry blotting. Membranes were blocked with 5% skim milk powder in TBS and subsequently incubated with TUFT1 rabbit polyclonal antibodies (Novus Biologicals, Cat #NBP1-87446) at a dilution of 1:500. Signals were detected using Donkey anti-rabbit HRP-conjugated secondary antibodies (St. Cruz Biotech, Heidelberg, Germany) and Super Signal West Pico detection regent (Pierce). As shown in FIG. 44 the Western Blot detected protein in the 2 ug (lane 2) and 200 ng (lane 3) samples. In FIG. 44, lane 1 is the marker.

### Example 155. Detection of Galactokinase 1 Protein: Western Blot

[1795] CD1 mice (Harlan Laboratories, South Easton, MA) were administered intravenously lipolexed galactokinase 1 (GALK1) mRNA (mRNA sequence shown in SEQ ID NO: 21470; polyA tail of approximately 140 nucleotides not shown in sequence; 5′cap, Cap1) fully modified with 5-methylcytosine and pseudouridine (5 mC/pU), fully modified with 5-methylcytosine and 1-methylpseudouridine (5 mC/1mpU), 25% of uridine modified with 2-thiouridine and 25% of cytosine modified with 5-methylcytosine (s2U and 5 mC), fully modified with pseudouridine (pU) or fully modified with 1-methylpseudouridine (1mpU). The mice were administered a dose of 2 ug of mRNA complexed with 2 ul Lipofectamine 2000 (LifeTechnologies, Grand Island, NY) in 100 ul sterile basal DMEM medium (w/o additives, LifeTechnologies, Grand Island, NY).

[1796] After 6 hours, the animals were sacrificed and serum & spleen are taken. Spleens were transferred to 6-well plates and kept on ice in presence of 1 ml PBS. One spleen was cut with a scalpel several times and with a rubber cell scraper splenocytes were squeezed out until the PBS turns turbid due to cell release.

[1797] Leaving fibrous components behind, the cells were transferred to a 100 um cell strainer (BD Biosciences, San Jose, CA) sitting on a 12-well cell culture plate. By gravity the cells passed through the cell strainer and were collected beneath in the 12-well culture dish. 1 ml of PBS was transferred with the free-floating splenocytes to an Eppendorf tube and spun for 5 min at 2000 rpm. The PBS was discarded and the cell pellet combined with 500 ul fresh PBS. The spenocytes were resuspended by brief vortexing for 5 mins at 2000 rpm. The PBS was discarded and 1 ml BD Pharmlyse was added to the cell pellet. The splenocytes were resuspended by brief vortexing. The cells were incubated at room temperature for 3 minutes and then spun at 200 rpm for 5 minutes. The cells were washed twice with 500 ul PBS and spun as described above. The cells were resuspended with 500 ul of PBS and spun as described.

[1798] 250 ul of splenocytes were combined with 1× Pharmlyse buffer and vortexed briefly or resuspended with a pipet and then spun for 2 minutes at 2000 rpm.

[1799] In one tube, resuspend cell pellet in 500 ul RIPA buffer with protease inhibitor cocktail for mammalian cells (BostonBioproducts, Ashland, MA) and freeze lysate or continue with BCA assay immediately. In a second tube, add 250 ul FACS staining kit fixation solution (4% formaldehyde; R and D Systems, Minneapolis, MN) and then incubate for 10 minutes at room temperature. The cells were washed twice with 500 ul PBS and spun as described above. The cell pellet was resuspended in 500 PBS and stored at 4° C.

[1800] Protein lysates were loaded on NuPage SDS-PAGE system (chambers and power supply) with 1.5 mm ready-to-use Bis-Tris gels and 4-12% acrylamide gradient with MOPS-buffer as running aid (all Life Technologies, Grand Island, NY). Each lysate sample was prepared to 40 ul final volume. This sample contained 25 ug protein lysate in variable volume, RIPA buffer to make up volume to 26 ul, 4 ul of 10× reducing agent and 10 ul 4× SDS loading buffer (both from Life Technologies, Grand Island, NY). Samples were heated at 95° C. for 5 min and loaded on the gel. Standard settings were chosen by the manufacturer, 200V, 120 mA and max. 25 W. Run time was 60 min, but no longer than running dye reaching the lower end of the gel.

[1801] After the run was terminated, the plastic case was cracked and the encased gel transferred to a ready-to-use nitrocellulose membrane kit and power supply (iBLOT; LifeTechnologies, Grand Island, NY). Using default settings, the protein lysate was transferred by high Ampere electricity from the gel to the membrane.

[1802] After the transfer, the membranes were incubated in 5% BSA in 1× TBS for 15 minutes then in 5% BSA in 1× TBS+0.1% Tween for another 15 minutes. GALK1 rabbit polyclonal antibody (Abcam, Cambridge, MA) against GALK1 proteins were applied in 3 ml of 5% BSA in 1× TBS solution at a 1:500 to 1:2000 dilution for 3 hours at room temperature and gentle agitation on an orbital shaker. Membranes are washed 3 times with 1× TBS/0.1% Tween, 5 minutes each time with gentle agitation. The Goat anti-rabbit HRP conjugate (Abcam, Cambridge MA) was conjugated to horse radish peroxidase and binds to the GALK1 rabbit polyclonal antibody. The conjugated antibody was diluted of 1:1000 to 1:5000 in 5% BSA in 1× TBS and incubated for 3 hrs at RT. Primary and secondary antibodies were purchased from Abcam (Cambridge, MA), Novus Biologicals (Littleton, CO), Thermo Fisher (Rockford, IL), Millipore (Billerica, MA) or R and D systems (Minneapolis, MD).

[1803] At the end of incubation time, the membranes were washed 3 times with 1× TBS/0.1% Tween, 5 minutes each time with gentle agitation. The membranes were developed in 5 ml Pierce WestPico Chemiluminescent Subtrate (Thermo Fisher, Rockford, IL) as directed.

[1804] As shown with the box in FIGS. 45A and 45B the Western Blot detected protein around the expected size of 30 and 42 kd for each of the 2 samples evaluated for each chemistry.

### Example 156. Detection of Defensin, Beta 103A Protein: Western Blot

[1805] The day before transfection, 750,000 HeLa cells (ATCC no. CCL-2; Manassas, VA) were harvested by treatment with Trypsin-Ethylenediaminetetraacetic acid (EDTA) solution (LifeTechnologies, Grand Island, NY) and seeded in a total volume of 3 ml Eagle's minimal essential medium (EMEM) (supplemented with 10% fetal calf serum (FCS) and 1× Glutamax) per well in a 6-well cell culture plate (Corning, Manassas, VA). The cells were grown at 37° C. in 5% CO2 atmosphere overnight. Next day, 1250 ng of defensing, beta 103A (DEFB103A) mRNA (mRNA sequence shown in SEQ ID NO: 1631; polyA tail of approximately 140 nucleotides not shown in sequence; 5′cap, Cap1) fully modified with 5-methylcytosine and pseudouridine (5 mC/pU) was diluted in 250 ul final volume of OPTI-MEM® (LifeTechnologies, Grand Island, NY). Lipofectamine 2000 (LifeTechnologies, Grand Island, NY) was used as transfection reagent and 5.5 ul were diluted in 250 ul final volume of OPTI-MEM®. After 5 minutes of incubation at room temperature, both solutions were combined and incubated an additional 15 minutes at room temperature. Then 500 ul of the combined solution was added to the 3 ml cell culture medium containing the HeLa cells. The plates were then incubated as described before. A control of untreated cells was also evaluated.

[1806] After an 16-18 hour incubation, the medium was removed and the cells were washed with 1 ml PBS. After complete removal of the PBS, 500 ul of fresh PBS was added. Cells were harvested by scraping with a cell scraper. Harvested cells receiving the same mRNA were then combined in one 1.5 ml Eppendorf tube.

[1807] Cells were pelleted by centrifugation at 3,000 rpm for 2 minutes. The PBS was removed and cells lysed in 250 ul radio immunoprecipitation assay (RIPA) buffer (containing PMSF and eukaryotic protease inhibitor mix) (all from BostonBioProducts, Ashland, MA) by gentle pipetting. Lysates were cleared by centrifugation at 10,000 rpm at 4° G for 10 minutes. Cleared lysates were transferred to Amicon filters with 10,000 kd molecular cutoff (Waters, Milford, MA) and spun at 12,000 rpm and 4° G for 20 minutes. The concentrated protein lysate was recovered by placing the inverted filter in a fresh 1.5 ml Eppendorf tube and spinning at 3,000 rpm for 1 minute. The final volume of the lysate is between 25-40 ul.

[1808] Protein concentration was determined using the BCA kit for microtiter-plates from Pierce (Thermo Fisher, Rockford, IL). The standard proteins of the titration curve were dissolved in RIPA buffer (as described for cell lysate generation) and not in dilution buffer.

[1809] Protein lysates were loaded on NuPage SDS-PAGE system (chambers and power supply) with 1.5 mm ready-to-use Bis-Tris gels and 4-12% acrylamide gradient with MOPS-buffer as running aid (all from Life Technologies, Grand Island, NY). Each lysate sample was prepared to 40 ul final volume. This sample contained 25 ug protein lysate in variable volume, RIPA buffer to make up volume to 26 ul, 4 ul of 10 × reducing agent and 10 ul 4× SDS loading buffer (both from Life Technologies, Grand Island, NY). Samples were heated at 95° C. for 5 minutes and loaded on the gel. Standard settings were chosen by the manufacturer, 200V, 120 mA and maximum 25 W. Run time was 60 minutes, but no longer than running dye reaching the lower end of the gel.

[1810] After the run was terminated, the plastic case was cracked and the encased gel transferred to a ready-to-use nitrocellulose membrane kit and power supply (iBLOT; LifeTechnologies, Grand Island, NY). Using default settings, the protein lysate was transferred by high Ampere electricity from the gel to the membrane.

[1811] After the transfer, the membranes were incubated in 5% bovine serum albumin (BSA) in 1× tris buffered saline (TBS) for 15 minutes then in 5% BSA in 1× TBS+0.1% Tween for another 15 minutes. DEFB103A rabbit polyclonal antibody (Abcam, Cambridge MA) against DEFB103A proteins were applied in 3 ml of 5% BSA in 1× TBS solution at a 1:500 to 1:2000 dilution for 3 hours at room temperature and gentle agitation on an orbital shaker. Membranes are washed 3 times with 1× TBS/0.1% Tween, 5 minutes each time with gentle agitation. The Donkey anti-rabbit NL557 conjugate (R&D Systems, Minneapolis, MN) was conjugated to horse radish peroxidase and binds to the DEFB103A rabbit polyclonal antibody. The conjugated antibody was diluted of 1:1000 to 1:5000 in 5% BSA in 1× TBS and incubated for 3 hours at room temperature. As shown with the box in FIG. 46 the Western Blot detected protein in each of the chemistries evaluated.

### Example 157. Confirmation of Peptide Identity

[1812] Proteins can be evaluated using liquid chromatography-mass spectrometry in tandem with mass spectrometry (LC-MS/MS) with quantitative LC-multiple reaction monitoring (MRM) in order to confirm the identity of the peptide.

[1813] The identity of any protein target described herein can be evaluated using the liquid chromatography-mass spectrometry in tandem with mass spectrometry (LC-MS/MS) with quantitative LC-multiple reaction monitoring (MRM) Assay (Biognosys AG, Schlieren Switzerland). HeLa cell lysates containing protein expressed from modified mRNA are evaluated using LC-MS/MS with quantitative LC-MRM Assay (Biognosys, Schlieren Switzerland) in order to confirm the identity of the peptides in the cell lysates. The identified peptide fragments are compared against known proteins including isoforms using methods known and/or described in the art.

### A. Sample Preparation

[1814] Protein in each sample in lysis buffer is reduced by incubation for 1 hour at 37° C. with 5 mM tris(2-carboxyethyl)phosphine (TCEP). Alkylation is carried out using 10 mM iodoacetamide for 30 minutes in the dark at room temperature. Proteins are digested to peptides using trypsin (sequence grade, PromegaCorporation, Madison, WI) at a protease: protein ratio of 1:50. Digestion is carried out overnight at 37° C. (total digestion time is 12 hours). Peptides are cleaned up for mass spectrometric analysis using C18 spin columns (The Nest Group, Southborough, MA) according to the manufacturer's instructions. Peptides are dried down to complete dryness and resuspended in LC solvent A (1% acetonitrile, 0.1% formic acid (FA)). All solvents are HPLC-grade from SIGMA-ALDRICH® (St. Louis, MO) and all chemicals, where not stated otherwise, are obtained from SIGMA-ALDRICH® (St. Louis, MO).

### B. LC-MS/MS and LC-MRM

[1815] Peptides are injected to a packed C18 column (Magic AQ, 3 um particle size, 200 Å pore size, Michrom Bioresources, Inc (Auburn, CA); 11 cm column length, 75 um inner diameter, New Objective (Woburn, MA)) on a Proxeon Easy nLC nano-liquid chromatography system for all mass spectrometric analysis. LC solvents are A: 1% acetonitrile in water with 0.1% FA; B: 3% water in acetonitrile with 0.1% FA. The LC gradient for shotgun analysis is 5-35% solvent B in 120 minutes followed by 35-100% solvent B in 2 minutes and 100% solvent B for 8 minutes (total gradient length is 130 minutes). LC-MS/MS shotgun runs for peptide discovery are carried out on a Thermo Scientific (Thermo Fisher Scientific) (Billerica, MA) Q Exactive mass spectrometer equipped with a standard nano-electrospray source. The LC gradient for LC-MRM is 5-35% solvent B in 30 minutes followed by 35-100% solvent B in 2 minutes and 100% solvent B for 8 minutes (total gradient length is 40 minutes). The Thermo Scientific (Thermo Fisher Scientific) (Billerica, MA) TSQ Vantage triple quadrupole mass spectrometer is equipped with a standard nano-electrospray source. In unscheduled MRM mode for recalibration it is operated at a dwell time of 20 ms per transition. For relative quantification of the peptides across samples, the TSQ Vantage is operated in scheduled MRM mode with an acquisition window length of 4 minutes. The LC eluent is electrosprayed at 1.9 kV and MRM analysis is performed using a Q1 peak width of 0.7 Da. Collision energies are calculated for the TSQ Vantage by a linear regression according to the vendor's specifications.

### C. Assay Design, Data Processing and Analysis

[1816] For the generation of LC-MRM assays, the 12 most intense fragment ions from LC-MS/MS analysis are measured in scheduled LC-MRM mode and data were processed using MQUEST® (Cluetec, Karlsruhe, Germany), the scoring part of mProphet (Reiter et a1, mProphet: Automated data processing and statistical validation for large-scale SRM experiments, Nature Methods, 2011 (8), 430-435; the contents of which are herein incorporated by reference). Assays were validated manually, exact fragment intensities are determined and iRTs (indexed retention times) are assigned relative to Biognosys's iRT-peptides (Escher et a1. Using iRT, a normalized retention time for more targeted measurement of peptides, Proteomics, 2012 (12), 1111-1121; the contents of which are herein incorporated by reference).

[1817] For the relative quantification of the peptides across the sample series the 8 most intense transitions of each assay are measured across the sample series. Data analysis is carried out using SpectroDive™ (Biognosys, Schlieren Switzerland). Total peak areas are compared for the selected peptides and a false discover rate of 0.05 is applied. Peptides with a Qvalue below 0.05 are excluded and considered not detected in the respective sample.

### Example 158. Confirmation of Peptide Identity from Modified mRNA Containing Chemical Modifications

[1818] Cell lysates containing protein produced from low density lipoprotein receptor (LDLR) modified mRNA (mRNA sequence shown in SEQ ID NO: 21463; polyA tail of approximately 140 nucleotides not shown in sequence; 5′cap, Cap1; fully modified with 5-methylcytosine and pseudouridine), ornithine carbamoyltransferase (OTC) modified mRNA (mRNA sequence shown in SEQ ID NO: 1659; polyA tail of approximately 160 nucleotides not shown in sequence; 5′cap, Cap1; fully modified with 5-methylcytosine and pseudouridine), wild-type apolipoprotein A-I (APOA1wt) modified mRNA (mRNA sequence shown in SEQ ID NO: 21453; polyA tail of approximately 160 nucleotides not shown in sequence; 5′cap, Cap1; fully modified with 5-methylcytosine and pseudouridine), Hepcidin (HEPC) modified mRNA (mRNA sequence shown in SEQ ID NO: 21471; polyA tail of approximately 160 nucleotides not shown in sequence; 5′cap, Cap1; fully modified with 5-methylcytosine and 1-methylpseudouridine), hemochromatosis type 2 (HFE2) modified mRNA (mRNA sequence shown in SEQ ID NO: 21472; polyA tail of approximately 160 nucleotides not shown in sequence; 5′cap, Cap1; fully modified with 5-methylcytosine and 1-methylpseudouridine) or fumarylacetoacetate hydrolase (FAH) modified mRNA (mRNA sequence shown in SEQ ID NO: 21473; polyA tail of approximately 160 nucleotides not shown in sequence; 5′cap, Cap1; fully modified with 5-methylcytosine and 1-methylpseudouridine) were evaluated using the LC-MS/MS with quantitative LC-MRM as described in Example 157. Peptide fragments identified for the evaluated proteins are shown in Table 200. All peptides were specific for parent protein and LDLR and HIFE2 was specific for the parent protein and its isoforms. In Table 200, “Uniprot ID” refers to the protein identifier from the UniProt database when the peptide fragment sequences were blasted against all review proteins in the database. Housekeeping proteins used to evaluate the protein in the cell lysates are shown in Table 201.

TABLE 200
Protein and Peptide Fragment Sequences

| | | Peptide | |
|---|---|---|---|
| | | Fragment | |
| | Peptide | SEQ ID | Uniprot |
| Protein | Fragment Sequence | NO | ID |
| APOA1 | LLDNWDSVTSTFSK | 21474 | P02647 |
| APOA1 | WQEEMELYR | 21475 | P02647 |
| APOA1 | LHELQEK | 21476 | P02647 |
| APOA1 | VQPYLDDFQK | 21477 | P02647 |
| FAH | ASSVVVSGTPIR | 21478 | P16930 |
| FAH | GEGMSQAATICK | 21479 | P16930 |
| FAH | HLFTGPVLSK | 21480 | P16930 |
| FAH | IGVAIGDQILDLSIIK | 21481 | P16930 |
| FAH | LGEPIPISK | 21482 | P16930 |
| FAH | VFLQNLLSVSQAR | 21483 | P16930 |
| FAH | WEYVPLGPFLGK | 21484 | P16930 |
| FAH | AHEHIFGMVLMNDWSAR | 21485 | P16930 |
| FAH | GTKPIDLGNGQTR | 21486 | P16930 |
| FAH | HQDVFNQPTLNSFMGLGQAAWK | 21487 | P16930 |
| FAH | QHATNVGIMFR | 21488 | P16930 |
| HEPC | ASWMPMFQR | 21489 | P81172 |
| HEPC | DTHFPICIFCCGCCHR | 21490 | P81172 |
| LDLR | MICSTQLDR | 21491 | P01130, |
| | | | P01130-4, |
| | | | P01130-3, |
| | | | P01130-2 |
| LDLR | LAHPFSLAVFEDK | 21492 | P01130, |
| | | | P01130-4, |
| | | | P01130-3, |
| | | | P01130-2 |
| LDLR | NVVALDTEVASNR | 21493 | P01130, |
| | | | P01130-4, |
| | | | P01130-3, |
| | | | P01130-2 |
| LDLR | TCSQDEFR | 21494 | P01130, |
| | | | P01130-4 |
| OTC | FGMHLQAATPK | 21495 | P00480 |
| OTC | KPEEVDDEVFYSPR | 21496 | P00480 |
| OTC | LAEQYAK | 21497 | P00480 |
| OTC | LQAFQGYQVTMK | 21498 | P00480 |
| OTC | SLGMIFEK | 21499 | P00480 |
| OTC | VAASDWTFLHCLPR | 21500 | P00480 |
| OTC | GEYLPLLQGK | 21501 | P00480 |
| OTC | GLTLSWIGDGNNILHSIMMSAAK | 21502 | P00480 |
| OTC | LLLTNDPLEAAHGGNVLITDTWI | 21503 | P00480 |
| | SMGQEEEK | | |
| OTC | LSTETGFALLGGHPCGLTTQDIH | 21504 | P00480 |
| | LGVNESLT | | |
| OTC | YMLWLSADLK | 21505 | P00480 |
| HFE2 | CNAEYVSSTLSLR | 21506 | Q6ZVN8 |
| HFE2 | GGGVGSGGLCR | 21507 | Q6ZVN8 |
| HFE2 | GPALPGAGSGLPAPDPCDYEGR | 21508 | Q6ZVN8, |
| | | | Q6ZVN8-2 |
| HFE2 | AFLPDLEK | 21509 | Q6ZVN8, |
| | | | Q6ZVN8- |
| | | | 2, |
| | | | Q6ZVN8-3 |
| HFE2 | LHGRPPGFLHCASFGDPHVR | 21510 | Q6ZVN8, |
| | | | Q6ZVN8-2 |
| HFE2 | NMQECIDQK | 21511 | Q6ZVN8, |
| | | | Q6ZVN8-2 |

TABLE 201
Housekeeping Proteins

| | | Peptide | |
|---|---|---|---|
| | | Fragment | |
| | Peptide Fragment | SEQ ID | Uniprot |
| Protein | Sequence | NO | ID |
| Beta-actin | VAPEEHPVLLTEAPLNPK | 21512 | P60709 |
| (ACTB) | | | |
| Glyceraldehyde- | VVDLMAHMASK | 21513 | P04406 |
| 3-phosphate | | | |
| dehydrogenase | | | |
| (G3P) | | | |
| Heat shock | HLEINPDHPIVETLR | 21514 | P08238 |
| protein HSP | | | |
| 90-beta (HS90B) | | | |
| Heat shock | YIDQEELNK | 21515 | P08238 |
| protein HSP | | | |
| 90-beta (HS90B) | | | |
| L-lactate | DQLIYNLLK | 21516 | P00338 |
| dehydrogenase A | | | |
| chain (LDHA) | | | |
| L-lactate | GEMMDLQHGSLFLR | 21517 | P00338 |
| dehydrogenase A | | | |
| chain (LDHA) | | | |
| Phosphoglycerate | ALESPERPFLAILGGAK | 21518 | P00558 |
| kinase 1 (PGK1) | | | |
| Phosphoglycerate | LGDVYVNDAFGTAHR | 21519 | P00558 |
| kinase 1 (PGK1) | | | |
| 60S acidic | IIQLLDDYPK | 21520 | P05388 |
| ribosomal | | | |
| protein P0 | | | |
| (RLA0) | | | |

### Example 159. Confirmation and of Peptide Identity from Chemically Modified mRNA

[1819] Cell lysates containing protein produced from cytotoxic T-lymphocyte-associated protein 4 (CTLA4) modified mRNA (mRNA sequence shown in SEQ ID NO: 21521; polyA tail of approximately 140 nucleotides not shown in sequence; 5′cap, Cap1), serpin peptidase inhibitor, clade A (alpha-1 antiproteinase, antitrypsin), member 1 (SERPINA1) modified mRNA (mRNA sequence shown in SEQ ID NO: 21522; polyA tail of approximately 140 nucleotides not shown in sequence; 5′cap, Cap1), sphingomyelin phosphodiesterase 1 (SMPD1) modified mRNA (mRNA sequence shown in SEQ ID NO: 21523; polyA tail of approximately 140 nucleotides not shown in sequence; 5′cap, Cap1), hypoxanthine-guanine phosphoribosyltransferase (HPRT1) modified mRNA (mRNA sequence shown in SEQ ID NO: 21524; polyA tail of approximately 140 nucleotides not shown in sequence; 5′cap, Cap1), 4-hydroxyphenylpyruvate dioxigenase (HPD) modified mRNA (mRNA sequence shown in SEQ ID NO: 21525; polyA tail of approximately 140 nucleotides not shown in sequence; 5′cap, Cap1), bone morphogenic protein-7 (BMP7) modified mRNA (mRNA sequence shown in SEQ ID NO: 21526; polyA tail of approximately 140 nucleotides not shown in sequence; 5′cap, Cap1), lecithin-cholesterol acyltransferase (LCAT) modified mRNA (mRNA sequence shown in SEQ ID NO: 21527; polyA tail of approximately 140 nucleotides not shown in sequence; 5′cap, Cap1), apoptosis-inducing factor short isoform 1 (AIFsh) modified mRNA (mRNA sequence shown in SEQ ID NO: 21528; polyA tail of approximately 140 nucleotides not shown in sequence; 5′cap, Cap1), tumor protein 53 (TP53 or P53) modified mRNA (mRNA sequence shown in SEQ ID NO: 1670; polyA tail of approximately 140 nucleotides not shown in sequence; 5′cap, Cap1), argininosuccinate synthetase (ASS1) modified mRNA (mRNA sequence shown in SEQ ID NO: 21529; polyA tail of approximately 160 nucleotides not shown in sequence; 5′cap, Cap1), KIT ligand/stem cell factor (KITLG) modified mRNA (mRNA sequence shown in SEQ ID NO: 21530; polyA tail of approximately 140 nucleotides not shown in sequence; 5′cap, Cap1), neuregulin 1, β2a isoform (NRG1) modified mRNA (cDNA sequence shown in SEQ ID NO: 21531; the T7 promoter, 5′untranslated region (UTR) and 3′ UTR used in in vitro transcription (IVT) shown in the sequence), vasoactive intestinal peptide (VIP) modified mRNA (mRNA sequence shown in SEQ ID NO: 21532; polyA tail of approximately 140 nucleotides not shown in sequence; 5′cap, Cap1), arylsulfatase B (ARSB) modified mRNA (mRNA sequence shown in SEQ ID NO: 1618; polyA tail of approximately 140 nucleotides not shown in sequence; 5′cap, Cap1), 6-pyrovoyltetrahydropterin synthase (PTS) modified mRNA (mRNA sequence shown in SEQ ID NO: 1609; polyA tail of approximately 140 nucleotides not shown in sequence; 5′cap, Cap1), fibronectin type III domain-containing protein 5 (FNDC5 or Irisin) modified mRNA (cDNA sequence shown in SEQ ID NO: 21533; the T7 promoter, 5′untranslated region (UTR) and 3′ UTR used in in vitro transcription (IVT) shown in the sequence), amelogenin (AMELY) modified mRNA (mRNA sequence shown in SEQ ID NO: 1613; polyA tail of approximately 140 nucleotides not shown in sequence; 5′cap, Cap1), aldolase A (ALDOA) modified mRNA (mRNA sequence shown in SEQ ID NO: 21534; polyA tail of approximately 140 nucleotides not shown in sequence; 5′cap, Cap1), nerve growth factor (NGF) modified mRNA (mRNA sequence shown in SEQ ID NO: 21535; polyA tail of approximately 140 nucleotides not shown in sequence; 5′cap, Cap1), glycogen synthase 2 (GYS2) modified mRNA (mRNA sequence shown in SEQ ID NO: 21536; polyA tail of approximately 140 nucleotides not shown in sequence; 5′cap, Cap1), GTP cyclohydrolase 1 (GCH1) modified mRNA (mRNA sequence shown in SEQ ID NO: 1649; polyA tail of approximately 140 nucleotides not shown in sequence; 5′cap, Cap1), hepatocyte growth factor (HGF) modified mRNA (mRNA sequence shown in SEQ ID NO: 21537; polyA tail of approximately 140 nucleotides not shown in sequence; 5′cap, Cap1), ectodysplasin-A (EDA) modified mRNA (mRNA sequence shown in SEQ ID NO: 1636; polyA tail of approximately 140 nucleotides not shown in sequence; 5′cap, Cap1), arginase (ARG1) modified mRNA (mRNA sequence shown in SEQ ID NO: 21538; polyA tail of approximately 140 nucleotides not shown in sequence; 5′cap, Cap1), serum amyloid P (APCS) modified mRNA (mRNA sequence shown in SEQ ID NO: 21539; polyA tail of approximately 140 nucleotides not shown in sequence; 5′cap, Cap1), phosphorylase kinase, gamma 2 (PHKG2) modified mRNA (mRNA sequence shown in SEQ ID NO: 21540; polyA tail of approximately 140 nucleotides not shown in sequence; 5′cap, Cap1), 686eoxyribonuclease I (DNASE1) modified mRNA (mRNA sequence shown in SEQ ID NO: 1632; polyA tail of approximately 140 nucleotides not shown in sequence; 5′cap, Cap1), Exenatide modified mRNA (mRNA sequence shown in SEQ ID NO: 21541; polyA tail of approximately 140 nucleotides not shown in sequence; 5′cap, Cap1), glycogenin-1 (PYGL) modified mRNA (mRNA sequence shown in SEQ ID NO: 21542; polyA tail of approximately 140 nucleotides not shown in sequence; 5′cap, Cap1), alpha-galactosidase (GLA) modified mRNA (mRNA sequence shown in SEQ ID NO: 1640; polyA tail of approximately 140 nucleotides not shown in sequence; 5′cap, Cap1), alpha-L-iduronidase (IDUA) modified mRNA (mRNA sequence shown in SEQ ID NO: 1652; polyA tail of approximately 140 nucleotides not shown in sequence; 5′cap, Cap1), galactokinase-1 (GALK1) modified mRNA (mRNA sequence shown in SEQ ID NO: 21470; polyA tail of approximately 140 nucleotides not shown in sequence; 5′cap, Cap1) fully modified with 5-methylcytosine and pseudouridine (5 mC and pU), fully modified with 5-methylcytosine and 1-methylpsudouridine (5 mC and 1mpU), modified where 25% of uridine modified with 2-thiouridine and 25% of cytosine modified with 5-methylcytosine (s2U and 5 mC), fully modified with pseudouridine (pU), or fully modified with 1-methylpseudouridine (1mpU) were evaluated using the LC-MS/MS with quantitative LC-MRM as described in Example 157. Peptide fragments identified for the evaluated proteins are shown in Table 202.

TABLE 202
Proteins and Peptide Fragment Sequences

| | | | | | |
|---|---|---|---|---|---|
| Peptide | 5mC | 5mC | s2U | | |
| Fragment | and | and | and | | |
| SEQ ID NO | pU | 1mpU | 5mC | pU | 1mpU |

CTLA4

| | | | | | | |
|---|---|---|---|---|---|---|
| AMDTGLYICK | 21543 | YES | — | YES | — | YES |
| GIASFVCEYASP | 21544 | — | — | YES | — | — |
| GK | | | | | | |

SERPINA1

| | | | | | | |
|---|---|---|---|---|---|---|
| ITPNLAEFAFSLYR | 21545 | — | YES | — | YES | YES |
| LSITGTYDLK | 21546 | — | YES | — | — | — |

SMPD1

| | | | | | | |
|---|---|---|---|---|---|---|
| IGGFYALSPYPG | 21547 | — | YES | — | YES | YES |

HPRT1

| | | | | | | |
|---|---|---|---|---|---|---|
| DLNHVCVISETG | 21548 | YES | YES | YES | YES | YES |
| EMGGHHIVALC | 21549 | YES | — | — | YES | YES |

HPD

| | | | | | | |
|---|---|---|---|---|---|---|
| AFEEEQNLR | 21550 | YES | YES | YES | YES | YES |
| EMGDHLVK | 21551 | — | YES | — | — | YES |
| EVVSHVIK | 21552 | — | YES | YES | — | YES |

BMP7

| | | | | | | |
|---|---|---|---|---|---|---|
| ATEVHFR | 21553 | YES | YES | — | YES | YES |
| ESDLFLLDSR | 21554 | — | — | — | — | YES |
| IPEGEAVTAAEF | 21555 | YES | YES | YES | YES | YES |

LCAT

| | | | | | | |
|---|---|---|---|---|---|---|
| LDKPDVVNWMC | 21556 | — | YES | — | — | YES |
| LEPGQQEEYYR | 21557 | — | YES | — | YES | YES |
| SSGLVSNAPGVQ | 21558 | — | YES | YES | YES | YES |

AIFsh

| | | | | | | |
|---|---|---|---|---|---|---|
| DGEQHEDLNEV | 21559 | — | — | — | — | YES |
| TGGLEIDSDFGG | 21560 | YES | — | — | YES | YES |

P53

| | | | | | | |
|---|---|---|---|---|---|---|
| ELNEALELK | 21561 | — | — | — | — | YES |
| SVTCTYSPALNK | 21562 | — | — | — | YES | YES |
| TCPVQLWVDSTP | 21563 | — | — | — | — | YES |

ASS1

| | | | | | | |
|---|---|---|---|---|---|---|
| APNTPDILEIEFK | 21564 | YES | YES | — | — | YES |
| FAELVYTGFWHS | 21565 | YES | YES | — | YES | YES |
| FELSCYSLAPQIK | 21566 | YES | YES | YES | YES | YES |

KITLG

| | | | | | | |
|---|---|---|---|---|---|---|
| AVENIQINEEDN | 21567 | YES | YES | — | YES | YES |
| LFTPEEFFR | 21568 | YES | YES | — | YES | YES |
| LVANLPK | 21569 | YES | YES | — | — | — |

NRG1

| | | | | | | |
|---|---|---|---|---|---|---|
| ASLADSGEYMC | 21570 | YES | YES | YES | — | YES |

VIP

| | | | | | | |
|---|---|---|---|---|---|---|
| HADGVFTSDFSK | 21571 | YES | YES | YES | YES | YES |
| HSDAVFTDNYTR | 21572 | YES | YES | YES | YES | YES |

ARSB

| | | | | | | |
|---|---|---|---|---|---|---|
| ELIHISDWLPTLV | 21573 | — | YES | YES | YES | YES |
| GVGFVASPLLK | 21574 | — | YES | YES | YES | — |
| HSVPVYFPAQDP | 21575 | — | YES | YES | YES | YES |

PTS

| | | | | | | |
|---|---|---|---|---|---|---|
| FLSDEENLK | 21576 | YES | YES | YES | YES | YES |
| VYETDNNIVVYK | 21577 | YES | YES | — | YES | YES |
| YMEEAIMQPLD | 21578 | YES | YES | — | YES | YES |

FNDC5

| | | | | | | |
|---|---|---|---|---|---|---|
| SASETSTPEHQG | 21579 | — | YES | — | YES | YES |

AMELY

| | | | | | | |
|---|---|---|---|---|---|---|
| IALVLTPLK | 21580 | YES | — | — | YES | YES |

ALDOA

| | | | | | | |
|---|---|---|---|---|---|---|
| ALANSLACQGK | 21581 | YES | YES | YES | YES | YES |
| ALQASALK | 21582 | YES | YES | YES | YES | YES |
| GILAADESTGSIA | 21583 | YES | YES | YES | YES | YES |

NGF

| | | | | | | |
|---|---|---|---|---|---|---|
| LQHSLDTALR | 21584 | — | YES | — | — | YES |

GYS2

| | | | | | | |
|---|---|---|---|---|---|---|
| TQVEQCEPVND | 21585 | — | — | — | — | YES |

GCH1

| | | | | | | |
|---|---|---|---|---|---|---|
| AASAMQFFTK | 21586 | YES | YES | YES | YES | YES |
| IVEIYSR | 21587 | YES | YES | YES | YES | YES |
| VHIGYLPNK | 21588 | YES | YES | YES | YES | YES |

HGF

| | | | | | | |
|---|---|---|---|---|---|---|
| GEEGGPWCFTSN | 21589 | YES | YES | — | YES | YES |
| HIFWEPDASK | 21590 | — | — | — | — | YES |
| NPDGSESPWCFT | 21591 | — | YES | — | — | YES |

EDA

| | | | | | | |
|---|---|---|---|---|---|---|
| NDLSGGVLNDW | 21592 | — | — | YES | YES | YES |

ARG1

| | | | | | | |
|---|---|---|---|---|---|---|
| GGVEEGPTVLR | 21593 | YES | YES | YES | YES | YES |
| TIGIIGAPFSK | 21594 | YES | YES | YES | YES | YES |
| YFSMTEVDR | 21595 | YES | YES | YES | YES | YES |

APCS

| | | | | | | |
|---|---|---|---|---|---|---|
| IVLGQEQDSYGG | 21596 | YES | YES | — | YES | YES |
| QGYFVEAQPK | 21597 | YES | YES | — | — | YES |
| VGEYSLYIGR | 2158 | YES | YES | — | YES | YES |

PHKG2

| | | | | | | |
|---|---|---|---|---|---|---|
| IMEVTAER | 21599 | YES | YES | YES | YES | YES |
| LLQVDPEAR | 21600 | — | YES | — | YES | YES |
| LSPEQLEEVR | 21601 | YES | YES | YES | YES | YES |

DNASE1

| | | | | | | |
|---|---|---|---|---|---|---|
| IAAFNIQTFGETK | 21602 | YES | YES | YES | YES | YES |
| IVVAGMLLR | 21603 | YES | — | — | YES | YES |
| YDIALVQEVR | 21604 | YES | YES | YES | YES | YES |

Exenatide

| | | | | | | |
|---|---|---|---|---|---|---|
| LFIEWLK | 21605 | YES | YES | YES | — | YES |

PYGL

| | | | | | | |
|---|---|---|---|---|---|---|
| APNDFNLR | 21606 | YES | YES | YES | YES | YES |
| DYYFALAHTVR | 21607 | YES | YES | YES | YES | YES |
| VLYPNDNFFEGK | 21608 | YES | YES | YES | YES | YES |

GLA

| | | | | | | |
|---|---|---|---|---|---|---|
| FDGCYCDSLENL | 21609 | YES | YES | YES | YES | YES |
| NFADIDDSWK | 21610 | YES | YES | YES | YES | YES |
| SILDWTSFNQER | 21611 | YES | YES | YES | YES | YES |

IDUA

| | | | | | | |
|---|---|---|---|---|---|---|
| LDYISLHR | 21612 | YES | YES | YES | YES | YES |
| SPLSWGLLR | 21613 | YES | YES | YES | YES | YES |
| THWLLELVTTR | 21614 | YES | YES | YES | YES | YES |

GALK1

| | | | | | | |
|---|---|---|---|---|---|---|
| GHALLIDCR | 21615 | YES | YES | YES | YES | YES |
| LAVLITNSNVR | 21616 | YES | YES | YES | YES | YES |
| LQFPLPTAQR | 21617 | YES | YES | YES | YES | YES |

### Example 160. Confirmation of Peptide Identity and Comparison to Recombinant Protein

[1820] Liquid chromatography (LC)-mass spectrometry (MS) analysis, LC-MS/MS tryptic peptide mapping/sequencing analysis and 2-dimensional fluorescence differential gel electrophoresis (2-D DIGE) were conducted to confirm the expression of ornithine carbamoyltransferase (OTC) modified mRNA (mRNA sequence shown in SEQ ID NO: 1659; polyA tail of approximately 140 nucleotides not shown in sequence; 5′cap, Cap1) fully modified with 5-methylcytosine and pseudouridine or UDP glucuronosyltransferase 1 family, polypeptide A1 (UGT1A1) modified mRNA (mRNA sequence shown in SEQ ID NO: 21464; polyA tail of approximately 140 nucleotides not shown in sequence; 5′cap, Cap1) fully modified with 5-methylcytosine and 1-methylpseudouridine in HeLa cells transfected with either transcript. The following materials were used: HPLC grade water (EMD Chemicals Inc., Gibbstown, NJ); formic acid (90%) (J. T. Baker, Phillipsburg, NJ); iodoacetamide (Sigma Aldrich, St. Louis, MO); methanol (EMD Chemicals Inc., Gibbstown, NJ); Tris(2-carboxyethyl)phosphine hydrochloride solution (TCEP), 0.5 M (Sigma Aldrich, St. Louis, MO); Tris(hydroxymethyl)aminomethane buffer substance (Tris buffer), pH 8.0 (Fluka-Sigma Aldrich, St. Louis, MO); calcium chloride dehydrated ACS reagent (CaCl₂) (Sigma Aldrich, St. Louis, MO); OTC reference protein [purified recombinant full length human OTC protein, (Abcam, Cambridge, MA)]; UGT1A1 reference protein [purified recombinant human UGT1A1 protein (OriGene Technologies, Rockville, MD).

[1821] Hela cells were transfected with mRNA encoding OTC and UGT1A1. After transfection, cells were lysed and centrifuged to form a cell pellet. The total protein concentration of each sample was determined by bicinchoninic acid assay (BCA assay). The cellular pellet from untransfected HeLa cells had a total protein concentration of 1707 μg/mL while cellular pellets from OTC and UGT1A1 transfected HeLa cells had total protein concentrations of 3947 μg/mL and 2609 μg/mL, respectively.

[1822] For tryptic peptide mapping/sequencing, recombinant proteins as well as cellular pellets were subjected to typsin digestion. Recombinant OTC and UGT1A1 were prepared in 100 mM Tris buffer with 3 mM calcium chloride. The proteins (5 μg each) were reduced with 2 mM TCEP then denatured at 100° C. for five minutes. The samples were cooled to room temperature then alkylated with 2 mM iodoacetamide. The alkylated samples were further reduced with 0.5 mM TCEP. The samples were treated with trypsin overnight at 37° C. in a water bath. The digested samples were removed from the water bath and quenched with 2% formic acid in water. Cell pellets were prepared in 100 mM Tris buffer with 3 mM calcium chloride, pH 8.0. The reconstituted cell pellets and supernatant samples (50 μg each) were reduced with 2 mM TCEP then denatured at 100° C. for five minutes. The samples were cooled to room temperature then alkylated with 100 mM iodoacetamide. The alkylated samples were further reduced with 0.5 mM TCEP. The samples were treated with trypsin overnight at 37° C. in a water bath. The digested samples were removed from the water bath and quenched with 2% formic acid in water.

[1823] The tryptic peptides of recombinant proteins, cell pellets, and supernatant samples were injected onto a 150×2.1 mm Xbridge BEH300 C18 column. The column heater was set at 35° C. Mobile Phase A was 0.1% formic acid in water. Mobile Phase B was 0.1% formic acid in 90/10 acetonitrile/water (v/v). The mass spectra of the digestion products were acquired with an ABSciex API QSTAR ELITE quadrupole time-of-flight mass spectrometer (AB Sciex, Foster City, CA). Data were acquired in time-of-flight (TOF) MS and MS/MS modes using positive electrospray ionization (ESI). The Turbo IonSpray interface was set at 500° C. and maintained at a turbospray voltage of 5.0 kV with a declustering potential of 35 V. Ionization was assisted with a nebulizer and ionspray gas (nitrogen) set at 40 and 35 (arbitrary units) respectively. The data were acquired and processed using Analyst QS 2.0 software (AB Sciex, Foster City, CA).

[1824] The LC-MS data were compared against the predicted/theoretical tryptic digestion products of OTC and UGT1A1 proteins using BioAnalyst software (AB Sciex, Foster City, CA). The digestion products of the recombinant proteins were used as reference peptides for peptide matching in the digested cell pellets and supernatant. The LC-MS and LC-MS/MS data were also mapped and sequenced to specific tryptic digestion products of the HeLa cell derived proteins. The peptide sequence of tryptic peptides were confirmed based on the LC-MS/MS product ion spectra.

[1825] OTC protein was present in the cell pellet of the HeLa cells transfected with the OTC mRNA. Peptide mapping identified sixteen OTC peptides in the tryptic digest of the cell pellet. The product ion spectra of the cell derived peptides matched well with those of the recombinant protein. A database search of human proteins indicated the sequences of the thirteen unmodified peptides were specific only to human OTC. UGT1A1 protein was expressed by the HeLa cells transfected with the UGT1A1 mRNA. Seven UGT1A1 peptides were identified in the tryptic digest of the cell pellet based on exact mass assignment and retention time match to the recombinant UGT1A1 protein. The identities of the matched peptides were confirmed by LC-MS/MS. Based on a search of human proteins, four of the seven observed tryptic peptides was specific to human UGT1A proteins while one of the seven observed tryptic peptides was specific only for UGT1A1. Table 203 shows the peptides identified from the HeLa cell lysates for UGT1A1 modified mRNA and Table 204 shows the peptides identified from OTC modified mRNA.

TABLE 203
UGT1A1 Peptide Fragments

| Peptide Fragment Sequence | SEQ ID NO |
|---|---|
| AMAIADALGKIPQTVLWR | 21618 |
| WLPQNDLLGHPMTR | 21619 |
| IPQTVLWR | 21620 |
| TYPVPFQR | 21621 |
| AMAIADALGK | 21622 |
| ENIMR | 21623 |
| SDFVK | 21624 |

TABLE 204
OTC Peptide Fragments

| Peptide Fragment Sequence | SEQ ID NO |
|---|---|
| QKGEYLPLLQGK | 21625 |
| VLSSMADAVLAR | 21626 |
| FGMHLQAATPK | 21627 |
| SLVFPEAENR | 21628 |
| GEYLPLLQGK | 21629 |
| GYEPDASVTK | 21630 |
| ILLNNAAFR | 21631 |
| QSDLDTLAK | 21632 |
| NFTGEEIK | 21633 |
| SLGMIFEK | 21634 |
| GRDLLTLK | 21635 |
| LAEQYAK | 21636 |
| DLLTLK | 21637 |

[1826] The protein profiles of the cell pellet samples were further characterized by two-dimensional fluorescence differential gel electrophoresis. The test samples were treated with different fluorescent dyes. The contents of the samples were resolved using isoelectric focusing (IEF) in the first dimension and sodium dodecyl sulfate polyacrylamide gel electrophoresis (SDS-PAGE) in the second dimension. The protein profiles of the OTC and UGT1A1 cell pellets were compared. DeCyder Differential Analysis Software (GE Healthcare, Buckinghamshire, UK) was used for data analysis. The presence of OTC and UGT1A1 in the HeLa cells was confirmed by the results of the analysis.

### Example 161. Confirmation of Peptide Identity from Modified mRNA Containing Chemical Modifications

[1827] Cell lysates containing protein produced from cathelicidin antimicrobial peptide (CAMP) modified mRNA (mRNA sequence shown in SEQ ID NO: 1621; polyA tail of approximately 140 nucleotides not shown in sequence; 5′cap, Cap1), CAP18 modified mRNA (mRNA sequence shown in SEQ ID NO: 21638; polyA tail of approximately 140 nucleotides not shown in sequence; 5′cap, Cap1), ciliary neurotrophic factor (CNTF) modified mRNA (mRNA sequence shown in SEQ ID NO: 21639; polyA tail of approximately 140 nucleotides not shown in sequence; 5′cap, Cap1), follicle stimulating hormone, beta polypeptide (FSHB) modified mRNA (mRNA sequence shown in SEQ ID NO: 21640; polyA tail of approximately 140 nucleotides not shown in sequence; 5′cap, Cap 1), interferon, alpha 2 (IFNA2) modified mRNA (mRNA sequence shown in SEQ ID NO: 1654; polyA tail of approximately 140 nucleotides not shown in sequence; 5′cap, Cap1), interferon, beta 1, fibroblast (IFNB1) modified mRNA (mRNA sequence shown in SEQ ID NO: 1655; polyA tail of approximately 140 nucleotides not shown in sequence; 5′cap, Cap1), methylmalonyl-CoA mutase, mitochondrial (MUTA) modified mRNA (mRNA sequence shown in SEQ ID NO: 1658; polyA tail of approximately 140 nucleotides not shown in sequence; 5′cap, Cap1), galectin 3 (LEG3) modified mRNA (mRNA sequence shown in SEQ ID NO: 21641; poly A tail of approximately 140 nucleotides not shown in sequence; 5′cap, Cap1), transforming growth factor beta-3 (TGFB3) modified mRNA (mRNA sequence shown in SEQ ID NO: 21642; polyA tail of approximately 140 nucleotides not shown in sequence; 5′cap, Cap1), or tuftelin (TUFT1) modified mRNA (mRNA sequence shown in SEQ ID NO: 1669; polyA tail of approximately 140 nucleotides not shown in sequence; 5′cap, Cap1) fully modified with 5-methylcytosine and pseudouridine (5 mC and pU), fully modified with 5-methylcytosine and 1-methylpsudouridine (5 mC and 1mpU), modified where 25% of uridine modified with 2-thiouridine and 25% of cytosine modified with 5-methylcytosine (s2U and 5 mC), fully modified with pseudouridine (pU), or fully modified with 1-methylpseudouridine (1mpU) were evaluated using the LC-MS/MS with quantitative LC-MRM as described in Example 157. Peptide fragments identified for the evaluated proteins are shown in Table 205. In Table 205, “Uniprot ID” refers to the protein identifier from the UniProt database when the peptide fragment sequences were blasted against all review proteins in the database.

TABLE 205
Protein and Peptide Fragment Sequences

| | | | | | | |
|---|---|---|---|---|---|---|
| Peptide | | | | | | |
| Fragment | 5mC | 5mC | s2U | | | |
| SEQ | and | and | and | | | Uniprot |
| ID NO | pU | 1mpU | 5mC | pU | 1mpU | ID |

CAMP

| | | | | | | | |
|---|---|---|---|---|---|---|---|
| CMGTVTLNQAR | 21643 | — | Yes | Yes | Yes | Yes | P49913 |
| FALLGDFFR | 21644 | — | Yes | Yes | Yes | Yes | P49913 |
| TTQQSPEDCDFK | 21645 | Yes | Yes | Yes | Yes | Yes | P49913 |

CAP18

| | | | | | | | |
|---|---|---|---|---|---|---|---|
| CVGTVILNQAR | 21646 | Yes | Yes | Yes | Yes | Yes | NA |
| SSDANLYR | 21647 | Yes | Yes | Yes | Yes | Yes | P49913 |

CNTF

| | | | | | | | |
|---|---|---|---|---|---|---|---|
| LQENLQAYR | 21648 | Yes | Yes | Yes | Yes | Yes | P26441 |
| TFHVLLAR | 21649 | Yes | Yes | Yes | Yes | Yes | P26441 |
| VLQELSQWTV | 21650 | Yes | Yes | Yes | Yes | Yes | P26441 |

FSHB

| | | | | | | | |
|---|---|---|---|---|---|---|---|
| CDSDSTDCTVR | 21651 | Yes | Yes | Yes | Yes | Yes | P01225 |
| ELVYETVR | 21652 | — | — | Yes | — | Yes | P01225 |
| VPGCAHHADSL | 21653 | Yes | Yes | Yes | Yes | Yes | P01225 |
| YTYPVATQCHC | | | | | | | |

IFNA2

| | | | | | | | |
|---|---|---|---|---|---|---|---|
| SFSLSTNLQESL | 21654 | — | Yes | — | Yes | Yes | P01563 |
| TLMLLAQMR | 21655 | — | Yes | — | Yes | Yes | P01563 |
| YSPCAWEVVR | 21656 | — | — | — | — | Yes | P01563 |

IFNB1

| | | | | | | | |
|---|---|---|---|---|---|---|---|
| LLWQLNGR | 21657 | — | Yes | — | Yes | Yes | P01574 |
| LMSSLHLK | 21658 | — | — | — | Yes | Yes | P01574 |

LEG3

| | | | | | | | |
|---|---|---|---|---|---|---|---|
| GNDVAFHFNPR | 21659 | Yes | Yes | Yes | Yes | Yes | P17931 |
| IQVLVEPDHFK | 21660 | Yes | Yes | Yes | Yes | Yes | P17931 |
| MLITILGTVKPN | 21661 | Yes | Yes | Yes | Yes | Yes | P17931 |

MUTA

| | | | | | | | |
|---|---|---|---|---|---|---|---|
| LINEIEEMGGM | 21662 | Yes | Yes | Yes | Yes | Yes | P22033 |
| NTQIIIQEESGIP | 21663 | Yes | Yes | Yes | Yes | Yes | P22033 |
| TGLQAGLTIDE | 21664 | Yes | Yes | Yes | Yes | Yes | P22033 |

TGFB3

| | | | | | | | |
|---|---|---|---|---|---|---|---|
| ALDTNYCFR | 21665 | Yes | Yes | Yes | Yes | Yes | P10600 |
| GYYANFCSGPC | 21666 | Yes | Yes | — | Yes | Yes | P10600 |
| VEQLSNMVVK | 21667 | Yes | Yes | Yes | Yes | Yes | P10600 |

TUFT1

| | | | | | | | |
|---|---|---|---|---|---|---|---|
| EAEQSNVALQR | 21668 | Yes | Yes | Yes | Yes | Yes | Q9NNX1 |
| IAYLEAENLEM | 21669 | — | Yes | Yes | Yes | Yes | Q9NNX1 |
| SEVQYIQEAR | 21670 | Yes | Yes | Yes | Yes | Yes | Q9NNX1 |

### Example 162. Detection of Low Density Lipoprotein Receptor Expression in Cell Culture

### A. HeLa Cell Transfection

[1828] HeLa cells were plated into 24-well dishes (Corning Life Sciences, Tewksbury, MA) (7.5×10⁴ cells/well) in Eagles Minimal Essential Medium (EMEM, Life Technologies, Grand Island, NY) supplemented with 10% fetal calf serum (FCS, Life Technologies, Grand Island, NY) and 1× glutamax reagent (Life Technologies, Grand Island, NY) cultured overnight under standard cell culture conditions. Transfection solutions were prepared for each well to be treated by combining 250 ng of low density lipoprotein receptor (LDLR) modified mRNA (mRNA sequence shown in SEQ ID NO: 21463; polyA tail of approximately 140 nucleotides not shown in sequence; 5′cap, Cap1) fully modified with 5-methylcytosine and pseudouridine, mCherry modified mRNA (mRNA sequence shown in SEQ ID NO: 21439; polyA tail of approximately 160 nucleotides not shown in sequence; 5′cap, Cap1; fully modified with 5-methylcytosine and pseudouridine) or luciferase modified mRNA (mRNA sequence shown in SEQ ID NO: 21446; polyA tail of approximately 160 nucleotides not shown in sequence; 5′cap, Cap1; fully modified with 5-methylcytosine and pseudouridine) with 50 μl Opti-MEM reagent (Life Technologies, Grand Island, NY) in a first tube and 1 μl of L2000 transfection reagent (Life Technologies, Grand Island, NY) in 50 μl of Opti-MEM in a second tube. After preparation, first and second tubes were incubated at room temperature for 5 minutes before combining the contents of each. Combined transfection solutions were incubated for 15 minutes at room temperature. 100 μl of transfection solution was then added to each well. Cells were cultured for an additional 16 hours before continued analysis.

### B. LDLR Detection by Flow Cytometry

[1829] After transfection, medium were removed from cells and 60 μl of 0.25% trypsin (Life Technologies, Grand Island, NY) was added to each well. Cells were trypsinized for 2 minutes before the addition of 240 μl/well of trypsin inhibitor (Life Technologies, Grand Island, NY). Resulting cell solutions were transferred to 96 well plates (Corning Life Sciences, Tewksbury, MA), cells were pelleted by centrifugation (800 × gravity for 5 minutes) and supernatants were discarded. Cell pellets were washed with PBS and resuspended in Foxp3 Fixation/Permeabilization solution (eBioscience, San Diego, CA) for 45 minutes. Cells were pelleted again by centrifugation (800 × gravity for 5 minutes) and resuspended in permeabilization buffer (eBiosciences, San Diego, CA) for 10 minutes. Cells were pelleted again by centrifugation (800 × gravity for 5 minutes) and washed in permeabilization buffer. Cells were then treated with primary antibodies directed toward LDLR, followed by phycoerythrin-labeled secondary antibodies. Labeled cells were then combined with FACS buffer (PBS with 1% bovine serum albumin and 0.1% sodium azide) and transferred to cluster tubes. As shown in FIG. 47, labeled cells were then analyzed by flow cytometry using a BD Accuri (BD Biosciences, San Jose, CA).

### C. LDLR Detection by Immunofluorescence

[1830] Transfected cells were washed with PBS, and treated with fixation solution (PBS with 4% formaldehyde) for 20 minutes at room temperature. Cells were then washed with PBS and treated with permeabilization/blocking solution (Tris buffered saline with 5% bovine serum albumin with 0.1% Tween-20). Cells were incubated for 2 hours at room temperature with gentle agitation before washing 3 times with PBS containing 0.05% Tween-20. Cells were then treated with or without primary antibodies (goat anti-LDLR, R&D Systems, Minneapolis, MN) or normal IgG controls for 2 hours at room temperature, washed 3 times with PBS containing 0.05% Tween-20 and treated with secondary antibody solutions containing a 1:200 dilution of donkey anti-goat IgG with fluorescent label (R&D Systems, Minneapolis, MN). Cells were again washed with PBS containing 0.05% Tween-20 and examined by fluorescence microscopy imaging. Cells transiently expressing luciferase or mCherry were examined by fluorescence microscopy without fluorescent immunostaining.

### Example 163. Detection of Defensin, Beta 103A by Immunofluorescence

### A. HeLa Cell Transfection

[1831] HeLa cells are plated into 24-well dishes (Corning Life Sciences, Tewksbury, MA) (7.5×10⁴ cells/well) in Eagles Minimal Essential Medium (EMEM, Life Technologies, Grand Island, NY) supplemented with 10% fetal calf serum (FCS, Life Technologies, Grand Island, NY) and 1× glutamax reagent (Life Technologies, Grand Island, NY) cultured overnight under standard cell culture conditions. Transfection solutions are prepared for each well to be treated by combining 250 ng defensin, beta 103A (DEFB103A) modified mRNA (mRNA sequence shown in SEQ ID NO: 1631; polyA tail of approximately 140 nucleotides not shown in sequence; 5′cap, Cap1) or mCherry modified mRNA (mRNA sequence shown in SEQ ID NO: 21439; polyA tail of approximately 160 nucleotides not shown in sequence; 5′cap, Cap1) with 50 μl Opti-MEM reagent (Life Technologies, Grand Island, NY) in a first tube and 1 μl of L2000 transfection reagent (Life Technologies, Grand Island, NY) in 50 μl of Opti-MEM in a second tube. After preparation, first and second tubes are incubated at room temperature for 5 minutes before combining the contents of each. Combined transfection solutions are incubated for 15 minutes at room temperature. 100 μl of transfection solution is then added to each well. Cells are cultured for an additional 16 hours before continued analysis.

### B. DEFB103A Detection by Immunofluorescence

[1832] Transfected cells are washed with PBS, and treated with fixation solution (PBS with 4% formaldehyde) for 20 minutes at room temperature. Cells are then washed with PBS and treated with permeabilization/blocking solution (Tris buffered saline with 5% bovine serum albumin with 0.1% Tween-20). Cells are incubated for 2 hours at room temperature with gentle agitation before washing 3 times with PBS containing 0.05% Tween-20. Cells are then left untreated with primary antibody, treated with anti-DEFB103A primary antibody (Rabbit anti-DEFB103A, Abcam, Cambridge, MA) or treated with normal IgG control antibody for 2 hours at room temperature, washed 3 times with PBS containing 0.05% Tween-20 and treated with secondary antibody solutions containing a 1:200 dilution of donkey anti-rabbit IgG with red fluorescent label (R&D Systems, Minneapolis, MN). Cells are again washed with PBS containing 0.05% Tween-20 and examined by fluorescence microscopy imaging. Cells transfected with modified mRNA encoding mCherry are visualized without immunofluorescent staining.

### Example 164. Confirmation of Protein Expression

[1833] Modified mRNA fully modified with 5-methylcytosine and pseudouridine (5 mC/pU), fully modified with 5-methylcytosine and 1-methylpseudouridine (5 mC/1mpU), modified where 250 of the cytosines replaced with 5-methylcytosine and 25% of the uridines replaced with 2-thiouridine (s2U/5 mC), fully modified with 1-methylpseudouridine (1 mpU) or fully modified with pseudouridine (pU) encoding the proteins described in Table 205 were analyzed by fluorescence and/or western blot in order to confirm the expression of protein and the length of the protein expressed. Table 205 describes the sequence of the modified mRNA (polyA tail of approximately 140 nucleotides not shown in sequence; 5′ cap, Cap 1) or the cDNA (the T7 promoter, 5′untranslated region (UTR) and 3′ UTR used in in vitro transcription (JVT) shown in the sequence) the chemical modification evaluated and the length (in base pairs), if known.

TABLE 205
Protein and Expression

| | Modified | | | | | | | | | | |
|---|---|---|---|---|---|---|---|---|---|---|---|
| | mRNA | | | | | | | | | | |
| Protein | SEQ ID NO | 5mC/pU | | 5mC/1mpU | | s2U/5mC | | pU | | 1mpU | |
| Luciferase | 21446 | Yes | | Yes | | Yes | | Yes | | Yes | |
| Tumor protein 53 | 1670 | Yes | | Yes | | — | | — | | Yes | |
| (P53 or TP53) | | 1468 | bp | 1468 | bp | | | | | 1468 | bp |
| Phenylalanine | 1660 | Yes | | Yes | | Yes | | — | | Yes | |
| hydroxylase | | 1645 | bp | 1645 | bp | 1645 | bp | | | 1645 | bp |
| (PAH) | | | | | | | | | | | |
| Factor VII (F7) | 1623 | Yes | | Yes | | Yes | | — | | Yes | |
| | | 1687 | bp | 1687 | bp | 1687 | bp | | | 1687 | bp |
| Defensin, beta | 1631 | Yes | | Yes | | Yes | | Yes | | Yes | |
| 103A | | 490 | bp | 490 | bp | 490 | bp | 490 | bp | 490 | bp |
| (DEFB103A) | | | | | | | | | | | |
| 6-pyruvoyltetra- | 1609 | Yes | | Yes | | Yes | | Yes | | Yes | |
| hydropterin | | 724 | bp | 724 | bp | 724 | bp | 724 | bp | 724 | bp |
| synthase | | | | | | | | | | | |
| (PTS) | | | | | | | | | | | |
| Serpina 1 | 21522 | Yes | | Yes | | — | | — | | Yes | |
| | | 1543 | bp | 1543 | bp | | | | | 1543 | bp |
| Sphingomyelin | 21523 | Yes | | Yes | | — | | — | | Yes | |
| phosphodiesterase | | 2176 | bp | 2176 | bp | | | | | 2176 | bp |
| 1, acid lysosomal | | | | | | | | | | | |
| (SMPD1) | | | | | | | | | | | |
| Herceptin Light | 21452 | Yes | | Yes | | Yes | | Yes | | Yes | |
| Chain | | 1042 | bp | 1042 | bp | 1042 | bp | 1042 | bp | 1042 | bp |
| Herceptin Heavy | 21451 | Yes | | Yes | | Yes | | Yes | | Yes | |
| Chain | | 1753 | bp | 1753 | bp | 1753 | bp | 1753 | bp | 1753 | bp |
| Glial cell derived | 21671 | Yes | | Yes | | Yes | | — | | Yes | |
| neurotrophic | | 922 | bp | 922 | bp | 922 | bp | | | 922 | bp |
| factor (GDNF) | | | | | | | | | | | |
| Rhodopsin (RHO) | 21672 | Yes | | Yes | | — | | — | | Yes | |
| | | 985 | bp | 985 | bp | | | | | 985 | bp |
| Tissue | 1661 | Yes | | Yes | | Yes | | — | | Yes | |
| Plasminogen | | 1975 | bp | 1975 | bp | 1975 | bp | | | 1975 | bp |
| Activator (PLAT) | | | | | | | | | | | |
| Argininosuccinate | 21529 | Yes | | Yes | | — | | — | | Yes | |
| synthase 1 | | 1525 | bp | 1525 | bp | | | | | 1525 | bp |
| (ASS1) | | | | | | | | | | | |
| UDP | 21464 | Yes | | Yes | | — | | — | | Yes | |
| glucuronosyltrans- | | 1888 | bp | 1888 | bp | | | | | 1888 | bp |
| ferase 1 family, | | | | | | | | | | | |
| polypeptide A1 | | | | | | | | | | | |
| (UGT1A1) | | | | | | | | | | | |
| Sirtuin 6 (SIRT6) | 1665 | Yes | | Yes | | Yes | | — | | Yes | |
| | | 1354 | bp | 1354 | bp | 1354 | bp | | | 1354 | bp |
| Thrombopoietin | 1667 | Yes | | Yes | | Yes | | — | | Yes | |
| (THPO) | | 3088 | bp | 3088 | bp | 3088 | bp | | | 3088 | bp |
| Hypoxanthine | 21524 | Yes | | Yes | | — | | — | | Yes | |
| phosphoribosyltrans- | | 943 | bp | 943 | bp | | | | | 943 | bp |
| ferase 1 | | | | | | | | | | | |
| (HPRT1) | | | | | | | | | | | |
| Thrombomodulin | 21673 | Yes | | Yes | | — | | — | | Yes | |
| (THBD) | | 2014 | bp | 2014 | bp | | | | | 2014 | bp |
| Factor XII (F12) | 21674 | Yes | | Yes | | Yes | | — | | Yes | |
| | | 2134 | bp | 2134 | bp | 2134 | bp | | | 2134 | bp |
| Relaxin 2 (RLN2) | 21675 | Yes | | Yes | | Yes | | Yes | | Yes | |
| | | 844 | bp | 844 | bp | 844 | bp | 844 | bp | 844 | bp |
| Vasoactive | 21532 | Yes | | Yes | | Yes | | Yes | | Yes | |
| Intestinal Peptide | | 799 | bp | 799 | bp | 799 | bp | 799 | bp | 799 | bp |
| (VIP) | | | | | | | | | | | |
| Lecithin- | 21527 | Yes | | Yes | | Yes | | — | | Yes | |
| cholesterol | | 1609 | bp | 1609 | bp | 1609 | bp | | | 1609 | bp |
| acyltransferase | | | | | | | | | | | |
| (LCAT) | | | | | | | | | | | |
| Fibroblast growth | 21676 | Yes | | Yes | | Yes | | — | | Yes | |
| factor 21 | | 916 | bp | 916 | bp | 916 | bp | | | 916 | bp |
| OMOMYC | 21677 | Yes | | Yes | | — | | — | | Yes | |
| | | 1623 | bp | 1623 | bp | | | | | 1623 | bp |
| Apoptosis- | 21528 | Yes | | Yes | | — | | — | | Yes | |
| inducing factor | | 1089 | bp | 1089 | bp | | | | | 1089 | bp |
| pro-apoptotic | | | | | | | | | | | |
| isoform (AIFsh) | | | | | | | | | | | |
| Erythropoietin | 1638 | Yes | | — | | — | | — | | — | |
| (EPO) | | 868 | bp | | | | | | | | |
| Human Growth | 1648 | Yes | | Yes | | Yes | | Yes | | Yes | |
| Hormone (hGH) | | 940 | bp | 940 | bp | 940 | bp | 940 | bp | 940 | bp |
| Glactosidase, | 1640 | — | | Yes | | Yes | | Yes | | — | |
| alpha (GLA) | | | | 1576 | bp | 1576 | bp | 1576 | bp | | |
| Arylsulfatase B | 1618 | — | | Yes | | Yes | | Yes | | — | |
| | | | | 1888 | bp | 1888 | bp | 1888 | bp | | |
| Iduronidase, | 1652 | — | | Yes | | Yes | | Yes | | — | |
| alpha-L- (IDUA) | | | | 2248 | bp | 2248 | bp | 2248 | bp | | |
| interferon, beta 1, | 1655 | Yes | | — | | — | | — | | — | |
| fibroblast (IFNB) | | 850 | bp | | | | | | | | |
| CTLA4-Ig | 21521 | — | | Yes | | Yes | | Yes | | — | |
| | | | | 958 | bp | 958 | bp | 958 | bp | | |
| Interferon alpha 2 | 1654 | Yes | | — | | — | | — | | — | |
| (IFNA2) | | 853 | bp | | | | | | | | |
| Factor IX (F9) | 1622 | Yes | | Yes | | Yes | | — | | Yes | |
| | | 1672 | bp | 1672 | bp | 1672 | bp | | | 1672 | bp |
| APOA1 Milano | 21455 | Yes | | Yes | | Yes | | Yes | | Yes | |
| | | 1090 | bp | 1090 | bp | 1090 | bp | 1090 | bp | 1090 | bp |
| Factor XI (F11) | 1625 | Yes | | Yes | | Yes | | — | | Yes | |
| | | 2164 | bp | 2164 | bp | 2164 | bp | | | 2164 | bp |
| CAP18 | 21638 | Yes | | — | | — | | — | | — | |
| | | 796 | bp | | | | | | | | |
| Aquaporin 5 | 1617 | Yes | | Yes | | Yes | | Yes | | Yes | |
| | | 1084 | bp | 1084 | bp | 1084 | bp | 1084 | bp | 1084 | bp |
| APOA1 Paris | 21454 | Yes | | Yes | | Yes | | Yes | | Yes | |
| | | 1090 | bp | 1090 | bp | 1090 | bp | 1090 | bp | 1090 | bp |
| APOA1 | 21453 | Yes | | Yes | | Yes | | Yes | | Yes | |
| | | 1090 | bp | 1090 | bp | 1090 | bp | 1090 | bp | 1090 | bp |
| follicle | 21640 | Yes | | — | | — | | — | | — | |
| stimulating | | 673 | bp | | | | | | | | |
| hormone beta | | | | | | | | | | | |
| (FSH beta) | | | | | | | | | | | |
| Prothrombin | 21462 | Yes | | Yes | | Yes | | Yes | | Yes | |
| | | 2155 | bp | 2155 | bp | 2155 | bp | 2155 | bp | 2155 | bp |
| Tissue Factor | 21466 | Yes | | Yes | | Yes | | Yes | | Yes | |
| (Factor 3) | | 1174 | bp | 1174 | bp | 1174 | bp | 1174 | bp | 1174 | bp |
| galactokinase 1 | 21470 | — | | Yes | | — | | Yes | | Yes | |
| (GALK1) | | | | 1465 | bp | | | 1465 | bp | 1465 | bp |
| 4- | 21525 | — | | — | | Yes | | Yes | | Yes | |
| hydroxyphenylpyruvate | | | | | | 1468 | bp | 1468 | bp | 1468 | bp |
| dioxigenase | | | | | | | | | | | |
| (HPD) | | | | | | | | | | | |
| bone | 21526 | — | | Yes | | Yes | | Yes | | — | |
| morphogenic | | | | 1582 | bp | 1582 | bp | 1582 | bp | | |
| protein-7 (BMP7) | | | | | | | | | | | |
| KIT ligand/stem | 21530 | — | | Yes | | Yes | | Yes | | — | |
| cell factor | | | | 1108 | bp | 1108 | bp | 1108 | bp | | |
| (KITLG) | | | | | | | | | | | |
| Insulin Glulisine | 21469 | Yes | | Yes | | Yes | | Yes | | Yes | |
| | | 619 | bp | 619 | bp | 619 | bp | 619 | bp | 619 | bp |
| Insulin Lispro | 21468 | Yes | | Yes | | Yes | | Yes | | Yes | |
| | | 619 | bp | 619 | bp | 619 | bp | 619 | bp | 619 | bp |
| Insulin Aspart | 21467 | Yes | | Yes | | Yes | | Yes | | Yes | |
| | | 619 | bp | 619 | bp | 619 | bp | 619 | bp | 619 | bp |
| Insulin Glargine | 21465 | Yes | | Yes | | Yes | | Yes | | Yes | |
| | | 619 | bp | 619 | bp | 619 | bp | 619 | bp | 619 | bp |

| LL-37 | 1621 | Yes | | — | | — | | — | — | |
|---|---|---|---|---|---|---|---|---|---|---|
| | | 796 | bp | | | | | | | |
| Methylmalonyl- | 1658 | Yes | | — | | — | | — | — | |
| CoA mutase, | | 2539 | bp | | | | | | | |
| mitochondrial | | | | | | | | | | |
| (MUTA) | | | | | | | | | | |
| Ceruloplasmin | 1620 | Yes | | — | | — | | — | — | |
| (CP) | | 3481 | bp | | | | | | | |
| | cDNA | | | | | | | | | |
| Protein | SEQ ID NO | 5mC/pU | | 5mC/1mpU | | s2U/5mC | | pU | 1mpU | |
| Irisin | 21532 | Yes | | Yes | | Yes | | — | Yes | |
| | | 925 | bp | 925 | bp | 925 | bp | | 925 | bp |

### Example 165. Vascular Endothelial Growth Factor Expression and Cell Vitality

[1834] The day before transfection, 100,000 HeLa cells (ATCC no. CCL-2; Manassas, VA) were harvested by treatment with Trypsin-EDTA solution (LifeTechnologies, Grand Island, NY) and seeded in a total volume of 100 ul EMEM medium (supplemented with 10% FCS and 1× Glutamax) per well in a 24-well cell culture plate (Corning, Manassas, VA). The cells were grown at 37° C. in 5% CO₂ atmosphere overnight. The next day, 62 ng, 250 ng, 750 ng or 1500 ng of vascular endothelial growth factor (VEGF) modified RNA (mRNA sequence shown in SEQ ID NO: 1672; polyA tail of approximately 160 nucleotides not shown in sequence; 5′cap, Cap1) fully modified with 5-methylcytosine and pseudouridine (5 mC/pU), fully modified with 5-methylcytosine and 1-methylpseudouridine (5 mC/1mpU), fully modified with 1-methylpseudouridine (1mpU) or containing no modifications (unmodified) was mixed with 2 ul Lipofectamine 2000 (LifeTechnologies, Grand Island, NY) as transfection aid and added to the cells in duplicate.

### A. Vascular Endothelial Growth Factor Protein Expression

[1835] After an incubation of 24 hours cell culture supernatants of cells expressing VEGF were collected and centrifuged at 10.000 rcf for 2 minutes. The cleared supernatants were then analyzed with a VEGF-specific ELISA kit (R & D Systems, Minneapolis, MN) according to the manufacturer instructions. All samples were diluted until the determined values were within the linear range of the ELISA standard curve. A control of untreated cells, cells treated in duplicate with 62 ng or 750 ng of green fluorescent protein (GFP) modified mRNA (mRNA sequence shown in SEQ ID NO: 1672; polyA tail of approximately 160 nucleotides not shown in sequence; 5′cap, Cap1) fully modified with 5-methylcytosine and pseudouridine (5 mC/pU), fully modified with 5-methylcytosine and 1-methylpseudouridine (5 mC/1mpU), fully modified with 1-methylpseudouridine (1mpU) or containing no modifications (unmodified) and a control of 250 ng of mCherry modified mRNA (mRNA sequence shown in SEQ ID NO: 21439; polyA tail of approximately 160 nucleotides not shown in sequence; 5′cap, Cap1) was also analyzed. The amount of VEGF produced in pg/ml is shown in Table 206 and in FIG. 48. In FIG. 48, “eGFP” refers to the green fluorescent protein modified mRNA, “MC” refers to the mCherry modified mRNA, “UNT-1” refers to the untreated cells, “G0” means the modified mRNA contains no modifications, “G1” means fully modified with 5-methylcytosine and pseudouridine, “G1” means fully modified with 5-methylcytosine and 1-methyl pseudouridine and “G5” means fully modified with 1-methylpseudouridine.

[1836] Cells transfected with VEGF modified mRNA fully modified with 5-methylcytosine and 1-methylpseduoruidine or fully modified with 1-methylpseudouridine showed the highest expression of VEGF.

TABLE 206
VEGF Protein Production (pg/ml)

| | | 5mC/pU | 5mC/1 mpU | 1mpU | Unmodified |
|---|---|---|---|---|---|
| VEGF | 62 ng | 220500 | 327409 | 325500 | 156545 |
| | 250 ng | 322636 | 283500 | 168955 | 45818 |
| | 750 ng | 1264773 | 2486591 | 3085091 | 107864 |
| | 1500 ng | 2231727 | 3874500 | 3465955 | 238636 |
| GFP | 62 ng | NA | 0 | 3818 | 955 |
| | 750 ng | NA | 11455 | 1909 | 6682 |

| | |
|---|---|
| Untreated | 4773 |
| mCherry | 0 |

### B. Vascular Endothelial Growth Factor

[1837] After an incubation of 24 hours the medium was removed and cells lysed with 200 ul per well of the Cell Titer Glo (CTG) assay reagent (Promega Corporation, Madison, WI). After 15 minutes of incubation at room temperature, two sets of 10 ul of each lysate were transferred into white opaque polystyrene 96-well plates (Corning, Tewksbury, MA). Again 100 ul of Cell Titer Glo assay reagent was added to each aliquot of cell lysate. The total volume of 110 ul reagent mix was analyzed on a BioTek Synergy H1 plate reader with a general luminescence program. The mean of duplicate measures were plotted in a graph with untreated HeLa cells as reference (1.0=100% vitality). A control of untreated cells in duplicate and cells treated with 250 ng of mCherry modified mRNA (mRNA sequence shown in SEQ ID NO: 1672; polyA tail of approximately 160 nucleotides not shown in sequence; 5′cap, Cap1) was also evaluated. The normalized ATP abundance/cell viability is shown in Table 207 and FIG. 49. In FIG. 49, “MC” refers to the mCherry modified mRNA, “UNT-1” and “UNT-2” refers to the untreated cells, “G0” means the modified mRNA contains no modifications, “G1” means fully modified with 5-methylcytosine and pseudouridine, “G1” means fully modified with 5-methylcytosine and 1-methyl pseudouridine, “G5” means fully modified with 1-methylpseudouridine and “*” means only one data point was obtained.

[1838] Decreased luminescence activity, which is indicative of loss of cell vitality, was seen in cells transfected with VEGF modified mRNA fully modified with 5-methylcytosine and pseudouridine or unmodified. There was no decrease in cell vitality for cells transfected with VEGF modified mRNA fully modified with 5-methylcyotosine and 1-methylpsuedouridine or fully modified with 1-methylpseudouridine.

TABLE 207
Normalized ATP abundance/Cell Vitality

| | 5mC/pU | 5mC/1 mpU | 1mpU | Unmodified |
|---|---|---|---|---|
| 62 ng | 1.12 | 1.19 | 1.20 | 1.59 |
| 250 ng | 0.80 | 1.11 | 1.14 | 0.86 |
| 750 ng | 0.64 | 1.01 | 1.04 | 0.38 |
| 1500 ng | 0.48 | 0.99 | 0.98 | 0.48 |

| | |
|---|---|
| Untreated | 0.94 |
| mCherry | 1.04 |

### Example 166. Protein Production of Erythropoietin in HeLa Cell Supernatant

[1839] The day before transfection, 100,000 HeLa cells (ATCC no. CCL-2; Manassas, VA) were harvested by treatment with Trypsin-EDTA solution (LifeTechnologies, Grand Island, NY) and seeded in a total volume of 100 ul EMEM medium (supplemented with 10% FCS and 1× Glutamax) per well in a 96-well cell culture plate (Corning, Manassas, VA). The cells were grown at 37° C. in 5% CO₂ atmosphere overnight. Next day, 250 ng of erythropoietin (EPO) modified RNA (mRNA sequence shown in SEQ ID NO: 1638; polyA tail of approximately 160 nucleotides not shown in sequence; 5′cap, Cap1) fully modified with 5-methylcytosine and pseudouridine (5 mC/pU), fully modified with 5-methylcytosine and 1-methylpseudouridine (5 mC/1mpU), modified where 25% of uridine modified with 2-thiouridine and 25% of cytosine modified with 5-methylcytosine (s2U and 5 mC), fully modified with pseudouridine (pU), or fully modified with 1-methylpseudouridine (1mpU), was diluted in 10 ul final volume of OPTI-MEM (LifeTechnologies, Grand Island, NY). Lipofectamine 2000 (LifeTechnologies, Grand Island, NY) was used as transfection reagent and 0.2 ul of lipofectamine 2000 was diluted to 10 ul final volume of OPTI-MEM. After 5 minutes of incubation at room temperature, both solutions were combined and incubated an additional 15 minute at room temperature. Then the 20 ul combined solution was added to the 100 ul cell culture medium containing the HeLa cells and incubated at room temperature. A control of lipofecatmine 2000 treated cells (L2000) and untreated cells was also analyzed.

[1840] After an 18 to 22 hour incubation cell culture supernatants of cells expressing EPO was collected and centrifuged at 10.000 rcf for 2 minutes. The cleared supernatants were then analyzed with an EPO ELISA kit (Stem Cell Technologies, Vancouver Canada) according to the manufacturer instructions. All samples were diluted until the determined values were within the linear range of the ELISA standard curve. The amount of protein produced is shown in Table 208.

TABLE 208
Protein Production

| Sample | EPO (pg/ml) |
|---|---|
| 5-methylcytosine and pseudouridine (5mC and pU) | 17,900 |
| 5-methylcytosine and 1-methylpsudouridine (5mC and | 81,146 |
| 1mpU) | |
| 25% of uridine modified with 2-thiouridine and 25% of | 224,195 |
| cytosine modified with 5-methylcytosine (s2U and 5mC) | |
| Pseudouridine (pU) | 226,283 |
| 1-methylpseudouridine (1mpU) | 522,375 |
| L2000 | 597 |
| Untreated | 0 |

### Example 167. In Vitro Expression of Insulin Aspart Modified mRNA

[1841] The cells were transfected with Insulin Aspart modified mRNA (mRNA sequence shown in SEQ ID NO: 21468; polyA tail of approximately 160 nucleotides not shown in sequence; 5′cap, Cap1) fully modified with 5-methylcytosine and pseudouridine (5 mC/pU), fully modified with 5-methylcytosine and 1-methylpseudouridine (5 mC/1mpU), modified where 25% of uridine modified with 2-thiouridine and 25% of cytosine modified with 5-methylcytosine (s2U and 5 mC), fully modified with pseudouridine (pU), or fully modified with 1-methylpseudouridine (1mpU) which had been complexed with Lipofectamine2000 from Invitrogen (Carlsbad, CA) at the concentration shown in Table 209. The total volume of transfection mix per 96-well was 50 μl, split in two aliquots 25 μl each. One 25 μl aliquot contained 1 μl of respective mmRNA and 24 μl Opti-MEM, the other 25 μl aliquot contained 0.4 μl Lipofectamine2000 and 24.6 μl Opti-MEM. Where needed, the aliquot containing modified mRNA and Opti-MEM was serially diluted in Opti-MEM. Both aliquots were incubated separately for 15 min at room temperature. Subsequently, both aliquots were mixed together and incubated for another 20 min at room temperature before finally transferring the total 50 μl transfection mix to a 96-well containing 100p cell culture medium plus 35000 HEK293 cells. Cells were then incubated for 24 h in a humidified 37° C./5% CO₂ cell culture incubator before harvesting the cell culture supernatant or preparing cell lysate. The protein expression was detected by ELISA and the protein (pg/ml) is shown in FIG. 50 and in Table 209. In Table 209, “>” means greater than.

TABLE 209
Protein Expression

| | Amount Transfected | | | | | | | |
|---|---|---|---|---|---|---|---|---|
| | 2 | 400 | 80 | 16 | 3.2 | 640 | 128 | 26 |
| | ug | ng | ng | ng | ng | pg | pg | pg |
| Protein | >100 | >100 | >100 | 103.0 | 11.4 | 1.3 | 0 | 0 |
| (mU/I) | | | | | | | | |

### Example 168. In Vitro Expression of Insulin Glargine Modified mRNA

[1842] The cells were transfected with Insulin Glargine modified mRNA (mRNA sequence shown in SEQ ID NO: 21465; polyA tail of approximately 160 nucleotides not shown in sequence; 5′cap, Cap1) fully modified with 5-methylcytosine and pseudouridine (5 mC/pU), fully modified with 5-methylcytosine and 1-methylpseudouridine (5 mC/1mpU), modified where 25% of uridine modified with 2-thiouridine and 25% of cytosine modified with 5-methylcytosine (s2U and 5 mC), fully modified with pseudouridine (pU), or fully modified with 1-methylpseudouridine (1mpU) which had been complexed with Lipofectamine2000 from Invitrogen (Carlsbad, CA) at the concentration shown in Table 210. The total volume of transfection mix per 96-well was 50 μl, split in two aliquots 25 μl each. One 25 μl aliquot contained 1 μl of respective mmRNA and 24 μl Opti-MEM, the other 25 μl aliquot contained 0.4 μl Lipofectamine2000 and 24.6 μl Opti-MEM. Where needed, the aliquot containing modified mRNA and Opti-MEM was serially diluted in Opti-MEM. Both aliquots were incubated separately for 15 min at room temperature. Subsequently, both aliquots were mixed together and incubated for another 20 min at room temperature before finally transferring the total 50 p transfection mix to a 96-well containing 100p cell culture medium plus 35000 HEK293 cells. Cells were then incubated for 24 h in a humidified 37° C./5% CO₂ cell culture incubator before harvesting the cell culture supernatant or preparing cell lysate. The protein expression was detected by ELISA and the protein (pg/ml) is shown in FIG. 51 and in Table 210.

TABLE 210
Protein Expression

| | Amount Transfected | | | | | | | |
|---|---|---|---|---|---|---|---|---|
| | 2 | 400 | 80 | 16 | 3.2 | 640 | 128 | 26 |
| | ug | ng | ng | ng | ng | pg | pg | pg |
| Protein | 16.7 | 21.8 | 16.4 | 4.7 | 0 | 0 | 0 | 0 |
| (mU/I) | | | | | | | | |

### Example 169. In Vitro Expression of Insulin Glulisine Modified mRNA

[1843] The cells were transfected with Insulin Glulisine modified mRNA (mRNA sequence shown in SEQ ID NO: 21469; polyA tail of approximately 160 nucleotides not shown in sequence; 5′cap, Cap) fully modified with 5-methylcytosine and pseudouridine (5 mC/pU), fully modified with 5-methylcytosine and 1-methylpseudouridine (5 mC/1mpU), modified where 25% of uridine modified with 2-thiouridine and 25% of cytosine modified with 5-methylcytosine (s2U and 5 mC), fully modified with pseudouridine (pU), or fully modified with 1-methylpseudouridine (1mpU) which had been complexed with Lipofectamine2000 from Invitrogen (Carlsbad, CA) at the concentration shown in Table 211. The total volume of transfection mix per 96-well was 50 μl, split in two aliquots 25 μl each. One 25 μl aliquot contained 1l of respective mmRNA and 24 μl Opti-MEM, the other 25 μl aliquot contained 0.4 μl Lipofectamine2000 and 24.6 μl Opti-MEM. Where needed, the aliquot containing modified mRNA and Opti-MEM was serially diluted in Opti-MEM. Both aliquots were incubated separately for 15 min at room temperature. Subsequently, both aliquots were mixed together and incubated for another 20 min at room temperature before finally transferring the total 50 μl transfection mix to a 96-well containing 100p cell culture medium plus 35000 HEK293 cells. Cells were then incubated for 24 h in a humidified 37° C./5% CO₂ cell culture incubator before harvesting the cell culture supernatant or preparing cell lysate. The protein expression was detected by ELISA and the protein (pg/ml) is shown in FIG. 52 and in Table 211. In Table 211, “>” means greater than.

TABLE 211
Protein Expression

| | Amount Transfected | | | | | | | |
|---|---|---|---|---|---|---|---|---|
| | 2 | 400 | 80 | 16 | 3.2 | 640 | 128 | 26 |
| | ug | ng | ng | ng | ng | pg | pg | pg |
| Protein | >100 | >100 | >100 | 95.9 | 13.1 | 0 | 0 | 0 |
| (mU/I) | | | | | | | | |

### Example 170. Dose Response and Injection Site Selection and Timing

[1844] To determine the dose response trends, impact of injection site and impact of injection timing, studies are performed following the protocol outlined in Example 35. In these studies, varied doses of 1 ug, 5 ug, 10 ug, 25 ug, 50 ug, and values in between are used to determine dose response outcomes. Split dosing for a 100 ug total dose includes three or six doses of 1.6 ug, 4.2 ug, 8.3 ug, 16.6 ug, or values and total doses equal to administration of the total dose selected.

[1845] Injection sites are chosen from the limbs or any body surface presenting enough area suitable for injection. This may also include a selection of injection depth to target the dermis (Intradermal), epidermis (Epidermal), subcutaneous tissue (SC) or muscle (IM). Injection angle will vary based on targeted delivery site with injections targeting the intradermal site to be 10-15 degree angles from the plane of the surface of the skin, between 20-45 degrees from the plane of the surface of the skin for subcutaneous injections and angles of between 60-90 degreees for injections substantially into the muscle.

### Example 171. Protein Production of Transforming Growth Factor Beta 1 in HeLa Cell Supernatant

[1846] The day before transfection, 100,000 HeLa cells (ATCC no. CCL-2; Manassas, VA) were harvested by treatment with Trypsin-EDTA solution (LifeTechnologies, Grand Island, NY) and seeded in a total volume of 100 ul EMEM medium (supplemented with 10% FCS and 1× Glutamax) per well in a 96-well cell culture plate (Corning, Manassas, VA). The cells were grown at 37° C. in 5% CO₂ atmosphere overnight. Next day, 250 ng of transforming growth factor beta 1 (TGFB1) modified RNA (mRNA sequence shown in SEQ ID NO: 1668; polyA tail of approximately 140 nucleotides not shown in sequence; 5′cap, Cap1) fully modified with 5-methylcytosine and pseudouridine (5 mC/pU), fully modified with 5-methylcytosine and 1-methylpseudouridine (5 mC/1mpU), modified where 25% of uridine modified with 2-thiouridine and 25% of cytosine modified with 5-methylcytosine (s2U and 5 mC), fully modified with pseudouridine (pU), or fully modified with 1-methylpseudouridine (1mpU), was diluted in 10 ul final volume of OPTI-MEM (LifeTechnologies, Grand Island, NY). Lipofectamine 2000 (LifeTechnologies, Grand Island, NY) was used as transfection reagent and 0.2 ul of lipofectamine 2000 was diluted to 10 ul final volume of OPTI-MEM. After 5 minutes of incubation at room temperature, both solutions were combined and incubated an additional 15 minute at room temperature. Then the 20 ul combined solution was added to the 100 ul cell culture medium containing the HeLa cells and incubated at room temperature. A control of lipofecatmine 2000 treated cells (L2000) and untreated cells was also analyzed.

[1847] After an 18 to 22 hour incubation cell culture supernatants of cells expressing TGFB1 was collected and centrifuged at 10.000 rcf for 2 minutes. The cleared supernatants were then analyzed with an TGFB1 ELISA kit (R & D Systems, Minneapolis, MN) according to the manufacturer instructions. All samples were diluted until the determined values were within the linear range of the ELISA standard curve. The amount of protein produced is shown in Table 212.

TABLE 212
Protein Production

| | |
|---|---|
| | TGFB1 |
| Sample | (pg/ml) |

| | |
|---|---|
| 5-methylcytosine and pseudouridine (5mC and pU) | 704 |
| 5-methylcytosine and 1-methylpsudouridine (5mC and | 1800 |
| 1mpU) | |
| 25% of uridine modified with 2-thiouridine and 25% of | 57 |
| cytosine modified with 5-methylcytosine (s2U and 5mC) | |
| Pseudouridine (pU) | 743 |
| 1-methylpseudouridine (1mpU) | 2279 |
| L2000 | 4 |
| Untreated | 0 |

### Example 172. Protein Production of Transforming Growth Factor Beta 1 in HeLa Cell Supernatant

[1848] The day before transfection, 100,000 HeLa cells (ATCC no. CCL-2; Manassas, VA) were harvested by treatment with Trypsin-EDTA solution (LifeTechnologies, Grand Island, NY) and seeded in a total volume of 100 ul EMEM medium (supplemented with 10% FCS and 1× Glutamax) per well in a 96-well cell culture plate (Corning, Manassas, VA). The cells were grown at 37° C. in 5% CO₂ atmosphere overnight. Next day, 250 ng of transforming growth factor beta 1 (TGFB1) modified RNA (mRNA sequence shown in SEQ ID NO: 1668; polyA tail of approximately 140 nucleotides not shown in sequence; 5′cap, Cap1) fully modified with 5-methylcytosine and pseudouridine (5 mC/pU), fully modified with 5-methylcytosine and 1-methylpseudouridine (5 mC/1mpU), modified where 25% of uridine modified with 2-thiouridine and 25% of cytosine modified with 5-methylcytosine (s2U and 5 mC), fully modified with pseudouridine (pU), or fully modified with 1-methylpseudouridine (1mpU), was diluted in 10 ul final volume of OPTI-MEM (LifeTechnologies, Grand Island, NY). Lipofectamine 2000 (LifeTechnologies, Grand Island, NY) was used as transfection reagent and 0.2 ul of lipofectamine 2000 was diluted to 10 ul final volume of OPTI-MEM. After 5 minutes of incubation at room temperature, both solutions were combined and incubated an additional 15 minute at room temperature. Then the 20 ul combined solution was added to the 100 ul cell culture medium containing the HeLa cells and incubated at room temperature. A control of lipofecatmine 2000 treated cells (L2000) and untreated cells was also analyzed.

[1849] After an 18 to 22 hour incubation cell culture lysates of cells expressing TGFB1 was collected and centrifuged at 10.000 rcf for 2 minutes. The cell lysates (7 ug per ELISA) were then analyzed with an TGFB1 ELISA kit (R & D Systems, Minneapolis, MN) according to the manufacturer instructions. All samples were diluted until the determined values were within the linear range of the ELISA standard curve. The amount of protein produced is shown in Table 213.

TABLE 213
Protein Production

| | TGFB1 |
|---|---|
| Sample | (pg/ml) |
| 5-methylcytosine and pseudouridine (5mC and pU) | 6214 |
| 5-methylcytosine and 1-methylpsudouridine (5mC and 1mpU) | 9257 |
| 25% of uridine modified with 2-thiouridine and 25% of | 5929 |
| cytosine modified with 5-methylcytosine (s2U and 5mC) | |
| Pseudouridine (pU) | 5157 |
| 1-methylpseudouridine (1mpU) | 10857 |
| L2000 | 0 |
| Untreated | 1043 |

### Example 173. Confirmation of Peptide Identity from Modified mRNA

[1850] Cell lysates containing protein produced from angiotensin-coverting enzyme 2 (ACE2) modified mRNA (mRNA sequence shown in SEQ ID NO: 21678; polyA tail of approximately 140 nucleotides not shown in sequence; 5′cap, Cap1), activity-dependent neuroprotector (ADNP) modified mRNA (mRNA sequence shown in SEQ ID NO: 21679; polyA tail of approximately 140 nucleotides not shown in sequence; 5′cap, Cap1), Septin-4 (ARTS) modified mRNA (mRNA sequence shown in SEQ ID NO: 21680; polyA tail of approximately 140 nucleotides not shown in sequence; 5′cap, Cap1), bone morphogenetic protein 2 (BMP2) modified mRNA (mRNA sequence shown in SEQ ID NO: 21681; polyA tail of approximately 140 nucleotides not shown in sequence; 5′cap, Cap1), ceruloplasmin (CP) modified mRNA (mRNA sequence shown in SEQ ID NO: 1620; polyA tail of approximately 160 nucleotides not shown in sequence; 5′cap, Cap1), COMM domain-containing protein 1 (COMMD1) modified mRNA (mRNA sequence shown in SEQ ID NO: 21682; polyA tail of approximately 160 nucleotides not shown in sequence; 5′cap, Cap1), diablo, IAP-binding mitochondrial protein (DIABLO or SMAC) modified mRNA (mRNA sequence shown in SEQ ID NO: 21683; polyA tail of approximately 160 nucleotides not shown in sequence; 5′cap, Cap1), coagulation factor XIII alpha (F13A1) modified mRNA (mRNA sequence shown in SEQ ID NO: 21684; polyA tail of approximately 160 nucleotides not shown in sequence; 5′cap, Cap1), Hepcidin (HEPC) modified mRNA (mRNA sequence shown in SEQ ID NO: 21471; polyA tail of approximately 160 nucleotides not shown in sequence; 5′cap, Cap1), IgM Heavy Chain modified mRNA (mRNA sequence shown in SEQ ID NO: 21685; polyA tail of approximately 160 nucleotides not shown in sequence; 5′cap, Cap1), Interleukin-21 (IL21) modified mRNA (mRNA sequence shown in SEQ ID NO: 21686; polyA tail of approximately 160 nucleotides not shown in sequence; 5′cap, Cap1), N-acetylglutamate synthase (NAGS) modified mRNA (mRNA sequence shown in SEQ ID NO: 21687; polyA tail of approximately 160 nucleotides not shown in sequence; 5′cap, Cap1) or E3ubiquitin-protein ligase (XIAP) modified mRNA (mRNA sequence shown in SEQ ID NO: 21688; polyA tail of approximately 160 nucleotides not shown in sequence; 5′cap, Cap1), fully modified with 5-methylcytosine and pseudouridine (5 mC and pU), fully modified with 5-methylcytosine and 1-methylpsudouridine (5 mC and 1mpU), modified where 25% of uridine modified with 2-thiouridine and 25% of cytosine modified with 5-methylcytosine (s2U and 5 mC), fully modified with pseudouridine (pU), or fully modified with 1-methylpseudouridine (1mpU) were evaluated using the LC-MS/MS with quantitative LC-MRM as described in Example 157. Peptide fragments identified for the evaluated proteins are shown in Table 214

TABLE 214
Protein and Peptide Fragment Sequences

| | | | | | |
|---|---|---|---|---|---|
| Peptide | | | | | |
| Fragment | 5mC | 5mC | s2U | | |
| SEQ ID | and | and | and | | |
| NO | pU | 1mpU | 5mC | pU | 1mpU |

ACE2

| | | | | | | |
|---|---|---|---|---|---|---|
| ISFNFFVTAPK | 21689 | — | Yes | — | Yes | Yes |
| LWAWESWR | 21690 | — | Yes | Yes | Yes | Yes |
| SEPWTLALENVVG | 21691 | — | Yes | Yes | Yes | Yes |
| AK | | | | | | |

ADNP

| | | | | | | |
|---|---|---|---|---|---|---|
| NVHSEDFENR | 21692 | — | — | — | — | Yes |

ARTS

| | | | | | | |
|---|---|---|---|---|---|---|
| ESGTDFPIPAVPPGT | 21693 | Yes | Yes | Yes | Yes | Yes |
| DPETEK | | | | | | |
| FLEDTTDDGELSK | 21694 | Yes | Yes | Yes | Yes | Yes |
| HAVDIEEK | 21695 | Yes | Yes | Yes | Yes | Yes |

BMP2

| | | | | | | |
|---|---|---|---|---|---|---|
| NYQDMVVEGCGCR | 21696 | — | Yes | Yes | Yes | Yes |
| SFHHEESLEELPETS | 21697 | — | Yes | Yes | Yes | Yes |
| GK | | | | | | |
| WESFDVTPAVMR | 21698 | Yes | Yes | Yes | Yes | Yes |

CP

| | |
|---|---|
| ALYLQYTDETFR | 21699 |
| DIASGLIGPLIICK | 21700 |
| GAYPLSIEPIGVR | 21701 |

COMMD1

| | | | | | | |
|---|---|---|---|---|---|---|
| ESLMNQSR | 21702 | Yes | Yes | Yes | Yes | Yes |
| HSAQIHTPVAIIELE | 21703 | — | — | Yes | Yes | Yes |
| LGK | | | | | | |
| WNSGLR | 21704 | — | Yes | Yes | Yes | Yes |

DIABLO

| | | | | | | |
|---|---|---|---|---|---|---|
| AVYTLTSLYR | 21705 | Yes | Yes | Yes | Yes | Yes |
| LAEAQIEELR | 21706 | Yes | Yes | Yes | Yes | Yes |
| NHIQLVK | 21707 | Yes | Yes | Yes | Yes | Yes |

F13A1

| | | | | | | |
|---|---|---|---|---|---|---|
| MYVAVWTPYGVLR | 21708 | Yes | Yes | Yes | Yes | Yes |
| STVLTIPEIIIK | 21709 | — | Yes | Yes | Yes | Yes |
| VEYVIGR | 21710 | — | — | Yes | Yes | Yes |

HEPC

| | | | | | | |
|---|---|---|---|---|---|---|
| DTHFPIBIFBBGBBHR | 21711 | Yes | Yes | Yes | Yes | Yes |

IgM Heavy Chain

| | | | | | | |
|---|---|---|---|---|---|---|
| TSTSPIVK | 21712 | — | Yes | — | Yes | Yes |
| WIYDTSK | 21713 | — | Yes | Yes | Yes | Yes |
| WKIDGSER | 21714 | Yes | Yes | Yes | Yes | Yes |

IL21

| | | | | | | |
|---|---|---|---|---|---|---|
| IINVSIK | 21715 | Yes | Yes | — | Yes | Yes |
| LTBPSBDSYEK | 21716 | Yes | Yes | Yes | Yes | Yes |
| QLIDIVDQLK | 21717 | Yes | Yes | Yes | Yes | Yes |

NAGS

| | | | | | | |
|---|---|---|---|---|---|---|
| DLQTLFWR | 21718 | — | — | — | — | Yes |
| DSYELVNHAK | 21719 | Yes | Yes | Yes | Yes | Yes |
| HNAAAAVPFFGGG | 21720 | Yes | Yes | Yes | Yes | Yes |
| SVLR | | | | | | |

XIAP

| | | | | | | |
|---|---|---|---|---|---|---|
| AGFLYTGEGDTVR | 21721 | Yes | Yes | Yes | Yes | Yes |
| DHFALDRPSETHAD | 21722 | Yes | — | — | Yes | Yes |
| YLLR | | | | | | |
| IFTFGTWIYSVNK | 21723 | Yes | Yes | Yes | Yes | Yes |

### Example 174. Protein Expression Confirmation

[1851] Modified mRNA fully modified with 5-methylcytosine and pseudouridine (5 mC/pU), fully modified with 5-methylcytosine and 1-methylpseudouridine (5 mC/1mpU), modified where 25% of the cytosines replaced with 5-methylcytosine and 25% of the uridines replaced with 2-thiouridine (s2U/5 mC), fully modified with 1-methylpseudouridine (1mpU) or fully modified with pseudouridine (pU) encoding the proteins described in Table 215 were analyzed by fluorescence and/or western blot in order to confirm the expression of protein and the length of the protein expressed. Table 215 describes the sequence of the modified mRNA (polyA tail of approximately 140 nucleotides not shown in sequence; 5′ cap, Cap 1), the chemical modification evaluated and the length (in base pairs), if known.

TABLE 215
Protein and Expression

| | Modified | | | | | | | | |
|---|---|---|---|---|---|---|---|---|---|
| | mRNA | | | | | | | | |
| Protein | SEQ ID NO | 5mC/pU | 5mC/1mpU | | s2U/5mC | | pU | | 1mpU |
| Glucagon | 21724 | — | Yes | | Yes | | Yes | | — |
| (GLP1) | | | 451 | bp | 451 | bp | 451 | bp | |
| Glycoprotein | 21725 | — | Yes | | Yes | | Yes | | — |
| hormones, alpha | | | 634 | bp | 634 | bp | 634 | bp | |

| polypeptide | | | | | | | |
|---|---|---|---|---|---|---|---|
| (FSH-alpha) | | | | | | | |
| Surfactant | 21726 | Yes | | — | — | — | — |
| protein B | | 1432 | bp | | | | |

| (SFTPB) | | | | | | | | | |
|---|---|---|---|---|---|---|---|---|---|
| Anti-tumor | 21727 | — | Yes | | Yes | | Yes | | — |
| necrosis factor | | | 1684 | bp | 1684 | bp | 1684 | bp | |

| alpha | | | | | | | |
|---|---|---|---|---|---|---|---|
| Sortilin 1 | 21728 | Yes | | — | — | — | — |
| (SORT1) | | 2782 | bp | | | | |
| ImG Light | 21729 | Yes | | — | — | — | — |
| Chain | | 982 | bp | | | | |
| Sirtuin 1 | 21730 | Yes | | — | — | — | — |
| (SIRT1) | | 2530 | bp | | | | |

| galactosamine | 21731 | — | Yes | | Yes | | Yes | | Yes | |
|---|---|---|---|---|---|---|---|---|---|---|
| (N-acetyl)-6- | | | 1855 | bp | 1855 | bp | 1855 | bp | 1855 | bp |

| sulfate sulfatase | | | | | | | |
|---|---|---|---|---|---|---|---|
| (GALNS) | | | | | | | |
| Complement | 21732 | Yes | | — | — | — | — |
| factor H (CFH) | | 3982 | bp | | | | |
| colony | 21733 | Yes | | — | — | — | — |
| stimulating | | 854 | bp | | | | |
| factor 2 | | | | | | | |
| (granulocyte- | | | | | | | |
| macrophage) | | | | | | | |
| (GM-CSF) | | | | | | | |
| Klotho (KL) | 21734 | Yes | | — | — | — | — |
| | | 1933 | bp | | | | |
| coagulation | 21684 | Yes | | — | — | — | — |
| factor XIII alpha | | 2485 | bp | | | | |
| (F13A1) | | | | | | | |
| Phosphorylase | 21735 | Yes | | — | — | — | — |
| kinase, alpha 2 | | 3994 | bp | | | | |
| (PHKA2) | | | | | | | |
| Phosphorylase | 21736 | Yes | | — | — | — | — |
| kinase, beta | | 3568 | bp | | | | |

| Tyrosinase | 21737 | — | Yes | | — | Yes | | — |
|---|---|---|---|---|---|---|---|---|
| (TYR) | | | 1876 | bp | | 1876 | bp | |

| angiotensin- | 21678 | Yes | | — | — | — | — |
|---|---|---|---|---|---|---|---|
| coverting | | 2704 | bp | | | | |

| enzyme 2 | | | | | | | | | |
|---|---|---|---|---|---|---|---|---|---|
| (ACE2) | | | | | | | | | |
| neuregulin 1 | 21738 | — | Yes | | Yes | | Yes | | — |
| | | | 2209 | bp | 2209 | bp | 2209 | bp | |

| activity- | 21679 | Yes | | — | — | — | — |
|---|---|---|---|---|---|---|---|
| dependent | | 3595 | bp | | | | |
| neuroprotector | | | | | | | |
| (ADNP) | | | | | | | |
| Interleukin-21 | 21686 | Yes | | — | — | — | — |
| (IL21) | | 754 | bp | | | | |
| COMM domain- | 21682 | Yes | | — | — | — | — |
| containing | | 859 | bp | | | | |

protein 1
(COMMD1)

### Example 175. Intranasal Lung Delivery of 1-Methylpseudouridine or 5-Methylcytosine and 1-Methylpseudouridine Modified Luciferase mRNA Formulated in Cationic Lipid Nanoparticle

[1852] Luciferase modified mRNA (mRNA sequence shown in SEQ ID NO: 21446; polyA tail of approximately 140 nucleotides not shown in sequence; 5′ cap, Cap 1) fully modified with 1-methylpseudouridine (Luc-G5-LNP-KC2) or fully modified with 1-methylpseudouridine and 5-methylcytosine (Luc-G2-LNP-KC2) were formulated in the cationic Lipid Nanoparticle (LNP-KC2) as described in Table 216.

TABLE 216
Formulation

Formulation

| | NPA-127-1 | NPA-135-1 |
|---|---|---|
| Lipid | DLin-KC2-DMA | DLin-KC2-DMA |
| Lipid/mRNA | 20:1 | 20:1 |
| ratio (wt/wt) | | |
| Mean Size | 114 nm | 95 nm |
| | PDI: 0.10 | PDI: 0.11 |
| Zeta at pH 7.4 | −0.5 mV | −1.0 mV |
| Encaps. (RiboGr) | 77% | 100% |

[1853] The formulations were administered intranasally (LN.) to Balb-C mice at a dose of 0.3 mg/kg. Twenty minutes prior to imaging, mice were injected intraperitoneally with a D-luciferin solution at 150 mg/kg. Animals were then anesthetized and images were acquired with an IVIS Lumina II imaging system (Perkin Elmer). Bioluminescence was measured as total flux (photons/second) of the entire mouse. The mice were imaged at 2 hours, 8 hours, 48, and 72 hours after dosing and the average total flux (photons/second) was measured and shown in Table 217. The background flux was about 6.3+05 p/s. The results of the imaging of Luc-G5-LNP-KC2 or Luc-G5-LNP-KC2 vs. Vehicle are shown in the Table 217, “NT” means not tested.

TABLE 217
Luciferase expression after intranasal dosing

| | | | | Vehicle |
|---|---|---|---|---|
| | Time | Luc-G5-LNP-KC2 | Luc-G2-LNP-KC2 | (PBS) |
| Route | Point | Flux (p/s) | Flux (p/s) | Flux (p/s) |
| I.N. | 2 hrs | 1.53E+06 | 5.81E+05 | 3.87E+05 |
| I.N. | 8 hrs | 1.09E+07 | 9.35E+05 | 5.57E+05 |
| I.N. | 24 hrs | 5.93E+06 | 5.33E+05 | 4.89E+05 |
| I.N. | 28 hrs | 1.22E+06 | 7.63E+05 | 8.81E+05 |
| I.N. | 72 hrs | 8.43E+05 | NT | 8.17E+05 |

### Example 176. Intranasal Lung Delivery of 1-Methylpseudouridine or 5-Methylcytosine and 1-Methylpseudouridine Modified Luciferase mRNA Lipoplexed in Lipofectamine 2000

[1854] Luciferase modified mRNA (mRNA sequence shown in SEQ ID NO: 21446; polyA tail of approximately 140 nucleotides not shown in sequence; 5′cap, Cap1) fully modified with 1-methylpseudouridine (Luc-G5-Lipoplex) or fully modified with 1-methylpseudouridine and 5-methylcytosine (Luc-G2-Lipoplex) were lipoplexed in two steps, first step was the dilution of 16.6 ul from 3 mg/ml of G5 or G2 modified luciferase mRNA in 108.5 ul DMEM and the second step was the dilution of 100 ul LF2000 in 25 ul DMEM then both mixed together gently to make 250 ul total mixer which incubated 5-10 min at RT to form a Lipid-mRNA complex before injection. The lipoplex from both Luciferase mRNA fully modified with 1-methylpseudouridine or 1-methylpseudouridine and 5-methylcytosine were administered intranasally (IN.) to Balb-C mice at a dose of 0.5 mg/kg.

[1855] Twenty minutes prior to imaging, mice were injected intraperitoneally with a D-luciferin solution at 150 mg/kg. Animals were then anesthetized and images were acquired with an IVIS Lumina II imaging system (Perkin Elmer). Bioluminescence was measured as total flux (photons/second) of the entire mouse. The mice were imaged at 2 hours, 8 hours and 24 hours after dosing and the average total flux (photons/second) was measured and is shown in Table 218. The background signal was about 4.8+05 p/s. The background flux was about 6.3+05 p/s. The results of the imaging of Luc-G5-Lipoplex or Luc-G2-Lipoplex vs. Vehicle are shown in the Table 218.

TABLE 218
Luciferase expression after intranasal dosing

| | Time | Luc-G5-Lipoplex | Luc-G2-Lipoplex | Vehicle (PBS) |
|---|---|---|---|---|
| Route | Point | Flux (p/s) | Flux (p/s) | Flux (p/s) |
| I.N. | 2 hrs | 8.37E+05 | 9.58E+05 | 3.87E+05 |
| I.N. | 8 hrs | 8.42E+05 | 7.11E+05 | 5.57E+05 |
| I.N. | 24 hrs | 5.74E+05 | 5.53E+05 | 4.89E+05 |

### Example 177. Intranasal Lung Delivery of 1-Methylpseudouridine or 5-Methylcytosine and 1-Methylpseudouridine Modified Luciferase mRNA Formulated in PBS

[1856] Luciferase modified mRNA (mRNA sequence shown in SEQ ID NO: 21446; polyA tail of approximately 140 nucleotides not shown in sequence; 5′cap, Cap1) fully modified with 1-methylpseudouridine (Luc-G5-Buffer(PBS)) or fully modified with 1-methylpseudouridine and 5-methylcytosine (Luc-G2-Buffer(PBS)) formulated in PBS (pH 7.4) were administered intranasally (IN.) to Balb-C mice at a dose of 7.5 mg/kg.

[1857] Twenty minutes prior to imaging, mice were injected intraperitoneally with a D-luciferin solution at 150 mg/kg. Animals were then anesthetized and images were acquired with an IVIS Lumina II imaging system (Perkin Elmer). Bioluminescence was measured as total flux (photons/second) of the entire mouse. The mice were imaged at 2 hours, 8 hours and 24 hours after dosing and the average total flux (photons/second) was measured and is shown in Table 219. The background flux was about 4.8+05 p/s. The background flux was about 6.3+05 p/s. The results of the imaging of Luc-G5-in Buffer vs. Vehicle are shown in the Table 219.

TABLE 219
Luciferase expression after intranasal dosing

| | | Luc-G5-in Buffer | Luc- | Vehicle |
|---|---|---|---|---|
| | | (PBS) | G2-in Buffer (PBS) | (PBS) |
| Route | Time Point | Flux [p/s] | Flux [p/s] | Flux (p/s) |
| I.N. | 2 hrs | 4.50E+05 | 9.58E+05 | 3.87E+05 |
| I.N. | 8 hrs | 7.12E+05 | 7.11E+05 | 5.57E+05 |
| I.N. | 24 hrs | 4.47E+05 | 5.53E+05 | 4.89E+05 |

### Example 178. In Vitro Transfection of Interleukin 7

[1858] Interleukin 7 (IL7) modified mRNA (mRNA sequence shown in SEQ ID NO: 1656; polyA tail of approximately 160 nucleotides not shown in sequence; 5′cap, Cap1) was transfected via reverse transfection in Human Keratinocyte cells in 24 multi-well plates. Human Keratinocytes cells were grown in EPILIFE® medium with Supplement S7 from Invitrogen (Carlsbad, CA) until they reached a confluence of 50-70%. The cells were transfected with 0, 46.875, 93.75, 187.5, 375 and 750, ng of modified mRNA (mmRNA) encoding IL-7 which had been complexed with RNAIMAX™ from Invitrogen (Carlsbad, CA). The RNA:RNAIMAX™ complex was formed by first incubating the RNA with Supplement-free EPILIFE® media in a 5× volumetric dilution for 10 minutes at room temperature. In a second vial, RNAIMAX™ reagent was incubated with Supplement-free EPILIFE® Media in a 10× volumetric dilution for 10 minutes at room temperature. The RNA vial was then mixed with the RNAIMAX™ vial and incubated for 20-30 minutes at room temperature before being added to the cells in a drop-wise fashion.

[1859] The fully optimized mRNA encoding IL-7 (mRNA sequence shown in SEQ ID NO: 1656; polyA tail of approximately 160 nucleotides not shown in sequence; 5′cap, Cap1) was fully modified with 5-methylcytosine and pseudouridine. Cells were transfected with the mmRNA encoding IL-7 and IL-7 concentration (pg/ml) in the culture medium was measured at 6 and 12 hours post-transfection for each of the concentrations using an ELISA kit from Invitrogen (Carlsbad, CA) following the manufacturers recommended instructions. These data, shown in FIG. 53, show that modified mRNA encoding IL-7 is capable of being translated in Human Keratinocyte cells at the 375 and 750 ng doses.

### Example 179. In Vitro Transfection of Erythropoietin

[1860] Erythropoietin (EPO) modified mRNA (mRNA sequence shown in SEQ ID NO: 1638; polyA tail of approximately 160 nucleotides not shown in sequence; 5′cap, Cap1) was transfected via reverse transfection in Human Keratinocyte cells in 24 multi-well plates. Human Keratinocytes cells were grown in EPILIFE® medium with Supplement S7 from Invitrogen (Carlsbad, CA) until they reached a confluence of 50-70%. The cells were transfected with 46.875, 93.75, 187.5, 375 and 750, ng of modified mRNA (mmRNA) encoding EPO which had been complexed with RNAIMAX™ from Invitrogen (Carlsbad, CA). The RNA:RNAIMAX™ complex was formed by first incubating the RNA with Supplement-free EPILIFE® media in a 5× volumetric dilution for 10 minutes at room temperature. In a second vial, RNAIMAX™ reagent was incubated with Supplement-free EPILIFE® Media in a 10× volumetric dilution for 10 minutes at room temperature. The RNA vial was then mixed with the RNAIMAX™ vial and incubated for 20-30 minutes at room temperature before being added to the cells in a drop-wise fashion.

[1861] The fully optimized mRNA encoding EPO (mRNA sequence shown in SEQ ID NO: 1638; polyA tail of approximately 160 nucleotides not shown in sequence; 5′cap, Cap1) was fully modified with 5-methylcytosine and pseudouridine. Cells were transfected with the mmRNA encoding EPO and EPO concentration (pg/ml) in the culture medium was measured at 6 and 12 hours post-transfection for each of the concentrations using an ELISA kit from Invitrogen (Carlsbad, CA) following the manufacturers recommended instructions. These data, shown in FIG. 54, show that modified mRNA encoding EPO is capable of being translated in Human Keratinocyte cells.

### Example 180. Detection of Lysosomal Acid Lipase Protein: Western Blot

[1862] The day before transfection, 750,000 HeLa cells (ATCC no. CCL-2; Manassas, VA) were harvested by treatment with Trypsin-Ethylenediaminetetraacetic acid (EDTA) solution (LifeTechnologies, Grand Island, NY) and seeded in a total volume of 3 ml Eagle's minimal essential medium (EMEM) (supplemented with 10% fetal calf serum (FCS) and 1× Glutamax) per well in a 6-well cell culture plate (Corning, Manassas, VA). The cells were grown at 37° C. in 5% CO2 atmosphere overnight. Next day, 750 ng of lysosomal acid lipase (LAL) mRNA (mRNA sequence shown in SEQ ID NO: 1657; polyA tail of approximately 160 nucleotides not shown in sequence; 5′cap, Cap1) fully modified with 5-methylcytosine and pseudouridine) was diluted in 250 ul final volume of OPTI-MEM® (LifeTechnologies, Grand Island, NY). Lipofectamine 2000 (LifeTechnologies, Grand Island, NY) was used as transfection reagent and 5.5 ul were diluted in 250 ul final volume of OPTI-MEM®. After 5 minutes of incubation at room temperature, both solutions were combined and incubated an additional 15 minutes at room temperature. Then 500 ul of the combined solution was added to the 3 ml cell culture medium containing the HeLa cells. The plates were then incubated as described before.

[1863] After an 16-18 hour incubation, the medium was removed and the cells were washed with 1 ml PBS. After complete removal of the PBS, 500 ul of fresh PBS was added. Cells were harvested by scraping with a cell scraper. Harvested cells receiving the same mRNA were then combined in one 1.5 ml Eppendorf tube.

[1864] Cells were pelleted by centrifugation at 3,000 rpm for 2 minutes. The PBS was removed and cells lysed in 250 ul radio immunoprecipitatoin assay (RIPA) buffer (containing PMSF and eukaryotic protease inhibitor mix) (all from BostonBioProducts, Ashland, MA) by gentle pipetting. Lysates were cleared by centrifugation at 10,000 rpm at 4° G for 10 minutes. Cleared lysates were transferred to Amicon filters with 10,000 kd molecular cutoff (Waters, Milford, MA) and spun at 12,000 rpm and 4° G for 20 minutes. The concentrated protein lysate was recovered by placing the inverted filter in a fresh 1.5 ml Eppendorf tube and spinning at 3,000 rpm for 1 minute. The final volume of the lysate is between 25-40 ul.

[1865] Protein concentration was determined using the BCA kit for microtiter-plates from Pierce (Thermo Fisher, Rockford, IL). The standard proteins of the titration curve were dissolved in RIPA buffer (as described for cell lysate generation) and not in dilution buffer.

[1866] Protein lysates were loaded on NuPage SDS-PAGE system (chambers and power supply) with 1.5 mm ready-to-use Bis-Tris gels and 4-12% acrylamide gradient with MOPS-buffer as running aid (all from Life Technologies, Grand Island, NY). Each lysate sample was prepared to 40 ul final volume. This sample contained 25 ug protein lysate in variable volume, RIPA buffer to make up volume to 26 ul, 4 ul of 10 × reducing agent and 10 ul 4× SDS loading buffer (both from Life Technologies, Grand Island, NY). Samples were heated at 95° C. for 5 minutes and loaded on the gel. Standard settings were chosen by the manufacturer, 200V, 120 mA and maximum 25 W. Run time was 60 minutes, but no longer than running dye reaching the lower end of the gel.

[1867] After the run was terminated, the plastic case was cracked and the encased gel transferred to a ready-to-use nitrocellulose membrane kit and power supply (iBLOT; LifeTechnologies, Grand Island, NY). Using default settings, the protein lysate was transferred by high Ampere electricity from the gel to the membrane.

[1868] After the transfer, the membranes were incubated in 5% bovine serum albumin (BSA) in 1× tris buffered saline (TBS) for 15 minutes then in 5% BSA in 1× TBS+0.1% Tween for another 15 minutes. Primary antibody anti-lysosomal acid lipase antibody; Abcam Cat No. ab89771) against the target protein was applied in 3 ml of 5% BSA in 1× TBS solution at a 1:500 to 1:2000 dilution for 3 hours at room temperature and gentle agitation on an orbital shaker. Membranes are washed 3 times with 1× TBS/0.1% Tween, 5 minutes each time with gentle agitation. The secondary antibody ((Western Breeze, Invitrogen) was conjugated to horse radish peroxidase and binds to the primary antibody. The secondary antibody was diluted of 1:1000 to 1:5000 in 5% BSA in 1× TBS and incubated for 3 hours at room temperature. As shown in FIG. 55 the western blot detection of LAL was close to 45.4 kDa. In FIG. 55, lanes 1 and 2 show the modified mRNA and lanes 3 and 4 show the dosing vehicle only.

### Example 181. Detection of Glucocerebrosidase Protein: Western Blot

[1869] The day before transfection, 750,000 HeLa cells (ATCC no. CCL-2; Manassas, VA) were harvested by treatment with Trypsin-Ethylenediaminetetraacetic acid (EDTA) solution (LifeTechnologies, Grand Island, NY) and seeded in a total volume of 3 ml Eagle's minimal essential medium (EMEM) (supplemented with 10% fetal calf serum (FCS) and 1× Glutamax) per well in a 6-well cell culture plate (Corning, Manassas, VA). The cells were grown at 37° C. in 5% CO2 atmosphere overnight. Next day, 750 ng of glucocerebrosidase mRNA (mRNA sequence shown in SEQ ID NO: 1645; polyA tail of approximately 160 nucleotides not shown in sequence; 5′cap, Cap1) fully modified with 5-methylcytosine and pseudouridine was diluted in 250 ul final volume of OPTI-MEM® (LifeTechnologies, Grand Island, NY). Lipofectamine 2000 (LifeTechnologies, Grand Island, NY) was used as transfection reagent and 5.5 ul were diluted in 250 ul final volume of OPTI-MEM®. After 5 minutes of incubation at room temperature, both solutions were combined and incubated an additional 15 minutes at room temperature. Then 500 ul of the combined solution was added to the 3 ml cell culture medium containing the HeLa cells. The plates were then incubated as described before.

[1870] After an 16-18 hour incubation, the medium was removed and the cells were washed with 1 ml PBS. After complete removal of the PBS, 500 ul of fresh PBS was added. Cells were harvested by scraping with a cell scraper. Harvested cells receiving the same mRNA were then combined in one 1.5 ml Eppendorf tube.

[1871] Cells were pelleted by centrifugation at 3,000 rpm for 2 minutes. The PBS was removed and cells lysed in 250 ul radio immunoprecipitatoin assay (RIPA) buffer (containing PMSF and eukaryotic protease inhibitor mix) (all from BostonBioProducts, Ashland, MA) by gentle pipetting. Lysates were cleared by centrifugation at 10,000 rpm at 4° G for 10 minutes. Cleared lysates were transferred to Amicon filters with 10,000 kd molecular cutoff (Waters, Milford, MA) and spun at 12,000 rpm and 4° G for 20 minutes. The concentrated protein lysate was recovered by placing the inverted filter in a fresh 1.5 ml Eppendorf tube and spinning at 3,000 rpm for 1 minute. The final volume of the lysate is between 25-40 ul.

[1872] Protein concentration was determined using the BCA kit for microtiter-plates from Pierce (Thermo Fisher, Rockford, IL). The standard proteins of the titration curve were dissolved in RIPA buffer (as described for cell lysate generation) and not in dilution buffer.

[1873] Protein lysates were loaded on NuPage SDS-PAGE system (chambers and power supply) with 1.5 mm ready-to-use Bis-Tris gels and 4-12% acrylamide gradient with MOPS-buffer as running aid (all from Life Technologies, Grand Island, NY). Each lysate sample was prepared to 40 ul final volume. This sample contained 25 ug protein lysate in variable volume, RIPA buffer to make up volume to 26 ul, 4 ul of 10 × reducing agent and 10 ul 4× SDS loading buffer (both from Life Technologies, Grand Island, NY). Samples were heated at 95° C. for 5 minutes and loaded on the gel. Standard settings were chosen by the manufacturer, 200V, 120 mA and maximum 25 W. Run time was 60 minutes, but no longer than running dye reaching the lower end of the gel.

[1874] After the run was terminated, the plastic case was cracked and the encased gel transferred to a ready-to-use nitrocellulose membrane kit and power supply (iBLOT; LifeTechnologies, Grand Island, NY). Using default settings, the protein lysate was transferred by high Ampere electricity from the gel to the membrane.

[1875] After the transfer, the membranes were incubated in 5% bovine serum albumin (BSA) in 1× tris buffered saline (TBS) for 15 minutes then in 5% BSA in 1× TBS+0.1% Tween for another 15 minutes. Primary antibody (Anti-GBA antibody; Abcam Cat No. ab55080 and Sigma Cat No. G4046) against the target protein were applied in 3 ml of 5% BSA in 1× TBS solution at a 1:500 to 1:2000 dilution for 3 hours at room temperature and gentle agitation on an orbital shaker. Membranes are washed 3 times with 1× TBS/0.1% Tween, 5 minutes each time with gentle agitation. The secondary antibody (Western Breeze, Invitrogen) was conjugated to horse radish peroxidase and binds to the primary antibody. The secondary antibody was diluted of 1:1000 to 1:5000 in 5% BSA in 1× TBS and incubated for 3 hours at room temperature. As shown in FIG. 56 the western blot detection of glucocerebrosidase was close to 59.7 kDa. In FIG. 56, lanes 1 and 2 show the modified mRNA and lanes 3 and 4 show the dosing vehicle only.

### Example 182. Detection of Iduronate 2-Sulfatase Protein: Western Blot

[1876] The day before transfection, 750,000 HeLa cells (ATCC no. CCL-2; Manassas, VA) were harvested by treatment with Trypsin-Ethylenediaminetetraacetic acid (EDTA) solution (LifeTechnologies, Grand Island, NY) and seeded in a total volume of 3 ml Eagle's minimal essential medium (EMEM) (supplemented with 10% fetal calf serum (FCS) and 1× Glutamax) per well in a 6-well cell culture plate (Corning, Manassas, VA). The cells were grown at 37° C. in 5% CO2 atmosphere overnight. Next day, 750 ng of iduronate 2-sulfatase mRNA (mRNA sequence shown in SEQ ID NO: 1652; polyA tail of approximately 160 nucleotides not shown in sequence; 5′cap, Cap1) fully modified with 5-methylcytosine and pseudouridine) was diluted in 250 ul final volume of OPTI-MEM® (LifeTechnologies, Grand Island, NY). Lipofectamine 2000 (LifeTechnologies, Grand Island, NY) was used as transfection reagent and 5.5 ul were diluted in 250 ul final volume of OPTI-MEM®. After 5 minutes of incubation at room temperature, both solutions were combined and incubated an additional 15 minutes at room temperature. Then 500 ul of the combined solution was added to the 3 ml cell culture medium containing the HeLa cells. The plates were then incubated as described before.

[1877] After an 16-18 hour incubation, the medium was removed and the cells were washed with 1 ml PBS. After complete removal of the PBS, 500 ul of fresh PBS was added. Cells were harvested by scraping with a cell scraper. Harvested cells receiving the same mRNA were then combined in one 1.5 ml Eppendorf tube.

[1878] Cells were pelleted by centrifugation at 3,000 rpm for 2 minutes. The PBS was removed and cells lysed in 250 ul radio immunoprecipitatoin assay (RIPA) buffer (containing PMSF and eukaryotic protease inhibitor mix) (all from BostonBioProducts, Ashland, MA) by gentle pipetting. Lysates were cleared by centrifugation at 10,000 rpm at 4° G for 10 minutes. Cleared lysates were transferred to Amicon filters with 10,000 kd molecular cutoff (Waters, Milford, MA) and spun at 12,000 rpm and 4° G for 20 minutes. The concentrated protein lysate was recovered by placing the inverted filter in a fresh 1.5 ml Eppendorf tube and spinning at 3,000 rpm for 1 minute. The final volume of the lysate is between 25-40 ul.

[1879] Protein concentration was determined using the BCA kit for microtiter-plates from Pierce (Thermo Fisher, Rockford, IL). The standard proteins of the titration curve were dissolved in RIPA buffer (as described for cell lysate generation) and not in dilution buffer.

[1880] Protein lysates were loaded on NuPage SDS-PAGE system (chambers and power supply) with 1.5 mm ready-to-use Bis-Tris gels and 4-12% acrylamide gradient with MOPS-buffer as running aid (all from Life Technologies, Grand Island, NY). Each lysate sample was prepared to 40 ul final volume. This sample contained 25 ug protein lysate in variable volume, RIPA buffer to make up volume to 26 ul, 4 ul of 10 × reducing agent and 10 ul 4× SDS loading buffer (both from Life Technologies, Grand Island, NY). Samples were heated at 95° C. for 5 minutes and loaded on the gel. Standard settings were chosen by the manufacturer, 200V, 120 mA and maximum 25 W. Run time was 60 minutes, but no longer than running dye reaching the lower end of the gel.

[1881] After the run was terminated, the plastic case was cracked and the encased gel transferred to a ready-to-use nitrocellulose membrane kit and power supply (iBLOT; LifeTechnologies, Grand Island, NY). Using default settings, the protein lysate was transferred by high Ampere electricity from the gel to the membrane.

[1882] After the transfer, the membranes were incubated in 5% bovine serum albumin (BSA) in 1× tris buffered saline (TBS) for 15 minutes then in 5% BSA in 1× TBS+0.1% Tween for another 15 minutes. Primary antibodies (anti-iduronate 2 sulfatase antibody; Abcam Cat No. ab 70025 and R&D Systems Cat No. AF2449) against the target protein were applied in 3 ml of 5% BSA in 1× TBS solution at a 1:500 to 1:2000 dilution for 3 hours at room temperature and gentle agitation on an orbital shaker. Membranes are washed 3 times with 1× TBS/0.1% Tween, 5 minutes each time with gentle agitation. The secondary antibody (Western Breeze, Invitrogen) was conjugated to horse radish peroxidase and binds to the primary antibody. The secondary antibody was diluted of 1:1000 to 1:5000 in 5% BSA in 1× TBS and incubated for 3 hours at room temperature. As shown in FIG. 57 the western blot detection of iduronate 2-sulfatase was close to 76 kDa. In FIG. 57, lanes 1 and 2 show the modified mRNA and lanes 3 and 4 show the dosing vehicle only.

### Example 183. Detection of Luciferase Protein: Western Blot

[1883] The day before transfection, 750,000 HeLa cells (ATCC no. CCL-2; Manassas, VA) were harvested by treatment with Trypsin-Ethylenediaminetetraacetic acid (EDTA) solution (LifeTechnologies, Grand Island, NY) and seeded in a total volume of 3 ml Eagle's minimal essential medium (EMEM) (supplemented with 10% fetal calf serum (FCS) and 1× Glutamax) per well in a 6-well cell culture plate (Corning, Manassas, VA). The cells were grown at 37° C. in 5% CO2 atmosphere overnight. Next day, 750 ng of luciferase mRNA (mRNA sequence shown in SEQ ID NO: 21446; polyA tail of approximately 160 nucleotides not shown in sequence; 5′cap, Cap1) fully modified with 5-methylcytosine and pseudouridine) was diluted in 250 ul final volume of OPTI-MEM® (LifeTechnologies, Grand Island, NY). Lipofectamine 2000 (LifeTechnologies, Grand Island, NY) was used as transfection reagent and 5.5 ul were diluted in 250 ul final volume of OPTI-MEM®. After 5 minutes of incubation at room temperature, both solutions were combined and incubated an additional 15 minutes at room temperature. Then 500 ul of the combined solution was added to the 3 ml cell culture medium containing the HeLa cells. The plates were then incubated as described before.

[1884] After an 16-18 hour incubation, the medium was removed and the cells were washed with 1 ml PBS. After complete removal of the PBS, 500 ul of fresh PBS was added. Cells were harvested by scraping with a cell scraper. Harvested cells receiving the same mRNA were then combined in one 1.5 ml Eppendorf tube.

[1885] Cells were pelleted by centrifugation at 3,000 rpm for 2 minutes. The PBS was removed and cells lysed in 250 ul radio immunoprecipitatoin assay (RIPA) buffer (containing PMSF and eukaryotic protease inhibitor mix) (all from BostonBioProducts, Ashland, MA) by gentle pipetting. Lysates were cleared by centrifugation at 10,000 rpm at 4° G for 10 minutes. Cleared lysates were transferred to Amicon filters with 10,000 kd molecular cutoff (Waters, Milford, MA) and spun at 12,000 rpm and 4° G for 20 minutes. The concentrated protein lysate was recovered by placing the inverted filter in a fresh 1.5 ml Eppendorf tube and spinning at 3,000 rpm for 1 minute. The final volume of the lysate is between 25-40 ul.

[1886] Protein concentration was determined using the BCA kit for microtiter-plates from Pierce (Thermo Fisher, Rockford, IL). The standard proteins of the titration curve were dissolved in RIPA buffer (as described for cell lysate generation) and not in dilution buffer.

[1887] Protein lysates were loaded on NuPage SDS-PAGE system (chambers and power supply) with 1.5 mm ready-to-use Bis-Tris gels and 4-12% acrylamide gradient with MOPS-buffer as running aid (all from Life Technologies, Grand Island, NY). Each lysate sample was prepared to 40 ul final volume. This sample contained 25 ug protein lysate in variable volume, RIPA buffer to make up volume to 26 ul, 4 ul of 10 × reducing agent and 10 ul 4× SDS loading buffer (both from Life Technologies, Grand Island, NY). Samples were heated at 95° C. for 5 minutes and loaded on the gel. Standard settings were chosen by the manufacturer, 200V, 120 mA and maximum 25 W. Run time was 60 minutes, but no longer than running dye reaching the lower end of the gel.

[1888] After the run was terminated, the plastic case was cracked and the encased gel transferred to a ready-to-use nitrocellulose membrane kit and power supply (iBLOT; LifeTechnologies, Grand Island, NY). Using default settings, the protein lysate was transferred by high Ampere electricity from the gel to the membrane.

[1889] After the transfer, the membranes were incubated in 5% bovine serum albumin (BSA) in 1× tris buffered saline (TBS) for 15 minutes then in 5% BSA in 1× TBS+0.1% Tween for another 15 minutes. Primary antibody (anti-luciferase, AbCam Cat No. ab21176) against the target protein was applied in 3 ml of 5% BSA in 1× TBS solution at a 1:500 to 1:2000 dilution for 3 hours at room temperature and gentle agitation on an orbital shaker. Membranes are washed 3 times with 1× TBS/0.1% Tween, 5 minutes each time with gentle agitation. The secondary antibody (Western Breeze, Invitrogen) was conjugated to horse radish peroxidase and binds to the primary antibody. The secondary antibody was diluted of 1:1000 to 1:5000 in 5% BSA in 1× TBS and incubated for 3 hours at room temperature. As shown in FIG. 58 the western blot detection of luciferase was close to 60.7 kDa. In FIG. 58, lanes 1 and 2 show the modified mRNA and lanes 3 and 4 show the dosing vehicle only.

### Example 184. Herceptin In Vivo Studies

[1890] Herceptin heavy chain (HC) modified mRNA (SEQ ID NO: 21451; polyA tail of approximately 140 nucleotides not shown in sequence; 5′cap, Cap1; fully modified with 5-methylcytosine and 1-methylpseudouridine) and Herceptin light chain (LC) modified mRNA (SEQ ID NO: 21452; polyA tail of approximately 140 nucleotides not shown in sequence; 5′cap, Cap1; fully modified with 5-methylcytosine and 1-methylpseudouridine) were formulated in DLin-MC3-DMA and DLin-KC2-DMA as described in Table 220.

TABLE 220
DLin-MC3-DMA and DLin-KC2-DMA Formulations

| | Formulation |
|---|---|
| | NPA-159-1 |
| Herceptin HC:LC | 2:1 |
| Ratio (wt/wt) | |
| Lipid | DLin-KC2- |
| | DMA |
| Lipid/Total mRNA | 20:1 |
| ratio (wt/wt) | |
| Mean Size | 100 nm |
| | PDI: 0.10 |
| Zeta at pH 7.4 | 1.9 mV |
| Encaps. (RiboGr) | 100% |

[1891] The Herceptin formulations described in Table X1 were administered intravenously to mice (CD1) at a dose of 0.5 mgs/kg. A control of Luciferase mRNA was also evaluated (Luc in FIG. 59). The mice were bled at 8 hours, 24 hours, 48 hours, 96 hours, 168 hours (7 days), 336 hours (14 days), 504 hours (21 days) after the administration of Herceptin to determine the serum IgG concentration by ELISA (total human IgG detection kit by ABCAM®, Cambridge MA). The control Luciferase injected animals were bled at only 8 hr time point. The results are shown in Table 222 and FIG. 59.

TABLE 222
Herceptin Formulations

| | | Injection | Amount of | | Post dose | |
|---|---|---|---|---|---|---|
| | | Volume | modified | Dose | collection | Human IgG |
| mRNA | Route | (ul) | RNA (ug) | (mg/kg) | (Hrs) | (ng/ml) |
| Herceptin (LC + HC) | IV | 100 | 10 | 0.5 | 8 | 39.4 |
| Herceptin (LC + HC) | IV | 100 | 10 | 0.5 | 24 | 56.1 |
| Herceptin (LC + HC) | IV | 100 | 10 | 0.5 | 48 | 43.8 |
| Herceptin (LC + HC) | IV | 100 | 10 | 0.5 | 96 | 56.7 |
| Herceptin (LC + HC) | IV | 100 | 10 | 0.5 | 168 | 31.7 |
| Herceptin (LC + HC) | IV | 100 | 10 | 0.5 | 336 | 17.6 |
| Herceptin (LC + HC) | IV | 100 | 10 | 0.5 | 504 | 3 |
| Luciferase | IV | 100 | 10 | 0.5 | 8 | 0.57 |

### Example 185. Herceptin In Vitro Studies

[1892] The day before transfection, 15,000 HeLa cells (ATCC no. CCL-2; Manassas, VA) were harvested by treatment with Trypsin-EDTA solution (LifeTechnologies, Grand Island, NY) and seeded in a total volume of 100 ul EMEM medium (supplemented with 10% FCS and 1× Glutamax) per well in a 96-well cell culture plate (Corning, Manassas, VA). The cells were grown at 37° C. in 5% CO₂ atmosphere overnight. The next day, 150 ng of the herceptin heavy chain (HC) mRNA (SEQ ID NO: 21451; polyA tail of approximately 140 nucleotides not shown in sequence; 5′cap, Cap1; fully modified with 5-methylcytosine and 1-methylpsuedouridine) or 75 ng Herceptin light chain (LC) (SEQ ID NO: 21452; polyA tail of approximately 140 nucleotides not shown in sequence; 5′cap, Cap1; fully modified with 5-methylcytosine and 1-methylpsuedouridine) or 500 ng of the Herceptin HC and 250 ng of Herceptin LC together was diluted in 10 ul final volume of OPTI-MEM (LifeTechnologies, Grand Island, NY). Lipofectamine 2000 (LifeTechnologies, Grand Island, NY) was used as transfection reagent and 0.2 ul of lipofectamine 2000 was diluted to 10 ul final volume of OPTI-MEM. After 5 minutes of incubation at room temperature, both solutions were combined and incubated an additional 15 minute at room temperature. Then the 20 ul combined solution was added to the 100 ul cell culture medium containing the HeLa cells and incubated at room temperature. As controls, Recombinant human IgG (Hu IgG ctrl), assay buffer and culture medium from untreated wells in the presence absence of assay buffer (Assay buffer+Control Media) were also analyzed.

[1893] After an 18 to 22 hour incubation cell culture supernatants of cells expressing Herceptin heavy or light chains were collected and analyzed with the total human IgG ELISA kit (ABCAM®, Cambridge MA) according to the manufacturer instructions. The amount of IgG produced is shown in Table 223 and FIG. 60. In Table X3, “OTC” means off the chart.

TABLE 223
Herceptin Study

| Sample | IgG (ng/ml) |
|---|---|
| Recombinant Human IgG | OTC |
| Herceptin Heavy Chain | 12 |
| Herceptin Light Chain | 0 |
| Herceptin Heavy + Light Chain | 348 |
| Assay buffer | 9 |
| Assay buffer + Control Media | 12 |

### Example 186. Herceptin In Vitro Studies: Confirmation of Antibody Production In Vitro by Immunoblotting

[1894] HeLa cells were transfected in vitro in absence of serum using the Herceptin heavy and light chain mRNAs (herceptin heavy chain (HC) mRNA (SEQ ID NO: 21451; polyA tail of approximately 140 nucleotides not shown in sequence; 5′cap, Cap1; fully modified with 5-methylcytosine and 1-methylpsuedouridine), Herceptin light chain (LC) (SEQ ID NO: 21452; polyA tail of approximately 140 nucleotides not shown in sequence; 5′cap, Cap1; fully modified with 5-methylcytosine and 1-methylpsuedouridine) or Herceptin HC and LC together (H&L)) described in Example 185. 24 hours after transfection, supernatants were collected, concentrated and 4 ug of protein was loaded, in presence (Lanes 1-5 in FIG. 61) and absence (Lanes 6-10 in FIG. 61) of reducing agents, into each lane of a 4-12% MOPS NuPAGE gel for electrophoretic separation. The proteins were then transferred onto a PVDF membrane and probed using an antibody for simultaneous detection of heavy and light Ig chains.

[1895] As shown in FIG. 61, In the lanes where supernatants from the only light chain transfected cells were run, light chain bands were detected under both reducing and non-reducing conditions. In the non-reducing condition a larger band was also detected at ˜50 kDa. This corroborates well with the fact that light chain alone is secretory. The lanes containing supernatants from only heavy chain mRNA transfected cells had no signal in presence or absence of reducing agents, confirming lack of secretion of the heavy chain alone. Supernatants from cells transfected with both heavy and light chain mRNA had two bands in presence or absence of reducing agents. In both conditions there was a light chain specific band. This represented light chain from denatured Ig molecule under the reducing condition and free light chain protein under the non-reducing condition. Under the reducing condition, the heavy chain, which was only secreted in association with the light chain, was visible at 55 kDa whereas, under the non-reducing condition, no individual heavy chain band was apparent as expected. In that lane, a 160 kDa the total Ig band was clearly detectable. This confirms the molecular identity of the light and heavy chain proteins produced when the chemically modified mRNAs encoding these proteins were transfected in HeLa cells.

[1896] In FIG. 61, “MWM” represents molecular weight marker, “LC” represents Herceptin light chain, “HC” represents Herceptin heavy chain, and “Media” represents culture media alone.

### Example 187. Enzymatic Activity Assay

### A. Glucocerebrosidase Enzyme Activity

[1897] HEK293 cells were transfected with 0, 625, 125, 250, 500, 1000 or 2000 ng of glucocerebrosidase modified mRNA (mRNA sequence shown in SEQ ID NO: 1645; polyA tail of approximately 160 nucleotides not shown in sequence; 5′cap, Cap1) fully modified with 5-methylcytosine and pseudouridine) complexed with RNAiMAX (Invitrogen). The cells were washed with PBS at 6 hours, 12 hours, 24 hours and 48 hours after transfection. The cells were then lysed in 100 mM citrate-phosphate buffer (pH 5.4) containing 0.54% sodium taurodeoxycholate with 1% Triton X-100. The cell lysate was then incubated in the presence of 0.5 mM of 4-Methylumbelliferyl β-D-Galactopyranoside (4-MUG) substrate for 1 hour at 37° C. After an hour the reaction was stopped with an equivalent volume of 200 mM sodium hydroxide. The conversion of 4-MU was measured in the plate reader (Ex=370 nm; Em=460 nm). FIG. 62 shows the enzymatic activity expressed as a percentage normalized against the mRNA control transfection (iduronate 2-sulfatase (mRNA sequence shown in SEQ ID NO: 1652; polyA tail of approximately 160 nucleotides not shown in sequence; 5′cap, Cap1) fully modified with 5-methylcytosine and pseudouridine) complexed with RNAiMAX (Invitrogen).

### B. Lysosomal Acid Lipase Enzyme Activity

[1898] HEK293 cells were transfected with 0, 625, 125, 250, 500, 1000 or 2000 ng of lysosomal acid lipase modified mRNA (mRNA sequence shown in SEQ ID NO: 1657; polyA tail of approximately 160 nucleotides not shown in sequence; 5′cap, Cap1) fully modified with 5-methylcytosine and pseudouridine) complexed with RNAiMAX (Invitrogen). The cells were washed with PBS at 6 hours, 12 hours, 24 hours and 48 hours after transfection. The cells were then lysed in 100 mM citrate-phosphate buffer (pH 5.4) containing 0.54% sodium taurodeoxycholate with 1% Triton X-100. The cell lysate was then incubated in the presence of 0.5 mM of 4-Methylumbelliferyl β-D-Galactopyranoside (4-MUG) substrate for 1 hour at 37° C. After an hour the reaction was stopped with an equivalent volume of 200 mM sodium hydroxide. The conversion of 4-MU was measured in the plate reader (Ex=370 nm; Em=460 nm). FIG. 63 shows the enzymatic activity expressed as a percentage normalized against the mRNA control transfection (iduronate 2-sulfatase (mRNA sequence shown in SEQ ID NO: 1652; polyA tail of approximately 160 nucleotides not shown in sequence; 5′cap, Cap1) fully modified with 5-methylcytosine and pseudouridine) complexed with RNAiMAX (Invitrogen).

### Example 188. In Vitro Transfection of Factor VIII: Protein Detection

[1899] Factor VIII modified mRNA (mRNA sequence shown in SEQ ID NO: 1623; polyA tail of approximately 160 nucleotides not shown in sequence; 5′cap, Cap1) was transfected via reverse transfection in HepG2 cells in 24 multi-well plates. HepG2 cells were grown in EPILIFE® medium with Supplement S7 from Invitrogen (Carlsbad, CA) until they reached a confluence of 50-70%. The cells were transfected with 0, 250 ng, 500 ng, 750 ng, 1000 ng of modified mRNA (mmRNA) encoding Factor VIII which had been complexed with RNAIMAX™ from Invitrogen (Carlsbad, CA). The RNA:RNAIMAX™ complex was formed by first incubating the RNA with Supplement-free EPILIFE® media in a 5× volumetric dilution for 10 minutes at room temperature. In a second vial, RNAIMAX™ reagent was incubated with Supplement-free EPILIFE® Media in a 10× volumetric dilution for 10 minutes at room temperature. The RNA vial was then mixed with the RNAIMAX™ vial and incubated for 20-30 minutes at room temperature before being added to the cells in a drop-wise fashion.

[1900] The fully optimized mRNA encoding Factor VIII (mRNA sequence shown in SEQ ID NO: 1623; polyA tail of approximately 160 nucleotides not shown in sequence; 5′cap, Cap1) transfected with the HepG2 cells included modifications during translation such as natural nucleoside triphosphates (NTP), pseudouridine at each uridine site and 5-methylcytosine at each cytosine site (pseudo-U/5 mC), and N1-methyl-pseudouridine at each uridine site and 5-methylcytosine at each cytosine site (N1-methy-Pseudo-U/5 mC). Cells were transfected with the mmRNA encoding Factor VIII and secreted Factor VIII concentration (pg/ml) in the culture medium was measured at 18 hours post-transfection for each of the concentrations using an ELISA kit from Invitrogen (Carlsbad, CA) following the manufacturers recommended instructions. These data, shown in Table 224 and FIGS. 64, show that modified mRNA encoding Factor VIII is capable of being translated in HepG2 cells.

TABLE 224
Factor VIII Dosing and Protein Secretion

| | |
|---|---|
| Dose (ng) | 18 hours (IU/ml) |

Factor VIII Dose Containing Natural NTPs

| | |
|---|---|
| 0 | 0 |
| 250 | 0 |
| 500 | 0.4 |
| 750 | 1.9 |
| 1000 | 2.1 |

Factor VIII Dose Containing Pseudo-U/5mC

| | |
|---|---|
| 0 | 0 |
| 250 | 7.8 |
| 500 | 8.1 |
| 750 | 6.1 |
| 1000 | 7.8 |

Factor VIII Dose Containing N1-methy-Pseudo-U/5mC

| | |
|---|---|
| 0 | 0 |
| 250 | 3.5 |
| 500 | 4.6 |
| 750 | 6.2 |
| 1000 | 6.0 |

### Example 189. In Vitro Transfection of Factor VIII: Chromogenic Activity

[1901] Factor VIII modified mRNA (mRNA sequence shown in SEQ ID NO: 1623; polyA tail of approximately 160 nucleotides not shown in sequence; 5′cap, Cap1) was transfected via reverse transfection in HepG2 cells in 24 multi-well plates. HepG2 cells were grown in EPILIFE® medium with Supplement S7 from Invitrogen (Carlsbad, CA) until they reached a confluence of 50-70%. The cells were transfected with 0, 250 ng, 500 ng, 750 ng, 1000 ng of modified mRNA (mmRNA) encoding Factor VIII which had been complexed with RNAIMAX™ from Invitrogen (Carlsbad, CA). The RNA:RNAIMAX™ complex was formed by first incubating the RNA with Supplement-free EPILIFE® media in a 5× volumetric dilution for 10 minutes at room temperature. In a second vial, RNAIMAX™ reagent was incubated with Supplement-free EPILIFE® Media in a 10× volumetric dilution for 10 minutes at room temperature. The RNA vial was then mixed with the RNAIMAX™ vial and incubated for 20-30 minutes at room temperature before being added to the cells in a drop-wise fashion.

[1902] The fully optimized mRNA encoding Factor VIII (mRNA sequence shown in SEQ ID NO: 1623; polyA tail of approximately 160 nucleotides not shown in sequence; 5′cap, Cap1) transfected with the HepG2 cells included modifications during translation such pseudouridine at each uridine site and 5-methylcytosine at each cytosine site (pseudo-U/5 mC), and N1-methy-pseudouridine at each uridine site and 5-methylcytosine at each cytosine site (N1-methyl-Pseudo-U/5 mC). Cells were transfected with the mmRNA encoding Factor VIII. When activated by thrombin, Factor VIII forms an enzymatic complex with Factor IXa, phospholipids and Calcium, which activates Factor X to Factor Xa which activates Factor X, supplied in the assay at a constant concentration and in excess, to Factor Xa. This activity is directly related to the amount of Factor VIII.

[1903] Generated Factor Xa was measured at 18 hours post-transfection by its activity on a specific Factor Xa chromogenic substrate (SXa-11), measured by the amount of pNA released, determined by color development at 405 nm in order to determine the activity of Factor VIII.

[1904] The Factor VIII activity was normalized to 25-30% Factor VIII concentrate control standard (% Activity). These data, shown in Table 225 and FIG. 65, show that modified mRNA encoding Factor VIII is capable of being translated in HepG2 cells.

TABLE 225
Factor VIII Dosing and Protein Secretion

| | |
|---|---|
| Dose (ng) | 18 hours (% Activity) |

Factor VIII Dose Containing Pseudo-U/5mC

| | |
|---|---|
| 0 | 0 |
| 250 | 31.7 |
| 500 | 29.2 |
| 750 | 26.7 |
| 1000 | 20.4 |

Factor VIII Dose Containing N1-methy-Pseudo-U/5mC

| | |
|---|---|
| 0 | 0 |
| 250 | 25.8 |
| 500 | 30.4 |
| 750 | 30.0 |
| 1000 | 26.7 |

### Example 190. Low Density Lipoprotein Receptor (LDLR) Expression

A. In Vitro LDLR expression

[1905] Human embryonic kidney epithelial (HEK293) cells (LGC standards GmbH, Wesel, Germany) are seeded on 6-well plates (BD Biosciences, San Jose, USA). HEK293 are seeded at a density of about 500,000 cells per well in 3 mL cell culture medium. Formulations containing LDLR mRNA (mRNA shown in SEQ ID NO: 21463; fully modified with 5-methylcytosine and 1-methylpseudouridine; 5′cap, cap 1, polyA tail of approximately 160 nucleotides (not shown in sequence)) or a control of G-CSF mRNA (mRNA shown in SEQ ID NO: 21438; fully modified with 5-methylcytosine and pseudouridine; 5′cap, cap1; polyA tail of approximately 160 nucleotides not shown in sequence) are added directly after seeding the cells at quantities of 4000, 800, 400, 40, and 4 ng per well and incubated. G-CSF mRNA transfected cells were treated with anti-LDLR antibody and one set of LDLR transfected cells were treated with normal goat IgG as controls. Bound primary antibodies were detected by FACS analysis following treatment with a PE-labeled secondary antibody.

[1906] As shown in FIG. 66A, results of the FACS analyses shows 74.8% of all gated live cells were detected to express LDLR at the 800 ng dose of LDLR mRNA. At the 40 ng dose of LDLR mRNA, 11.6% of all gated live cells were detected to express LDLR. No staining was observed in LDLR mRNA treated cells stained with the control nonimmune IgG. No LDLR positive cells were detected in cells transfected with G-CSF mRNA.

### B. Protein Accumulation

[1907] Human embryonic kidney epithelial (HEK293) cells (LGC standards GmbH, Wesel, Germany) are seeded on 6-well plates (BD Biosciences, San Jose, USA). HEK293 are seeded at a density of about 500,000 cells per well in 3 mL cell culture medium. Formulations containing LDLR mRNA (mRNA shown in SEQ ID NO: 21463; fully modified with 5-methylcytosine and 1-methylpseudouridine; 5′cap, cap 1, polyA tail of approximately 160 nucleotides (not shown in sequence)) or a control of G-CSF mRNA (mRNA shown in SEQ ID NO: 21438; fully modified with 5-methylcytosine and pseudouridine; 5′cap, cap1; polyA tail of approximately 160 nucleotides not shown in sequence) are added directly after seeding the cells per well and incubated. Fifteen hours later the transfection media is replaced with complete media. Transfected cells are harvested at 0, 2, 4, 8, 24, 48, and 72 hours after media replacement. Transfected cells were treated with anti-LDLR antibody conjugated to Phycoerythrin (PE) and one set of LDLR transfected cells were treated with normal goat IgG conjugated to PE as controls. Bound primary antibodies were detected by FACS analysis as described above.

[1908] As shown in FIG. 66B, the FACS analysis shows ˜65% of all gated live cells were detected to express LDLR at the 0.0-h time point (15.0-h after transfection) after washing away the transfection media. The percent positive cells declined with time at 37° C., such that by 24 h post-removal of the transfection media, LDLR was not detected.

### C. BODIPY®-Labeled LDLR

[1909] To evaluate whether the expressed LDLR were functional, BODIPY®-labeled LDL was used. HEK293 cells were transfected overnight with either LDLR modified mRNA (mRNA shown in SEQ ID NO: 21463; fully modified with 5-methylcytosine and 1-methylpseudouridine; 5′cap, cap 1, polyA tail of approximately 16 nucleotides (not shown in sequence)) or G-CSF modified mRNA (mRNA shown in SEQ ID NO: 21438; fully modified with 5-methylcytosine and pseudouridine; 5′cap, cap1; polyA tail of approximately 160 nucleotides not shown in sequence), the cells were washed and incubated with increasing amounts of BODIPY-LDL. Following incubation for 1.0-h at 37° C., the cells were washed and the binding of BODIPY-LDL was assessed by FACS. Binding of BODIPY-LDL to LDLR mRNA tranfected cells was high affinity (Kd˜60 ng/mL) and saturable as shown in FIG. 66C.

[1910] In competition studies, binding of BODIPY-LDL could be reduced in a dose-dependent manner by unlabeled LDL (FIG. 66D). These data show that binding of BODIPY-LDL to cells expressing LDLR mRNA is saturable, specific, and of high affinity.

### Example 191. UDP Glucuronosyltransferase 1 Family, Polypeptide A1 (UGT1A1) Expression

### A. In Vitro UGT1A1 Expression

[1911] Human embryonic kidney epithelial (HEK293) cells (LGC standards GmbH, Wesel, Germany) are seeded on 6-well plates (BD Biosciences, San Jose, USA). HEK293 are seeded at a density of about 500,000 cells per well in 3 mL cell culture medium. Formulations containing UDP glucuronosyltransferase 1 family, polypeptide A1 (UGT1A1) mRNA (mRNA shown in SEQ ID NO: 21463; fully modified with 5-methylcytosine and 1-methylpseudouridine; 5′cap, cap 1, polyA tail of approximately 160 nucleotides (not shown in sequence) or a control of G-CSF mRNA (mRNA shown in SEQ ID NO: 21438; fully modified with 5-methylcytosine and pseudouridine; 5′cap, cap1; polyA tail of approximately 160 nucleotides not shown in sequence) are added directly after seeding the cells at quantities of 4000, 800, 400, 40, and 4 ng per well and incubated. G-CSF mRNA transfected cells were treated with anti-UGT1A1 antibody and one set of UGT1A1 transfected cells were treated with normal goat IgG as controls. Bound primary antibodies were detected by FACS analysis following treatment with a PE-labeled secondary antibody.

[1912] As is shown in FIG. 67 the percent positive cells measured by FACS increased with the amount of UGT1A1 mRNA transfected into the HEK293 cells and reached a maximum at 74.8% of all gated live cells at the 800 ng dose of UGT1A1 mRNA. No further increase was in percent positive cells was observed at the highest dose tested (4000 ng). These data demonstrate that the mRNA delivery and/or expression in mammalian cells are saturable. No staining was observed in UGT1A1 mRNA treated cells stained with the control nonimmune IgG and no UGT1A1 positive cells were detected in cells transfected with G-CSF mRNA.

### B. In Vitro UGT1A1 Expression—Protein Accumulation

[1913] Human embryonic kidney epithelial (HEK293) cells (LGC standards GmbH, Wesel, Germany) are seeded on 6-well plates (BD Biosciences, San Jose, USA). HEK293 are seeded at a density of about 500,000 cells per well in 3 mL cell culture medium. Formulations containing UGT1A1 mRNA (mRNA shown in SEQ ID NO: 2146; fully modified with 5-methylcytosine and 1-methylpseudouridine; 5′cap, cap 1, polyA tail of approximately 160 nucleotides (not shown in sequence) or a control of G-CSF mRNA (mRNA shown in SEQ ID NO: 21438; fully modified with 5-methylcytosine and pseudouridine; 5′cap, cap1; polyA tail of approximately 160 nucleotides not shown in sequence) are added directly after seeding the cells per well and incubated. Fifteen hours later the transfection media is replaced with complete media. Transfected cells are harvested at 0, 2, 4, 8, 24, 48, and 72 hours after media replacement. Transfected cells were treated with anti-UGT1A1 antibody conjugated to Phycoerythrin (PE) and one set of UGT1A1 transfected cells were treated with normal goat IgG conjugated to PE as controls. Bound primary antibodies were detected by FACS analysis as described above.

[1914] As is shown in FIG. 68, UGT1A1 protein accumulation in the UGT1A1 mRNA transfected cells increased with time of incubation after media replacement to a maximum at 24 hours and then declined to baseline values by 72 hours. Under these conditions, the apparent half-life of UGT1A1 mRNA was approximately 40.0-h.

### Example 192. Detection of UGT1A1 and OTC by Western blot

[1915] HEK293 Human embryonic kidney epithelial (HEK293) cells (LGC standards GmbH, Wesel, Germany) are seeded on 6-well plates (BD Biosciences, San Jose, USA). HEK293 are seeded at a density of about 500,000 cells per well in 2.4 mL cell culture medium. Formulations containing UGT1A1 mRNA (mRNA shown in SEQ ID NO: 21464; fully modified with 5-methylcytosine and 1-methylpseudouridine; 5′cap, cap 1, polyA tail of approximately 160 nucleotides (not shown in sequence) or OTC mRNA (mRNA shown in SEQ ID NO: 1659; fully modified with 5-methylcytosine and 1-methylpseudouridine; 5′cap, cap1; polyA tail of approximately 160 nucleotides not shown in sequence) are added directly after seeding the cells at quantities of 800 ng per well and incubated for 16 hours. Cells were washed with 500 μL PBS and harvested through cell scraping into 500 μL PBS. Cells were centrifuged at 200×g for 5 minutes and resuspended in 250 μL RIPA buffer supplemented with protease inhibitors. The tubes were centrifuged for ten minutes at 14,000×g. The supernatants were transferred to centrificon concentration columns and centrifuged for 30 minutes at 14,000×g to concentrate the lysate. Lysate was quantified through BCA protein assay (Thermo Fisher Scientific Inc, Rockford, USA).

[1916] Protein lysates were loaded on NuPage SDS-PAGE system (chambers and power supply) with 1.5 mm ready-to-use Bis-Tris gels and 4-12% acrylamide gradient with MOPS-buffer as running aid (all from Life Technologies, Grand Island, NY). Each lysate sample was prepared to 40 ul final volume. This sample contained 25 ug protein lysate in variable volume, RIPA buffer to make up volume to 26 μl, 4 μl of 10 × reducing agent and 10 ul 4× SDS loading buffer (both from Life Technologies, Grand Island, NY). Samples were heated at 95° C. for 5 minutes and loaded on the gel. Standard settings were chosen by the manufacturer, 200V, 120 mA and maximum 25 W. Run time was 60 minutes, but no longer than running dye reaching the lower end of the gel.

[1917] After the run was terminated, the plastic case was cracked and the encased gel transferred to a ready-to-use nitrocellulose membrane kit and power supply (iBLOT; LifeTechnologies, Grand Island, NY). Using default settings, the protein lysate was transferred by high Ampere electricity from the gel to the membrane.

[1918] After the transfer, the membranes were incubated in 5% bovine serum albumin (BSA) in 1× tris buffered saline (TBS) for 15 minutes then in 5% BSA in 1× TBS+0.1% Tween for another 15 minutes. Primary antibodies, goat anti-human UGT1A1 (R&D systems) and rabbit anti-human OTC (NBP1) were applied in 3 ml of 5% BSA in 1× TBS solution at a 1:500 dilution for 3 hours at room temperature and gentle agitation on an orbital shaker. The OTC primary antibodies were detected with the WesternBreeze Chromogenic Kit-Anti-Rabbit according to the manufacturing protocol, and the UGT1A1 primary antibodies were detected with the WesternBreeze Chromogenic Kit-Anti-Goat (Invitrogen, Grand Island, NY) according to the manufacturing protocol.

[1919] As is shown in FIG. 69, UGT1A1 was detected as a ˜60 kDa band by anti-UGT1A1 IgG in lysates of cells transfected with UGT1A1 mRNA (lane 4) but not in cells transfected with OTC mRNA (lane 3). Using the same lysates, OTC was detected as a ˜39 kDa band by anti-OTC IgG in lysates of cells transfected with OTC mRNA (lane 7) but not in cells transfected with UGT1A1 mRNA (lane 8). These data establish that exogenous UGT1A1 and OTC mRNAs can direct the synthesis of their cognate proteins in mammalian cells.

### Example 193. PAH and UGT1A1 Expression and Detection

### A. HEK293, Mouse and Rat Myoblast Cell Transfection With

[1920] HEK293 (LGC standards GmbH, Wesel, Germany), C2C12 mouse myoblast (ATCC) and L6 rat myoblast (ATCC) cell lines were plated into 24-well dishes (BD Biosciences, San Jose, USA) (1.5×10⁵ cells/well)) in DMEM (ATCC) supplemented with 10% fetal calf serum (ATCC).

[1921] Transfection solutions were prepared for each well to be treated by combining 250 ng of PAH modified mRNA (SEQ ID NO: 1660; polyA tail of approximately 160 nucleotides not shown in sequence; 5′cap, Cap1) fully modified with 5-methylcytosine and pseudouridine, UGT1A1 modified mRNA (SEQ ID NO: 21464; polyA tail of approximately 160 nucleotides not shown in sequence; 5′cap, Cap1; fully modified with 5-methylcytosine and pseudouridine or G-CSF modified mRNA (SEQ ID NO: 21438; polyA tail of approximately 160 nucleotides not shown in sequence; 5′cap, Cap1; fully modified with 5-methylcytosine and pseudouridine with 50 μl Opti-MEM reagent (Life Technologies, Grand Island, NY) in a first tube and 1 μl of L2000 transfection reagent (Life Technologies, Grand Island, NY) in 50 μl of Opti-MEM in a second tube. After preparation, first and second tubes were incubated at room temperature for 5 minutes before combining the contents of each. Combined transfection solutions were incubated for 15 minutes at room temperature. 100 μl of transfection solution was then added to each well. Cells were cultured for an additional 14 hours before continued analysis.

### B. PAH, UGT1A1 Detection by Flow Cytometry

[1922] After transfection, medium were removed from cells and 60 μl of 0.25% trypsin (Life Technologies, Grand Island, NY) was added to each well. Cells were trypsinized for 2 minutes before the addition of 240 μl/well of trypsin inhibitor (Life Technologies, Grand Island, NY). Resulting cell solutions were transferred to 96 well plates (Corning Life Sciences, Tewksbury, MA), cells were pelleted by centrifugation (800 × gravity for 5 minutes) and supernatants were discarded. Cell pellets were washed with PBS and resuspended in Foxp3 Fixation/Permeabilization solution (eBioscience, San Diego, CA) for 45 minutes. Cells were pelleted again by centrifugation (800 × gravity for 5 minutes) and resuspended in permeabilization buffer (eBiosciences, San Diego, CA) for 10 minutes. Cells were pelleted again by centrifugation (800 × gravity for 5 minutes) and washed in permeabilization buffer. PAH transfected cells were treated with anti-PAH antibody conjugated to Phycoerythrin (PE). One set of PAH transfected cells were treated with normal goat IgG conjugated to PE as staining controls. One set of G-CSF transfected cells was treated with anti-PAH antibody conjugated to Phycoerythrin (PE) as a transfection control. Bound primary antibodies were detected by FACS analysis as described above. Labeled cells were then combined with FACS buffer (PBS with 1% bovine serum albumin and 0.1% sodium azide) and transferred to cluster tubes and labeled cells were then analyzed by flow cytometry using a BD Accuri (BD Biosciences, San Jose, CA). As is shown in FIG. 70, 11.9% of HEK293 cells transfected with PAH were detected to express PAH, and 58.6% of HEK293 cells transfected with UGT1A1 were detected to express UGT1A1. For each mRNA, the percent positive cells were similar to the results obtained with HEK293 cells when rat or mouse myoblast cells were used.

### Example 194. Expression of UGT1A1 in HEK293 Cells Using Direct Capture Capillary Electrophoresis

[1923] HEK293 cells were transfected with UGT1A1 mRNA and cell lysates were prepared as described above. Western analysis was performed using the Simple Simon Western system (Protein Simple). As is shown in FIG. 71, UGT1A1 (˜60 kDa band) was detected in lysates of cells transfected with UGT1A1 mRNA by the anti-UGT1A1 IgG (lanes 1, 4, and 6) but not by an identical concentration of nonimmune IgG (lanes 2 and 5). Similarly, no UGT1A1 was detected in using an identical amount of cell lysate of non-transfected Hep3b cells (lane 3) or in lysates from HEK293 cells transfected with OTC mRNA (lane 7).

[1924] Normal C₅₇BL6 mice were given a single intravenous injection of LNP containing UGT1A1 mRNA at a dose of 0.5 mg/kg. Twenty four hours later the mice were sacrificed and the livers were isolated from each mouse. Microsomal membrane extracts were prepared from each liver by homogenization in ice-cold 5.0 mL of phosphate buffered saline (pH 7.4) containing protease inhibitors, using a Polytron homogenizer. The tissue homogenate was mixed with 40 ml of ice-cold microsome buffer (2.62 mM KH2PO4, 1.38 mM K2HPO4, 2% glycerol, and 0.5 mM dithiothreitol) and centrifuged at 12,000×g for 20 min at 4° C. The supernatant fraction was then centrifuged at 100,000×g for 60 min at 4° C. The microsomal pellet was resuspended in microsome buffer and the protein concentration was determined by the Bradford method. Microsomal extracts were characterized by detection of a calnexin band by Western blotting using anti-calnexin antibody (Assay Designs, Ann Arbor, MI). Approximately 2-5 μg of microsomal extract was applied to the capillaries and electrophoresis and protein immobilization was performed as described by the manufacturer. As is shown in FIG. 72 UGT1A1 was detected in microsomal extracts of mice treated with LNPs containing UGT1A1 mRNA using an antibody specific (described above) for UGT1A1 (lane 2) but not with a non-specific antibody (lane 4). The molecular weight of the UGT1A1 in mouse liver was the same as that observed with extracts of HEK293 cells transfected with UGT1A1mRNA and probed with the anti-UGT1A1 IgG (lane 3). No UGT1A1 band was detected in extracts of HEK293 cells transfected with OTC mRNA (lane 5). These data demonstrate expression of UGT1A1 mRNA in vivo in mice injected with LNPs containing UGT1A1 mRNA.

[1925] It is to be understood that the words which have been used are words of description rather than limitation, and that changes may be made within the purview of the appended claims without departing from the true scope and spirit of the invention in its broader aspects.

[1926] While the present invention has been described at some length and with some particularity with respect to the several described embodiments, it is not intended that it should be limited to any such particulars or embodiments or any particular embodiment, but it is to be construed with references to the appended claims so as to provide the broadest possible interpretation of such claims in view of the prior art and, therefore, to effectively encompass the intended scope of the invention.

[1927] All publications, patent applications, patents, and other references mentioned herein are incorporated by reference in their entirety. In case of conflict, the present specification, including definitions, will control. In addition, section headings, the materials, methods, and examples are illustrative only and not intended to be limiting.

The application's sequence listing, which the Patent Office published only in electronic form, follows.

SEQUENCE LISTING (21738 sequences)

SEQ ID NO: 1 - DNA, 47 bp, Homo sapiens
  source 1..47: mol_type = genomic DNA
gggaaataagagagaaaagaagagtaagaagaaatataagagccacc

SEQ ID NO: 2 - DNA, 47 bp, Homo sapiens
  source 1..47: mol_type = genomic DNA
gggagatcagagagaaaagaagagtaagaagaaatataagagccacc

SEQ ID NO: 3 - DNA, 145 bp, Homo sapiens
  source 1..145: mol_type = genomic DNA
ggaataaaagtctcaacacaacatatacaaaacaaacgaatctcaagcaatcaagcattctacttctattgcagcaatttaaatcatttcttttaaagcaaaagcaattttctgaaaattttcaccatttacgaacgatagcaac

SEQ ID NO: 4 - RNA, 42 nt, Homo sapiens
  source 1..42: mol_type = genomic RNA
gggagacaagcttggcattccggtactgttggtaaagccacc

SEQ ID NO: 5 - DNA, 371 bp, Homo sapiens
  source 1..371: mol_type = genomic DNA
gcgcctgcccacctgccaccgactgctggaacccagccagtgggagggcctggcccaccagagtcctgctccctcactcctcgccccgccccctgtcccagagtcccacctgggggctctctccacccttctcagagttccagtttcaaccagagttccaaccaatgggctccatcctctggattctggccaatgaaatatctccctggcagggtcctcttcttttcccagagctccaccccaaccaggagctctagttaatggagagctcccagcacactcggagcttgtgctttgtctccacgcaaagcgataaataaaagcattggtggcctttggtctttgaataaagcctgagtaggaagtctaga

SEQ ID NO: 6 - DNA, 568 bp, Homo sapiens
  source 1..568: mol_type = genomic DNA
gcccctgccgctcccacccccacccatctgggccccgggttcaagagagagcggggtctgatctcgtgtagccatatagagtttgcttctgagtgtctgctttgtttagtagaggtgggcaggaggagctgaggggctggggctggggtgttgaagttggctttgcatgcccagcgatgcgcctccctgtgggatgtcatcaccctgggaaccgggagtggcccttggctcactgtgttctgcatggtttggatctgaattaattgtcctttcttctaaatcccaaccgaacttcttccaacctccaaactggctgtaaccccaaatccaagccattaactacacctgacagtagcaattgtctgattaatcactggccccttgaagacagcagaatgtccctttgcaatgaggaggagatctgggctgggcgggccagctggggaagcatttgactatctggaacttgtgtgtgcctcctcaggtatggcagtgactcacctggttttaataaaacaacctgcaacatctcatggtctttgaataaagcctgagtaggaagtctaga

SEQ ID NO: 7 - DNA, 289 bp, Homo sapiens
  source 1..289: mol_type = genomic DNA
acacactccacctccagcacgcgacttctcaggacgacgaatcttctcaatgggggggcggctgagctccagccaccccgcagtcactttctttgtaacaacttccgttgctgccatcgtaaactgacacagtgtttataacgtgtacatacattaacttattacctcattttgttatttttcgaaacaaagccctgtggaagaaaatggaaaacttgaagaagcattaaagtcattctgttaagctgcgtaaatggtctttgaataaagcctgagtaggaagtctaga

SEQ ID NO: 8 - DNA, 379 bp, Homo sapiens
  source 1..379: mol_type = genomic DNA
catcacatttaaaagcatctcagcctaccatgagaataagagaaagaaaatgaagatcaaaagcttattcatctgtttttctttttcgttggtgtaaagccaacaccctgtctaaaaaacataaatttctttaatcattttgcctcttttctctgtgcttcaattaataaaaaatggaaagaatctaatagagtggtacagcactgttatttttcaaagatgtgttgctatcctgaaaattctgtaggttctgtggaagttccagtgttctctcttattccacttcggtagaggatttctagtttcttgtgggctaattaaataaatcattaatactcttctaatggtctttgaataaagcctgagtaggaagtctaga

SEQ ID NO: 9 - DNA, 118 bp, Mus sp.
  source 1..118: mol_type = genomic DNA
gctgccttctgcggggcttgccttctggccatgcccttcttctctcccttgcacctgtacctcttggtctttgaataaagcctgagtaggaaggcggccgctcgagcatgcatctaga

SEQ ID NO: 10 - DNA, 908 bp, Homo sapiens
  source 1..908: mol_type = genomic DNA
gccaagccctccccatcccatgtatttatctctatttaatatttatgtctatttaagcctcatatttaaagacagggaagagcagaacggagccccaggcctctgtgtccttccctgcatttctgagtttcattctcctgcctgtagcagtgagaaaaagctcctgtcctcccatcccctggactgggaggtagataggtaaataccaagtatttattactatgactgctccccagccctggctctgcaatgggcactgggatgagccgctgtgagcccctggtcctgagggtccccacctgggacccttgagagtatcaggtctcccacgtgggagacaagaaatccctgtttaatatttaaacagcagtgttccccatctgggtccttgcacccctcactctggcctcagccgactgcacagcggcccctgcatccccttggctgtgaggcccctggacaagcagaggtggccagagctgggaggcatggccctggggtcccacgaatttgctggggaatctcgtttttcttcttaagacttttgggacatggtttgactcccgaacatcaccgacgcgtctcctgtttttctgggtggcctcgggacacctgccctgcccccacgagggtcaggactgtgactctttttagggccaggcaggtgcctggacatttgccttgctggacggggactggggatgtgggagggagcagacaggaggaatcatgtcaggcctgtgtgtgaaaggaagctccactgtcaccctccacctcttcaccccccactcaccagtgtcccctccactgtcacattgtaactgaacttcaggataataaagtgtttgcctccatggtctttgaataaagcctgagtaggaaggcggccgctcgagcatgcatctaga

SEQ ID NO: 11 - DNA, 835 bp, Homo sapiens
  source 1..835: mol_type = genomic DNA
actcaatctaaattaaaaaagaaagaaatttgaaaaaactttctctttgccatttcttcttcttcttttttaactgaaagctgaatccttccatttcttctgcacatctacttgcttaaattgtgggcaaaagagaaaaagaaggattgatcagagcattgtgcaatacagtttcattaactccttcccccgctcccccaaaaatttgaatttttttttcaacactcttacacctgttatggaaaatgtcaacctttgtaagaaaaccaaaataaaaattgaaaaataaaaaccataaacatttgcaccacttgtggcttttgaatatcttccacagagggaagtttaaaacccaaacttccaaaggtttaaactacctcaaaacactttcccatgagtgtgatccacattgttaggtgctgacctagacagagatgaactgaggtccttgttttgttttgttcataatacaaaggtgctaattaatagtatttcagatacttgaagaatgttgatggtgctagaagaatttgagaagaaatactcctgtattgagttgtatcgtgtggtgtattttttaaaaaatttgatttagcattcatattttccatcttattcccaattaaaagtatgcagattatttgcccaaatcttcttcagattcagcatttgttctttgccagtctcattttcatcttcttccatggttccacagaagctttgtttcttgggcaagcagaaaaattaaattgtacctattttgtatatgtgagatgtttaaataaattgtgaaaaaaatgaaataaagcatgtttggttttccaaaagaacatat

SEQ ID NO: 12 - DNA, 297 bp, Homo sapiens
  source 1..297: mol_type = genomic DNA
cgccgccgcccgggccccgcagtcgagggtcgtgagcccaccccgtccatggtgctaagcgggcccgggtcccacacggccagcaccgctgctcactcggacgacgccctgggcctgcacctctccagctcctcccacggggtccccgtagccccggcccccgcccagccccaggtctccccaggccctccgcaggctgcccggcctccctccccctgcagccatcccaaggctcctgacctacctggcccctgagctctggagcaagccctgacccaataaaggctttgaacccat

SEQ ID NO: 13 - DNA, 602 bp, Homo sapiens
  source 1..602: mol_type = genomic DNA
ggggctagagccctctccgcacagcgtggagacggggcaaggaggggggttattaggattggtggttttgttttgctttgtttaaagccgtgggaaaatggcacaactttacctctgtgggagatgcaacactgagagccaaggggtgggagttgggataatttttatataaaagaagtttttccactttgaattgctaaaagtggcatttttcctatgtgcagtcactcctctcatttctaaaatagggacgtggccaggcacggtggctcatgcctgtaatcccagcactttgggaggccgaggcaggcggctcacgaggtcaggagatcgagactatcctggctaacacggtaaaaccctgtctctactaaaagtacaaaaaattagctgggcgtggtggtgggcacctgtagtcccagctactcgggaggctgaggcaggagaaaggcatgaatccaagaggcagagcttgcagtgagctgagatcacgccattgcactccagcctgggcaacagtgttaagactctgtctcaaatataaataaataaataaataaataaataaataaataaaaataaagcgagatgttgccctcaaa

SEQ ID NO: 14 - DNA, 785 bp, Homo sapiens
  source 1..785: mol_type = genomic DNA
ggccctgccccgtcggactgcccccagaaagcctcctgccccctgccagtgaagtccttcagtgagcccctccccagccagcccttccctggccccgccggatgtataaatgtaaaaatgaaggaattacattttatatgtgagcgagcaagccggcaagcgagcacagtattatttctccatcccctccctgcctgctccttggcacccccatgctgccttcagggagacaggcagggagggcttggggctgcacctcctaccctcccaccagaacgcaccccactgggagagctggtggtgcagccttcccctccctgtataagacactttgccaaggctctcccctctcgccccatccctgcttgcccgctcccacagcttcctgagggctaattctgggaagggagagttctttgctgcccctgtctggaagacgtggctctgggtgaggtaggcgggaaaggatggagtgttttagttcttgggggaggccaccccaaaccccagccccaactccaggggcacctatgagatggccatgctcaacccccctcccagacaggccctccctgtctccagggcccccaccgaggttcccagggctggagacttcctctggtaaacattcctccagcctcccctcccctggggacgccaaggaggtgggccacacccaggaagggaaagcgggcagccccgttttggggacgtgaacgttttaataatttttgctgaattcctttacaactaaataacacagatattgttataaataaaattgt

SEQ ID NO: 15 - DNA, 3001 bp, Homo sapiens
  source 1..3001: mol_type = genomic DNA
atattaaggatcaagctgttagctaataatgccacctctgcagttttgggaacaggcaaataaagtatcagtatacatggtgatgtacatctgtagcaaagctcttggagaaaatgaagactgaagaaagcaaagcaaaaactgtatagagagatttttcaaaagcagtaatccctcaattttaaaaaaggattgaaaattctaaatgtctttctgtgcatattttttgtgttaggaatcaaaagtattttataaaaggagaaagaacagcctcattttagatgtagtcctgttggattttttatgcctcctcagtaaccagaaatgttttaaaaaactaagtgtttaggatttcaagacaacattatacatggctctgaaatatctgacacaatgtaaacattgcaggcacctgcattttatgttttttttttcaacaaatgtgactaatttgaaacttttatgaacttctgagctgtccccttgcaattcaaccgcagtttgaattaatcatatcaaatcagttttaattttttaaattgtacttcagagtctatatttcaagggcacattttctcactactattttaatacattaaaggactaaataatctttcagagatgctggaaacaaatcatttgctttatatgtttcattagaataccaatgaaacatacaacttgaaaattagtaatagtatttttgaagatcccatttctaattggagatctctttaatttcgatcaacttataatgtgtagtactatattaagtgcacttgagtggaattcaacatttgactaataaaatgagttcatcatgttggcaagtgatgtggcaattatctctggtgacaaaagagtaaaatcaaatatttctgcctgttacaaatatcaaggaagacctgctactatgaaatagatgacattaatctgtcttcactgtttataatacggatggattttttttcaaatcagtgtgtgttttgaggtcttatgtaattgatgacatttgagagaaatggtggctttttttagctacctctttgttcatttaagcaccagtaaagatcatgtctttttatagaagtgtagattttctttgtgactttgctatcgtgcctaaagctctaaatataggtgaatgtgtgatgaatactcagattatttgtctctctatataattagtttggtactaagtttctcaaaaaattattaacacatgaaagacaatctctaaaccagaaaaagaagtagtacaaattttgttactgtaatgctcgcgtttagtgagtttaaaacacacagtatcttttggttttataatcagtttctattttgctgtgcctgagattaagatctgtgtatgtgtgtgtgtgtgtgtgtgcgtttgtgtgttaaagcagaaaagacttttttaaaagttttaagtgataaatgcaatttgttaattgatcttagatcactagtaaactcagggctgaattataccatgtatattctattagaagaaagtaaacaccatctttattcctgccctttttcttctctcaaagtagttgtagttatatctagaaagaagcaattttgatttcttgaaaaggtagttcctgcactcagtttaaactaaaaataatcatacttggattttatttatttttgtcatagtaaaaattttaatttatatatatttttatttagtattatcttattctttgctatttgccaatcctttgtcatcaattgtgttaaatgaattgaaaattcatgccctgttcattttattttactttattggttaggatatttaaaggatttttgtatatataatttcttaaattaatattccaaaaggttagtggacttagattataaattatggcaaaaatctaaaaacaacaaaaatgatttttatacattctatttcattattcctctttttccaataagtcatacaattggtagatatgacttattttatttttgtattattcactatatctttatgatatttaagtataaataattaaaaaaatttattgtaccttatagtctgtcaccaaaaaaaaaaaattatctgtaggtagtgaaatgctaatgttgatttgtctttaagggcttgttaactatcctttattttctcatttgtcttaaattaggagtttgtgtttaaattactcatctaagcaaaaaatgtatataaatcccattactgggtatatacccaaaggattataaatcatgctgctataaagacacatgcacacgtatgtttattgcagcactattcacaatagcaaagacttggaaccaacccaaatgtccatcaatgatagacttgattaagaaaatgtgcacatatacaccatggaatactatgcagccataaaaaaggatgagttcatgtcctttgtagggacatggataaagctggaaaccatcattctgagcaaactattgcaaggacagaaaaccaaacactgcatgttctcactcataggtgggaattgaacaatgagaacacttggacacaaggtggggaacaccacacaccagggcctgtcatggggtggggggagtggggagggatagcattaggagatatacctaatgtaaatgatgagttaatgggtgcagcacaccaacatggcacatgtatacatatgtagcaaacctgcacgttgtgcacatgtaccctagaacttaaagtataattaaaaaaaaaaagaaaacagaagctatttataaagaagttatttgctgaaataaatgtgatctttcccattaaaaaaataaagaaattttggggtaaaaaaacacaatatattgtattcttgaaaaattctaagagagtggatgtgaagtgttctcaccacaaaagtgataactaattgaggtaatgcacatattaattagaaagattttgtcattccacaatgtatatatacttaaaaatatgttatacacaataaatacatacattaaaaaataagtaaatgta

SEQ ID NO: 16 - DNA, 1037 bp, Homo sapiens
  source 1..1037: mol_type = genomic DNA
cccaccctgcacgccggcaccaaaccctgtcctcccacccctccccactcatcactaaacagagtaaaatgtgatgcgaattttcccgaccaacctgattcgctagattttttttaaggaaaagcttggaaagccaggacacaacgctgctgcctgctttgtgcagggtcctccggggctcagccctgagttggcatcacctgcgcagggccctctggggctcagccctgagctagtgtcacctgcacagggccctctgaggctcagccctgagctggcgtcacctgtgcagggccctctggggctcagccctgagctggcctcacctgggttccccaccccgggctctcctgccctgccctcctgcccgccctccctcctgcctgcgcagctccttccctaggcacctctgtgctgcatcccaccagcctgagcaagacgccctctcggggcctgtgccgcactagcctccctctcctctgtccccatagctggtttttcccaccaatcctcacctaacagttactttacaattaaactcaaagcaagctcttctcctcagcttggggcagccattggcctctgtctcgttttgggaaaccaaggtcaggaggccgttgcagacataaatctcggcgactcggccccgtctcctgagggtcctgctggtgaccggcctggaccttggccctacagccctggaggccgctgctgaccagcactgaccccgacctcagagagtactcgcaggggcgctggctgcactcaagaccctcgagattaacggtgctaaccccgtctgctcctccctcccgcagagactggggcctggactggacatgagagccccttggtgccacagagggctgtgtcttactagaaacaacgcaaacctctccttcctcagaatagtgatgtgttcgacgttttatcaaaggccccctttctatgttcatgttagttttgctccttctgtgtttttttctgaaccatatccatgttgctgacttttccaaataaaggttttcactcctctc

SEQ ID NO: 17 - DNA, 577 bp, Homo sapiens
  source 1..577: mol_type = genomic DNA
agaggcctgcctccagggctggactgaggcctgagcgctcctgccgcagagctggccgcgccaaataatgtctctgtgagactcgagaactttcatttttttccaggctggttcggatttggggtggattttggttttgttcccctcctccactctcccccaccccctccccgcccttttttttttttttttttaaactggtattttatctttgattctccttcagccctcacccctggttctcatctttcttgatcaacatcttttcttgcctctgtccccttctctcatctcttagctcccctccaacctggggggcagtggtgtggagaagccacaggcctgagatttcatctgctctccttcctggagcccagaggagggcagcagaagggggtggtgtctccaaccccccagcactgaggaagaacggggctcttctcatttcacccctccctttctcccctgcccccaggactgggccacttctgggtggggcagtgggtcccagattggctcacactgagaatgtaagaactacaaacaaaatttctattaaattaaattttgtgtctcc

SEQ ID NO: 18 - DNA, 2212 bp, Homo sapiens
  source 1..2212: mol_type = genomic DNA
ctccctccatcccaacctggctccctcccacccaaccaactttccccccaacccggaaacagacaagcaacccaaactgaaccccctcaaaagccaaaaaatgggagacaatttcacatggactttggaaaatatttttttcctttgcattcatctctcaaacttagtttttatctttgaccaaccgaacatgaccaaaaaccaaaagtgcattcaaccttaccaaaaaaaaaaaaaaaaaaagaataaataaataactttttaaaaaaggaagcttggtccacttgcttgaagacccatgcgggggtaagtccctttctgcccgttgggcttatgaaaccccaatgctgccctttctgctcctttctccacaccccccttggggcctcccctccactccttcccaaatctgtctccccagaagacacaggaaacaatgtattgtctgcccagcaatcaaaggcaatgctcaaacacccaagtggcccccaccctcagcccgctcctgcccgcccagcacccccaggccctgggggacctggggttctcagactgccaaagaagccttgccatctggcgctcccatggctcttgcaacatctccccttcgtttttgagggggtcatgccgggggagccaccagcccctcactgggttcggaggagagtcaggaagggccacgacaaagcagaaacatcggatttggggaacgcgtgtcaatcccttgtgccgcagggctgggcgggagagactgttctgttccttgtgtaactgtgttgctgaaagactacctcgttcttgtcttgatgtgtcaccggggcaactgcctgggggcggggatgggggcagggtggaagcggctccccattttataccaaaggtgctacatctatgtgatgggtggggtggggagggaatcactggtgctatagaaattgagatgcccccccaggccagcaaatgttcctttttgttcaaagtctatttttattccttgatatttttctttttttttttttttttttgtggatggggacttgtgaatttttctaaaggtgctatttaacatgggaggagagcgtgtgcggctccagcccagcccgctgctcactttccaccctctctccacctgcctctggcttctcaggcctctgctctccgacctctctcctctgaaaccctcctccacagctgcagcccatcctcccggctccctcctagtctgtcctgcgtcctctgtccccgggtttcagagacaacttcccaaagcacaaagcagtttttccccctaggggtgggaggaagcaaaagactctgtacctattttgtatgtgtataataatttgagatgtttttaattattttgattgctggaataaagcatgtggaaatgacccaaacataatccgcagtggcctcctaatttccttctttggagttgggggaggggtagacatggggaaggggctttggggtgatgggcttgccttccattcctgccctttccctccccactattctcttctagatccctccataaccccactcccctttctctcacccttcttataccgcaaacctttctacttcctctttcattttctattcttgcaatttccttgcaccttttccaaatcctcttctcccctgcaataccatacaggcaatccacgtgcacaacacacacacacactcttcacatctggggttgtccaaacctcatacccactccccttcaagcccatccactctccaccccctggatgccctgcacttggtggcggtgggatgctcatggatactgggagggtgaggggagtggaacccgtgaggaggacctgggggcctctccttgaactgacatgaagggtcatctggcctctgctcccttctcacccacgctgacctcctgccgaaggagcaacgcaacaggagaggggtctgctgagcctggcgagggtctgggagggaccaggaggaaggcgtgctccctgctcgctgtcctggccctgggggagtgagggagacagacacctgggagagctgtggggaaggcactcgcaccgtgctcttgggaaggaaggagacctggccctgctcaccacggactgggtgcctcgacctcctgaatccccagaacacaacccccctgggctggggtggtctggggaaccatcgtgcccccgcctcccgcctactcctttttaagctt

SEQ ID NO: 19 - DNA, 729 bp, Homo sapiens
  source 1..729: mol_type = genomic DNA
ttggccaggcctgaccctcttggacctttcttctttgccgacaaccactgcccagcagcctctgggacctcggggtcccagggaacccagtccagcctcctggctgttgacttcccattgctcttggagccaccaatcaaagagattcaaagagattcctgcaggccagaggcggaacacacctttatggctggggctctccgtggtgttctggacccagcccctggagacaccattcacttttactgctttgtagtgactcgtgctctccaacctgtcttcctgaaaaaccaaggcccccttcccccacctcttccatggggtgagacttgagcagaacaggggcttccccaagttgcccagaaagactgtctgggtgagaagccatggccagagcttctcccaggcacaggtgttgcaccagggacttctgcttcaagttttggggtaaagacacctggatcagactccaagggctgccctgagtctgggacttctgcctccatggctggtcatgagagcaaaccgtagtcccctggagacagcgactccagagaacctcttgggagacagaagaggcatctgtgcacagctcgatcttctacttgcctgtggggaggggagtgacaggtccacacaccacactgggtcaccctgtcctggatgcctctgaagagagggacagaccgtcagaaactggagagtttctattaaaggtcatttaaacca

SEQ ID NO: 20 - DNA, 847 bp, Homo sapiens
  source 1..847: mol_type = genomic DNA
tcctccgggaccccagccctcaggattcctgatgctccaaggcgactgatgggcgctggatgaagtggcacagtcagcttccctgggggctggtgtcatgttgggctcctggggcgggggcacggcctggcatttcacgcattgctgccaccccaggtccacctgtctccactttcacagcctccaagtctgtggctcttcccttctgtcctccgaggggcttgccttctctcgtgtccagtgaggtgctcagtgatcggcttaacttagagaagcccgccccctccccttctccgtctgtcccaagagggtctgctctgagcctgcgttcctaggtggctcggcctcagctgcctgggttgtggccgccctagcatcctgtatgcccacagctactggaatccccgctgctgctccgggccaagcttctggttgattaatgagggcatggggtggtccctcaagaccttcccctaccttttgtggaaccagtgatgcctcaaagacagtgtcccctccacagctgggtgccaggggcaggggatcctcagtatagccggtgaaccctgataccaggagcctgggcctccctgaacccctggcttccagccatctcatcgccagcctcctcctggacctcttggcccccagccccttccccacacagccccagaagggtcccagagctgaccccactccaggacctaggcccagcccctcagcctcatctggagcccctgaagaccagtcccacccacctttctggcctcatctgacactgctccgcatcctgctgtgtgtcctgttccatgttccggttccatccaaatacactttctggaacaaa

SEQ ID NO: 21 - DNA, 110 bp, Homo sapiens
  source 1..110: mol_type = genomic DNA
gctggagcctcggtggccatgcttcttgccccttgggcctccccccagcccctcctccccttcctgcacccgtacccccgtggtctttgaataaagtctgagtgggcggc

SEQ ID NO: 22 - DNA, 27 bp, Homo sapiens
  source 1..27: mol_type = genomic DNA
ttggaccctcgtacagaagctaatacg

SEQ ID NO: 23 - DNA, 189 bp, Homo sapiens
  source 1..189: mol_type = genomic DNA
ttttttttttttttttttttttttttttttttttttttttttttttttttttttttttttttttttttttttttttttttttttttttttttttttttttttttttttttttttttttttttttttttttttttttttttttttttttttttttttttttcttcctactcaggctttattcaaagacca

SEQ ID NO: 24 - DNA, 20 bp, Homo sapiens
  source 1..20: mol_type = genomic DNA
ccttgaccttctggaacttc

SEQ ID NO: 25 - DNA, 20 bp, Homo sapiens
  source 1..20: mol_type = genomic DNA
ccaagcactgaaacggatat

SEQ ID NO: 26 - DNA, 20 bp, Homo sapiens
  source 1..20: mol_type = genomic DNA
gatgaaaagtgctccaagga

SEQ ID NO: 27 - DNA, 20 bp, Homo sapiens
  source 1..20: mol_type = genomic DNA
aaccgtgatgaaaaggtacc

SEQ ID NO: 28 - DNA, 20 bp, Homo sapiens
  source 1..20: mol_type = genomic DNA
tcatgcagattggaaaggtc

SEQ ID NO: 29 - DNA, 20 bp, Homo sapiens
  source 1..20: mol_type = genomic DNA
cttcttggactgtccagagg

SEQ ID NO: 30 - DNA, 20 bp, Homo sapiens
  source 1..20: mol_type = genomic DNA
gcagtccctgatacaagaac

SEQ ID NO: 31 - DNA, 20 bp, Homo sapiens
  source 1..20: mol_type = genomic DNA
gattgaaggtggctcgctac

SEQ ID NO: 32 - DNA, 75 bp, Homo sapiens
  source 1..75: mol_type = genomic DNA
atgatgccatcctcagtctcatggggtattttgctcttggcgggtctgtgctgtctcgtgccggtgtcgctcgca

SEQ ID NO: 33 - DNA, 90 bp, Homo sapiens
  source 1..90: mol_type = genomic DNA
atggccggaccggcgactcagtcgcccatgaaactcatggccctgcagttgttgctttggcactcagccctctggaccgtccaagaggcg

SEQ ID NO: 34 - DNA, 137 bp, Homo sapiens
  source 1..137: mol_type = genomic DNA
atgcagagagtgaacatgattatggccgagtccccatcgctcatcacaatctgcctgcttggtacctgctttccgccgaatgcactgtctttctggatcacgagaatgcgaataagatcttgaaccgacccaaacgg

SEQ ID NO: 35 - DNA, 63 bp, Homo sapiens
  source 1..63: mol_type = genomic DNA
atgaaaggatcattgctgttgctcctcgtgtcgaaccttctgctttgccagtccgtagccccc

SEQ ID NO: 36 - DNA, 72 bp, Homo sapiens
  source 1..72: mol_type = genomic DNA
atgaaatgggtgacgttcatctcactgttgtttttgttctcgtccgcctactccaggggagtattccgccga

SEQ ID NO: 37 - DNA, 63 bp, Homo sapiens
  source 1..63: mol_type = genomic DNA
atgtggtggcggctctggtggctgctcctgttgctcctcttgctgtggcccatggtgtgggca

SEQ ID NO: 38 - DNA, 95 bp, Homo sapiens
  source 1..95: mol_type = genomic DNA
tgctctttaacctccgcatcctgttgaataacgctgcgttccgaaatgggcataacttcatggtacgcaacttcagatgcggccagccactccag

SEQ ID NO: 39 - DNA, 87 bp, Homo sapiens
  source 1..87: mol_type = genomic DNA
atgtccgtcttgacacccctgctcttgagagggctgacggggtccgctagacgcctgccggtaccgcgagcgaagatccactccctg

SEQ ID NO: 40 - DNA, 87 bp, Homo sapiens
  source 1..87: mol_type = genomic DNA
atgagcgtgctcactccgttgcttcttcgagggcttacgggatcggctcggaggttgcccgtcccgagagcgaagatccattcgttg

SEQ ID NO: 41 - DNA, 175 bp, unidentified
  source 1..175: mol_type = other DNA; note = /note="Description of Unknown: Bacterial signal sequence"
tgacaaaaataactttatctccccagaattttagaatccaaaaacaggaaaccacactactaaaagaaaaatcaaccgagaaaaattctttagcaaaaagtattctcgcagtaaaaatcacttcatcgaattaaggtcaaaattatcggaacgttttatttcgcataagaacact

SEQ ID NO: 42 - DNA, 69 bp, unidentified
  source 1..69: mol_type = other DNA; note = /note="Description of Unknown: Viral signal sequence"
atgctgagctttgtggatacccgcaccctgctgctgctggcggtgaccagctgcctggcgacctgccag

SEQ ID NO: 43 - DNA, 96 bp, unidentified
  source 1..96: mol_type = other DNA; note = /note="Description of Unknown: Viral signal sequence"
atgggcagcagccaggcgccgcgcatgggcagcgtgggcggccatggcctgatggcgctgctgatggcgggcctgattctgccgggcattctggcg

SEQ ID NO: 44 - DNA, 51 bp, unidentified
  source 1..51: mol_type = other DNA; note = /note="Description of Unknown: Viral signal sequence"
atggcgggcattttttattttctgtttagctttctgtttggcatttgcgat

SEQ ID NO: 45 - DNA, 66 bp, unidentified
  source 1..66: mol_type = other DNA; note = /note="Description of Unknown: Viral signal sequence"
atggaaaaccgcctgctgcgcgtgtttctggtgtgggcggcgctgaccatggatggcgcgagcgcg

SEQ ID NO: 46 - DNA, 81 bp, unidentified
  source 1..81: mol_type = other DNA; note = /note="Description of Unknown: Viral signal sequence"
atggcgcgccagggctgctttggcagctatcaggtgattagcctgtttacctttgcgattggcgtgaacctgtgcctgggc

SEQ ID NO: 47 - DNA, 57 bp, unidentified
  source 1..57: mol_type = other DNA; note = /note="Description of Unknown: Bacterial signal sequence"
atgagccgcctgccggtgctgctgctgctgcagctgctggtgcgcccgggcctgcag

SEQ ID NO: 48 - DNA, 87 bp, unidentified
  source 1..87: mol_type = other DNA; note = /note="Description of Unknown: Bacterial signal sequence"
atgaaacagcagaaacgcctgtatgcgcgcctgctgaccctgctgtttgcgctgatttttctgctgccgcatagcagcgcgagcgcg

SEQ ID NO: 49 - DNA, 78 bp, Homo sapiens
  source 1..78: mol_type = genomic DNA
atggcgacgccgctgcctccgccctccccgcggcacctgcggctgctgcggctgctgctctccgccctcgtcctcggc

SEQ ID NO: 50 - DNA, 54 bp, Homo sapiens
  source 1..54: mol_type = genomic DNA
atgaaggctccgggtcggctcgtgctcatcatcctgtgctccgtggtcttctct

SEQ ID NO: 51 - DNA, 45 bp, Homo sapiens
  source 1..45: mol_type = genomic DNA
atgcttcagctttggaaacttgttctcctgtgcggcgtgctcact

SEQ ID NO: 52 - DNA, 39 bp, Homo sapiens
  source 1..39: mol_type = genomic DNA
atgctttatctccagggttggagcatgcctgctgtggca

SEQ ID NO: 53 - DNA, 144 bp, Homo sapiens
  source 1..144: mol_type = genomic DNA
atggataacgtgcagccgaaaataaaacatcgccccttctgcttcagtgtgaaaggccacgtgaagatgctgcggctggatattatcaactcactggtaacaacagtattcatgctcatcgtatctgtgttggcactgatacca

SEQ ID NO: 54 - DNA, 96 bp, Homo sapiens
  source 1..96: mol_type = genomic DNA
atgccctgcctagaccaacagctcactgttcatgccctaccctgccctgcccagccctcctctctggccttctgccaagtggggttcttaacagca

SEQ ID NO: 55 - DNA, 138 bp, Homo sapiens
  source 1..138: mol_type = genomic DNA
atgaaaaccttgttcaatccagcccctgccattgctgacctggatccccagttctacaccctctcagatgtgttctgctgcaatgaaagtgaggctgagattttaactggcctcacggtgggcagcgctgcagatgct

SEQ ID NO: 56 - DNA, 57 bp, Homo sapiens
  source 1..57: mol_type = genomic DNA
atgaagcctctccttgttgtgtttgtctttcttttcctttgggatccagtgctggca

SEQ ID NO: 57 - DNA, 63 bp, Homo sapiens
  source 1..63: mol_type = genomic DNA
atgtcctgttccctaaagtttactttgattgtaatttttttttactgttggctttcatccagc

SEQ ID NO: 58 - DNA, 210 bp, Homo sapiens
  source 1..210: mol_type = genomic DNA
atggttcttactaaacctcttcaaagaaatggcagcatgatgagctttgaaaatgtgaaagaaaagagcagagaaggagggccccatgcacacacacccgaagaagaattgtgtttcgtggtaacacactaccctcaggttcagaccacactcaacctgtttttccatatattcaaggttcttactcaaccactttcccttctgtggggt

SEQ ID NO: 59 - DNA, 96 bp, Homo sapiens
  source 1..96: mol_type = genomic DNA
atggccaccccgccattccggctgataaggaagatgttttccttcaaggtgagcagatggatggggcttgcctgcttccggtccctggcggcatcc

SEQ ID NO: 60 - DNA, 87 bp, Homo sapiens
  source 1..87: mol_type = genomic DNA
atgagctttttccaactcctgatgaaaaggaaggaactcattcccttggtggtgttcatgactgtggcggcgggtggagcctcatct

SEQ ID NO: 61 - DNA, 123 bp, Homo sapiens
  source 1..123: mol_type = genomic DNA
atggtctcagctctgcggggagcacccctgatcagggtgcactcaagccctgtttcttctccttctgtgagtggaccacggaggctggtgagctgcctgtcatcccaaagctcagctctgagc

SEQ ID NO: 62 - DNA, 60 bp, Homo sapiens
  source 1..60: mol_type = genomic DNA
atgatggggtccccagtgagtcatctgctggccggcttctgtgtgtgggtcgtcttgggc

SEQ ID NO: 63 - DNA, 69 bp, Homo sapiens
  source 1..69: mol_type = genomic DNA
atggcaagcatggctgccgtgctcacctgggctctggctcttctttcagcgttttcggccacccaggca

SEQ ID NO: 64 - DNA, 135 bp, Homo sapiens
  source 1..135: mol_type = genomic DNA
atggtgctcatgtggaccagtggtgacgccttcaagacggcctacttcctgctgaagggtgcccctctgcagttctccgtgtgcggcctgctgcaggtgctggtggacctggccatcctggggcaggcctacgcc

SEQ ID NO: 65 - DNA, 204 bp, Homo sapiens
  source 1..204: mol_type = genomic DNA
atggattttgtcgctggagccatcggaggcgtctgcggtgttgctgtgggctaccccctggacacggtgaaggtcaggatccagacggagccaaagtacacaggcatctggcactgcgtccgggatacgtatcaccgagagcgcgtgtggggcttctaccggggcctctcgctgcccgtgtgcacggtgtccctggtatcttcc

SEQ ID NO: 66 - DNA, 147 bp, Homo sapiens
  source 1..147: mol_type = genomic DNA
atggagaagcccctcttcccattagtgcctttgcattggtttggctttggctacacagcactggttgtttctggtgggatcgttggctatgtaaaaacaggcagcgtgccgtccctggctgcagggctgctcttcggcagtctagcc

SEQ ID NO: 67 - DNA, 45 bp, Homo sapiens
  source 1..45: mol_type = genomic DNA
atgggtctgctccttcccctggcactctgcatcctagtcctgtgc

SEQ ID NO: 68 - DNA, 78 bp, Homo sapiens
  source 1..78: mol_type = genomic DNA
atggggatccagacgagccccgtcctgctggcctccctgggggtggggctggtcactctgctcggcctggctgtgggc

SEQ ID NO: 69 - DNA, 75 bp, Homo sapiens
  source 1..75: mol_type = genomic DNA
atgtcggacctgctactactgggcctgattgggggcctgactctcttactgctgctgacgctgctagcctttgcc

SEQ ID NO: 70 - DNA, 87 bp, Homo sapiens
  source 1..87: mol_type = genomic DNA
atggagactgtggtgattgttgccataggtgtgctggccaccatgtttctggcttcgtttgcagccttggtgctggtttgcaggcag

SEQ ID NO: 71 - DNA, 105 bp, Homo sapiens
  source 1..105: mol_type = genomic DNA
atgcgcggctctgtggagtgcacctggggttgggggcactgtgcccccagccccctgctcctttggactctacttctgtttgcagccccatttggcctgctgggg

SEQ ID NO: 72 - DNA, 171 bp, Homo sapiens
  source 1..171: mol_type = genomic DNA
atgatgccgtcccgtaccaacctggctactggaatccccagtagtaaagtgaaatattcaaggctctccagcacagacgatggctacattgaccttcagtttaagaaaacccctcctaagatcccttataaggccatcgcacttgccactgtgctgtttttgattggcgcc

SEQ ID NO: 73 - DNA, 108 bp, Homo sapiens
  source 1..108: mol_type = genomic DNA
atggccctgccccagatgtgtgacgggagccacttggcctccaccctccgctattgcatgacagtcagcggcacagtggttctggtggccgggacgctctgcttcgct

SEQ ID NO: 74 - DNA, 63 bp, unidentified
  source 1..63: mol_type = other DNA; note = /note="Description of Unknown: Bacterial signal sequence"
tgaaaaagtggttcgttgctgccggcatcggcgctgccggactcatgctctccagcgccgcca

SEQ ID NO: 75 - DNA, 63 bp, unidentified
  source 1..63: mol_type = other DNA; note = /note="Description of Unknown: Bacterial signal sequence"
atgaaacagagcaccattgcgctggcgctgctgccgctgctgtttaccccggtgaccaaagcg

SEQ ID NO: 76 - DNA, 63 bp, unidentified
  source 1..63: mol_type = other DNA; note = /note="Description of Unknown: Bacterial signal sequence"
atgaaaaaaaccgcgattgcgattgcggtggcgctggcgggctttgcgaccgtggcgcaggcg

SEQ ID NO: 77 - DNA, 63 bp, unidentified
  source 1..63: mol_type = other DNA; note = /note="Description of Unknown: Bacterial signal sequence"
atgaaaaaactgatgctggcgattttttttagcgtgctgagctttccgagctttagccagagc

SEQ ID NO: 78 - DNA, 69 bp, unidentified
  source 1..69: mol_type = other DNA; note = /note="Description of Unknown: Bacterial signal sequence"
atgaaaaaaaacattgcgtttctgctggcgagcatgtttgtgtttagcattgcgaccaacgcgtatgcg

SEQ ID NO: 79 - DNA, 96 bp, Homo sapiens
  source 1..96: mol_type = genomic DNA
atgtttgcgaaacgctttaaaaccagcctgctgccgctgtttgcgggctttctgctgctgtttcatctggtgctggcgggcccggcggcggcgagc

SEQ ID NO: 80 - DNA, 57 bp, Homo sapiens
  source 1..57: mol_type = genomic DNA
atgcgctttccgagcatttttaccgcggtgctgtttgcggcgagcagcgcgctggcg

SEQ ID NO: 81 - DNA, 57 bp, Homo sapiens
  source 1..57: mol_type = genomic DNA
atgcgctttccgagcatttttaccaccgtgctgtttgcggcgagcagcgcgctggcg

SEQ ID NO: 82 - DNA, 57 bp, Homo sapiens
  source 1..57: mol_type = genomic DNA
atgcgctttccgagcatttttaccagcgtgctgtttgcggcgagcagcgcgctggcg

SEQ ID NO: 83 - DNA, 57 bp, Homo sapiens
  source 1..57: mol_type = genomic DNA
atgcgctttccgagcatttttacccatgtgctgtttgcggcgagcagcgcgctggcg

SEQ ID NO: 84 - DNA, 57 bp, Homo sapiens
  source 1..57: mol_type = genomic DNA
atgcgctttccgagcatttttaccattgtgctgtttgcggcgagcagcgcgctggcg

SEQ ID NO: 85 - DNA, 57 bp, Homo sapiens
  source 1..57: mol_type = genomic DNA
atgcgctttccgagcatttttacctttgtgctgtttgcggcgagcagcgcgctggcg

SEQ ID NO: 86 - DNA, 57 bp, Homo sapiens
  source 1..57: mol_type = genomic DNA
atgcgctttccgagcatttttaccgaagtgctgtttgcggcgagcagcgcgctggcg

SEQ ID NO: 87 - DNA, 57 bp, Homo sapiens
  source 1..57: mol_type = genomic DNA
atgcgctttccgagcatttttaccggcgtgctgtttgcggcgagcagcgcgctggcg

SEQ ID NO: 88 - DNA, 63 bp, Homo sapiens
  source 1..63: mol_type = genomic DNA
atgcgttcctcccccctcctccgctccgccgttgtggccgccctgccggtgttggcccttgcc

SEQ ID NO: 89 - DNA, 66 bp, Homo sapiens
  source 1..66: mol_type = genomic DNA
atgggcgcggcggccgtgcgctggcacttgtgcgtgctgctggccctgggcacacgcgggcggctg

SEQ ID NO: 90 - DNA, 53 bp, synthetic construct
  misc_feature 1..53: note = source = /note="Description of Artificial Sequence: Synthetic signal sequence"
  source 1..53: mol_type = other DNA
atgaggagctcccttgtgctgttctttgtctctgcgtggacggccttggccag

SEQ ID NO: 91 - DNA, 96 bp, Homo sapiens
  source 1..96: mol_type = genomic DNA
atgctcaggggtccgggacccgggcggctgctgctgctagcagtcctgtgcctggggacatcggtgcgctgcaccgaaaccgggaagagcaagagg

SEQ ID NO: 92 - DNA, 69 bp, Homo sapiens
  source 1..69: mol_type = genomic DNA
atgcttaggggtccggggcccgggctgctgctgctggccgtccagctggggacagcggtgccctccacg

SEQ ID NO: 93 - DNA, 93 bp, Homo sapiens
  source 1..93: mol_type = genomic DNA
atgcgccggggggccctgaccgggctgctcctggtcctgtgcctgagtgttgtgctacgtgcagccccctctgcaacaagcaagaagcgcagg

SEQ ID NO: 94 - protein, 24 aa, Homo sapiens
MMPSSVSWGILLAGLCCLVPVSLA

SEQ ID NO: 95 - protein, 30 aa, Homo sapiens
MAGPATQSPMKLMALQLLLWHSALWTVQEA

SEQ ID NO: 96 - protein, 46 aa, Homo sapiens
MQRVNMIMAESPSLITICLLGYLLSAECTVFLDHENANKILNRPKR

SEQ ID NO: 97 - protein, 21 aa, Homo sapiens
MKGSLLLLLVSNLLLCQSVAP

SEQ ID NO: 98 - protein, 24 aa, Homo sapiens
MKWVTFISLLFLFSSAYSRGVFRR

SEQ ID NO: 99 - protein, 19 aa, Homo sapiens
MWWRLWWLLLLLLLLPMWA

SEQ ID NO: 100 - protein, 32 aa, Homo sapiens
MLFNLRILLNNAAFRNGHNFMVRNFRCGQPLQ

SEQ ID NO: 101 - protein, 29 aa, Homo sapiens
MSVLTPLLLRGLTGSARRLPVPRAKIHSL

SEQ ID NO: 102 - protein, 29 aa, Homo sapiens
MSVLTPLLLRGLTGSARRLPVPRAKIHSL

SEQ ID NO: 103 - protein, 59 aa, unidentified
  source 1..59: note = /note="Description of Unknown: Bacterial signal sequence"
VTKITLSPQNFRIQKQETTLLKEKSTEKNSLAKSILAVKNHFIELRSKLSERFISHKNT

SEQ ID NO: 104 - protein, 23 aa, unidentified
  source 1..23: note = /note="Description of Unknown: Viral signal sequence"
MLSFVDTRTLLLLAVTSCLATCQ

SEQ ID NO: 105 - protein, 32 aa, unidentified
  source 1..32: note = /note="Description of Unknown: Viral signal sequence"
MGSSQAPRMGSVGGHGLMALLMAGLILPGILA

SEQ ID NO: 106 - protein, 17 aa, unidentified
  source 1..17: note = /note="Description of Unknown: Viral signal sequence"
MAGIFYFLFSFLFGICD

SEQ ID NO: 107 - protein, 22 aa, unidentified
  source 1..22: note = /note="Description of Unknown: Viral signal sequence"
MENRLLRVFLVWAALTMDGASA

SEQ ID NO: 108 - protein, 27 aa, unidentified
  source 1..27: note = /note="Description of Unknown: Viral signal sequence"
MARQGCFGSYQVISLFTFAIGVNLCLG

SEQ ID NO: 109 - protein, 19 aa, unidentified
  source 1..19: note = /note="Description of Unknown: Bacterial signal sequence"
MSRLPVLLLLQLLVRPGLQ

SEQ ID NO: 110 - protein, 29 aa, unidentified
  source 1..29: note = /note="Description of Unknown: Bacterial signal sequence"
MKQQKRLYARLLTLLFALIFLLPHSSASA

SEQ ID NO: 111 - protein, 22 aa, Homo sapiens
MATPLPPPSPRHLRLLRLLLSG

SEQ ID NO: 112 - protein, 18 aa, Homo sapiens
MKAPGRLVLIILCSVVFS

SEQ ID NO: 113 - protein, 13 aa, Homo sapiens
MLQLWKLLCGVLT

SEQ ID NO: 114 - protein, 13 aa, Homo sapiens
MLYLQGWSMPAVA

SEQ ID NO: 115 - protein, 48 aa, Homo sapiens
MDNVQPKIKHRPFCFSVKGHVKMLRLDIINSLVTTVFMLIVSVLALIP

SEQ ID NO: 116 - protein, 32 aa, Homo sapiens
MPCLDQQLTVHALPCPAQPSSLAFCQVGFLTA

SEQ ID NO: 117 - protein, 46 aa, Homo sapiens
MKTLFNPAPAIADLDPQFYTLSDVFCCNESEAEILTGLTVGSAADA

SEQ ID NO: 118 - protein, 19 aa, Homo sapiens
MKPLLVVFVFLFLWDPVLA

SEQ ID NO: 119 - protein, 21 aa, Homo sapiens [sequence omitted]

SEQ ID NO: 120 - protein, 70 aa, Homo sapiens
MVLTKPLQRNGSMMSFENVKEKSREGGPHAHTPEEELCFVVTHTPQVQTTLNLFFHIFKVLTQPLSLLWG

SEQ ID NO: 121 - protein, 32 aa, Homo sapiens
MATPPFRLIRKMFSFKVSRWMGLACFRSLAAS

SEQ ID NO: 122 - protein, 29 aa, Homo sapiens
MSFFQLLMKRKELIPLVVFMTVAAGGASS

SEQ ID NO: 123 - protein, 41 aa, Homo sapiens
MVSALRGAPLIRVHSSPVSSPSVSGPAALVSCLSSQSSALS

SEQ ID NO: 124 - protein, 20 aa, Homo sapiens
MMGSPVSHLLAGFCVWVVLG

SEQ ID NO: 125 - protein, 23 aa, Homo sapiens
MASMAAVLTWALALLSAFSATQA

SEQ ID NO: 126 - protein, 45 aa, Homo sapiens
MVLMWTSGDAFKTAYFLLKGAPLQFSVCGLLQVLVDLAILGQATA

SEQ ID NO: 127 - protein, 68 aa, Homo sapiens
MDFVAGAIGGVCGVAVGYPLDTVKVRIQTEPLYTGIWHCVRDTYHRERVWGFYRGLSLPVCTVSLVSS

SEQ ID NO: 128 - protein, 49 aa, Homo sapiens
MEKPLFPLVPLHWFGFGYTALVVSGGIVGYVKTGSVPSLAAGLLFGSLA

SEQ ID NO: 129 - protein, 15 aa, Homo sapiens
MGLLLPLALCILVLC

SEQ ID NO: 130 - protein, 26 aa, Homo sapiens
MGIQTSPVLLASLGVGLVTLLGLAVG

SEQ ID NO: 131 - protein, 25 aa, Homo sapiens
MSDLLLLGLIGGLTLLLLLTLLAFA

SEQ ID NO: 132 - protein, 29 aa, Homo sapiens
METVVIVAIGVLATIFLASFAALVLVCRQ

SEQ ID NO: 133 - protein, 35 aa, Homo sapiens
MAGSVECTWGWGHCAPSPLLLWTLLLFAAPFGLLG

SEQ ID NO: 134 - protein, 57 aa, Homo sapiens
MMPSRTNLATGIPSSKVKYSRLSSTDDGYIDLQFKKTPPKIPYKAIALATVLFLIGA

SEQ ID NO: 135 - protein, 36 aa, Homo sapiens
MALPQMCDGSHLASTLRYCMTVSGTVVLVAGTLCFA

SEQ ID NO: 136 - protein, 21 aa, Homo sapiens
MKKWFVAAGIGAGLLMLSSAA

SEQ ID NO: 137 - protein, 21 aa, Homo sapiens
MKQSTIALALLPLLFTPVTKA

SEQ ID NO: 138 - protein, 21 aa, Homo sapiens
MKKTAIAIAVALAGFATVAQA

SEQ ID NO: 139 - protein, 21 aa, unidentified
  source 1..21: note = /note="Description of Unknown: Bacterial signal sequence"
MKKLMLAIFFSVLSFPSFSQS

SEQ ID NO: 140 - protein, 23 aa, unidentified
  source 1..23: note = /note="Description of Unknown: Bacterial signal sequence"
MKKNIAFLLASMFVFSIATNAYA

SEQ ID NO: 141 - protein, 32 aa, Homo sapiens
MFAKRFKTSLLPLFAGFLLLFHLVLAGPAAAS

SEQ ID NO: 142 - protein, 19 aa, Homo sapiens
MRFPSIFTAVLFAASSALA

SEQ ID NO: 143 - protein, 19 aa, Homo sapiens
MRFPSIFTTVLFAASSALA

SEQ ID NO: 144 - protein, 19 aa, Homo sapiens
MRFPSIFTSVLFAASSALA

SEQ ID NO: 145 - protein, 19 aa, Homo sapiens
MRFPSIFTHVLFAASSALA

SEQ ID NO: 146 - protein, 19 aa, Homo sapiens
MRFPSIFTIVLFAASSALA

SEQ ID NO: 147 - protein, 19 aa, Homo sapiens
MRFPSIFTFVLFAASSALA

SEQ ID NO: 148 - protein, 19 aa, Homo sapiens
MRFPSIFTEVLFAASSALA

SEQ ID NO: 149 - protein, 19 aa, Homo sapiens
MRFPSIFTGVLFAASSALA

SEQ ID NO: 150 - protein, 21 aa, Homo sapiens
MRSSPLLRSAVVAALPVLALA

SEQ ID NO: 151 - protein, 22 aa, Homo sapiens
MGAAAVRWHLCVLLALGTRGRL

SEQ ID NO: 152 - protein, 17 aa, synthetic construct
  REGION 1..17: note = source = /note="Description of Artificial Sequence: Synthetic signal sequence"
MRSSLVLFFVSAWTALA

SEQ ID NO: 153 - protein, 32 aa, Homo sapiens
MLRGPGPGRLLLLAVLCLGTSVRCTETGKSKR

SEQ ID NO: 154 - protein, 26 aa, Homo sapiens
MLRGPGPGLLLLAVQCLGTAVPSTGA

SEQ ID NO: 155 - protein, 31 aa, Homo sapiens
MRRGALTGLLLVLCLSVVLRAAPSATSKKRR

SEQ ID NO: 156 - DNA, 1419 bp, Homo sapiens
  source 1..1419: mol_type = genomic DNA
ctctagtcccagtaggaggtttgactaagatcaatcatgacgacttacagtgacaaaggggcaaagcctgagagaggccgattcctccacttccactctgtgaccttctgggttggcaacgccaagcaggccacgtcattctactgcagcaagatgggctttgaacctctagcctacaggggcctggagaccggttcccgggaggtggtcagccatgtaatcaaacaagggaagattgtgtttgtcctctcctcagcgctcaacccctggaacaaagagatgggcgatcacctggtgaaacacggtgacggagtgaaggacattgcgttcgaggtggaagattgtgactacatcgtgcagaaagcacgggaacggggcgccaaaatcatgcgggagccctgggtagagcaagacaagtttgggaaggtgaagtttgctgtgctgcagacgtatggggacaccacacacaccctggtggagaagatgaactacatcggccaattcttgcctggatatgaggccccagcgttcatggaccccctacttcctaaactgcccaaatgcagtctggagatgatcgaccacattgtgggaaaccagcctgatcaggagatggtgtccgcctccgaatggtacctgaaaaacctgcagttccaccgcttctggtccgtggatgacacgcaggtgcacacggaatatagctctctgcgatccattgtggtggccaactatgaagagtccatcaagatgcccatcaatgagccagcgcctggcaagaagaagtcccagatccaggaatatgtggactataacgggggcgctggggtccagcacatcgctctcaagaccgaagacatcatcacagcgattcgccacttgagagagagaggcctggagttcttatctgttccctccacgtactacaaacaactgcgggagaagctgaagacggccaagatcaaggtgaaggagaacattgatgccctggaggagctgaaaatcctggtggactacgacgagaaaggctacctcctgcagatcttcaccaaaccggtgcaggaccggcccacgctcttcctggaagtcatccagcgccacaaccaccagggttttggagccggcaacttcaactcactgttcaaggctttcgaggaggagcagaacctgcggggtaacctcaccaacatggagaccaatggggtggtgcccggcatgtaagccccgcccaccccacggaggccacagccacacagccacgccccctgattctggaactcgcccaacttccctactggctgctccccttgggtcccgcccaccagcggactcggcccccaaggctccgcccacactgaccacgcccctcggcggggccgccctctgctccagccctcccgattaaagcgtgccccggtccaa

SEQ ID NO: 157 - DNA, 1709 bp, Homo sapiens
  source 1..1709: mol_type = genomic DNA
tgagcagcatagaagaaataatgccttttgagggacagttgcatttaacagacagccttactaaggcaagagttctggagccgccactgcactccagccggccttggcttctgagctttggattctgggcagtaatggtcacattcccagcgtcctggaaaagcttgcccttggcttctggccctgactctgcctcccactgactagtggacgtcactgcccctctctgggcctggcaacaccatcctgttcaatgaggctgcggctggatcagaggtccccaggcctggaaccttccagggctgggctcagctccccaccccatcccccagacgacttacagtgacaaaggggcaaagcctgagagaggccgattcctccacttccactctgtgaccttctgggttggcaacgccaagcaggccacgtcattctactgcagcaagatgggctttgaacctctagcctacaggggcctggagaccggttcccgggaggtggtcagccatgtaatcaaacaagggaagattgtgtttgtcctctcctcagcgctcaacccctggaacaaagagatgggcgatcacctggtgaaacacggtgacggagtgaaggacattgcgttcgaggtggaagattgtgactacatcgtgcagaaagcacgggaacggggcgccaaaatcatgcgggagccctgggtagagcaagacaagtttgggaaggtgaagtttgctgtgctgcagacgtatggggacaccacacacaccctggtggagaagatgaactacatcggccaattcttgcctggatatgaggccccagcgttcatggaccccctacttcctaaactgcccaaatgcagtctggagatgatcgaccacattgtgggaaaccagcctgatcaggagatggtgtccgcctccgaatggtacctgaaaaacctgcagttccaccgcttctggtccgtggatgacacgcaggtgcacacggaatatagctctctgcgatccattgtggtggccaactatgaagagtccatcaagatgcccatcaatgagccagcgcctggcaagaagaagtcccagatccaggaatatgtggactataacgggggcgctggggtccagcacatcgctctcaagaccgaagacatcatcacagcgattcgccacttgagagagagaggcctggagttcttatctgttccctccacgtactacaaacaactgcgggagaagctgaagacggccaagatcaaggtgaaggagaacattgatgccctggaggagctgaaaatcctggtggactacgacgagaaaggctacctcctgcagatcttcaccaaaccggtgcaggaccggcccacgctcttcctggaagtcatccagcgccacaaccaccagggttttggagccggcaacttcaactcactgttcaaggctttcgaggaggagcagaacctgcggggtaacctcaccaacatggagaccaatggggtggtgcccggcatgtaagccccgcccaccccacggaggccacagccacacagccacgccccctgattctggaactcgcccaacttccctactggctgctccccttgggtcccgcccaccagcggactcggcccccaaggctccgcccacactgaccacgcccctcggcggggccgccctctgctccagccctcccgattaaagcgtgccccggtc

SEQ ID NO: 158 - DNA, 1897 bp, Homo sapiens
  source 1..1897: mol_type = genomic DNA
acgcaattgcacaccaacgctaggggatgatctcgccccagctgactcattttctcattcgtgcagcagacatttattgagcgcctactgtatggatggatactgtacgccagagaaccgctgcgtggcgctccaattcagttcttcacatccacacagccctggaggatttacaaaatacattaagtgagcagcatagaagaaataatgccttttgagggacagttgcatttaacagacagccttactaaggcaagagttctggagccgccactgcactccagccggccttggcttctgagctttggattctgggcagtaatggtcacattcccagcgtcctggaaaagcttgcccttggcttctggccctgactctgcctcccactgactagtggacgtcactgcccctctctgggcctggcaacaccatcctgttcaatgaggctgcggctggatcagaggtccccaggcctggaaccttccagggctgggctcagctccccaccccatcccccagacgacttacagtgacaaaggggcaaagcctgagagaggccgattcctccacttccactctgtgaccttctgggttggcaacgccaagcaggccacgtcattctactgcagcaagatgggctttgaacctctagcctacaggggcctggagaccggttcccgggaggtggtcagccatgtaatcaaacaagggaagattgtgtttgtcctctcctcagcgctcaacccctggaacaaagagatgggcgatcacctggtgaaacacggtgacggagtgaaggacattgcgttcgaggtggaagattgtgactacatcgtgcagaaagcacgggaacggggcgccaaaatcatgcgggagccctgggtagagcaagacaagtttgggaaggtgaagtttgctgtgctgcagacgtatggggacaccacacacaccctggtggagaagatgaactacatcggccaattcttgcctggatatgaggccccagcgttcatggaccccctacttcctaaactgcccaaatgcagtctggagatgatcgaccacattgtgggaaaccagcctgatcaggagatggtgtccgcctccgaatggtacctgaaaaacctgcagttccaccgcttctggtccgtggatgacacgcaggtgcacacggaatatagctctctgcgatccattgtggtggccaactatgaagagtccatcaagatgcccatcaatgagccagcgcctggcaagaagaagtcccagatccaggaatatgtggactataacgggggcgctggggtccagcacatcgctctcaagaccgaagacatcatcacagcgattcgccacttgagagagagaggcctggagttcttatctgttccctccacgtactacaaacaactgcgggagaagctgaagacggccaagatcaaggtgaaggagaacattgatgccctggaggagctgaaaatcctggtggactacgacgagaaaggctacctcctgcagatcttcaccaaaccggtgcaggaccggcccacgctcttcctggaagtcatccagcgccacaaccaccagggttttggagccggcaacttcaactcactgttcaaggctttcgaggaggagcagaacctgcggggtaacctcaccaacatggagaccaatggggtggtgcccggcatgtaagccccgcccaccccacggaggccacagccacacagccacgccccctgattctggaactcgcccaacttccctactggctgctccccttgggtcccgcccaccagcggactcggcccccaaggctccgcccacactgaccacgcccctcggcggggccgccctctgctccagccctcccgattaaagcgtgccccggtcc

SEQ ID NO: 159 - DNA, 935 bp, Homo sapiens
  source 1..935: mol_type = genomic DNA
gcgcagccgcggtgggaggaggcaccggccgcgcggcgggaggaggtgccggccgagcaccgcagacagcgccgggaagatgagcacggaaggtggtggccgtcgctgccaggcacaagtgtcccgccgcatctccttcagcgcgagccaccgattgtacagtaaatttctaagtgatgaagaaaacttgaaactgtttgggaaatgcaacaatccaaatggccatgggcacaattataaagttgtggtgacagtacatggagagattgaccctgctacgggaatggttatgaatctggctgatctcaaaaaatatatggaggaggcgattatgcagccccttgatcataagaatctggatatggatgtgccatactttgcagatgtggtgagcacgactgaaaatgtagctgtttatatctgggacaacctccagaaagttcttcctgtaggagttctttataaagtaaaagtatacgaaactgacaataatattgtggtttataaaggagaatagctattggggttagcattgcacaaagcccagtttctttctgtgtttgaaaaagattttgatccccttggaatattaagaggtcaacacgtgattgttgtacgtacacattgtgctctggagtgcctatttattgaaatcattgtaagacctgttataaatttaagtctatttaaaactaaacttgtaatatacatcctgaaaatcatttagagagtcttttatttataaattaaaaatcacttcattttcacaaaatgttttggtgtgggattatttgaaagcaaaagaaatctaattttgttttctccattacctcattttagtattaatttttacttggtataatatacatggttaaaatgcttatgtgacttcgagtaggtgaatcttaaagaaataaaattcaagtgaccacaaa

SEQ ID NO: 160 - DNA, 4934 bp, Homo sapiens
  source 1..4934: mol_type = genomic DNA
aaccacgatgtctttggcacagcctctcatctgtcagatgggagcggggaccccggagagggagtcagccgaggtcctggcattccttgtgaacccccgtctgtgggtttctggtccagtgtcccttctccagattagatggcttaggcctcctctaagggggtgggcgtgcacatccggagagctgtctggtgtgcaggactgggctgcaggttaccctgaactgcaaccatcttagagcaaggcccagcttgcagcaggaggagctgcaggccgcccaccctagccacggcccctgccctggcaggaagcttccaagagtaaacactgcctaatcgtcccgcccagtagtgagcaggcctgtcccattccatactgaccagattcccagtcaccaaggccccctctcactccgctccactcctcgggctggctctcctgaggatgcaccagcgtcacccccgggcaagatgccctcccctctgtgtggccggaatccttgcctgtggctttctcctgggctgctggggaccctcccatttccagcagagttgtcttcaggctttggagccacaggccgtgtcttcttacttgagccctggtgctcccttaaaaggccgccctccttcccctggcttccagaggcagaggcagaggcagaggcgggctgcaggcggcatcctacacctggagctgctggtggccgtgggccccgatgtcttccaggctcaccaggaggacacagagcgctatgtgctcaccaacctcaacatcggggcagaactgcttcgggacccgtccctgggggctcagtttcgggtgcacctggtgaagatggtcattctgacagagcctgagggtgctccaaatatcacagccaacctcacctcgtccctgctgagcgtctgtgggtggagccagaccatcaaccctgaggacgacacggatcctggccatgctgacctggtcctctatatcactaggtttgacctggagttgcctgatggtaaccggcaggtgcggggcgtcacccagctgggcggtgcctgctccccaacctggagctgcctcattaccgaggacactggcttcgacctgggagtcaccattgcccatgagattgggcacagcttcggcctggagcacgacggcgcgcccggcagcggctgcggccccagcggacacgtgatggcttcggacggcgccgcgccccgcgccggcctcgcctggtccccctgcagccgccggcagctgctgagcctgctcagcgcaggacgggcgcgctgcgtgtgggacccgccgcggcctcaacccgggtccgcggggcacccgccggatgcgcagcctggcctctactacagcgccaacgagcagtgccgcgtggccttcggccccaaggctgtcgcctgcaccttcgccagggagcacctggatatgtgccaggccctctcctgccacacagacccgctggaccaaagcagctgcagccgcctcctcgttcctctcctggatgggacagaatgtggcgtggagaagtggtgctccaagggtcgctgccgctccctggtggagctgacccccatagcagcagtgcatgggcgctggtctagctggggtccccgaagtccttgctcccgctcctgcggaggaggtgtggtcaccaggaggcggcagtgcaacaaccccagacctgcctttggggggcgtgcatgtgttggtgctgacctccaggccgagatgtgcaacactcaggcctgcgagaagacccagctggagttcatgtcgcaacagtgcgccaggaccgacggccagccgctgcgctcctcccctggcggcgcctccttctaccactggggtgctgctgtaccacacagccaaggggatgctctgtgcagacacatgtgccgggccattggcgagagcttcatcatgaagcgtggagacagcttcctcgatgggacccggtgtatgccaagtggcccccgggaggacgggaccctgagcctgtgtgtgtcgggcagctgcaggacatttggctgtgatggtaggatggactcccagcaggtatgggacaggtgccaggtgtgtggtggggacaacagcacgtgcagcccacggaagggctctttcacagctggcagagcgagagaatatgtcacgtttctgacagttacccccaacctgaccagtgtctacattgccaaccacaggcctctcttcacacacttggcggtgaggatcggagggcgctatgtcgtggctgggaagatgagcatctcccctaacaccacctacccctccctcctggaggatggtcgtgtcgagtacagagtggccctcaccgaggaccggctgccccgcctggaggagatccgcatctggggacccctccaggaagatgctgacatccaggtttacaggcggtatggcgaggagtatggcaacctcacccgcccagacatcaccttcacctacttccagcctaagccacggcaggcctgggtgtgggccgctgtgcgtgggccctgctcggtgagctgtggggcagggctgcgctgggtaaactacagctgcctggaccaggccaggaaggagttggtggagactgtccagtgccaagggagccagcagccaccagcgtggccagaggcctgcgtgctcgaaccctgccctccctactgggcggtgggagacttcggcccatgcagcgcctcctgtgggggtggcctgcgggagcggccagtgcgctgcgtggaggcccagggcagcctcctgaagacattgcccccagcccggtgcagagcaggggcccagcagccagctgtggcgctggaaacctgcaacccccagccctgccctgccaggtgggaggtgtcagagcccagctcatgcacatcagctggtggagcaggcctggccttggagaacgagacctgtgtgccaggggcagatggcctggaggctccagtgactgaggggcctggctccgtagatgagaagctgcctgcccctgagccctgtgtcgggatgtcatgtcctccaggctggggccatctggatgccacctctgcaggggagaaggctccctccccatggggcagcatcaggacgggggctcaagctgcacacgtgtggacccctgcggcagggtcgtgctccgtctcctgcgggcgaggtctgatggagctgcgtttcctgtgcatggactctgccctcagggtgcctgtccaggaagagctgtgtggcctggcaagcaagcctgggagccggcgggaggtctgccaggctgtcccgtgccctgctcggtggcagtacaagctggcggcctgcagcgtgagctgtgggagaggggtcgtgcggaggatcctgtattgtgcccgggcccatggggaggacgatggtgaggagatcctgttggacacccagtgccaggggctgcctcgcccggaaccccaggaggcctgcagcctggagccctgcccacctaggtggaaagtcatgtcccttggcccatgttcggccagctgtggccttggcactgctagacgctcggtggcctgtgtgcagctcgaccaaggccaggacgtggaggtggacgaggcggcctgtgcggcgctggtgcggcccgaggccagtgtcccctgtctcattgccgactgcacctaccgctggcatgttggcacctggatggagtgctctgtttcctgtggggatggcatccagcgccggcgtgacacctgcctcggaccccaggcccaggcgcctgtgccagctgatttctgccagcacttgcccaagccggtgactgtgcgtggctgctgggctgggccctgtgtgggacagggtacgcccagcctggtgccccacgaagaagccgctgctccaggacggaccacagccacccctgctggtgcctccctggagtggtcccaggcccggggcctgctcttctccccggctccccagcctcggcggctcctgcccgggccccaggaaaactcagtgcagtccagtgcctgtggcaggcagcaccttgagccaacaggaaccattgacatgcgaggcccagggcaggcagactgtgcagtggccattgggcggcccctcggggaggtggtgaccctccgcgtccttgagagttctctcaactgcagtgcgggggacatgttgctgctttggggccggctcacctggaggaagatgtgcaggaagctgttggacatgactttcagctccaagaccaacacgctggtggtgaggcagcgctgcgggcggccaggaggtggggtgctgctgcggtatgggagccagcttgctcctgaaaccttctacagagaatgtgacatgcagctctttgggccctggggtgaaatcgtgagcccctcgctgagtccagccacgagtaatgcagggggctgccggctcttcattaatgtggctccgcacgcacggattgccatccatgccctggccaccaacatgggcgctgggaccgagggagccaatgccagctacatcttgatccgggacacccacagcttgaggaccacagcgttccatgggcagcaggtgctctactgggagtcagagagcagccaggctgagatggagttcagcgagggcttcctgaaggctcaggccagcctgcggggccagtactggaccctccaatcatgggtaccggagatgcaggaccctcagtcctggaagggaaaggaaggaacctgagggtcattgaacatttgttccgtgtctggccagccctggagggttgacccctggtctcagtgctttccaattcgaactttttccaatcttaggtatctactttagagtcttctccaatgtccaaaaggctagggggttggaggtggggactctggaaaagcagcccccatttcctcgggtaccaataaataaaacatgcaggctga

SEQ ID NO: 161 - DNA, 5963 bp, Homo sapiens
  source 1..5963: mol_type = genomic DNA
aatattcttaactagtcaaactgagtcatgtgtactctgctctgctggaaaagtgactttctgtcttccatcaatcgtggcagaggcgtttccaagaggaggctgggcaggcaaaaacaggtgtctaaaccctactgattgagggctggctatgtgtattctaagctggaagaaatggactgttgaaggggaagaagaaccatgtcttactcatctctctattcctagcacagttgagtggctaagtgcaagtgctctgaaaatgattgtctaacagatgaacaatatatagaaactatgttccaacttcctgtcaacaatcttggcagtttaagaaaagcccggaaaactgtgaaaaaaatacttagtgacattgggttggaatactgtaaagaacatatagaagattttaaacaatttgaacctaatgacttttatttgaaaaacactacatgggaggatgtaggactgtgggacccatcacttacgaaaaaccaggactatcggacaaaacctttctgctgcagcgcttgtccattttcctcaaaattcttctctgcctacaaaagtcatttccgcaatgtccatagtgaagactttgaaaataggattctccttaattgcccctactgtaccttcaatgcagacaaaaagactttggaaacacacattaaaatatttcatgctccgaacgccagcgcaccaagtagcagcctcagcactttcaaagataaaaacaaaaatgatggccttaaacctaagcaggctgacagtgtagagcaagctgtttattactgtaagaagtgcacttaccgagatcctctttatgaaatagttaggaagcacatttacagggaacattttcagcatgtggcagcaccttacatagcaaaggcaggagaaaaatcactcaatggggcagtccccttaggctcgaatgcccgagaagagagtagtattcactgcaagcgatgccttttcatgccaaagtcctatgaagctttggtacagcatgtcatcgaagaccatgaacgtataggctatcaggtcactgccatgattgggcacacaaatgtagtggttccccgatccaaacccttgatgctaattgctcccaaacctcaagacaagaagagcatgggactcccaccaaggatcggttcccttgcttctggaaatgtccggtctttaccatcacagcagatggtgaatcgactctcaataccaaagcctaacttaaattctacaggagtcaacatgatgtccagtgttcatctgcagcagaacaactatggagtcaaatctgtaggccagggttacagtgttggtcagtcaatgagactgggtctaggtggcaacgcaccagtttccattcctcaacaatctcagtctgtaaagcagttacttccaagtggaaacggaaggtcttatgggcttgggtcagagcagaggtcccaggcaccagcaagatactccctgcagtctgctaatgcctcttctctctcatcgggccagttaaagtctccttccctctctcagtcacaggcatccagagtgttaggtcagtccagttccaaacctgctgcagctgccacaggccctcccccaggtaacacttcctcaactcaaaagtggaaaatatgtacaatctgtaatgagctttttcctgaaaatgtctatagtgtgcacttcgaaaaagaacataaagctgagaaagtcccagcagtagccaactacattatgaaaatacacaattttactagcaaatgcctctactgtaatcgctatttacccacagatactctgctcaaccatatgttaattcatggtctgtcttgtccatattgccgttcaactttcaatgatgtggaaaagatggccgcacacatgcggatggttcacattgatgaagagatgggacctaaaacagattctactttgagttttgatttgacattgcagcagggtagtcacactaacatccatctcctggtaactacatacaatctgagggatgccccagctgaatctgttgcttaccatgcccaaaataatcctccagttcctccaaagccacagccaaaggttcaggaaaaggcagatatccctgtaaaaagttcacctcaagctgcagtgccctataaaaaagatgttgggaaaaccctttgtcctctttgcttttcaatcctaaaaggacccatatctgatgcacttgcacatcacttacgagagaggcaccaagttattcagacggttcatccagttgagaaaaagctcacctacaaatgtatccattgccttggtgtgtataccagcaacatgaccgcctcaactatcactctgcatctagttcactgcaggggcgttggaaagacccaaaatggccaggataagacaaatgcaccctctcggcttaatcagtctccaagtctggcacctgtgaagcgcacttacgagcaaatggaatttcccttactgaaaaaacgaaagttagatgatgatagtgattcacccagcttctttgaagagaagcctgaagagcctgttgttttagctttagaccccaagggtcatgaagatgattcctatgaagccaggaaaagctttctaacaaagtatttcaacaaacagccctatcccaccaggagagaaattgagaagctagcagccagtttatggttatggaagagtgacatcgcttcccattttagtaacaaaaggaagaagtgtgtccgtgattgtgaaaagtacaagcctggcgtgttgctggggtttaacatgaaagaattaaataaagtcaagcatgagatggattttgatgctgagtggctatttgaaaatcatgatgagaaggattccagagtcaatgctagtaagactgctgacaaaaagctcaaccttgggaaggaagatgacagttcctcagacagttttgaaaatttggaagaagaatccaatgaaagtggtagcccttttgaccctgtttttgaagttgaacctaaaatctctaacgataacccagaggaacatgtactgaaggtaattcctgaggatgcttcagaatctgaggagaagctagaccaaaaagaggatggttcaaaatacgaaactattcatttgactgaggaaccaaccaaactaatgcacaatgcatctgatagtgaggttgaccaagacgatgttgttgagtggaaagacggtgcttctccatctgagagtgggcctggatcccaacaagtgtcagactttgaggacaatacctgcgaaatgaaaccaggaacctggtctgacgagtcttcccaaagcgaagatgcaaggagcagtaagccagctgccaaaaaaaaggctaccatgcaaggtgacagagagcagttgaaatggaagaatagttcctatggaaaagttgaagggttttggtctaaggaccagtcacagtggaagaatgcatctgagaatgatgagcgcttatctaacccccagattgagtggcagaatagcacaattgacagtgaggatggggaacagtttgacaacatgactgatggagtagctgagcccatgcatggcagcttagccggagttaaactgagcagccaacaggcctaagtgccaggttccctggcgttggtgacatgctgcagcctggaactctgatatccagtgtgactgcaaagctgtcttctcactggtactgccttgtgagtactggttggactgtggggcatgtggccgctgcagttccagtggttatttctaagtctatgacaggacaggctgttcttgcttcagaaccttctctgacagacacggtaactaaatgtgaaaaaccaataagctggtgactcatgaatacacacgaggaaaagcagaggtttattttatctgccttttcaacatttctttccctctgtgaaatgattggtcagatgtctttgagaagtgttaaactaattcacatggtagtgtagggccaacatacaagctaccagtctaatgtgtatagtagactttgggaaaagcgattttttttcatgtattcattctgaatagttgaaatgtatatttgtacagtcttttagacctattcaagtgatgctcatgatcctgttactgtgtgcccatcatagatttctttttttagtgttgcccttgctgtgtaataaacgctctatctagtttacctagcaaaagctcaaaactgcgctagtatggactttttggacagacttagtttttgcacataaccttgtacaatcttgcaacagaggccagccacgtaagatatatatctggactctcttgtattataggatttttcttgttctgaatatccttgacattacagctgtcaaaaacaaaaactggtatttcagatctgttttctgaaatcttttaagctaaaatcacatgcaagaattgactttgcagctactaattttgacaccttttagatctgtataaaagtgtgttgtgttgaagcagcaaaccaatgagtgctgcattttggatatttagttttatctttagttcaacaccatcatggtggattcatttataccatctaatatatgacacactgttgtagtatgtataattttgtgatctttattttccctttgtattcattttaagcatctaaataaattgctgtattgtgcttaatgtaaatatttgctttattacacatgacagtcctgtgtgtccattatatcttttgccatttaatgccataactctttcatcagagatggcagccacagtcacagaggaaacttgtggaaaacccaagatctgtcatctgcaaatagaatgctttctcttgaggcacctggtacaaaatctgtttttcttttttttttttttttttttttttttttttaactgaaaaacaaacacccttgagtttttcagttcaccttttgttaaggagcagagcctgcatatatatgtaaatgtctcaatgataaaaaaaaaaatgtaaacatggattggcattaatttgcaagcagaatcttaatagcctgatgggttttttgtttgttttttcttctagatgaagttaaacgttcgttttcaccttacgatgggaacaactgtagtgcaggcggctctgcctctatttgccactcttggccctcttgctattaagggaaaggctttgaagagcacagcactgacagggctgtaaagatggaaggagctggtatttttaccatgcgtagattcccaagagaacttgtactaaaaagcagaaagttacaaggaagcagaattaggccaacatttccagcaattaaaacaatgatgggaaactccaatccatgaggaggctggtcagtcacctcaaggatagtggcctaaagaagtctgaagtggctgatgtccataacttctgagtctgtttccaaaagaaagactcttgttaatgctgttaccagagagtagagatttgaccagcctctccctaaaatgtaagcttctcaacaacagtacaggaagaagtgcaagagtagactagaacctttaaggaatttggggctggaacggagctatgttgcatctgttgttatacaggtagattataagttctacatgcaccagccaaaacttaggacaggatgtccccaaattaagatactacagattaccaaatcagaaataaccagctggatttaggccagctcacatttatttggaaattaccctccctgattaacaggcttctgagttgtacgtggaggactaatgagacttgtacaagacaccacggggcttggggtccaggtcccagttggatatcggaacagacacagataagtgtgtttcctcattaaggtggtgagagtgtgccttttggcattcagaaaagggtttagccaccctaagagttggaaataaagattcccaactggaaatgttgcagaatccctacaagtgtctcaataaaagccattttaaaagaa

SEQ ID NO: 162 - DNA, 5986 bp, Homo sapiens
  source 1..5986: mol_type = genomic DNA
ttgagcccagaaggttgaggctatggtgaatcgtgagtgcactgcagtcaatgaaccatgagtgcactgcactccagcctgcgcgacagagtaagactctgtcttaagaaaaggaaggaaggatggatggatggatatatcaagccatatgcacatgaaagcaggtgtgtgtctgtgtgtgtacacactagatgaggatatctatgcaccttttttgtcagatgggtaggttttatgatcctatcatcagtggaattagtaaatattacaagttgtacgtgttttgactttgacttaaatttttttttccaatagaaactatgttccaacttcctgtcaacaatcttggcagtttaagaaaagcccggaaaactgtgaaaaaaatacttagtgacattgggttggaatactgtaaagaacatatagaagattttaaacaatttgaacctaatgacttttatttgaaaaacactacatgggaggatgtaggactgtgggacccatcacttacgaaaaaccaggactatcggacaaaacctttctgctgcagcgcttgtccattttcctcaaaattcttctctgcctacaaaagtcatttccgcaatgtccatagtgaagactttgaaaataggattctccttaattgcccctactgtaccttcaatgcagacaaaaagactttggaaacacacattaaaatatttcatgctccgaacgccagcgcaccaagtagcagcctcagcactttcaaagataaaaacaaaaatgatggccttaaacctaagcaggctgacagtgtagagcaagctgtttattactgtaagaagtgcacttaccgagatcctctttatgaaatagttaggaagcacatttacagggaacattttcagcatgtggcagcaccttacatagcaaaggcaggagaaaaatcactcaatggggcagtccccttaggctcgaatgcccgagaagagagtagtattcactgcaagcgatgccttttcatgccaaagtcctatgaagctttggtacagcatgtcatcgaagaccatgaacgtataggctatcaggtcactgccatgattgggcacacaaatgtagtggttccccgatccaaacccttgatgctaattgctcccaaacctcaagacaagaagagcatgggactcccaccaaggatcggttcccttgcttctggaaatgtccggtctttaccatcacagcagatggtgaatcgactctcaataccaaagcctaacttaaattctacaggagtcaacatgatgtccagtgttcatctgcagcagaacaactatggagtcaaatctgtaggccagggttacagtgttggtcagtcaatgagactgggtctaggtggcaacgcaccagtttccattcctcaacaatctcagtctgtaaagcagttacttccaagtggaaacggaaggtcttatgggcttgggtcagagcagaggtcccaggcaccagcaagatactccctgcagtctgctaatgcctcttctctctcatcgggccagttaaagtctccttccctctctcagtcacaggcatccagagtgttaggtcagtccagttccaaacctgctgcagctgccacaggccctcccccaggtaacacttcctcaactcaaaagtggaaaatatgtacaatctgtaatgagctttttcctgaaaatgtctatagtgtgcacttcgaaaaagaacataaagctgagaaagtcccagcagtagccaactacattatgaaaatacacaattttactagcaaatgcctctactgtaatcgctatttacccacagatactctgctcaaccatatgttaattcatggtctgtcttgtccatattgccgttcaactttcaatgatgtggaaaagatggccgcacacatgcggatggttcacattgatgaagagatgggacctaaaacagattctactttgagttttgatttgacattgcagcagggtagtcacactaacatccatctcctggtaactacatacaatctgagggatgccccagctgaatctgttgcttaccatgcccaaaataatcctccagttcctccaaagccacagccaaaggttcaggaaaaggcagatatccctgtaaaaagttcacctcaagctgcagtgccctataaaaaagatgttgggaaaaccctttgtcctctttgcttttcaatcctaaaaggacccatatctgatgcacttgcacatcacttacgagagaggcaccaagttattcagacggttcatccagttgagaaaaagctcacctacaaatgtatccattgccttggtgtgtataccagcaacatgaccgcctcaactatcactctgcatctagttcactgcaggggcgttggaaagacccaaaatggccaggataagacaaatgcaccctctcggcttaatcagtctccaagtctggcacctgtgaagcgcacttacgagcaaatggaatttcccttactgaaaaaacgaaagttagatgatgatagtgattcacccagcttctttgaagagaagcctgaagagcctgttgttttagctttagaccccaagggtcatgaagatgattcctatgaagccaggaaaagctttctaacaaagtatttcaacaaacagccctatcccaccaggagagaaattgagaagctagcagccagtttatggttatggaagagtgacatcgcttcccattttagtaacaaaaggaagaagtgtgtccgtgattgtgaaaagtacaagcctggcgtgttgctggggtttaacatgaaagaattaaataaagtcaagcatgagatggattttgatgctgagtggctatttgaaaatcatgatgagaaggattccagagtcaatgctagtaagactgctgacaaaaagctcaaccttgggaaggaagatgacagttcctcagacagttttgaaaatttggaagaagaatccaatgaaagtggtagcccttttgaccctgtttttgaagttgaacctaaaatctctaacgataacccagaggaacatgtactgaaggtaattcctgaggatgcttcagaatctgaggagaagctagaccaaaaagaggatggttcaaaatacgaaactattcatttgactgaggaaccaaccaaactaatgcacaatgcatctgatagtgaggttgaccaagacgatgttgttgagtggaaagacggtgcttctccatctgagagtgggcctggatcccaacaagtgtcagactttgaggacaatacctgcgaaatgaaaccaggaacctggtctgacgagtcttcccaaagcgaagatgcaaggagcagtaagccagctgccaaaaaaaaggctaccatgcaaggtgacagagagcagttgaaatggaagaatagttcctatggaaaagttgaagggttttggtctaaggaccagtcacagtggaagaatgcatctgagaatgatgagcgcttatctaacccccagattgagtggcagaatagcacaattgacagtgaggatggggaacagtttgacaacatgactgatggagtagctgagcccatgcatggcagcttagccggagttaaactgagcagccaacaggcctaagtgccaggttccctggcgttggtgacatgctgcagcctggaactctgatatccagtgtgactgcaaagctgtcttctcactggtactgccttgtgagtactggttggactgtggggcatgtggccgctgcagttccagtggttatttctaagtctatgacaggacaggctgttcttgcttcagaaccttctctgacagacacggtaactaaatgtgaaaaaccaataagctggtgactcatgaatacacacgaggaaaagcagaggtttattttatctgccttttcaacatttctttccctctgtgaaatgattggtcagatgtctttgagaagtgttaaactaattcacatggtagtgtagggccaacatacaagctaccagtctaatgtgtatagtagactttgggaaaagcgattttttttcatgtattcattctgaatagttgaaatgtatatttgtacagtcttttagacctattcaagtgatgctcatgatcctgttactgtgtgcccatcatagatttctttttttagtgttgcccttgctgtgtaataaacgctctatctagtttacctagcaaaagctcaaaactgcgctagtatggactttttggacagacttagtttttgcacataaccttgtacaatcttgcaacagaggccagccacgtaagatatatatctggactctcttgtattataggatttttcttgttctgaatatccttgacattacagctgtcaaaaacaaaaactggtatttcagatctgttttctgaaatcttttaagctaaaatcacatgcaagaattgactttgcagctactaattttgacaccttttagatctgtataaaagtgtgttgtgttgaagcagcaaaccaatgagtgctgcattttggatatttagttttatctttagttcaacaccatcatggtggattcatttataccatctaatatatgacacactgttgtagtatgtataattttgtgatctttattttccctttgtattcattttaagcatctaaataaattgctgtattgtgcttaatgtaaatatttgctttattacacatgacagtcctgtgtgtccattatatcttttgccatttaatgccataactctttcatcagagatggcagccacagtcacagaggaaacttgtggaaaacccaagatctgtcatctgcaaatagaatgctttctcttgaggcacctggtacaaaatctgtttttcttttttttttttttttttttttttttttttaactgaaaaacaaacacccttgagtttttcagttcaccttttgttaaggagcagagcctgcatatatatgtaaatgtctcaatgataaaaaaaaaaatgtaaacatggattggcattaatttgcaagcagaatcttaatagcctgatgggttttttgtttgttttttcttctagatgaagttaaacgttcgttttcaccttacgatgggaacaactgtagtgcaggcggctctgcctctatttgccactcttggccctcttgctattaagggaaaggctttgaagagcacagcactgacagggctgtaaagatggaaggagctggtatttttaccatgcgtagattcccaagagaacttgtactaaaaagcagaaagttacaaggaagcagaattaggccaacatttccagcaattaaaacaatgatgggaaactccaatccatgaggaggctggtcagtcacctcaaggatagtggcctaaagaagtctgaagtggctgatgtccataacttctgagtctgtttccaaaagaaagactcttgttaatgctgttaccagagagtagagatttgaccagcctctccctaaaatgtaagcttctcaacaacagtacaggaagaagtgcaagagtagactagaacctttaaggaatttggggctggaacggagctatgttgcatctgttgttatacaggtagattataagttctacatgcaccagccaaaacttaggacaggatgtccccaaattaagatactacagattaccaaatcagaaataaccagctggatttaggccagctcacatttatttggaaattaccctccctgattaacaggcttctgagttgtacgtggaggactaatgagacttgtacaagacaccacggggcttggggtccaggtcccagttggatatcggaacagacacagataagtgtgtttcctcattaaggtggtgagagtgtgccttttggcattcagaaaagggtttagccaccctaagagttggaaataaagattcccaactggaaatgttgcagaatccctacaagtgtctcaataaaagccattttaaaagaa

SEQ ID NO: 163 - DNA, 6234 bp, Homo sapiens
  source 1..6234: mol_type = genomic DNA
gcagcgctaagggggattttggcgtcttctcagacacagctccctctctcggtccccgctgctgaggagcgagaggagcgcggccgccgccgcccgcgccggtgaagccgcctctcccacaccctccgtctcctccctccgcccctcctttgtctgcaccgctcgacgacgccgccgccgcccgccgctctgctgcgcccgccgcgccccccggcagcacccgcggccgcggcgcgagccggagtccgccgagccggagcgcgacgaggccccgggcgcgccctccccgctgccgccaccgccgtgccgccgccatccgcccgccgccgccgccgctgtccggcccccgagcacgccggccccgcgcgcgcctcgaggccgagtcaaggtgtgagatgcacaatgcgaaacctaggccccagcttttacaccatgatgcgcagggttgtactttttgtactgaactgataggtggcctagtggttatgccctgtactaccattttgaggatctggactccgtttcctgccttgctctttggaccacattgtcaattcacaccgaaactatgttccaacttcctgtcaacaatcttggcagtttaagaaaagcccggaaaactgtgaaaaaaatacttagtgacattgggttggaatactgtaaagaacatatagaagattttaaacaatttgaacctaatgacttttatttgaaaaacactacatgggaggatgtaggactgtgggacccatcacttacgaaaaaccaggactatcggacaaaacctttctgctgcagcgcttgtccattttcctcaaaattcttctctgcctacaaaagtcatttccgcaatgtccatagtgaagactttgaaaataggattctccttaattgcccctactgtaccttcaatgcagacaaaaagactttggaaacacacattaaaatatttcatgctccgaacgccagcgcaccaagtagcagcctcagcactttcaaagataaaaacaaaaatgatggccttaaacctaagcaggctgacagtgtagagcaagctgtttattactgtaagaagtgcacttaccgagatcctctttatgaaatagttaggaagcacatttacagggaacattttcagcatgtggcagcaccttacatagcaaaggcaggagaaaaatcactcaatggggcagtccccttaggctcgaatgcccgagaagagagtagtattcactgcaagcgatgccttttcatgccaaagtcctatgaagctttggtacagcatgtcatcgaagaccatgaacgtataggctatcaggtcactgccatgattgggcacacaaatgtagtggttccccgatccaaacccttgatgctaattgctcccaaacctcaagacaagaagagcatgggactcccaccaaggatcggttcccttgcttctggaaatgtccggtctttaccatcacagcagatggtgaatcgactctcaataccaaagcctaacttaaattctacaggagtcaacatgatgtccagtgttcatctgcagcagaacaactatggagtcaaatctgtaggccagggttacagtgttggtcagtcaatgagactgggtctaggtggcaacgcaccagtttccattcctcaacaatctcagtctgtaaagcagttacttccaagtggaaacggaaggtcttatgggcttgggtcagagcagaggtcccaggcaccagcaagatactccctgcagtctgctaatgcctcttctctctcatcgggccagttaaagtctccttccctctctcagtcacaggcatccagagtgttaggtcagtccagttccaaacctgctgcagctgccacaggccctcccccaggtaacacttcctcaactcaaaagtggaaaatatgtacaatctgtaatgagctttttcctgaaaatgtctatagtgtgcacttcgaaaaagaacataaagctgagaaagtcccagcagtagccaactacattatgaaaatacacaattttactagcaaatgcctctactgtaatcgctatttacccacagatactctgctcaaccatatgttaattcatggtctgtcttgtccatattgccgttcaactttcaatgatgtggaaaagatggccgcacacatgcggatggttcacattgatgaagagatgggacctaaaacagattctactttgagttttgatttgacattgcagcagggtagtcacactaacatccatctcctggtaactacatacaatctgagggatgccccagctgaatctgttgcttaccatgcccaaaataatcctccagttcctccaaagccacagccaaaggttcaggaaaaggcagatatccctgtaaaaagttcacctcaagctgcagtgccctataaaaaagatgttgggaaaaccctttgtcctctttgcttttcaatcctaaaaggacccatatctgatgcacttgcacatcacttacgagagaggcaccaagttattcagacggttcatccagttgagaaaaagctcacctacaaatgtatccattgccttggtgtgtataccagcaacatgaccgcctcaactatcactctgcatctagttcactgcaggggcgttggaaagacccaaaatggccaggataagacaaatgcaccctctcggcttaatcagtctccaagtctggcacctgtgaagcgcacttacgagcaaatggaatttcccttactgaaaaaacgaaagttagatgatgatagtgattcacccagcttctttgaagagaagcctgaagagcctgttgttttagctttagaccccaagggtcatgaagatgattcctatgaagccaggaaaagctttctaacaaagtatttcaacaaacagccctatcccaccaggagagaaattgagaagctagcagccagtttatggttatggaagagtgacatcgcttcccattttagtaacaaaaggaagaagtgtgtccgtgattgtgaaaagtacaagcctggcgtgttgctggggtttaacatgaaagaattaaataaagtcaagcatgagatggattttgatgctgagtggctatttgaaaatcatgatgagaaggattccagagtcaatgctagtaagactgctgacaaaaagctcaaccttgggaaggaagatgacagttcctcagacagttttgaaaatttggaagaagaatccaatgaaagtggtagcccttttgaccctgtttttgaagttgaacctaaaatctctaacgataacccagaggaacatgtactgaaggtaattcctgaggatgcttcagaatctgaggagaagctagaccaaaaagaggatggttcaaaatacgaaactattcatttgactgaggaaccaaccaaactaatgcacaatgcatctgatagtgaggttgaccaagacgatgttgttgagtggaaagacggtgcttctccatctgagagtgggcctggatcccaacaagtgtcagactttgaggacaatacctgcgaaatgaaaccaggaacctggtctgacgagtcttcccaaagcgaagatgcaaggagcagtaagccagctgccaaaaaaaaggctaccatgcaaggtgacagagagcagttgaaatggaagaatagttcctatggaaaagttgaagggttttggtctaaggaccagtcacagtggaagaatgcatctgagaatgatgagcgcttatctaacccccagattgagtggcagaatagcacaattgacagtgaggatggggaacagtttgacaacatgactgatggagtagctgagcccatgcatggcagcttagccggagttaaactgagcagccaacaggcctaagtgccaggttccctggcgttggtgacatgctgcagcctggaactctgatatccagtgtgactgcaaagctgtcttctcactggtactgccttgtgagtactggttggactgtggggcatgtggccgctgcagttccagtggttatttctaagtctatgacaggacaggctgttcttgcttcagaaccttctctgacagacacggtaactaaatgtgaaaaaccaataagctggtgactcatgaatacacacgaggaaaagcagaggtttattttatctgccttttcaacatttctttccctctgtgaaatgattggtcagatgtctttgagaagtgttaaactaattcacatggtagtgtagggccaacatacaagctaccagtctaatgtgtatagtagactttgggaaaagcgattttttttcatgtattcattctgaatagttgaaatgtatatttgtacagtcttttagacctattcaagtgatgctcatgatcctgttactgtgtgcccatcatagatttctttttttagtgttgcccttgctgtgtaataaacgctctatctagtttacctagcaaaagctcaaaactgcgctagtatggactttttggacagacttagtttttgcacataaccttgtacaatcttgcaacagaggccagccacgtaagatatatatctggactctcttgtattataggatttttcttgttctgaatatccttgacattacagctgtcaaaaacaaaaactggtatttcagatctgttttctgaaatcttttaagctaaaatcacatgcaagaattgactttgcagctactaattttgacaccttttagatctgtataaaagtgtgttgtgttgaagcagcaaaccaatgagtgctgcattttggatatttagttttatctttagttcaacaccatcatggtggattcatttataccatctaatatatgacacactgttgtagtatgtataattttgtgatctttattttccctttgtattcattttaagcatctaaataaattgctgtattgtgcttaatgtaaatatttgctttattacacatgacagtcctgtgtgtccattatatcttttgccatttaatgccataactctttcatcagagatggcagccacagtcacagaggaaacttgtggaaaacccaagatctgtcatctgcaaatagaatgctttctcttgaggcacctggtacaaaatctgtttttcttttttttttttttttttttttttttttttaactgaaaaacaaacacccttgagtttttcagttcaccttttgttaaggagcagagcctgcatatatatgtaaatgtctcaatgataaaaaaaaaaatgtaaacatggattggcattaatttgcaagcagaatcttaatagcctgatgggttttttgtttgttttttcttctagatgaagttaaacgttcgttttcaccttacgatgggaacaactgtagtgcaggcggctctgcctctatttgccactcttggccctcttgctattaagggaaaggctttgaagagcacagcactgacagggctgtaaagatggaaggagctggtatttttaccatgcgtagattcccaagagaacttgtactaaaaagcagaaagttacaaggaagcagaattaggccaacatttccagcaattaaaacaatgatgggaaactccaatccatgaggaggctggtcagtcacctcaaggatagtggcctaaagaagtctgaagtggctgatgtccataacttctgagtctgtttccaaaagaaagactcttgttaatgctgttaccagagagtagagatttgaccagcctctccctaaaatgtaagcttctcaacaacagtacaggaagaagtgcaagagtagactagaacctttaaggaatttggggctggaacggagctatgttgcatctgttgttatacaggtagattataagttctacatgcaccagccaaaacttaggacaggatgtccccaaattaagatactacagattaccaaatcagaaataaccagctggatttaggccagctcacatttatttggaaattaccctccctgattaacaggcttctgagttgtacgtggaggactaatgagacttgtacaagacaccacggggcttggggtccaggtcccagttggatatcggaacagacacagataagtgtgtttcctcattaaggtggtgagagtgtgccttttggcattcagaaaagggtttagccaccctaagagttggaaataaagattcccaactggaaatgttgcagaatccctacaagtgtctcaataaaagccattttaaaagaa

SEQ ID NO: 164 - DNA, 4969 bp, Homo sapiens
  source 1..4969: mol_type = genomic DNA
tttggctagggcaggttcggggactcggtccgaggcgcttgtattgtctgctgaggggagacgcgggatcagccccctcccccgcccgttgccgccgccgcctccgccggcccggtctcccctccgccgcccgccgggatccatgagctgaactcccgcccccccccccccggccgccgccatcttgtgccccctccccctcccgcaggcagcgctaagggggattttggcgtcttctcagacacagctccctctctcggtccccgctgctgaggagcgagaggagcgcggccgccgccgcccgcgccggtgaagccgcctctcccacaccctccgtctcctccctccgcccctcctttgtctgcaccgctcgacgacgccgccgccgcccgccgctctgctgcgcccgccgcgccccccggcagcacccgcggccgcggcgcgagccggagtccgccgagccggagcgcgacgaggccccgggcgcgccctccccgctgccgccaccgccgtgccgccgccatccgcccgccgccgccgccgctgtccggcccccgagcacgccggccccgcgcgcgcctcgaggccgagtcaagaaactatgttccaacttcctgtcaacaatcttggcagtttaagaaaagcccggaaaactgtgaaaaaaatacttagtgacattgggttggaatactgtaaagaacatatagaagattttaaacaatttgaacctaatgacttttatttgaaaaacactacatgggaggatgtaggactgtgggacccatcacttacgaaaaaccaggactatcggacaaaacctttctgctgcagcgcttgtccattttcctcaaaattcttctctgcctacaaaagtcatttccgcaatgtccatagtgaagactttgaaaataggattctccttaattgcccctactgtaccttcaatgcagacaaaaagactttggaaacacacattaaaatatttcatgctccgaacgccagcgcaccaagtagcagcctcagcactttcaaagataaaaacaaaaatgatggccttaaacctaagcaggctgacagtgtagagcaagctgtttattactgtaagaagtgcacttaccgagatcctctttatgaaatagttaggaagcacatttacagggaacattttcagcatgtggcagcaccttacatagcaaaggcaggagaaaaatcactcaatggggcagtccccttaggctcgaatgcccgagaagagagtagtattcactgcaagcgatgccttttcatgccaaagtcctatgaagctttggtacagcatgtcatcgaagaccatgaacgtataggctatcaggtcactgccatgattgggcacacaaatgtagtggttccccgatccaaacccttgatgctaattgctcccaaacctcaagacaagaagagcatgggactcccaccaaggatcggttcccttgcttctggaaatgtccggtctttaccatcacagcagatggtgaatcgactctcaataccaaagcctaacttaaattctacaggagtcaacatgatgtccagtgttcatctgcagcagaacaactatggagtcaaatctgtaggccagggttacagtgttggtcagtcaatgagactgggtctaggtggcaacgcaccagtttccattcctcaacaatctcagtctgtaaagcagttacttccaagtggaaacggaaggtcttatgggcttgggtcagagcagaggtcccaggcaccagcaagatactccctgcagtctgctaatgcctcttctctctcatcgggccagttaaagtctccttccctctctcagtcacaggcatccagagtgttaggtcagtccagttccaaacctgctgcagctgccacaggccctcccccaggtaacacttcctcaactcaaaagtggaaaatatgtacaatctgtaatgagctttttcctgaaaatgtctatagtgtgcacttcgaaaaagaacataaagctgagaaagtcccagcagtagccaactacattatgaaaatacacaattttactagcaaatgcctctactgtaatcgctatttacccacagatactctgctcaaccatatgttaattcatggtctgtcttgtccatattgccgttcaactttcaatgatgtggaaaagatggccgcacacatgcggatggttcacattgatgaagagatgggacctaaaacagattctactttgagttttgatttgacattgcagcagggtagtcacactaacatccatctcctggtaactacatacaatctgagggatgccccagctgaatctgttgcttaccatgcccaaaataatcctccagttcctccaaagccacagccaaaggttcaggaaaaggcagatatccctgtaaaaagttcacctcaagctgcagtgccctataaaaaagatgttgggaaaaccctttgtcctctttgcttttcaatcctaaaaggacccatatctgatgcacttgcacatcacttacgagagaggcaccaagttattcagacggttcatccagttgagaaaaagctcacctacaaatgtatccattgccttggtgtgtataccagcaacatgaccgcctcaactatcactctgcatctagttcactgcaggggcgttggaaagacccaaaatggccaggataagacaaatgcaccctctcggcttaatcagtctccaagtctggcacctgtgaagcgcacttacgagcaaatggaatttcccttactgaaaaaacgaaagttagatgatgatagtgattcacccagcttctttgaagagaagcctgaagagcctgttgttttagctttagaccccaagggtcatgaagatgattcctatgaagccaggaaaagctttctaacaaagtatttcaacaaacagccctatcccaccaggagagaaattgagaagctagcagccagtttatggttatggaagagtgacatcgcttcccattttagtaacaaaaggaagaagtgtgtccgtgattgtgaaaagtacaagcctggcgtgttgctggggtttaacatgaaagaattaaataaagtcaagcatgagatggattttgatgctgagtggctatttgaaaatcatgatgagaaggattccagagtcaatgctagtaagactgctgacaaaaagctcaaccttgggaaggaagatgacagttcctcagacagttttgaaaatttggaagaagaatccaatgaaagtggtagcccttttgaccctgtttttgaagttgaacctaaaatctctaacgataacccagaggaacatgtactgaaggtaattcctgaggatgcttcagaatctgaggagaagctagaccaaaaagaggatggttcaaaatacgaaactattcatttgactgaggaaccaaccaaactaatgcacaatgcatctgatagtgaggttgaccaagacgatgttgttgagtggaaagacggtgcttctccatctgagagtgggcctggatcccaacaagtgtcagactttgaggacaatacctgcgaaatgaaaccaggaacctggtctgacgagtcttcccaaagcgaagatgcaaggagcagtaagccagctgccaaaaaaaaggctaccatgcaaggtgacagagagcagttgaaatggaagaatagttcctatggaaaagttgaagggttttggtctaaggaccagtcacagtggaagaatgcatctgagaatgatgagcgcttatctaacccccagattgagtggcagaatagcacaattgacagtgaggatggggaacagtttgacaacatgactgatggagtagctgagcccatgcatggcagcttagccggagttaaactgagcagccaacaggcctaagtgccaggttccctggcgttggtgacatgctgcagcctggaactctgatatccagtgtgactgcaaagctgtcttctcactggtactgccttgtgagtactggttggactgtggggcatgtggccgctgcagttccagtggttatttctaagtctatgacaggacaggctgttcttgcttcagaaccttctctgacagacacggtaactaaatgtgaaaaaccaataagctggtgactcatgaatacacacgaggaaaagcagaggtttattttatctgccttttcaacatttctttccctctgtgaaatgattggtcagatgtctttgagaagtgttaaactaattcacatggtagtgtagggccaacatacaagctaccagtctaatgtgtatagtagactttgggaaaagcgattttttttcatgtattcattctgaatagttgaaatgtatatttgtacagtcttttagacctattcaagtgatgctcatgatcctgttactgtgtgcccatcatagatttctttttttagtgttgcccttgctgtgtaataaacgctctatctagtttacctagcaaaagctcaaaactgcgctagtatggactttttggacagacttagtttttgcacataaccttgtacaatcttgcaacagaggccagccacgtaagatatatatctggactctcttgtattataggatttttcttgttctgaatatccttgacattacagctgtcaaaaacaaaaactggtatttcagatctgttttctgaaatcttttaagctaaaatcacatgcaagaattgactttgcagctactaattttgacaccttttagatctgtataaaagtgtgttgtgttgaagcagcaaaccaatgagtgctgcattttggatatttagttttatctttagttcaacaccatcatggtggattcatttataccatctaatatatgacacactgttgtagtatgtataattttgtgatctttattttccctttgtattcattttaagcatctaaataaattgctgtattgtgcttaatgt

SEQ ID NO: 165 - DNA, 773 bp, Homo sapiens
  source 1..773: mol_type = genomic DNA
gcacaatgcgaaacctaggccccagcttttacaccatgatgcgcagggttgtactttttgtactgaactgataggtggcctagtggttatgccctgtactaccattttgaggatctggactccgtttcctgccttgctctttggaccacattgtcaattcacaccgaataccgtagcagtaggcaggacagttccaattcaacaaaaacctctttaccctggcactcaaaactgtaatgatgatgaactgaaactatgttccaacttcctgtcaacaatcttggcagtttaagaaaagcccggaaaactgtgaaaaaaatacttagtgacattgggttggaatactgtaaagaacatatagaagattttaaacaatttgaacctaatgacttttatttgaaaaacactacatgggaggatgtaggactgtgggacccatcacttacgaaaaaccaggactatcggacaaaacctttctgctgcagcgcttgtccattttcctcaaaattcttctctgcctacaaaagtcatttccgcaatgtccatagtgaagactttgaaaataggattctccttaattgcccctactgtaccttcaatgcagacaaaaagactttggaaacacacattaaaatatttcatgctccgaacgccagcgcaccaagtagcagcctcagcactttcaaagataaaaacaaaaatgatggccttaaacctaagcaggctgacagtgtagagcaagctgtttattactgtaagaagtgcacttaccg

SEQ ID NO: 166 - DNA, 2221 bp, Homo sapiens
  source 1..2221: mol_type = genomic DNA
cactgcctaatcgtcccgcccagtagtgagcaggcctgtcccattccatactgaccagattcccagtcaccaaggccccctctcactccgctccactcctcgggctggctctcctgaggatgcaccagcgtcacccccgggcaagatgccctcccctctgtgtggccggaatccttgcctgtggctttctcctgggctgctggggaccctcccatttccagcagagttgtcttcaggctttggagccacaggccgtgtcttcttacttgagccctggtgctcccttaaaaggccgccctccttcccctggcttccagaggcagaggcagaggcagaggcgggctgcaggcggcatcctacacctggagctgctggtggccgtgggccccgatgtcttccaggctcaccaggaggacacagagcgctatgtgctcaccaacctcaacatcggggcagaactgcttcgggacccgtccctgggggctcagtttcgggtgcacctggtgaagatggtcattctgacagagcctgagggtgccccaaatatcacagccaacctcacctcgtccctgctgagcgtctgtgggtggagccagaccatcaaccctgaggacgacacggatcctggccatgctgacctggtcctctatatcactaggtttgacctggagttgcctgatggtaaccggcaggtgcggggcgtcacccagctgggcggtgcctgctccccaacctggagctgcctcattaccgaggacactggcttcgacctgggagtcaccattgcccatgagattgggcacaggatatgtgccaggccctctcctgccacacagacccgctggaccaaagcagctgcagccgcctcctcgttcctctcctggatgggacagaatgtggcgtggagaagtggtgctccaagggtcgctgccgctccctggtggagctgacccccatagcagcagtgcatgggcgctggtctagctggggtccccgaagtccttgctcccgctcctgcggaggaggtgtggtcaccaggaggcggcagtgcaacaaccccaggcctgcgagaagacccagctggagttcatgtcgcaacagtgcgccaggaccgacggccagccgctgcgctcctcccctggcggcgcctccttctaccactggggtgctgctgtaccacacagccaaggggatgctctgtgcagacacatgtgccgggccattggcgagagcttcatcatgaagcgtggagacagcttcctcgatgggacccggtgtatgccaagtggcccccgggaggacgggaccctgagcctgtgtgtgtcgggcagctgcaggacatttggctgtgatggtaggatggactcccagcaggtatgggacaggtgccaggtgtgtggtggggacaacagcacgtgcagcccacggaagggctctttcacagctggcagagcgagagaatatgtcacatttctgacagttacccccaacctgaccagtgtctacattgccaaccacaggcctctcttcacacacttggcggtgaggatcggagggcgctatgtcgtggctgggaagatgagcatctcccctaacaccacctacccctccctcctggaggatggtcgtgtcgagtacagagtggccctcaccgaggaccggctgccccgcctggaggagatccgcatctggggacccctccaggaagatgctgacatccagctgggcggtgggagacttcggcccatgcagcgcctcctgtgggggcggcctgcgggagcggccagtgcgctgcgtggaggcccagggcagcctcctgaagacattgcccccagcccggtgcagagcaggggcccagcagccagctgtggcgctggaaacctgcaacccccagccctgccctgccaggtgggaggtgtcagagcccagctcatgcacatcagctggtggagcaggcctggccttggagaacgagacctgtgtgccaggggcagatggcctggaggctccagtgactgaggggcctggctccgtagatgagaagctgcctgcccctgagccctgtgtcgggatgtcatgtcctccaggctggggccatctggatgccacctctgcaggggagaaggctccctccccatggggcagcatcaggacgggggctcaagctgcacacgtgtggacccctgcggcagggtcgtgctccgtctcctgcgggcgaggt

SEQ ID NO: 167 - DNA, 4442 bp, Homo sapiens
  source 1..4442: mol_type = genomic DNA
acactgcctaatcgtcccgcccagtagtgagcaggcctgtcccattccatactgaccagattcccagtcaccaaggccccctctcactccgctccactcctcgggctggctctcctgaggatgcaccagcgtcacccccgggcaagatgccctcccctctgtgtggccggaatccttgcctgtggctttctcctgggctgctggggaccctcccatttccagcagagttgtcttcaggctttggagccacaggccgtgtcttcttacttgagccctggtgctcccttaaaaggccgccctccttcccctggcttccagaggcagaggcagaggcagaggcgggctgcaggcggcatcctacacctggagctgctggtggccgtgggccccgatgtcttccaggctcaccaggaggacacagagcgctatgtgctcaccaacctcaacatcggggcagaactgcttcgggacccgtccctgggggctcagtttcgggtgcacctggtgaagatggtcattctgacagagcctgagggtgccccaaatatcacagccaacctcacctcgtccctgctgagcgtctgtgggtggagccagaccatcaaccctgaggacgacacggatcctggccatgctgacctggtcctctatatcactaggtttgacctggagttgcctgatggtaaccggcaggtgcggggcgtcacccagctgggcggtgcctgctccccaacctggagctgcctcattaccgaggacactggcttcgacctgggagtcaccattgcccatgagattgggcacagcttcggcctggagcacgacggcgcgcccggcagcggctgcggccccagcggacacgtgatggcttcggacggcgccgcgccccgcgccggcctcgcctggtccccctgcagccgccggcagctgctgagcctgctcagcgcaggacgggcgcgctgcgtgtgggacccgccgcggcctcaacccgggtccgcggggcacccgccggatgcgcagcctggcctctactacagcgccaacgagcagtgccgcgtggccttcggccccaaggctgtcgcctgcaccttcgccagggagcacctggatatgtgccaggccctctcctgccacacagacccgctggaccaaagcagctgcagccgcctcctcgttcctctcctggatgggacagaatgtggcgtggagaagtggtgctccaagggtcgctgccgctccctggtggagctgacccccatagcagcagtgcatgggcgctggtctagctggggtccccgaagtccttgctcccgctcctgcggaggaggtgtggtcaccaggaggcggcagtgcaacaaccccagacctgcctttggggggcgtgcatgtgttggtgctgacctccaggccgagatgtgcaacactcaggcctgcgagaagacccagctggagttcatgtcgcaacagtgcgccaggaccgacggccagccgctgcgctcctcccctggcggcgcctccttctaccactggggtgctgctgtaccacacagccaaggggatgctctgtgcagacacatgtgccgggccattggcgagagcttcatcatgaagcgtggagacagcttcctcgatgggacccggtgtatgccaagtggcccccgggaggacgggaccctgagcctgtgtgtgtcgggcagctgcaggacatttggctgtgatggtaggatggactcccagcaggtatgggacaggtgccaggtgtgtggtggggacaacagcacgtgcagcccacggaagggctctttcacagctggcagagcgagagaatatgtcacatttctgacagttacccccaacctgaccagtgtctacattgccaaccacaggcctctcttcacacacttggcggtgaggatcggagggcgctatgtcgtggctgggaagatgagcatctcccctaacaccacctacccctccctcctggaggatggtcgtgtcgagtacagagtggccctcaccgaggaccggctgccccgcctggaggagatccgcatctggggacccctccaggaagatgctgacatccaggtttacaggcggtatggcgaggagtatggcaacctcacccgcccagacatcaccttcacctacttccagcctaagccacggcaggcctgggtgtgggccgctgtgcgtgggccctgctcggtgagctgtggggcagggctgcgctgggtaaactacagctgcctggaccaggccaggaaggagttggtggagactgtccagtgccaagggagccagcagccaccagcgtggccagaggcctgcgtgctcgaaccctgccctccctactgggcggtgggagacttcggcccatgcagcgcctcctgtgggggcggcctgcgggagcggccagtgcgctgcgtggaggcccagggcagcctcctgaagacattgcccccagcccggtgcagagcaggggcccagcagccagctgtggcgctggaaacctgcaacccccagccctgccctgccaggtgggaggtgtcagagcccagctcatgcacatcagctggtggagcaggcctggccttggagaacgagacctgtgtgccaggggcagatggcctggaggctccagtgactgaggggcctggctccgtagatgagaagctgcctgcccctgagccctgtgtcgggatgtcatgtcctccaggctggggccatctggatgccacctctgcaggggagaaggctccctccccatggggcagcatcaggacgggggctcaagctgcacacgtgtggacccctgcggcagggtcgtgctccgtctcctgcgggcgaggtctgatggagctgcgtttcctgtgcatggactctgccctcagggtgcctgtccaggaagagctgtgtggcctggcaagcaagcctgggagccggcgggaggtctgccaggctgtcccgtgccctgctcggtggcagtacaagctggcggcctgcagcgtgagctgtgggagaggggtcgtgcggaggatcctgtattgtgcccgggcccatggggaggacgatggtgaggagatcctgttggacacccagtgccaggggctgcctcgcccggaaccccaggaggcctgcagcctggagccctgcccacctaggtggaaagtcatgtcccttggcccatgttcggccagctgtggccttggcactgctagacgctcggtggcctgtgtgcagctcgaccaaggccaggacgtggaggtggacgaggcggcctgtgcggcgctggtgcggcccgaggccagtgtcccctgtctcattgccgactgcacctaccgctggcatgttggcacctggatggagtgctctgtttcctgtggggatggcatccagcgccggcgtgacacctgcctcggaccccaggcccaggcgcctgtgccagctgatttctgccagcacttgcccaagccggtgactgtgcgtggctgctgggctgggccctgtgtgggacagggtgcctgtggcaggcagcaccttgagccaacaggaaccattgacatgcgaggcccagggcaggcagactgtgcagtggccattgggcggcccctcggggaggtggtgaccctccgcgtccttgagagttctctcaactgcagtgcgggggacatgttgctgctttggggccggctcacctggaggaagatgtgcaggaagctgttggacatgactttcagctccaagaccaacacgctggtggtgaggcagcgctgcgggcggccaggaggtggggtgctgctgcggtatgggagccagcttgctcctgaaaccttctacagagaatgtgacatgcagctctttgggccctggggtgaaatcgtgagcccctcgctgagtccagccacgagtaatgcagggggctgccggctcttcattaatgtggctccgcacgcacggattgccatccatgccctggccaccaacatgggcgctgggaccgagggagccaatgccagctacatcttgatccgggacacccacagcttgaggaccacagcgttccatgggcagcaggtgctctactgggagtcagagagcagccaggctgagatggagttcagcgagggcttcctgaaggctcaggccagcctgcggggccagtactggaccctccaatcatgggtaccggagatgcaggaccctcagtcctggaagggaaaggaaggaacctgagggtcattgaacatttgttccgtgtctggccagccctggagggttgacccctggtctcagtgctttccaattcgaactttttccaatcttaggtatctactttagagtcttctccaatgtccaaaaggctagggggttggaggtggggactctggaaaagcagcccccatttcctcgggtaccaataaataaaacatgcaggctga

SEQ ID NO: 168 - DNA, 4349 bp, Homo sapiens
  source 1..4349: mol_type = genomic DNA
acactgcctaatcgtcccgcccagtagtgagcaggcctgtcccattccatactgaccagattcccagtcaccaaggccccctctcactccgctccactcctcgggctggctctcctgaggatgcaccagcgtcacccccgggcaagatgccctcccctctgtgtggccggaatccttgcctgtggctttctcctgggctgctggggaccctcccatttccagcagagttgtcttcaggctttggagccacaggccgtgtcttcttacttgagccctggtgctcccttaaaaggccgccctccttcccctggcttccagaggcagaggcagaggcagaggcgggctgcaggcggcatcctacacctggagctgctggtggccgtgggccccgatgtcttccaggctcaccaggaggacacagagcgctatgtgctcaccaacctcaacatcggggcagaactgcttcgggacccgtccctgggggctcagtttcgggtgcacctggtgaagatggtcattctgacagagcctgagggtgccccaaatatcacagccaacctcacctcgtccctgctgagcgtctgtgggtggagccagaccatcaaccctgaggacgacacggatcctggccatgctgacctggtcctctatatcactaggtttgacctggagttgcctgatggtaaccggcaggtgcggggcgtcacccagctgggcggtgcctgctccccaacctggagctgcctcattaccgaggacactggcttcgacctgggagtcaccattgcccatgagattgggcacagcttcggcctggagcacgacggcgcgcccggcagcggctgcggccccagcggacacgtgatggcttcggacggcgccgcgccccgcgccggcctcgcctggtccccctgcagccgccggcagctgctgagcctgctcagcgccaacgagcagtgccgcgtggccttcggccccaaggctgtcgcctgcaccttcgccagggagcacctggatatgtgccaggccctctcctgccacacagacccgctggaccaaagcagctgcagccgcctcctcgttcctctcctggatgggacagaatgtggcgtggagaagtggtgctccaagggtcgctgccgctccctggtggagctgacccccatagcagcagtgcatgggcgctggtctagctggggtccccgaagtccttgctcccgctcctgcggaggaggtgtggtcaccaggaggcggcagtgcaacaaccccagacctgcctttggggggcgtgcatgtgttggtgctgacctccaggccgagatgtgcaacactcaggcctgcgagaagacccagctggagttcatgtcgcaacagtgcgccaggaccgacggccagccgctgcgctcctcccctggcggcgcctccttctaccactggggtgctgctgtaccacacagccaaggggatgctctgtgcagacacatgtgccgggccattggcgagagcttcatcatgaagcgtggagacagcttcctcgatgggacccggtgtatgccaagtggcccccgggaggacgggaccctgagcctgtgtgtgtcgggcagctgcaggacatttggctgtgatggtaggatggactcccagcaggtatgggacaggtgccaggtgtgtggtggggacaacagcacgtgcagcccacggaagggctctttcacagctggcagagcgagagaatatgtcacatttctgacagttacccccaacctgaccagtgtctacattgccaaccacaggcctctcttcacacacttggcggtgaggatcggagggcgctatgtcgtggctgggaagatgagcatctcccctaacaccacctacccctccctcctggaggatggtcgtgtcgagtacagagtggccctcaccgaggaccggctgccccgcctggaggagatccgcatctggggacccctccaggaagatgctgacatccaggtttacaggcggtatggcgaggagtatggcaacctcacccgcccagacatcaccttcacctacttccagcctaagccacggcaggcctgggtgtgggccgctgtgcgtgggccctgctcggtgagctgtggggcagggctgcgctgggtaaactacagctgcctggaccaggccaggaaggagttggtggagactgtccagtgccaagggagccagcagccaccagcgtggccagaggcctgcgtgctcgaaccctgccctccctactgggcggtgggagacttcggcccatgcagcgcctcctgtgggggcggcctgcgggagcggccagtgcgctgcgtggaggcccagggcagcctcctgaagacattgcccccagcccggtgcagagcaggggcccagcagccagctgtggcgctggaaacctgcaacccccagccctgccctgccaggtgggaggtgtcagagcccagctcatgcacatcagctggtggagcaggcctggccttggagaacgagacctgtgtgccaggggcagatggcctggaggctccagtgactgaggggcctggctccgtagatgagaagctgcctgcccctgagccctgtgtcgggatgtcatgtcctccaggctggggccatctggatgccacctctgcaggggagaaggctccctccccatggggcagcatcaggacgggggctcaagctgcacacgtgtggacccctgcggcagggtcgtgctccgtctcctgcgggcgaggtctgatggagctgcgtttcctgtgcatggactctgccctcagggtgcctgtccaggaagagctgtgtggcctggcaagcaagcctgggagccggcgggaggtctgccaggctgtcccgtgccctgctcggtggcagtacaagctggcggcctgcagcgtgagctgtgggagaggggtcgtgcggaggatcctgtattgtgcccgggcccatggggaggacgatggtgaggagatcctgttggacacccagtgccaggggctgcctcgcccggaaccccaggaggcctgcagcctggagccctgcccacctaggtggaaagtcatgtcccttggcccatgttcggccagctgtggccttggcactgctagacgctcggtggcctgtgtgcagctcgaccaaggccaggacgtggaggtggacgaggcggcctgtgcggcgctggtgcggcccgaggccagtgtcccctgtctcattgccgactgcacctaccgctggcatgttggcacctggatggagtgctctgtttcctgtggggatggcatccagcgccggcgtgacacctgcctcggaccccaggcccaggcgcctgtgccagctgatttctgccagcacttgcccaagccggtgactgtgcgtggctgctgggctgggccctgtgtgggacagggtgcctgtggcaggcagcaccttgagccaacaggaaccattgacatgcgaggcccagggcaggcagactgtgcagtggccattgggcggcccctcggggaggtggtgaccctccgcgtccttgagagttctctcaactgcagtgcgggggacatgttgctgctttggggccggctcacctggaggaagatgtgcaggaagctgttggacatgactttcagctccaagaccaacacgctggtggtgaggcagcgctgcgggcggccaggaggtggggtgctgctgcggtatgggagccagcttgctcctgaaaccttctacagagaatgtgacatgcagctctttgggccctggggtgaaatcgtgagcccctcgctgagtccagccacgagtaatgcagggggctgccggctcttcattaatgtggctccgcacgcacggattgccatccatgccctggccaccaacatgggcgctgggaccgagggagccaatgccagctacatcttgatccgggacacccacagcttgaggaccacagcgttccatgggcagcaggtgctctactgggagtcagagagcagccaggctgagatggagttcagcgagggcttcctgaaggctcaggccagcctgcggggccagtactggaccctccaatcatgggtaccggagatgcaggaccctcagtcctggaagggaaaggaaggaacctgagggtcattgaacatttgttccgtgtctggccagccctggagggttgacccctggtctcagtgctttccaattcgaactttttccaatcttaggtatctactttagagtcttctccaatgtccaaaaggctagggggttggaggtggggactctggaaaagcagcccccatttcctcgggtaccaataaataaaacatgcaggctga

SEQ ID NO: 169 - DNA, 1074 bp, Homo sapiens
  source 1..1074: mol_type = genomic DNA
ggtgggcaaaggcatcttcctctgggaaggactggcacaagcacttggtccctgggttgtgtgcctgggaggccgggatcagggctggccctctttctccctggcaaagcaaaacctcccttttactactatcaaggggaagtaacttgaaggtgcctgtggcaggcagcaccttgagccaacaggaaccattgacatgcgaggcccagggcaggcagactgtgcagtggccattgggcggcccctcggggaggtggtgaccctccgcgtccttgagagttctctcaactgcagtgcgggggacatgttgctgctttggggccggctcacctggaggaagatgtgcaggaagctgttggacatgactttcagctccaagaccaacacgctggtggtgaggcagcgctgcgggcggccaggaggtggggtgctgctgcggtatgggagccagcttgctcctgaaaccttctacagagaatgtgacatgcagctctttgggccctggggtgaaatcgtgagcccctcgctgagtccagccacgagtaatgcagggggctgccggctcttcattaatgtggctccgcacgcacggattgccatccatgccctggccaccaacatgggcgctgggaccgagggagccaatgccagctacatcttgatccgggacacccacagcttgaggaccacagcgttccatgggcagcaggtgctctactgggagtcagagagcagccaggctgagatggagttcagcgagggcttcctgaaggctcaggccagcctgcggggccagtactggaccctccaatcatgggtaccggagatgcaggaccctcagtcctggaagggaaaggaaggaacctgagggtcattgaacatttgttccgtgtctggccagccctggagggttgacccctggtctcagtgctttccaattcgaactttttccaatcttaggtatctactttagagtcttctccaatgtccaaaaggctagggggttggaggtggggactctggaaaagcagcccccatttcctcgggtaccaataaataaaacatgcaggctga

SEQ ID NO: 170 - DNA, 1155 bp, Homo sapiens
  source 1..1155: mol_type = genomic DNA
acactgcctaatcgtcccgcccagtagtgagcaggcctgtcccattccatactgaccagattcccagtcaccaaggccccctctcactccgctccactcctcgggctggctctcctgaggatgcaccagcgtcacccccgggcaagatgccctcccctctgtgtggccggaatccttgcctgtggctttctcctgggctgctggggaccctcccatttccagcagagttgtcttcaggctttggagccacaggccgtgtcttcttacttgagccctggtgctcccttaaaaggccgccctccttcccctggcttccagaggcagaggcagaggcagaggcgggctgcaggcggcatcctacacctggagctgctggtggccgtgggccccgatgtcttccaggctcaccaggaggacacagagcgctatgtgctcaccaacctcaacatcggggcagaactgcttcgggacccgtccctgggggctcagtttcgggtgcacctggtgaagatggtcattctgacagagcctgagggtgccccaaatatcacagccaacctcacctcgtccctgctgagcgtctgtgggtggagccagaccatcaaccctgaggacgacacggatcctggccatgctgacctggtcctctatatcactaggtttgacctggagttgcctgatggtaaccggcaggtgcggggcgtcacccagctgggcggtgcctgctccccaacctggagctgcctcattaccgaggacactggcttcgacctgggagtcaccattgcccatgagattgggcacagcttcggcctggagcacgacggcgcgcccggcagcggctgcggccccagcggacacgtgatggcttcggacggcgccgcgccccgcgccggcctcgcctggtccccctgcagccgccggcagctgctgagcctgctcagacccgtccctccgtcgccgctccctctgctggccacccacctctgcgccggcaggagccttagtcttggtcccagccaagagccggctcctggtggggggcgcgggccgagaactcctgttcccactcacaaaaggccacgcttccaaacgcttccatcctcgtgcccactcctccgtcccgcctcctcccggtgtacaccccgggactga

SEQ ID NO: 171 - DNA, 4632 bp, Homo sapiens
  source 1..4632: mol_type = genomic DNA
aaccacgatgtctttggcacagcctctcatctgtcagatgggagcggggaccccggagagggagtcagccgaggtcctggcattccttgtgaacccccgtctgtgggtttctggtccagtgtcccttctccagattagatggcttaggcctcctctaagggggtgggcgtgcacatccggagagctgtctggtgtgcaggactgggctgcaggttaccctgaactgcaaccatcttagagcaaggcccagcttgcagcaggaggagctgcaggccgcccaccctagccacggcccctgccctggcaggaagcttccaagagtaaacactgcctaatcgtcccgcccagtagtgagcaggcctgtcccattccatactgaccagattcccagtcaccaaggccccctctcactccgctccactcctcgggctggctctcctgaggatgcaccagcgtcacccccgggcaagatgccctcccctctgtgtggccggaatccttgcctgtggctttctcctgggctgctggggaccctcccatttccagcagagttgtcttcaggctttggagccacaggccgtgtcttcttacttgagccctggtgctcccttaaaaggccgccctccttcccctggcttccagaggcagaggcagaggcagaggcgggctgcaggcggcatcctacacctggagctgctggtggccgtgggccccgatgtcttccaggctcaccaggaggacacagagcgctatgtgctcaccaacctcaacatcggggcagaactgcttcgggacccgtccctgggggctcagtttcgggtgcacctggtgaagatggtcattctgacagagcctgagggtgccccaaatatcacagccaacctcacctcgtccctgctgagcgtctgtgggtggagccagaccatcaaccctgaggacgacacggatcctggccatgctgacctggtcctctatatcactaggtttgacctggagttgcctgatggtaaccggcaggtgcggggcgtcacccagctgggcggtgcctgctccccaacctggagctgcctcattaccgaggacactggcttcgacctgggagtcaccattgcccatgagattgggcacaggatatgtgccaggccctctcctgccacacagacccgctggaccaaagcagctgcagccgcctcctcgttcctctcctggatgggacagaatgtggcgtggagaagtggtgctccaagggtcgctgccgctccctggtggagctgacccccatagcagcagtgcatgggcgctggtctagctggggtccccgaagtccttgctcccgctcctgcggaggaggtgtggtcaccaggaggcggcagtgcaacaaccccagacctgcctttggggggcgtgcatgtgttggtgctgacctccaggccgagatgtgcaacactcaggcctgcgagaagacccagctggagttcatgtcgcaacagtgcgccaggaccgacggccagccgctgcgctcctcccctggcggcgcctccttctaccactggggtgctgctgtaccacacagccaaggggatgctctgtgcagacacatgtgccgggccattggcgagagcttcatcatgaagcgtggagacagcttcctcgatgggacccggtgtatgccaagtggcccccgggaggacgggaccctgagcctgtgtgtgtcgggcagctgcaggacatttggctgtgatggtaggatggactcccagcaggtatgggacaggtgccaggtgtgtggtggggacaacagcacgtgcagcccacggaagggctctttcacagctggcagagcgagagaatatgtcacatttctgacagttacccccaacctgaccagtgtctacattgccaaccacaggcctctcttcacacacttggcggtgaggatcggagggcgctatgtcgtggctgggaagatgagcatctcccctaacaccacctacccctccctcctggaggatggtcgtgtcgagtacagagtggccctcaccgaggaccggctgccccgcctggaggagatccgcatctggggacccctccaggaagatgctgacatccaggtttacaggcggtatggcgaggagtatggcaacctcacccgcccagacatcaccttcacctacttccagcctaagccacggcaggcctgggtgtgggccgctgtgcgtgggccctgctcggtgagctgtggggcagggctgcgctgggtaaactacagctgcctggaccaggccaggaaggagttggtggagactgtccagtgccaagggagccagcagccaccagcgtggccagaggcctgcgtgctcgaaccctgccctccctactgggcggtgggagacttcggcccatgcagcgcctcctgtgggggcggcctgcgggagcggccagtgcgctgcgtggaggcccagggcagcctcctgaagacattgcccccagcccggtgcagagcaggggcccagcagccagctgtggcgctggaaacctgcaacccccagccctgccctgccaggtgggaggtgtcagagcccagctcatgcacatcagctggtggagcaggcctggccttggagaacgagacctgtgtgccaggggcagatggcctggaggctccagtgactgaggggcctggctccgtagatgagaagctgcctgcccctgagccctgtgtcgggatgtcatgtcctccaggctggggccatctggatgccacctctgcaggggagaaggctccctccccatggggcagcatcaggacgggggctcaagctgcacacgtgtggacccctgcggcagggtcgtgctccgtctcctgcgggcgaggtctgatggagctgcgtttcctgtgcatggactctgccctcagggtgcctgtccaggaagagctgtgtggcctggcaagcaagcctgggagccggcgggaggtctgccaggctgtcccgtgccctgctcggtggcagtacaagctggcggcctgcagcgtgagctgtgggagaggggtcgtgcggaggatcctgtattgtgcccgggcccatggggaggacgatggtgaggagatcctgttggacacccagtgccaggggctgcctcgcccggaaccccaggaggcctgcagcctggagccctgcccacctaggtggaaagtcatgtcccttggcccatgttcggccagctgtggccttggcactgctagacgctcggtggcctgtgtgcagctcgaccaaggccaggacgtggaggtggacgaggcggcctgtgcggcgctggtgcggcccgaggccagtgtcccctgtctcattgccgactgcacctaccgctggcatgttggcacctggatggagtgctctgtttcctgtggggatggcatccagcgccggcgtgacacctgcctcggaccccaggcccaggcgcctgtgccagctgatttctgccagcacttgcccaagccggtgactgtgcgtggctgctgggctgggccctgtgtgggacagggtacgcccagcctggtgccccacgaagaagccgctgctccaggacggaccacagccacccctgctggtgcctccctggagtggtcccaggcccggggcctgctcttctccccggctccccagcctcggcggctcctgcccgggccccaggaaaactcagtgcagtccagtgcctgtggcaggcagcaccttgagccaacaggaaccattgacatgcgaggcccagggcaggcagactgtgcagtggccattgggcggcccctcggggaggtggtgaccctccgcgtccttgagagttctctcaactgcagtgcgggggacatgttgctgctttggggccggctcacctggaggaagatgtgcaggaagctgttggacatgactttcagctccaagaccaacacgctggtggtgaggcagcgctgcgggcggccaggaggtggggtgctgctgcggtatgggagccagcttgctcctgaaaccttctacagagaatgtgacatgcagctctttgggccctggggtgaaatcgtgagcccctcgctgagtccagccacgagtaatgcagggggctgccggctcttcattaatgtggctccgcacgcacggattgccatccatgccctggccaccaacatgggcgctgggaccgagggagccaatgccagctacatcttgatccgggacacccacagcttgaggaccacagcgttccatgggcagcaggtgctctactgggagtcagagagcagccaggctgagatggagttcagcgagggcttcctgaaggctcaggccagcctgcggggccagtactggaccctccaatcatgggtaccggagatgcaggaccctcagtcctggaagggaaaggaaggaacctgagggtcattgaacatttgttccgtgtctggccagccctggagggttgacccctggtctcagtgctttccaattcgaactttttccaatcttaggtatctactttagagtcttctccaatgtccaaaaggctagggggttggaggtggggactctggaaaagcagcccccatttcctcgggtaccaataaataaaacatgcaggctg

SEQ ID NO: 172 - DNA, 4934 bp, Homo sapiens
  source 1..4934: mol_type = genomic DNA
aaccacgatgtctttggcacagcctctcatctgtcagatgggagcggggaccccggagagggagtcagccgaggtcctggcattccttgtgaacccccgtctgtgggtttctggtccagtgtcccttctccagattagatggcttaggcctcctctaagggggtgggcgtgcacatccggagagctgtctggtgtgcaggactgggctgcaggttaccctgaactgcaaccatcttagagcaaggcccagcttgcagcaggaggagctgcaggccgcccaccctagccacggcccctgccctggcaggaagcttccaagagtaaacactgcctaatcgtcccgcccagtagtgagcaggcctgtcccattccatactgaccagattcccagtcaccaaggccccctctcactccgctccactcctcgggctggctctcctgaggatgcaccagcgtcacccccgggcaagatgccctcccctctgtgtggccggaatccttgcctgtggctttctcctgggctgctggggaccctcccatttccagcagagttgtcttcaggctttggagccacaggccgtgtcttcttacttgagccctggtgctcccttaaaaggccgccctccttcccctggcttccagaggcagaggcagaggcagaggcgggctgcaggcggcatcctacacctggagctgctggtggccgtgggccccgatgtcttccaggctcaccaggaggacacagagcgctatgtgctcaccaacctcaacatcggggcagaactgcttcgggacccgtccctgggggctcagtttcgggtgcacctggtgaagatggtcattctgacagagcctgagggtgccccaaatatcacagccaacctcacctcgtccctgctgagcgtctgtgggtggagccagaccatcaaccctgaggacgacacggatcctggccatgctgacctggtcctctatatcactaggtttgacctggagttgcctgatggtaaccggcaggtgcggggcgtcacccagctgggcggtgcctgctccccaacctggagctgcctcattaccgaggacactggcttcgacctgggagtcaccattgcccatgagattgggcacagcttcggcctggagcacgacggcgcgcccggcagcggctgcggccccagcggacacgtgatggcttcggacggcgccgcgccccgcgccggcctcgcctggtccccctgcagccgccggcagctgctgagcctgctcagcgcaggacgggcgcgctgcgtgtgggacccgccgcggcctcaacccgggtccgcggggcacccgccggatgcgcagcctggcctctactacagcgccaacgagcagtgccgcgtggccttcggccccaaggctgtcgcctgcaccttcgccagggagcacctggatatgtgccaggccctctcctgccacacagacccgctggaccaaagcagctgcagccgcctcctcgttcctctcctggatgggacagaatgtggcgtggagaagtggtgctccaagggtcgctgccgctccctggtggagctgacccccatagcagcagtgcatgggcgctggtctagctggggtccccgaagtccttgctcccgctcctgcggaggaggtgtggtcaccaggaggcggcagtgcaacaaccccagacctgcctttggggggcgtgcatgtgttggtgctgacctccaggccgagatgtgcaacactcaggcctgcgagaagacccagctggagttcatgtcgcaacagtgcgccaggaccgacggccagccgctgcgctcctcccctggcggcgcctccttctaccactggggtgctgctgtaccacacagccaaggggatgctctgtgcagacacatgtgccgggccattggcgagagcttcatcatgaagcgtggagacagcttcctcgatgggacccggtgtatgccaagtggcccccgggaggacgggaccctgagcctgtgtgtgtcgggcagctgcaggacatttggctgtgatggtaggatggactcccagcaggtatgggacaggtgccaggtgtgtggtggggacaacagcacgtgcagcccacggaagggctctttcacagctggcagagcgagagaatatgtcacatttctgacagttacccccaacctgaccagtgtctacattgccaaccacaggcctctcttcacacacttggcggtgaggatcggagggcgctatgtcgtggctgggaagatgagcatctcccctaacaccacctacccctccctcctggaggatggtcgtgtcgagtacagagtggccctcaccgaggaccggctgccccgcctggaggagatccgcatctggggacccctccaggaagatgctgacatccaggtttacaggcggtatggcgaggagtatggcaacctcacccgcccagacatcaccttcacctacttccagcctaagccacggcaggcctgggtgtgggccgctgtgcgtgggccctgctcggtgagctgtggggcagggctgcgctgggtaaactacagctgcctggaccaggccaggaaggagttggtggagactgtccagtgccaagggagccagcagccaccagcgtggccagaggcctgcgtgctcgaaccctgccctccctactgggcggtgggagacttcggcccatgcagcgcctcctgtgggggcggcctgcgggagcggccagtgcgctgcgtggaggcccagggcagcctcctgaagacattgcccccagcccggtgcagagcaggggcccagcagccagctgtggcgctggaaacctgcaacccccagccctgccctgccaggtgggaggtgtcagagcccagctcatgcacatcagctggtggagcaggcctggccttggagaacgagacctgtgtgccaggggcagatggcctggaggctccagtgactgaggggcctggctccgtagatgagaagctgcctgcccctgagccctgtgtcgggatgtcatgtcctccaggctggggccatctggatgccacctctgcaggggagaaggctccctccccatggggcagcatcaggacgggggctcaagctgcacacgtgtggacccctgcggcagggtcgtgctccgtctcctgcgggcgaggtctgatggagctgcgtttcctgtgcatggactctgccctcagggtgcctgtccaggaagagctgtgtggcctggcaagcaagcctgggagccggcgggaggtctgccaggctgtcccgtgccctgctcggtggcagtacaagctggcggcctgcagcgtgagctgtgggagaggggtcgtgcggaggatcctgtattgtgcccgggcccatggggaggacgatggtgaggagatcctgttggacacccagtgccaggggctgcctcgcccggaaccccaggaggcctgcagcctggagccctgcccacctaggtggaaagtcatgtcccttggcccatgttcggccagctgtggccttggcactgctagacgctcggtggcctgtgtgcagctcgaccaaggccaggacgtggaggtggacgaggcggcctgtgcggcgctggtgcggcccgaggccagtgtcccctgtctcattgccgactgcacctaccgctggcatgttggcacctggatggagtgctctgtttcctgtggggatggcatccagcgccggcgtgacacctgcctcggaccccaggcccaggcgcctgtgccagctgatttctgccagcacttgcccaagccggtgactgtgcgtggctgctgggctgggccctgtgtgggacagggtacgcccagcctggtgccccacgaagaagccgctgctccaggacggaccacagccacccctgctggtgcctccctggagtggtcccaggcccggggcctgctcttctccccggctccccagcctcggcggctcctgcccgggccccaggaaaactcagtgcagtccagtgcctgtggcaggcagcaccttgagccaacaggaaccattgacatgcgaggcccagggcaggcagactgtgcagtggccattgggcggcccctcggggaggtggtgaccctccgcgtccttgagagttctctcaactgcagtgcgggggacatgttgctgctttggggccggctcacctggaggaagatgtgcaggaagctgttggacatgactttcagctccaagaccaacacgctggtggtgaggcagcgctgcgggcggccaggaggtggggtgctgctgcggtatgggagccagcttgctcctgaaaccttctacagagaatgtgacatgcagctctttgggccctggggtgaaatcgtgagcccctcgctgagtccagccacgagtaatgcagggggctgccggctcttcattaatgtggctccgcacgcacggattgccatccatgccctggccaccaacatgggcgctgggaccgagggagccaatgccagctacatcttgatccgggacacccacagcttgaggaccacagcgttccatgggcagcaggtgctctactgggagtcagagagcagccaggctgagatggagttcagcgagggcttcctgaaggctcaggccagcctgcggggccagtactggaccctccaatcatgggtaccggagatgcaggaccctcagtcctggaagggaaaggaaggaacctgagggtcattgaacatttgttccgtgtctggccagccctggagggttgacccctggtctcagtgctttccaattcgaactttttccaatcttaggtatctactttagagtcttctccaatgtccaaaaggctagggggttggaggtggggactctggaaaagcagcccccatttcctcgggtaccaataaataaaacatgcaggctga

SEQ ID NO: 173 - DNA, 2219 bp, Homo sapiens
  source 1..2219: mol_type = genomic DNA
cagcttcggcctggagcacgacggcgcgcccggcagcggctgcggccccagcggacacgtgatggcttcggacggcgccgcgccccgcgccggcctcgcctggtccccctgcagccgccggcagctgctgagcctgctcagacccgtccctccgtcgccgctccctctgctggccacccacctctgcgccggcaggagccttagtcttggtcccagccaagagccggctcctggtggggggcgcgggccgagaactcctgttcccactcacaaaaggccacgcttccaaacgcttccatcctcgtgcccactcctccgtcccgcctcctcccggtgtacaccccgggactgagccgggcctgagccgggccttgtcgcagcgcaggacgggcgcgctgcgtgtgggacccgccgcggcctcaacccgggtccgcggggcacccgccggatgcgcagcctggcctctactacagcgccaacgagcagtgccgcgtggccttcggccccaaggctgtcgcctgcaccttcgccagggagcacctggtgagtctgccggcggtggcctgggattggctgtgaggtccctccgcatcacccagctcacgtcccccaaaacgtgcatggatatgtgccaggccctctcctgccacacagacccgctggaccaaagcagctgcagccgcctcctcgttcctctcctggatgggacagaatgtggcgtggagaagtggtgctccaagggtcgctgccgctccctggtggagctgacccccatagcagcagtgcatgggcgctggtctagctggggtccccgaagtccttgctcccgctcctgcggaggaggtgtggtcaccaggaggcggcagtgcaacaaccccagacctgcctttggggggcgtgcatgtgttggtgctgacctccaggccgagatgtgcaacactcaggcctgcgagaagacccagctggagttcatgtcgcaacagtgcgccaggaccgacggccagccgctgcgctcctcccctggcggcgcctccttctaccactggggtgctgctgtaccacacagccaaggggatgctctgtgcagacacatgtgccgggccattggcgagagcttcatcatgaagcgtggagacagcttcctcgatgggacccggtgtatgccaagtggcccccgggaggacgggaccctgagcctgtgtgtgtcgggcagctgcaggacatttggctgtgatggtaggatggactcccagcaggtatgggacaggtgccaggtgtgtggtggggacaacagcacgtgcagcccacggaagggctctttcacagctggcagagcgagagaatatgtcacatttctgacagttacccccaacctgaccagtgtctacattgccaaccacaggcctctcttcacacacttggcggtgaggatcggagggcgctatgtcgtggctgggaagatgagcatctcccctaacaccacctacccctccctcctggaggatggtcgtgtcgagtacagagtggccctcaccgaggaccggctgccccgcctggaggagatccgcatctggggacccctccaggaagatgctgacatccaggtgggaggtgtcagagcccagctcatgcacatcagctggtggagcaggcctggccttggagaacgagacctgtgtgccaggggcagatggcctggaggctccagtgactgaggggcctggctccgtagatgagaagctgcctgcccctgagccctgtgtcgggatgtcatgtcctccaggctggggccatctggatgccacctctgcaggggagaaggctccctccccatggggcagcatcaggacgggggctcaagctgcacacgtgtggacccctgcggcagggtcgtgctccgtctcctgcgggcgaggtctgatggagctgcgtttcctgtgcatggactctgccctcagggtgcctgtccaggaagagctgtgtggcctggcaagcaagcctgggagccggcgggaggtctgccaggctgtcccgtgccctgctcggtggcagtacaagctggcggcctgcagcgtgagctgtgggagaggggtcgtgcggaggatcctgtattgtgcccgggcccatggggaggacgatggtgaggagatcctgttggacacccagtgccaggggctgcctcgcccggaaccccaggaggcctgcagcctggagccctg

SEQ ID NO: 174 - DNA, 1550 bp, Homo sapiens
  source 1..1550: mol_type = genomic DNA
tccttcttaaaaaaaaccagggctccagagaatcagaacagccaccatcaccgcagggagtcaagggaggagggagattagagaaggagccagggagggtggcagggaggccacgtgatccgagtcccctcacccctttccttcccacaggtccctggccaaagatttatttctcttgacaaccaagggcctccgtctggatttccaaggaagaatttcctctgaagcaccggaacttgctactaccagcaccatgccctaccaatatccagcactgaccccggagcagaagaaggagctgtctgacatcgctcaccgcatcgtggcacctggcaagggcatcctggctgcagatgagtccactgggagcattgccaagcggctgcagtccattggcaccgagaacaccgaggagaaccggcgcttctaccgccagctgctgctgacagctgacgaccgcgtgaacccctgcattgggggtgtcatcctcttccatgagacactctaccagaaggcggatgatgggcgtcccttcccccaagttatcaaatccaagggcggtgttgtgggcatcaaggtagacaagggcgtggtccccctggcagggacaaatggcgagactaccacccaagggttggatgggctgtctgagcgctgtgcccagtacaagaaggacggagctgacttcgccaagtggcgttgtgtgctgaagattggggaacacaccccctcagccctcgccatcatggaaaatgccaatgttctggcccgttatgccagtatctgccagcagaatggcattgtgcccatcgtggagcctgagatcctccctgatggggaccatgacttgaagcgctgccagtatgtgaccgagaaggtgctggctgctgtctacaaggctctgagtgaccaccacatctacctggaaggcaccttgctgaagcccaacatggtcaccccaggccatgcttgcactcagaagttttctcatgaggagattgccatggcgaccgtcacagcgctgcgccgcacagtgccccccgctgtcactgggatcaccttcctgtctggaggccagagtgaggaggaggcgtccatcaacctcaatgccattaacaagtgccccctgctgaagccctgggccctgaccttctcctacggccgagccctgcaggcctctgccctgaaggcctggggcgggaagaaggagaacctgaaggctgcgcaggaggagtatgtcaagcgagccctggccaacagccttgcctgtcaaggaaagtacactccgagcggtcaggctggggctgctgccagcgagtccctcttcgtctctaaccacgcctattaagcggaggtgttcccaggctgcccccaacactccaggccctgccccctcccactcttgaagaggaggccgcctcctcggggctccaggctggcttgcccgcgctctttcttccctcgtgacagtggtgtgtggtgtcgtctgtgaatgctaagtccatcaccctttccggcacactgccaaataaacagctatttaaggggga

SEQ ID NO: 175 - DNA, 2104 bp, Homo sapiens
  source 1..2104: mol_type = genomic DNA
tcgcctccgcgcgccgctagttccgccgccttctcgcgctccctgcgtgtcctctcgatgccctttcctccgcctcccttacgcctgggccagtgacagggtgtcggctccgcgccgattcagcccgcgggcgaggcaggctaacgcacgactgcgcgatgtggcccctatggtgacacgcgctgcagccgcgaagaccggaagctggggcggccccgggccgcgcgcgctgggcctgggaggcgaaactcagcttccttcgtttccgacttttccatccgcgtcctccacttccccgttccgccctcccccattgccaacattctggctgagtcacggcgccccagagcgcgccaggctgggggaaaggagcagaagggagggccctagcgacccgcgggatgtggtccgagtcacgtccgaggggggtggggagggatcgtgttctcggcgcccgccccttcctagcgcggcctctgggctgcgcctctcgggggcggcccgtagcccagtccgtcgcctgccattggacgccgcccgctcctcgtaaaggaaaaagctcggcggagggcggagtggtgcctttaaaaggccgggcgccgccttccgcctgcccgcctcctgcgccgccccttccgaggctaaatcggctgcgttcctctcggaacgcgccgcagaaggggtcctggtgacgagtcccgcgttctctccttgaatccactcgccagcccgccgccctctgccgccgcaccctgcacacccgcccctctcctgtgccaggaacttgctactaccagcaccatgccctaccaatatccagcactgaccccggagcagaagaaggagctgtctgacatcgctcaccgcatcgtggcacctggcaagggcatcctggctgcagatgagtccactgggagcattgccaagcggctgcagtccattggcaccgagaacaccgaggagaaccggcgcttctaccgccagctgctgctgacagctgacgaccgcgtgaacccctgcattgggggtgtcatcctcttccatgagacactctaccagaaggcggatgatgggcgtcccttcccccaagttatcaaatccaagggcggtgttgtgggcatcaaggtagacaagggcgtggtccccctggcagggacaaatggcgagactaccacccaagggttggatgggctgtctgagcgctgtgcccagtacaagaaggacggagctgacttcgccaagtggcgttgtgtgctgaagattggggaacacaccccctcagccctcgccatcatggaaaatgccaatgttctggcccgttatgccagtatctgccagcagaatggcattgtgcccatcgtggagcctgagatcctccctgatggggaccatgacttgaagcgctgccagtatgtgaccgagaaggtgctggctgctgtctacaaggctctgagtgaccaccacatctacctggaaggcaccttgctgaagcccaacatggtcaccccaggccatgcttgcactcagaagttttctcatgaggagattgccatggcgaccgtcacagcgctgcgccgcacagtgccccccgctgtcactgggatcaccttcctgtctggaggccagagtgaggaggaggcgtccatcaacctcaatgccattaacaagtgccccctgctgaagccctgggccctgaccttctcctacggccgagccctgcaggcctctgccctgaaggcctggggcgggaagaaggagaacctgaaggctgcgcaggaggagtatgtcaagcgagccctggccaacagccttgcctgtcaaggaaagtacactccgagcggtcaggctggggctgctgccagcgagtccctcttcgtctctaaccacgcctattaagcggaggtgttcccaggctgcccccaacactccaggccctgccccctcccactcttgaagaggaggccgcctcctcggggctccaggctggcttgcccgcgctctttcttccctcgtgacagtggtgtgtggtgtcgtctgtgaatgctaagtccatcaccctttccggcacactgccaaataaacagctatttaagggggagtcggc

SEQ ID NO: 176 - DNA, 1663 bp, Homo sapiens
  source 1..1663: mol_type = genomic DNA
aaaaggccgggcgccgccttccgcctgcccgcctcctgcgccgccccttccgaggctaaatcggctgcgttcctctcggaacgcgccgcagaaggggtcctggtgacgagtcccgcgttctctccttgaatccactcgccagcccgccgccctctgccgccgcaccctgcacacccgcccctctcctgtgccaggcaaggtgaccccatggcaaggcgcaagccagaagggtccagcttcaacatgacccacctgtccatggctatggccttttcctttcccccagttgccagtgggcaactccaccctcagctgggcaacacccagcaccagacagagttaggaaaggaacttgctactaccagcaccatgccctaccaatatccagcactgaccccggagcagaagaaggagctgtctgacatcgctcaccgcatcgtggcacctggcaagggcatcctggctgcagatgagtccactgggagcattgccaagcggctgcagtccattggcaccgagaacaccgaggagaaccggcgcttctaccgccagctgctgctgacagctgacgaccgcgtgaacccctgcattgggggtgtcatcctcttccatgagacactctaccagaaggcggatgatgggcgtcccttcccccaagttatcaaatccaagggcggtgttgtgggcatcaaggtagacaagggcgtggtccccctggcagggacaaatggcgagactaccacccaagggttggatgggctgtctgagcgctgtgcccagtacaagaaggacggagctgacttcgccaagtggcgttgtgtgctgaagattggggaacacaccccctcagccctcgccatcatggaaaatgccaatgttctggcccgttatgccagtatctgccagcagaatggcattgtgcccatcgtggagcctgagatcctccctgatggggaccatgacttgaagcgctgccagtatgtgaccgagaaggtgctggctgctgtctacaaggctctgagtgaccaccacatctacctggaaggcaccttgctgaagcccaacatggtcaccccaggccatgcttgcactcagaagttttctcatgaggagattgccatggcgaccgtcacagcgctgcgccgcacagtgccccccgctgtcactgggatcaccttcctgtctggaggccagagtgaggaggaggcgtccatcaacctcaatgccattaacaagtgccccctgctgaagccctgggccctgaccttctcctacggccgagccctgcaggcctctgccctgaaggcctggggcgggaagaaggagaacctgaaggctgcgcaggaggagtatgtcaagcgagccctggccaacagccttgcctgtcaaggaaagtacactccgagcggtcaggctggggctgctgccagcgagtccctcttcgtctctaaccacgcctattaagcggaggtgttcccaggctgcccccaacactccaggccctgccccctcccactcttgaagaggaggccgcctcctcggggctccaggctggcttgcccgcgctctttcttccctcgtgacagtggtgtgtggtgtcgtctgtgaatgctaagtccatcaccctttccggcacactgccaaataaacagctatttaaggg

SEQ ID NO: 177 - DNA, 2303 bp, Homo sapiens
  source 1..2303: mol_type = genomic DNA
cctagcttggcgcggaatccgtgaattgcccgcggcccgagggtgcagctcccggactgactggctctgcccttccccatggacgcctcctctagcccgtggaatccaaccccggctcctgtcagcagccctcccctgctgctccccatccctgccatcgtcttcatcgctgtgggcatctatttgttgctgctgggtctagtcctgctgactaggaactgcctgctggcccagggctgctgcgcggacggtagctccccctgcaggaagcaaggttcctccgggcccccagactgctgctggacctgtgcagaagcctgcaactttcctctgcctagcccggcccacttcctggatgcttgctgcccccagcccaccagagctgactgggcacctcgctgcccccgctgctgcccactctgcgactgtgcctgtacgtgccagctccccgactgccagagcctcaactgtctctgcttcgagatcaagctccgatgaggacccagggcccctgccctctggggagcggccagcccccagggcccatgtgccctcctccctgaagagcctttccccacgccactggaaccacagatggcctgccgagcacccaggcctgggaactggaagtggcagcgcagggcctggctccctgcagggcaggactcttggccggctggacggcagctcctctggagggccagaaaagagaggggctagtgctcgggcaggtgccctggcttcccttcccctccacacgtcaacgattctatttgaagttgggcaggggggtggcgctgctcaccacacacaagtgttataggaggagtctggcccttgagtaccgggtacgcaggggtgcctcaaccacactccgtccacggactctccgttattttaggaggtccctggccaaagatttatttctcttgacaaccaagggcctccgtctggatttccaaggaagaatttcctctgaagcaccggaacttgctactaccagcaccatgccctaccaatatccagcactgaccccggagcagaagaaggagctgtctgacatcgctcaccgcatcgtggcacctggcaagggcatcctggctgcagatgagtccactgggagcattgccaagcggctgcagtccattggcaccgagaacaccgaggagaaccggcgcttctaccgccagctgctgctgacagctgacgaccgcgtgaacccctgcattgggggtgtcatcctcttccatgagacactctaccagaaggcggatgatgggcgtcccttcccccaagttatcaaatccaagggcggtgttgtgggcatcaaggtagacaagggcgtggtccccctggcagggacaaatggcgagactaccacccaagggttggatgggctgtctgagcgctgtgcccagtacaagaaggacggagctgacttcgccaagtggcgttgtgtgctgaagattggggaacacaccccctcagccctcgccatcatggaaaatgccaatgttctggcccgttatgccagtatctgccagcagaatggcattgtgcccatcgtggagcctgagatcctccctgatggggaccatgacttgaagcgctgccagtatgtgaccgagaaggtgctggctgctgtctacaaggctctgagtgaccaccacatctacctggaaggcaccttgctgaagcccaacatggtcaccccaggccatgcttgcactcagaagttttctcatgaggagattgccatggcgaccgtcacagcgctgcgccgcacagtgccccccgctgtcactgggatcaccttcctgtctggaggccagagtgaggaggaggcgtccatcaacctcaatgccattaacaagtgccccctgctgaagccctgggccctgaccttctcctacggccgagccctgcaggcctctgccctgaaggcctggggcgggaagaaggagaacctgaaggctgcgcaggaggagtatgtcaagcgagccctggccaacagccttgcctgtcaaggaaagtacactccgagcggtcaggctggggctgctgccagcgagtccctcttcgtctctaaccacgcctattaagcggaggtgttcccaggctgcccccaacactccaggccctgccccctcccactcttgaagaggaggccgcctcctcggggctccaggctggcttgcccgcgctctttcttccctcgtgacagtggtgtgtggtgtcgtctgtgaatgctaagtccatcaccctttccggcacactgccaaataaacagctatttaaggggg

SEQ ID NO: 178 - DNA, 1539 bp, Homo sapiens
  source 1..1539: mol_type = genomic DNA
ggagggcggagtggtgcctttaaaaggccgggcgccgccttccgcctgcccgcctcctgcgccgccccttccgaggctaaatcggctgcgttcctctcggaacgcgccgcagaaggggtcctggtgacgagtcccgcgttctctccttgaatccactcgccagcccgccgccctctgccgccgcaccctgcacacccgcccctctcctgtgccaggaacttgctactaccagcaccatgccctaccaatatccagcactgaccccggagcagaagaaggagctgtctgacatcgctcaccgcatcgtggcacctggcaagggcatcctggctgcagatgagtccactgggagcattgccaagcggctgcagtccattggcaccgagaacaccgaggagaaccggcgcttctaccgccagctgctgctgacagctgacgaccgcgtgaacccctgcattgggggtgtcatcctcttccatgagacactctaccagaaggcggatgatgggcgtcccttcccccaagttatcaaatccaagggcggtgttgtgggcatcaaggtagacaagggcgtggtccccctggcagggacaaatggcgagactaccacccaagggttggatgggctgtctgagcgctgtgcccagtacaagaaggacggagctgacttcgccaagtggcgttgtgtgctgaagattggggaacacaccccctcagccctcgccatcatggaaaatgccaatgttctggcccgttatgccagtatctgccagcagaatggcattgtgcccatcgtggagcctgagatcctccctgatggggaccatgacttgaagcgctgccagtatgtgaccgagaaggtgctggctgctgtctacaaggctctgagtgaccaccacatctacctggaaggcaccttgctgaagcccaacatggtcaccccaggccatgcttgcactcagaagttttctcatgaggagattgccatggcgaccgtcacagcgctgcgccgcacagtgccccccgctgtcactgggatcaccttcctgtctggaggccagagtgaggaggaggcgtccatcaacctcaatgccattaacaagtgccccctgctgaagccctgggccctgaccttctcctacggccgagccctgcaggcctctgccctgaaggcctggggcgggaagaaggagaacctgaaggctgcgcaggaggagtatgtcaagcgagccctggccaacagccttgcctgtcaaggaaagtacactccgagcggtcaggctggggctgctgccagcgagtccctcttcgtctctaaccacgcctattaagcggaggtgttcccaggctgcccccaacactccaggccctgccccctcccactcttgaagaggaggccgcctcctcggggctccaggctggcttgcccgcgctctttcttccctcgtgacagtggtgtgtggtgtcgtctgtgaatgctaagtccatcaccctttccggcacactgccaaataaacagctatttaagggggagtcggc

SEQ ID NO: 179 - DNA, 2447 bp, Homo sapiens
  source 1..2447: mol_type = genomic DNA
atgccgcgaacggcttctgggcggggccggtccctcggacgattggacctagcttggcgcggaatccgtgaattgcccgcggcccgagggtgcagctcccggactgactggctctgcccttccccatggacgcctcctctagcccgtggaatccaaccccggctcctgtcagcagccctcccctgctgctccccatccctgccatcgtcttcatcgctgtgggcatctatttgttgctgctgggtctagtcctgctgactaggaactgcctgctggcccagggctgctgcgcggacggtagctccccctgcaggaagcaaggttcctccgggcccccagactgctgctggacctgtgcagaagcctgcaactttcctctgcctagcccggcccacttcctggatgcttgctgcccccagcccaccagagctggcttccattctggtgatggagagagagaaataaccaggccattacaacagagggtgagaaatgacgtgctatggagcagcggttgctcagccctgcatgcgatcagaagcaggactgggcacctcgctgcccccgctgctgcccactctgcgactgtgcctgtacgtgccagctccccgactgccagagcctcaactgtctctgcttcgagatcaagctccgatgaggacccagggcccctgccctctggggagcggccagcccccagggcccatgtgccctcctccctgaagagcctttccccacgccactggaaccacagatggcctgccgagcacccaggcctgggaactggaagtggcagcgcagggcctggctccctgcagggcaggactcttggccggctggacggcagctcctctggagggccagaaaagagaggggctagtgctcgggtccctggccaaagatttatttctcttgacaaccaagggcctccgtctggatttccaaggaagaatttcctctgaagcaccggcaaggtgaccccatggcaaggcgcaagccagaagggtccagcttcaacatgacccacctgtccatggctatggccttttcctttcccccagttgccagtgggcaactccaccctcagctgggcaacacccagcaccagacagagttaggaaaggaacttgctactaccagcaccatgccctaccaatatccagcactgaccccggagcagaagaaggagctgtctgacatcgctcaccgcatcgtggcacctggcaagggcatcctggctgcagatgagtccactgggagcattgccaagcggctgcagtccattggcaccgagaacaccgaggagaaccggcgcttctaccgccagctgctgctgacagctgacgaccgcgtgaacccctgcattgggggtgtcatcctcttccatgagacactctaccagaaggcggatgatgggcgtcccttcccccaagttatcaaatccaagggcggtgttgtgggcatcaaggtagacaagggcgtggtccccctggcagggacaaatggcgagactaccacccaagggttggatgggctgtctgagcgctgtgcccagtacaagaaggacggagctgacttcgccaagtggcgttgtgtgctgaagattggggaacacaccccctcagccctcgccatcatggaaaatgccaatgttctggcccgttatgccagtatctgccagcagaatggcattgtgcccatcgtggagcctgagatcctccctgatggggaccatgacttgaagcgctgccagtatgtgaccgagaaggtgctggctgctgtctacaaggctctgagtgaccaccacatctacctggaaggcaccttgctgaagcccaacatggtcaccccaggccatgcttgcactcagaagttttctcatgaggagattgccatggcgaccgtcacagcgctgcgccgcacagtgccccccgctgtcactgggatcaccttcctgtctggaggccagagtgaggaggaggcgtccatcaacctcaatgccattaacaagtgccccctgctgaagccctgggccctgaccttctcctacggccgagccctgcaggcctctgccctgaaggcctggggcgggaagaaggagaacctgaaggctgcgcaggaggagtatgtcaagcgagccctggccaacagccttgcctgtcaaggaaagtacactccgagcggtcaggctggggctgctgccagcgagtccctcttcgtctctaaccacgcctattaagcggaggtgttcccaggctgcccccaacactccaggccctgccccctcccactcttgaagaggaggccgcctcctcggggctccaggctggcttgcccgcgctctttcttccctcgtgacagtggtgtgtggtgtcgtctgtgaatgctaagtccatcaccctttccggcacactgccaaataaacagctatttaagggggagtcggc

SEQ ID NO: 180 - DNA, 1450 bp, Homo sapiens
  source 1..1450: mol_type = genomic DNA
aaaagggcaggggtcattagagaagatcggggacacatgtggggcgggcaggagctgccttataaccagcccgggaacccctagctcactcgctgctgaccaggctctgccggctccttcggcctcgccgcaggaacttgctactaccagcaccatgccctaccaatatccagcactgaccccggagcagaagaaggagctgtctgacatcgctcaccgcatcgtggcacctggcaagggcatcctggctgcagatgagtccactgggagcattgccaagcggctgcagtccattggcaccgagaacaccgaggagaaccggcgcttctaccgccagctgctgctgacagctgacgaccgcgtgaacccctgcattgggggtgtcatcctcttccatgagacactctaccagaaggcggatgatgggcgtcccttcccccaagttatcaaatccaagggcggtgttgtgggcatcaaggtagacaagggcgtggtccccctggcagggacaaatggcgagactaccacccaagggttggatgggctgtctgagcgctgtgcccagtacaagaaggacggagctgacttcgccaagtggcgttgtgtgctgaagattggggaacacaccccctcagccctcgccatcatggaaaatgccaatgttctggcccgttatgccagtatctgccagcagaatggcattgtgcccatcgtggagcctgagatcctccctgatggggaccatgacttgaagcgctgccagtatgtgaccgagaaggtgctggctgctgtctacaaggctctgagtgaccaccacatctacctggaaggcaccttgctgaagcccaacatggtcaccccaggccatgcttgcactcagaagttttctcatgaggagattgccatggcgaccgtcacagcgctgcgccgcacagtgccccccgctgtcactgggatcaccttcctgtctggaggccagagtgaggaggaggcgtccatcaacctcaatgccattaacaagtgccccctgctgaagccctgggccctgaccttctcctacggccgagccctgcaggcctctgccctgaaggcctggggcgggaagaaggagaacctgaaggctgcgcaggaggagtatgtcaagcgagccctggccaacagccttgcctgtcaaggaaagtacactccgagcggtcaggctggggctgctgccagcgagtccctcttcgtctctaaccacgcctattaagcggaggtgttcccaggctgcccccaacactccaggccctgccccctcccactcttgaagaggaggccgcctcctcggggctccaggctggcttgcccgcgctctttcttccctcgtgacagtggtgtgtggtgtcgtctgtgaatgctaagtccatcaccctttccggcacactgccaaataaacagctatttaaggggg

SEQ ID NO: 181 - DNA, 2005 bp, Homo sapiens
  source 1..2005: mol_type = genomic DNA
gagaagtacagagcaagtcccacgcacagtcctgaaaaaaattttaatcttcttttcttagaactatcttggttggcatcatcaggccctgagagcacagtgcatgtcagcatctaagattccacttttcaaaatgaaggacctgatactgatcctatgcctcctggaaatgagttttgcagtgccgttctttcctcagcaatctggaacaccgggtatggctagtttgagccttgagacaatgagacagttgggaagtctgcagagattaaacacactttctcagtattctagatacggctttggaaaatcatttaattctttgtggatgcacggtctcctcccaccacattcctctcttccatggatgaggccaagagaacatgaaactcaacagtatgaatattctttgcctgtgcatcccccacctctcccatcacagccatccttgaagcctcaacagccaggactgaaaccttttctccagtctgctgctgcaaccaccaaccaggccacagcactgaaagaagcacttcagcctccaattcacctgggacatctgcccttgcaggaaggagaactgcctctggttcagcagcaggtggcaccatcagataagccaccaaagcctgagctcccaggagtagattttgctgatccacaaggtccatcactcccaggaatggattttcctgatccacaaggtccatcactcccaggattggattttgctgatccacaaggttcaacaattttccaaatagcccgtttgatttctcacggaccaatgccacaaaataaacaatctccactttatccaggaatgttgtacgtgccttttggagcaaatcaattgaatgcccctgccagacttggcatcatgagttcagaagaagtggcaggcgggagagaagacccaatggcctatggagccatgtttccaggatttggaggcatgaggcccggctttgagggaatgccccacaacccagctatgggcggtgacttcactctggaatttgactccccagtggctgccaccaaaggccctgagaacgaagaaggaggtgcacaaggctcccctatgccggaggccaacccagacaatctagaaaacccagctttccttacagagctagaacctgctccccacgcagggctccttgctctccctaaggatgacattcccggcctgccaaggagcccttcagggaagatgaagggactccccagcgtcaccccagcagctgctgacccactgatgacccctgaattagctgatgtttataggacctacgatgctgacatgaccacatccgtggatttccaggaagaagcaaccatggataccacgatggccccaaactctctgcaaacatccatgccaggaaacaaagcccaggagcccgagatgatgcatgacgcatggcatttccaagagccctgacagctctaagatattagctactttctgtatgcacaagcttcccagctttgtccccacagtgtacctttttgctaaaacacttattacccttctgcagcaaaggcattaaaagcgctaagcatatattaataaatgcaagtggctagaaatagtgtaggtccccttcttgctttcaatatcttgttgaaataaaatgtgtcaattgtctctgtgatttagaaacactattaataacatcagagcaaggttctaagggtctcagcatttgatcatcactttttcttagctgtcttaagcattatagaatttctcttaccagcatgacactattatattcaggaaacatggcactgcttttttctctaagcaaaggcaaatatcctcataattctaagctaattcatttaaactttattaaatggggattggtggaaaactcctgactggtattactgggtttggtataatttaatttaaaattctcatttatagagtattttatttaatctagtataaaaaatctagcctattttaaataaagaatttttctcactgaaa

SEQ ID NO: 182 - DNA, 1512 bp, Homo sapiens
  source 1..1512: mol_type = genomic DNA
aattttaatcttcttttcttagaactatcttggttggcatcatcaggccctgagagcacagtgcatgtcagcatctaagattccacttttcaaaatgaaggacctgatactgatcctatgcctcctggaaatgagttttgcagtgccgttctttcctcagcaatctggaacaccgggtatggctagtttgagccttgagacaatgagacagttgggaagtctgcagagattaaacacactttctcagtattctagatacggctttggaaaatcatttaattctttgtggatgcacggtctcctcccaccacattcctctcttccatggatgaggccaagagaacatgaaactcaacagccatccttgaagcctcaacagccaggactgaaaccttttctccagtctgctgctgcaaccaccaaccaggccacagcactgaaagaagcacttcagcctccaattcacctgggacatctgcccttgcaggaaggagaactgcctctggttcagcagcaggtggcaccatcagataagccaccaaagcctgagctcccaggagtagattttgctgatccacaaggtccatcactcccaggaatggattttcctgatccacaaggtccatcactcccaggattggattttgctgatccacaaggttcaacaattttccaaatagcccgtttgatttctcacggaccaatgccacaaaataaacaatctccactttatccaggaatgttgtacgtgccttttggagcaaatcaattgaatgcccctgccagacttggcatcatgagttcagaagaagtggcaggcgggagagaagacccaatggcctatggagccatgtttccaggatttggaggcatgaggcccggctttgagggaatgccccacaacccagctatgggcggtgacttcactctggaatttgactccccagtggctgccaccaaaggccctgagaacgaagaaggaggtgcacaaggctcccctatgccggaggccaacccagacaatctagaaaacccagctttccttacagagctagaacctgctccccacgcagggctccttgctctccctaaggatgacattcccggcctgccaaggagcccttcagggaagatgaagggactccccagcgtcaccccagcagctgctgacccactgatgacccctgaattagctgatgtttataggacctacgatgctgacatgaccacatccgtggatttccaggaagaagcaaccatggataccacgatggccccaaactctctgcaaacatccatgccaggaaacaaagcccaggagcccgagatgatgcatgacgcatggcatttccaagagccctgacagctctaagatattagctactttctgtatgcacaagcttcccagctttgtccccacagtgtacctttttgctaaaacacttattacccttctgcagcaaaggcattaaaagcgctaagcatatattaataaatgcaagtggctagaaa

SEQ ID NO: 183 - DNA, 1979 bp, Homo sapiens
  source 1..1979: mol_type = genomic DNA
cacgcacagtcctgaaaaaaattttaatcttcttttcttagaactatcttggttggcatcatcaggccctgagagcacagtgcatgtcagcatctaagattccacttttcaaaatgaaggacctgatactgatcctatgcctcctggaaatgagttttgcagtgccgttctttcctcagcaatctggaacaccgggtatggctagtttgagccttgagacaatgagacagttgggaagtctgcagagattaaacacactttctcagtattctagatacggctttggaaaatcatttaattctttgtggatgcacggtctcctcccaccacattcctctcttccatggatgaggccaagagaacatgaaactcaacagtatgaatattctttgcctgtgcatcccccacctctcccatcacagccatccttgaagcctcaacagccaggactgaaaccttttctccagtctgctgctgcaaccaccaaccaggccacagcactgaaagaagcacttcagcctccaattcacctgggacatctgcccttgcaggaaggagaactgcctctggttcagcagcaggtggcaccatcagataagccaccaaagcctgagttgcgagtagattttgctgatccacaaggtccatcactcccaggaatggattttcctgatccacaaggtccatcactcccaggattggattttgctgatccacaaggttcaacaattttccaaatagcccgtttgatttctcacggaccaatgccacaaaataaacaatctccactttatccaggaatgttgtacgtgccttttggagcaaatcaattgaatgcccctgccagacttggcatcatgagttcagaagaagtggcaggcgggagagaagacccaatggcctatggagccatgtttccaggatttggaggcatgaggcccggctttgagggaatgccccacaacccagctatgggcggtgacttcactctggaatttgactccccagtggctgccaccaaaggccctgagaacgaagaaggaggtgcacaaggctcccctatgccggaggccaacccagacaatctagaaaacccagctttccttacagagctagaacctgctccccacgcagggctccttgctctccctaaggatgacattcccggcctgccaaggagcccttcagggaagatgaagggactccccagcgtcaccccagcagctgctgacccactgatgacccctgaattagctgatgtttataggacctacgatgctgacatgaccacatccgtggatttccaggaagaagcaaccatggataccacgatggccccaaactctctgcaaacatccatgccaggaaacaaagcccaggagcccgagatgatgcatgacgcatggcatttccaagagccctgacagctctaagatattagctactttctgtatgcacaagcttcccagctttgtccccacagtgtacctttttgctaaaacacttattacccttctgcagcaaaggcattaaaagcgctaagcatatattaataaatgcaagtggctagaaatagtgtaggtccccttcttgctttcaatatcttgttgaaataaaatgtgtcaattgtctctgtgatttagaaacactattaataacatcagagcaaggttctaagggtctcagcatttgatcatcactttttcttagctgtcttaagcattatagaatttctcttaccagcatgacactattatattcaggaaacatggcactgcttttttctctaagcaaaggcaaatatcctcataattctaagctaattcatttaaactttattaaatggggattggtggaaaactcctgactggtattactgggtttggtataatttaatttaaaattctcatttatagagtattttatttaatctagtataaaaaatctagcctattttaaataaagaatttttctcactg

SEQ ID NO: 184 - DNA, 737 bp, Homo sapiens
  source 1..737: mol_type = genomic DNA
aaaggatcaagcatccctgagtttcaaacagaaacttgcactgaatacattcaaagaaccatcaagaaatggggacctggattttatttgcctgcctcctgggagcagcttttgccatgcctgtgcttacccctttgaagtggtaccagagcataaggccaccgtacccttcctatggttacgagcccatgggtggatggctgcaccaccaaatcatccccgtgctgtcccaacagcaccccccgactcacaccctgcagcctcatcaccacatcccagtggtgccagctcagcagcccgtgatcccccagcaaccaatgatgcccgttcctggccaacactccatgactccaatccaacaccaccagccaaacctccctccgcccgcccagcagccctaccagccccagcctgttcagccacagcctcaccagcccatgcagccccagccacctgtgcaccccatgcagcccctgccgccacagccacctctgcctccgatgttccccatgcagcccctgcctcccatgcttcctgatctgactctggaagcttggccatcaacagacaagaccaagcgggaggaagtggattaaaagatcagaagatgagaggggaatgaatacttcagatgctttcaggagtgacacaagaacacaatgatttttgcttataatcactttacttagcaaattctgtaactaaaaaagtaccattagcagacaataaaatgcatt

SEQ ID NO: 185 - DNA, 835 bp, Homo sapiens
  source 1..835: mol_type = genomic DNA
aaaggatcaagcatccctgagtttcaaacagaaacttgcactgaatacattcaaagaaccatcaagaaatggggacctggattttatttgcctgcctcctgggagcagcttttgccatgcctctaccacctcatcctgggcaccctggttatatcaacttcagctatgagaactcacattctcaggctatcaatgttgacaggactgcattagtgcttacccctttgaagtggtaccagagcataaggccaccgtacccttcctatggttacgagcccatgggtggatggctgcaccaccaaatcatccccgtgctgtcccaacagcaccccccgactcacaccctgcagcctcatcaccacatcccagtggtgccagctcagcagcccgtgatcccccagcaaccaatgatgcccgttcctggccaacactccatgactccaatccaacaccaccagccaaacctccctccgcccgcccagcagccctaccagccccagcctgttcagccacagcctcaccagcccatgcagccccagccacctgtgcaccccatgcagcccctgccgccacagccacctctgcctccgatgttccccatgcagcccctgcctcccatgcttcctgatctgactctggaagcttggccatcaacagacaagaccaagcgggaggaagtggattaaaagatcagaagatgagaggggaatgaatacttcagatgctttcaggagtgacacaagaacacaatgatttttgcttataatcactttacttagcaaattctgtaactaaaaaagtaccattagcagacaataaaatgcattaaaaatca

SEQ ID NO: 186 - DNA, 793 bp, Homo sapiens
  source 1..793: mol_type = genomic DNA
aaaggatcaagcatccctgagtttcaaacagaaacttgcactgaatacattcaaagaaccatcaagaaatggggacctggattttatttgcctgcctcctgggagcagcttttgccatgcctctaccacctcatcctgggcaccctggttatatcaacttcagctatgaggtgcttacccctttgaagtggtaccagagcataaggccaccgtacccttcctatggttacgagcccatgggtggatggctgcaccaccaaatcatccccgtgctgtcccaacagcaccccccgactcacaccctgcagcctcatcaccacatcccagtggtgccagctcagcagcccgtgatcccccagcaaccaatgatgcccgttcctggccaacactccatgactccaatccaacaccaccagccaaacctccctccgcccgcccagcagccctaccagccccagcctgttcagccacagcctcaccagcccatgcagccccagccacctgtgcaccccatgcagcccctgccgccacagccacctctgcctccgatgttccccatgcagcccctgcctcccatgcttcctgatctgactctggaagcttggccatcaacagacaagaccaagcgggaggaagtggattaaaagatcagaagatgagaggggaatgaatacttcagatgctttcaggagtgacacaagaacacaatgatttttgcttataatcactttacttagcaaattctgtaactaaaaaagtaccattagcagacaataaaatgcattaaaaatca

SEQ ID NO: 187 - DNA, 802 bp, Homo sapiens
  source 1..802: mol_type = genomic DNA
agaggaccaagcctccctgtgtagcacaaagaaagtttctctgaatatatttaaagaaccatcaagaaatggggacctggattttgtttgcctgccttgtgggagcagcttttgccatgcctctaccacctcatcctgggcaccctggttatatcaacttcagctatgaggtgctcacccctttgaagtggtaccagagcatgataagaccaccatactcttcctatggttacgagcccatgggtggatggctgcaccaccaaatcatccccgtggtgtcccaacagcaccccctgactcacaccctgcagtctcatcaccacatcccagtggtgccagctcagcagcccagggtccgccagcaagcactgatgcctgttcctggccagcaatccatgactccaacccaacaccatcagccaaacctccctctgcctgcccagcagcccttccagccccagcctgttcagccacagcctcaccagcccatgcagccccagccacctgtgcaacccatgcagcccctgctgccacagccacctctgcctccaatgttccccctgcggcccctgccccccatacttcctgatctgcatctggaagcttggccagcaacagacaagaccaagcaggaggaagtggattaaaagaccagaatatgagacaggaactgaagtaaacactttagttgctttcagggatgacacaagcacacaatgatttttgcttacaatcacttaacttagcaaattctgtaactaaaaatgtaccaatagtagacaataaaatgttttaaaaatca

SEQ ID NO: 188 - DNA, 621 bp, Homo sapiens
  source 1..621: mol_type = genomic DNA
atggggacctggattttgtttgcctgccttgtgggagcagcttttgccatgcctctaccacctcatcctgggcaccctggttatatcaacttcagctatgagaactcacattctcaggctatcaatgttgacaggattgctttagtgctcacccctttgaagtggtaccagagcatgataagaccaccatactcttcctatggttacgagcccatgggtggatggctgcaccaccaaatcatccccgtggtgtcccaacagcaccccctgactcacaccctgcagtctcatcaccacatcccagtggtgccagctcagcagcccagggtccgccagcaagcactgatgcctgttcctggccagcaatccatgactccaacccaacaccatcagccaaacctccctctgcctgcccagcagcccttccagccccagcctgttcagccacagcctcaccagcccatgcagccccagccacctgtgcaacccatgcagcccctgctgccacagccacctctgcctccaatgttccccctgcggcccctgccccccatacttcctgatctgcatctggaagcttggccagcaacagacaagaccaagcaggaggaagtggattaa

SEQ ID NO: 189 - DNA, 615 bp, Homo sapiens
  source 1..615: mol_type = genomic DNA
atggggacctggattttgtttgcctgccttgtgggagcagcttttgccatgcctctaccacctcatcctgggcaccctggttatatcaacttcagctatgagaactcacattctcaggctatcaatgttgacaggattgctttagtgctcacccctttgaagtggtaccagagcatgataagaccaccatactcttcctatggttacgagcccatgggtggatggctgcaccaccaaatcatccccgtggtgtcccaacagcaccccctgactcacaccctgcagtctcatcaccacatcccagtggtgccagctcagcagcccagggtccgccagcaagcactgatgcctgttcctggccagcaatccatgactccaacccaacaccatcagccaaacctccctctgcctgcccagcagcccttccagccccagcctgttcagccacagcctcaccagcccatgcagccccagccacctgtgcaacccatgcagcccctgctgccacagccacctctgcctccaatgttccccctgcggcccctgccccccatacttcctgatctgcatctggaagcttggccagcaacagacaagaccaagcaggaggaagtg

SEQ ID NO: 190 - DNA, 7446 bp, Homo sapiens
  source 1..7446: mol_type = genomic DNA
ctgtctacggcagctattccagaggcaacaactgcttccctctgttctcatctccccattggtggctggcgacccgaatttgggaatggggagattgcccacctgttatctttgagcagactaatctcttgtaagcagaagtgccattcggagtctccagagccctgtggcttggggctgggaatgtccccctgacttcaggctttcctaagtgtattgcttttctctgagaatggtctaggtttttaattttttaattgtaagaatctgtaatacagcatttttatttcggtcttattcgttgtgctcaaaggcaggaaacaactattaatttgccttctcgaatcttaatagttataagattcattctctttcattgctctgctaggcataaaacacacttcgaacatgggtaactcattcgactgtggagttcttttaattcttatgaaagatttcaaatcctctagaagccaaaatgggacacagtaaacagattcgaattttacttctgaacgaaatggagaaactggaaaagaccctcttcagacttgaacaagggtatgagctacagttccgattaggcccaactttacagggaaaagcagttaccgtgtatacaaattacccatttcctggagaaacatttaatagagaaaaattccgttctctggattgggaaaatccaacagaaagagaagatgattctgataaatactgtaaacttaatctgcaacaatctggttcatttcagtattatttccttcaaggaaatgagaaaagtggtggaggttacatagttgtggaccccattttacgtgttggtgctgataatcatgtgctacccttggactgtgttactcttcagacatttttagctaagtgtttgggaccttttgatgaatgggaaagcagacttagggttgcaaaagaatcaggctacaacatgattcattttaccccattgcagactcttggactatctaggtcatgctactcccttgccaatcagttagaattaaatcctgacttttcaagacctaatagaaagtatacctggaatgatgttggacagctagtggaaaaattaaaaaaggaatggaatgttatttgtattactgatgttgtctacaatcatactgctgctaatagtaaatggatccaggaacatccagaatgtgcctataatcttgtgaattctccacacttaaaacctgcctgggtcttagacagagcactttggcgtttctcctgtgatgttgcagaagggaaatacaaagaaaagggaatacctgctttgattgaaaatgatcaccatatgaattccatccgaaaaataatttgggaggatatttttccaaagcttaaactctgggaatttttccaagtagatgtcaacaaagcggttgagcaatttagaagacttcttacacaagaaaataggcgagtaaccaagtctgatccaaaccaacaccttacgattattcaagatcctgaatacagacggtttggctgtactgtagatatgaacattgcactaacgactttcataccacatgacaaggggccagcagcaattgaagaatgctgtaattggtttcataaaagaatggaggaattaaattcagagaagcatcgactcattaactatcatcaggaacaggcagttaattgccttttgggaaatgtgttttatgaacgactggctggccatggtccaaaactaggacctgtcactagaaagcatcctttagttaccaggtattttactttcccatttgaagagatagacttctccatggaagaatctatgattcatctgccaaataaagcttgttttctgatggcacacaatggatgggtaatgggagatgatcctcttcgaaactttgctgaaccgggttcagaagtttacctaaggagagaacttatttgctggggagacagtgttaaattacgctatgggaataaaccagaggactgtccttatctctgggcacacatgaaaaaatacactgaaataactgcaacttatttccagggagtacgtcttgataactgccactcaacacctcttcacgtagctgagtacatgttggatgctgctaggaatttgcaacccaatttatatgtagtagctgaactgttcacaggaagtgaagatctggacaatgtctttgttactagactgggcattagttccttaataagagaggcaatgagtgcatataatagtcatgaagagggcagattagtttaccgatatggaggagaacctgttggatcctttgttcagccctgtttgaggcctttaatgccagctattgcacatgccctgtttatggatattacgcatgataatgagtgtcctattgtgcatagatcagcgtatgatgctcttccaagtactacaattgtttctatggcatgttgtgctagtggaagtacaagaggctatgatgaattagtgcctcatcagatttcagtggtttctgaagaacggttttacactaagtggaatcctgaagcattgccttcaaacacaggtgaagttaatttccaaagcggcattattgcagccaggtgtgctatcagtaaacttcatcaggagcttggagccaagggttttattcaggtgtatgtggatcaagttgatgaagacatagtggcagtaacaagacactcacctagcatccatcagtctgttgtggctgtatctagaactgctttcaggaatcccaagacttcattttacagcaaggaagtgcctcaaatgtgcatccctggcaaaattgaagaagtagttcttgaagctagaactattgagagaaacacgaaaccttataggaaggatgagaattcaatcaatggaacaccagatatcacagtagaaattagagaacatattcagcttaatgaaagtaaaattgttaaacaagctggagttgccacaaaagggcccaatgaatatattcaagaaatagaatttgaaaacttgtctccaggaagtgttattatattcagagttagtcttgatccacatgcacaagtcgctgttggaattcttcgaaatcatctgacacaattcagtcctcactttaaatctggcagcctagctgttgacaatgcagatcctatattaaaaattccttttgcttctcttgcctccagattaactttggctgagctaaatcagatcctttaccgatgtgaatcagaagaaaaggaagatggtggagggtgctatgacataccaaactggtcagcccttaaatatgcaggtcttcaaggtttaatgtctgtattggcagaaataagaccaaagaatgacttggggcatcctttttgtaataatttgagatctggagattggatgattgactatgtcagtaaccggcttatttcacgatcaggaactattgctgaagttggtaaatggttgcaggctatgttcttctacctgaagcagatcccacgttaccttatcccatgttactttgatgctatattaattggtgcatataccactcttctggatacagcatggaagcagatgtcaagctttgttcagaatggttcaacctttgtgaaacacctttcattgggttcagttcaactgtgtggagtaggaaaattcccttccctgccaattctttcacctgccctaatggatgtaccttataggttaaatgagatcacaaaagaaaaggagcaatgttgtgtttctctagctgcaggcttacctcatttttcttctggtattttccgctgctggggaagggatacttttattgcacttagaggtatactgctgattactggacgctatgtagaagccaggaatattattttagcatttgcgggtaccctgaggcatggtctcattcctaatctactgggtgaaggaatttatgccagatacaattgtcgggatgctgtgtggtggtggctgcagtgtatccaggattactgtaaaatggttccaaatggtctagacattctcaagtgcccagtttccagaatgtatcctacagatgattctgctcctttgcctgctggcacactggatcagccattgtttgaagtcatacaggaagcaatgcaaaaacacatgcagggcatacagttccgagaaaggaatgctggtccccagatagatcgaaacatgaaggacgaaggttttaatataactgcaggagttgatgaagaaacaggatttgtttatggaggaaatcgtttcaattgtggcacatggatggataaaatgggagaaagtgacagagctagaaacagaggaatcccagccacaccaagagatgggtctgctgtggaaattgtgggcctgagtaaatctgctgttcgctggttgctggaattatccaaaaaaaatattttcccttatcatgaagtcacagtaaaaagacatggaaaggctataaaggtctcatatgatgagtggaacagaaaaatacaagacaactttgaaaagctatttcatgtttccgaagacccttcagatttaaatgaaaagcatccaaatctggttcacaaacgtggcatatacaaagatagttatggagcttcaagtccttggtgtgactatcagctcaggcctaattttaccatagcaatggttgtggcccctgagctctttactacagaaaaagcatggaaagctttggagattgcagaaaaaaaattgcttggtccccttggcatgaaaactttagatccagatgatatggtttactgtggaatttatgacaatgcattagacaatgacaactacaatcttgctaaaggtttcaattatcaccaaggacctgagtggctgtggcctattgggtattttcttcgtgcaaaattatatttttccagattgatgggcccggagactactgcaaagactatagttttggttaaaaatgttctttcccgacattatgttcatcttgagagatccccttggaaaggacttccagaactgaccaatgagaatgcccagtactgtcctttcagctgtgaaacacaagcctggtcaattgctactattcttgagacactttatgatttatagtttattacagatattaagtatgcaattacttgtattataggatgcaaggtcatcatatgtaaatgccttatatgcacaggctcaagttgttttaaaaatctcatttattataatattgatgctcaattaggtaagattgtaaaagcattgattttttttaatgtacagaggtagatttcaatttgaatcagaaagaaatatcattaccaatgaaatgtgtttgagttcagtaagaattattcaaatgcctagaaatccatagtttggaaaagaaaaatcatgtcatcttctatttgtacagaaatgaaaataaaatatgaaaataatgaaagaaatgaaaagatagcttttaattgtggtatatataatcttcagtaacaatacatactgaatacgctgtggttcattaatattaacaccacgtactatagtattcttaatacagtgctcactgcatttaataaatatttaataaatgatgaatgatagaagtttccatctacaatatatgttcctaaatggagcacagatgttcaaactatgctttcattttttcactgatatattaatttttgtgtaatgaatgccaacagtatattttatatgatttacttatgtgaggaaacatgcaaagcattaggaaatttatttcctaaaaacagttttgtaaaattagtattgagttctattgagtattataagatagcttacattttcaaaatggaaattgtcggtcatatttctagaactttaaagaaaaaagaatgttatattagttttctaaaactcaactatctttagtcatgttcaaaaatctattgctagatcatagtagatactggttttctattaactcaaaacctacattgacaagtttaacattgagaagaatcttaacaaaaatatggatatgaattcagtagatatcttaaattcaataaaatcactggaagtttttcatgataacttattttaagatgccttaaaaatcttaaagtcacaaaaggaaaaaggtttttaacatttacatgagttaacattttttcatagaacttatttcctagatagaattttttactgttttttactgttttcttaagaaaacagttaaatcattatgcattcagttggaagaaagtagtggcaagaattctttcattgctatataatattcagtggctcatttatacctaataaaataatggtattttaaaataatgctactttcaaagtagcatttttttagttagtttacaggttacatacccaaaaccttaactatgactaagaaattaaagaagaaaaccagcaaactaaaacttctgggcagcaaaaatatataaatgcttcagatgtcaaatacccatgcttgaaagctcgtgtaatttactttaagattatctgcctgctcttcttcaaagctgaccttgctttagaaatagttttaactagcttagttttctggtttccaaaactaaaatagattaaatcctacaaatttaaggacagttgtgacagtaatctgaccactatctataaatacattggacattggtttccaaatctccctttcttcttcagttccttccttgttcaatatatacccttctctaaactgtgcgggtaaaaggaatgactgtccttgagagaaccattagtttatcaaaggtttatgtagttttgttgctgtaccctaactttgatattcagggaggtaggaaaggtaacagaaaaccagcatatttaatcaaagcaagaagtaatcgctgacagttaaatgtgaccaaaaaaattaaaagttcacaatttttttaatgtagccatttggggttatctctagtaaggcagatacccacgttggtaaatttttaggatattgtgttgcactagaaaactaagtggttcatatttctaatgaggaagattaatgaaagaacattgttatattctgcgtggtatattttaaagtttaagaaggcatgttaaacattatttcctctatggtagttaaaatacagaattagatttttaacaggtgtcatttgactaaacgtttcggtagaatgcttcatacttgagtgatgctggataaggtattgtatttcaacaatggactatgccttggtttttcactaatcaaaatcaaaattactctttaacatgataaatgaatttaccagtttagtatgctgtggtattttaataagttttcaaagataattgggaaaacatgagactggtcatattgatgaatattgtaacatgtgaattgtgatccatttctgatatgtcttgaactactgtgtctagtgggcaaatgtcattgttacctctgtgtgttaagaaaataaaaatattttctaaaggtc

SEQ ID NO: 191 - DNA, 7179 bp, Homo sapiens
  source 1..7179: mol_type = genomic DNA
gggtaactcattcgactgtggagttcttttaattcttatgaaagatttcaaatcctctagaagccaaaatgggacacagtaaacagattcgaattttacttctgaacgaaatggagaaactggaaaagaccctcttcagacttgaacaagaaactgggtctcactatgttgcccaggttgatattgaactcctggactcaagcaaccctccctctttggcctctgaaagtactgggattacaagcataagccaccgggcatggccccaattctgagcattaatttatttattgggtatgagctacagttccgattaggcccaactttacagggaaaagcagttaccgtgtatacaaattacccatttcctggagaaacatttaatagagaaaaattccgttctctggattgggaaaatccaacagaaagagaagatgattctgataaatactgtaaacttaatctgcaacaatctggttcatttcagtattatttccttcaaggaaatgagaaaagtggtggaggttacatagttgtggaccccattttacgtgttggtgctgataatcatgtgctacccttggactgtgttactcttcagacatttttagctaagtgtttgggaccttttgatgaatgggaaagcagacttagggttgcaaaagaatcaggctacaacatgattcattttaccccattgcagactcttggactatctaggtcatgctactcccttgccaatcagttagaattaaatcctgacttttcaagacctaatagaaagtatacctggaatgatgttggacagctagtggaaaaattaaaaaaggaatggaatgttatttgtattactgatgttgtctacaatcatactgctgctaatagtaaatggatccaggaacatccagaatgtgcctataatcttgtgaattctccacacttaaaacctgcctgggtcttagacagagcactttggcgtttctcctgtgatgttgcagaagggaaatacaaagaaaagggaatacctgctttgattgaaaatgatcaccatatgaattccatccgaaaaataatttgggaggatatttttccaaagcttaaactctgggaatttttccaagtagatgtcaacaaagcggttgagcaatttagaagacttcttacacaagaaaataggcgagtaaccaagtctgatccaaaccaacaccttacgattattcaagatcctgaatacagacggtttggctgtactgtagatatgaacattgcactaacgactttcataccacatgacaaggggccagcagcaattgaagaatgctgtaattggtttcataaaagaatggaggaattaaattcagagaagcatcgactcattaactatcatcaggaacaggcagttaattgccttttgggaaatgtgttttatgaacgactggctggccatggtccaaaactaggacctgtcactagaaagcatcctttagttaccaggtattttactttcccatttgaagagatagacttctccatggaagaatctatgattcatctgccaaataaagcttgttttctgatggcacacaatggatgggtaatgggagatgatcctcttcgaaactttgctgaaccgggttcagaagtttacctaaggagagaacttatttgctggggagacagtgttaaattacgctatgggaataaaccagaggactgtccttatctctgggcacacatgaaaaaatacactgaaataactgcaacttatttccagggagtacgtcttgataactgccactcaacacctcttcacgtagctgagtacatgttggatgctgctaggaatttgcaacccaatttatatgtagtagctgaactgttcacaggaagtgaagatctggacaatgtctttgttactagactgggcattagttccttaataagagaggcaatgagtgcatataatagtcatgaagagggcagattagtttaccgatatggaggagaacctgttggatcctttgttcagccctgtttgaggcctttaatgccagctattgcacatgccctgtttatggatattacgcatgataatgagtgtcctattgtgcatagatcagcgtatgatgctcttccaagtactacaattgtttctatggcatgttgtgctagtggaagtacaagaggctatgatgaattagtgcctcatcagatttcagtggtttctgaagaacggttttacactaagtggaatcctgaagcattgccttcaaacacaggtgaagttaatttccaaagcggcattattgcagccaggtgtgctatcagtaaacttcatcaggagcttggagccaagggttttattcaggtgtatgtggatcaagttgatgaagacatagtggcagtaacaagacactcacctagcatccatcagtctgttgtggctgtatctagaactgctttcaggaatcccaagacttcattttacagcaaggaagtgcctcaaatgtgcatccctggcaaaattgaagaagtagttcttgaagctagaactattgagagaaacacgaaaccttataggaaggatgagaattcaatcaatggaacaccagatatcacagtagaaattagagaacatattcagcttaatgaaagtaaaattgttaaacaagctggagttgccacaaaagggcccaatgaatatattcaagaaatagaatttgaaaacttgtctccaggaagtgttattatattcagagttagtcttgatccacatgcacaagtcgctgttggaattcttcgaaatcatctgacacaattcagtcctcactttaaatctggcagcctagctgttgacaatgcagatcctatattaaaaattccttttgcttctcttgcctccagattaactttggctgagctaaatcagatcctttaccgatgtgaatcagaagaaaaggaagatggtggagggtgctatgacataccaaactggtcagcccttaaatatgcaggtcttcaaggtttaatgtctgtattggcagaaataagaccaaagaatgacttggggcatcctttttgtaataatttgagatctggagattggatgattgactatgtcagtaaccggcttatttcacgatcaggaactattgctgaagttggtaaatggttgcaggctatgttcttctacctgaagcagatcccacgttaccttatcccatgttactttgatgctatattaattggtgcatataccactcttctggatacagcatggaagcagatgtcaagctttgttcagaatggttcaacctttgtgaaacacctttcattgggttcagttcaactgtgtggagtaggaaaattcccttccctgccaattctttcacctgccctaatggatgtaccttataggttaaatgagatcacaaaagaaaaggagcaatgttgtgtttctctagctgcaggcttacctcatttttcttctggtattttccgctgctggggaagggatacttttattgcacttagaggtatactgctgattactggacgctatgtagaagccaggaatattattttagcatttgcgggtaccctgaggcatggtctcattcctaatctactgggtgaaggaatttatgccagatacaattgtcgggatgctgtgtggtggtggctgcagtgtatccaggattactgtaaaatggttccaaatggtctagacattctcaagtgcccagtttccagaatgtatcctacagatgattctgctcctttgcctgctggcacactggatcagccattgtttgaagtcatacaggaagcaatgcaaaaacacatgcagggcatacagttccgagaaaggaatgctggtccccagatagatcgaaacatgaaggacgaaggttttaatataactgcaggagttgatgaagaaacaggatttgtttatggaggaaatcgtttcaattgtggcacatggatggataaaatgggagaaagtgacagagctagaaacagaggaatcccagccacaccaagagatgggtctgctgtggaaattgtgggcctgagtaaatctgctgttcgctggttgctggaattatccaaaaaaaatattttcccttatcatgaagtcacagtaaaaagacatggaaaggctataaaggtctcatatgatgagtggaacagaaaaatacaagacaactttgaaaagctatttcatgtttccgaagacccttcagatttaaatgaaaagcatccaaatctggttcacaaacgtggcatatacaaagatagttatggagcttcaagtccttggtgtgactatcagctcaggcctaattttaccatagcaatggttgtggcccctgagctctttactacagaaaaagcatggaaagctttggagattgcagaaaaaaaattgcttggtccccttggcatgaaaactttagatccagatgatatggtttactgtggaatttatgacaatgcattagacaatgacaactacaatcttgctaaaggtttcaattatcaccaaggacctgagtggctgtggcctattgggtattttcttcgtgcaaaattatatttttccagattgatgggcccggagactactgcaaagactatagttttggttaaaaatgttctttcccgacattatgttcatcttgagagatccccttggaaaggacttccagaactgaccaatgagaatgcccagtactgtcctttcagctgtgaaacacaagcctggtcaattgctactattcttgagacactttatgatttatagtttattacagatattaagtatgcaattacttgtattataggatgcaaggtcatcatatgtaaatgccttatatgcacaggctcaagttgttttaaaaatctcatttattataatattgatgctcaattaggtaagattgtaaaagcattgattttttttaatgtacagaggtagatttcaatttgaatcagaaagaaatatcattaccaatgaaatgtgtttgagttcagtaagaattattcaaatgcctagaaatccatagtttggaaaagaaaaatcatgtcatcttctatttgtacagaaatgaaaataaaatatgaaaataatgaaagaaatgaaaagatagcttttaattgtggtatatataatcttcagtaacaatacatactgaatacgctgtggttcattaatattaacaccacgtactatagtattcttaatacagtgctcactgcatttaataaatatttaataaatgatgaatgatagaagtttccatctacaatatatgttcctaaatggagcacagatgttcaaactatgctttcattttttcactgatatattaatttttgtgtaatgaatgccaacagtatattttatatgatttacttatgtgaggaaacatgcaaagcattaggaaatttatttcctaaaaacagttttgtaaaattagtattgagttctattgagtattataagatagcttacattttcaaaatggaaattgtcggtcatatttctagaactttaaagaaaaaagaatgttatattagttttctaaaactcaactatctttagtcatgttcaaaaatctattgctagatcatagtagatactggttttctattaactcaaaacctacattgacaagtttaacattgagaagaatcttaacaaaaatatggatatgaattcagtagatatcttaaattcaataaaatcactggaagtttttcatgataacttattttaagatgccttaaaaatcttaaagtcacaaaaggaaaaaggtttttaacatttacatgagttaacattttttcatagaacttatttcctagatagaattttttactgttttttactgttttcttaagaaaacagttaaatcattatgcattcagttggaagaaagtagtggcaagaattctttcattgctatataatattcagtggctcatttatacctaataaaataatggtattttaaaataatgctactttcaaagtagcatttttttagttagtttacaggttacatacccaaaaccttaactatgactaagaaattaaagaagaaaaccagcaaactaaaacttctgggcagcaaaaatatataaatgcttcagatgtcaaatacccatgcttgaaagctcgtgtaatttactttaagattatctgcctgctcttcttcaaagctgaccttgctttagaaatagttttaactagcttagttttctggtttccaaaactaaaatagattaaatcctacaaatttaaggacagttgtgacagtaatctgaccactatctataaatacattggacattggtttccaaatctccctttcttcttcagttccttccttgttcaatatatacccttctctaaactgtgcgggtaaaaggaatgactgtccttgagagaaccattagtttatcaaaggtttatgtagttttgttgctgtaccctaactttgatattcagggaggtaggaaaggtaacagaaaaccagcatatttaatcaaagcaagaagtaatcgctgacagttaaatgtgaccaaaaaaattaaaagttcacaatttttttaatgtagccatttggggttatctctagtaaggcagatacccacgttggtaaatttttaggatattgtgttgcactagaaaactaagtggttcatatttctaatgaggaagattaatgaaagaacattgttatattctgcgtggtatattttaaagtttaagaaggcatgttaaacattatttcctctatggtagttaaaatacagaattagatttttaacaggtgtcatttgactaaacgtttcggtagaatgcttcatacttgagtgatgctggataaggtattgtatttcaacaatggactatgccttggtttttcactaatcaaaatcaaaattactctttaacatgataaatgaatttaccagtttagtatgctgtggtattttaataagttttcaaagataattgggaaaacatgagactggtcatattgatgaatattgtaacatgtgaattgtgatccatttctgatatgtcttgaactactgtgtctagtgggcaaatgtcattgttacctctgtgtgttaagaaaataaaaatattttctaaaggtc

SEQ ID NO: 192 - DNA, 7179 bp, Homo sapiens
  source 1..7179: mol_type = genomic DNA
tgtataagaatttgcacatcccaagttgctatgtgaataggaatgcgtttccaggggaaggagaaagagacattacagagcagacagctctatgatgtttactatacttgctaaaatgtgaaattcagctaaattggaatacaaagtagtgccaaaacagcattaggtttgcggagttattttaaacataattgaaaaatcaaggttttttaatactttaaataaaacatctgtttttcaatgtggtaatttaagtcctacgatgagtttattaacatgtgctttttatttagggtatgagctacagttccgattaggcccaactttacagggaaaagcagttaccgtgtatacaaattacccatttcctggagaaacatttaatagagaaaaattccgttctctggattgggaaaatccaacagaaagagaagatgattctgataaatactgtaaacttaatctgcaacaatctggttcatttcagtattatttccttcaaggaaatgagaaaagtggtggaggttacatagttgtggaccccattttacgtgttggtgctgataatcatgtgctacccttggactgtgttactcttcagacatttttagctaagtgtttgggaccttttgatgaatgggaaagcagacttagggttgcaaaagaatcaggctacaacatgattcattttaccccattgcagactcttggactatctaggtcatgctactcccttgccaatcagttagaattaaatcctgacttttcaagacctaatagaaagtatacctggaatgatgttggacagctagtggaaaaattaaaaaaggaatggaatgttatttgtattactgatgttgtctacaatcatactgctgctaatagtaaatggatccaggaacatccagaatgtgcctataatcttgtgaattctccacacttaaaacctgcctgggtcttagacagagcactttggcgtttctcctgtgatgttgcagaagggaaatacaaagaaaagggaatacctgctttgattgaaaatgatcaccatatgaattccatccgaaaaataatttgggaggatatttttccaaagcttaaactctgggaatttttccaagtagatgtcaacaaagcggttgagcaatttagaagacttcttacacaagaaaataggcgagtaaccaagtctgatccaaaccaacaccttacgattattcaagatcctgaatacagacggtttggctgtactgtagatatgaacattgcactaacgactttcataccacatgacaaggggccagcagcaattgaagaatgctgtaattggtttcataaaagaatggaggaattaaattcagagaagcatcgactcattaactatcatcaggaacaggcagttaattgccttttgggaaatgtgttttatgaacgactggctggccatggtccaaaactaggacctgtcactagaaagcatcctttagttaccaggtattttactttcccatttgaagagatagacttctccatggaagaatctatgattcatctgccaaataaagcttgttttctgatggcacacaatggatgggtaatgggagatgatcctcttcgaaactttgctgaaccgggttcagaagtttacctaaggagagaacttatttgctggggagacagtgttaaattacgctatgggaataaaccagaggactgtccttatctctgggcacacatgaaaaaatacactgaaataactgcaacttatttccagggagtacgtcttgataactgccactcaacacctcttcacgtagctgagtacatgttggatgctgctaggaatttgcaacccaatttatatgtagtagctgaactgttcacaggaagtgaagatctggacaatgtctttgttactagactgggcattagttccttaataagagaggcaatgagtgcatataatagtcatgaagagggcagattagtttaccgatatggaggagaacctgttggatcctttgttcagccctgtttgaggcctttaatgccagctattgcacatgccctgtttatggatattacgcatgataatgagtgtcctattgtgcatagatcagcgtatgatgctcttccaagtactacaattgtttctatggcatgttgtgctagtggaagtacaagaggctatgatgaattagtgcctcatcagatttcagtggtttctgaagaacggttttacactaagtggaatcctgaagcattgccttcaaacacaggtgaagttaatttccaaagcggcattattgcagccaggtgtgctatcagtaaacttcatcaggagcttggagccaagggttttattcaggtgtatgtggatcaagttgatgaagacatagtggcagtaacaagacactcacctagcatccatcagtctgttgtggctgtatctagaactgctttcaggaatcccaagacttcattttacagcaaggaagtgcctcaaatgtgcatccctggcaaaattgaagaagtagttcttgaagctagaactattgagagaaacacgaaaccttataggaaggatgagaattcaatcaatggaacaccagatatcacagtagaaattagagaacatattcagcttaatgaaagtaaaattgttaaacaagctggagttgccacaaaagggcccaatgaatatattcaagaaatagaatttgaaaacttgtctccaggaagtgttattatattcagagttagtcttgatccacatgcacaagtcgctgttggaattcttcgaaatcatctgacacaattcagtcctcactttaaatctggcagcctagctgttgacaatgcagatcctatattaaaaattccttttgcttctcttgcctccagattaactttggctgagctaaatcagatcctttaccgatgtgaatcagaagaaaaggaagatggtggagggtgctatgacataccaaactggtcagcccttaaatatgcaggtcttcaaggtttaatgtctgtattggcagaaataagaccaaagaatgacttggggcatcctttttgtaataatttgagatctggagattggatgattgactatgtcagtaaccggcttatttcacgatcaggaactattgctgaagttggtaaatggttgcaggctatgttcttctacctgaagcagatcccacgttaccttatcccatgttactttgatgctatattaattggtgcatataccactcttctggatacagcatggaagcagatgtcaagctttgttcagaatggttcaacctttgtgaaacacctttcattgggttcagttcaactgtgtggagtaggaaaattcccttccctgccaattctttcacctgccctaatggatgtaccttataggttaaatgagatcacaaaagaaaaggagcaatgttgtgtttctctagctgcaggcttacctcatttttcttctggtattttccgctgctggggaagggatacttttattgcacttagaggtatactgctgattactggacgctatgtagaagccaggaatattattttagcatttgcgggtaccctgaggcatggtctcattcctaatctactgggtgaaggaatttatgccagatacaattgtcgggatgctgtgtggtggtggctgcagtgtatccaggattactgtaaaatggttccaaatggtctagacattctcaagtgcccagtttccagaatgtatcctacagatgattctgctcctttgcctgctggcacactggatcagccattgtttgaagtcatacaggaagcaatgcaaaaacacatgcagggcatacagttccgagaaaggaatgctggtccccagatagatcgaaacatgaaggacgaaggttttaatataactgcaggagttgatgaagaaacaggatttgtttatggaggaaatcgtttcaattgtggcacatggatggataaaatgggagaaagtgacagagctagaaacagaggaatcccagccacaccaagagatgggtctgctgtggaaattgtgggcctgagtaaatctgctgttcgctggttgctggaattatccaaaaaaaatattttcccttatcatgaagtcacagtaaaaagacatggaaaggctataaaggtctcatatgatgagtggaacagaaaaatacaagacaactttgaaaagctatttcatgtttccgaagacccttcagatttaaatgaaaagcatccaaatctggttcacaaacgtggcatatacaaagatagttatggagcttcaagtccttggtgtgactatcagctcaggcctaattttaccatagcaatggttgtggcccctgagctctttactacagaaaaagcatggaaagctttggagattgcagaaaaaaaattgcttggtccccttggcatgaaaactttagatccagatgatatggtttactgtggaatttatgacaatgcattagacaatgacaactacaatcttgctaaaggtttcaattatcaccaaggacctgagtggctgtggcctattgggtattttcttcgtgcaaaattatatttttccagattgatgggcccggagactactgcaaagactatagttttggttaaaaatgttctttcccgacattatgttcatcttgagagatccccttggaaaggacttccagaactgaccaatgagaatgcccagtactgtcctttcagctgtgaaacacaagcctggtcaattgctactattcttgagacactttatgatttatagtttattacagatattaagtatgcaattacttgtattataggatgcaaggtcatcatatgtaaatgccttatatgcacaggctcaagttgttttaaaaatctcatttattataatattgatgctcaattaggtaagattgtaaaagcattgattttttttaatgtacagaggtagatttcaatttgaatcagaaagaaatatcattaccaatgaaatgtgtttgagttcagtaagaattattcaaatgcctagaaatccatagtttggaaaagaaaaatcatgtcatcttctatttgtacagaaatgaaaataaaatatgaaaataatgaaagaaatgaaaagatagcttttaattgtggtatatataatcttcagtaacaatacatactgaatacgctgtggttcattaatattaacaccacgtactatagtattcttaatacagtgctcactgcatttaataaatatttaataaatgatgaatgatagaagtttccatctacaatatatgttcctaaatggagcacagatgttcaaactatgctttcattttttcactgatatattaatttttgtgtaatgaatgccaacagtatattttatatgatttacttatgtgaggaaacatgcaaagcattaggaaatttatttcctaaaaacagttttgtaaaattagtattgagttctattgagtattataagatagcttacattttcaaaatggaaattgtcggtcatatttctagaactttaaagaaaaaagaatgttatattagttttctaaaactcaactatctttagtcatgttcaaaaatctattgctagatcatagtagatactggttttctattaactcaaaacctacattgacaagtttaacattgagaagaatcttaacaaaaatatggatatgaattcagtagatatcttaaattcaataaaatcactggaagtttttcatgataacttattttaagatgccttaaaaatcttaaagtcacaaaaggaaaaaggtttttaacatttacatgagttaacattttttcatagaacttatttcctagatagaattttttactgttttttactgttttcttaagaaaacagttaaatcattatgcattcagttggaagaaagtagtggcaagaattctttcattgctatataatattcagtggctcatttatacctaataaaataatggtattttaaaataatgctactttcaaagtagcatttttttagttagtttacaggttacatacccaaaaccttaactatgactaagaaattaaagaagaaaaccagcaaactaaaacttctgggcagcaaaaatatataaatgcttcagatgtcaaatacccatgcttgaaagctcgtgtaatttactttaagattatctgcctgctcttcttcaaagctgaccttgctttagaaatagttttaactagcttagttttctggtttccaaaactaaaatagattaaatcctacaaatttaaggacagttgtgacagtaatctgaccactatctataaatacattggacattggtttccaaatctccctttcttcttcagttccttccttgttcaatatatacccttctctaaactgtgcgggtaaaaggaatgactgtccttgagagaaccattagtttatcaaaggtttatgtagttttgttgctgtaccctaactttgatattcagggaggtaggaaaggtaacagaaaaccagcatatttaatcaaagcaagaagtaatcgctgacagttaaatgtgaccaaaaaaattaaaagttcacaatttttttaatgtagccatttggggttatctctagtaaggcagatacccacgttggtaaatttttaggatattgtgttgcactagaaaactaagtggttcatatttctaatgaggaagattaatgaaagaacattgttatattctgcgtggtatattttaaagtttaagaaggcatgttaaacattatttcctctatggtagttaaaatacagaattagatttttaacaggtgtcatttgactaaacgtttcggtagaatgcttcatacttgagtgatgctggataaggtattgtatttcaacaatggactatgccttggtttttcactaatcaaaatcaaaattactctttaacatgataaatgaatttaccagtttagtatgctgtggtattttaataagttttcaaagataattgggaaaacatgagactggtcatattgatgaatattgtaacatgtgaattgtgatccatttctgatatgtcttgaactactgtgtctagtgggcaaatgtcattgttacctctgtgtgttaagaaaataaaaatattttctaaaggtc

SEQ ID NO: 193 - DNA, 7368 bp, Homo sapiens
  source 1..7368: mol_type = genomic DNA
cccggaagtgggccagaggtacggtccgctcccacctggggcgagtgcgcgcacggccaggttgggtaccgggtgcgcccaggaacccgcgcgaggcgaagtcgctgagactctgcctgcttctcacccagctgcctcggcgctgccccggtcgctcgccgcccctccctttgcccttcacggcgcccggccctccttgggctgcggcttctgtgcgaggctgggcagccagcccttccccttctgtttctccccgtcccctccccccgaccgtagcaccagagtcgcgggtcctgcagtgccccagaagccgcacgtataactccctcggcgggtaactcattcgactgtggagttcttttaattcttatgaaagatttcaaatcctctagaagccaaaatgggacacagtaaacagattcgaattttacttctgaacgaaatggagaaactggaaaagaccctcttcagacttgaacaagggtatgagctacagttccgattaggcccaactttacagggaaaagcagttaccgtgtatacaaattacccatttcctggagaaacatttaatagagaaaaattccgttctctggattgggaaaatccaacagaaagagaagatgattctgataaatactgtaaacttaatctgcaacaatctggttcatttcagtattatttccttcaaggaaatgagaaaagtggtggaggttacatagttgtggaccccattttacgtgttggtgctgataatcatgtgctacccttggactgtgttactcttcagacatttttagctaagtgtttgggaccttttgatgaatgggaaagcagacttagggttgcaaaagaatcaggctacaacatgattcattttaccccattgcagactcttggactatctaggtcatgctactcccttgccaatcagttagaattaaatcctgacttttcaagacctaatagaaagtatacctggaatgatgttggacagctagtggaaaaattaaaaaaggaatggaatgttatttgtattactgatgttgtctacaatcatactgctgctaatagtaaatggatccaggaacatccagaatgtgcctataatcttgtgaattctccacacttaaaacctgcctgggtcttagacagagcactttggcgtttctcctgtgatgttgcagaagggaaatacaaagaaaagggaatacctgctttgattgaaaatgatcaccatatgaattccatccgaaaaataatttgggaggatatttttccaaagcttaaactctgggaatttttccaagtagatgtcaacaaagcggttgagcaatttagaagacttcttacacaagaaaataggcgagtaaccaagtctgatccaaaccaacaccttacgattattcaagatcctgaatacagacggtttggctgtactgtagatatgaacattgcactaacgactttcataccacatgacaaggggccagcagcaattgaagaatgctgtaattggtttcataaaagaatggaggaattaaattcagagaagcatcgactcattaactatcatcaggaacaggcagttaattgccttttgggaaatgtgttttatgaacgactggctggccatggtccaaaactaggacctgtcactagaaagcatcctttagttaccaggtattttactttcccatttgaagagatagacttctccatggaagaatctatgattcatctgccaaataaagcttgttttctgatggcacacaatggatgggtaatgggagatgatcctcttcgaaactttgctgaaccgggttcagaagtttacctaaggagagaacttatttgctggggagacagtgttaaattacgctatgggaataaaccagaggactgtccttatctctgggcacacatgaaaaaatacactgaaataactgcaacttatttccagggagtacgtcttgataactgccactcaacacctcttcacgtagctgagtacatgttggatgctgctaggaatttgcaacccaatttatatgtagtagctgaactgttcacaggaagtgaagatctggacaatgtctttgttactagactgggcattagttccttaataagagaggcaatgagtgcatataatagtcatgaagagggcagattagtttaccgatatggaggagaacctgttggatcctttgttcagccctgtttgaggcctttaatgccagctattgcacatgccctgtttatggatattacgcatgataatgagtgtcctattgtgcatagatcagcgtatgatgctcttccaagtactacaattgtttctatggcatgttgtgctagtggaagtacaagaggctatgatgaattagtgcctcatcagatttcagtggtttctgaagaacggttttacactaagtggaatcctgaagcattgccttcaaacacaggtgaagttaatttccaaagcggcattattgcagccaggtgtgctatcagtaaacttcatcaggagcttggagccaagggttttattcaggtgtatgtggatcaagttgatgaagacatagtggcagtaacaagacactcacctagcatccatcagtctgttgtggctgtatctagaactgctttcaggaatcccaagacttcattttacagcaaggaagtgcctcaaatgtgcatccctggcaaaattgaagaagtagttcttgaagctagaactattgagagaaacacgaaaccttataggaaggatgagaattcaatcaatggaacaccagatatcacagtagaaattagagaacatattcagcttaatgaaagtaaaattgttaaacaagctggagttgccacaaaagggcccaatgaatatattcaagaaatagaatttgaaaacttgtctccaggaagtgttattatattcagagttagtcttgatccacatgcacaagtcgctgttggaattcttcgaaatcatctgacacaattcagtcctcactttaaatctggcagcctagctgttgacaatgcagatcctatattaaaaattccttttgcttctcttgcctccagattaactttggctgagctaaatcagatcctttaccgatgtgaatcagaagaaaaggaagatggtggagggtgctatgacataccaaactggtcagcccttaaatatgcaggtcttcaaggtttaatgtctgtattggcagaaataagaccaaagaatgacttggggcatcctttttgtaataatttgagatctggagattggatgattgactatgtcagtaaccggcttatttcacgatcaggaactattgctgaagttggtaaatggttgcaggctatgttcttctacctgaagcagatcccacgttaccttatcccatgttactttgatgctatattaattggtgcatataccactcttctggatacagcatggaagcagatgtcaagctttgttcagaatggttcaacctttgtgaaacacctttcattgggttcagttcaactgtgtggagtaggaaaattcccttccctgccaattctttcacctgccctaatggatgtaccttataggttaaatgagatcacaaaagaaaaggagcaatgttgtgtttctctagctgcaggcttacctcatttttcttctggtattttccgctgctggggaagggatacttttattgcacttagaggtatactgctgattactggacgctatgtagaagccaggaatattattttagcatttgcgggtaccctgaggcatggtctcattcctaatctactgggtgaaggaatttatgccagatacaattgtcgggatgctgtgtggtggtggctgcagtgtatccaggattactgtaaaatggttccaaatggtctagacattctcaagtgcccagtttccagaatgtatcctacagatgattctgctcctttgcctgctggcacactggatcagccattgtttgaagtcatacaggaagcaatgcaaaaacacatgcagggcatacagttccgagaaaggaatgctggtccccagatagatcgaaacatgaaggacgaaggttttaatataactgcaggagttgatgaagaaacaggatttgtttatggaggaaatcgtttcaattgtggcacatggatggataaaatgggagaaagtgacagagctagaaacagaggaatcccagccacaccaagagatgggtctgctgtggaaattgtgggcctgagtaaatctgctgttcgctggttgctggaattatccaaaaaaaatattttcccttatcatgaagtcacagtaaaaagacatggaaaggctataaaggtctcatatgatgagtggaacagaaaaatacaagacaactttgaaaagctatttcatgtttccgaagacccttcagatttaaatgaaaagcatccaaatctggttcacaaacgtggcatatacaaagatagttatggagcttcaagtccttggtgtgactatcagctcaggcctaattttaccatagcaatggttgtggcccctgagctctttactacagaaaaagcatggaaagctttggagattgcagaaaaaaaattgcttggtccccttggcatgaaaactttagatccagatgatatggtttactgtggaatttatgacaatgcattagacaatgacaactacaatcttgctaaaggtttcaattatcaccaaggacctgagtggctgtggcctattgggtattttcttcgtgcaaaattatatttttccagattgatgggcccggagactactgcaaagactatagttttggttaaaaatgttctttcccgacattatgttcatcttgagagatccccttggaaaggacttccagaactgaccaatgagaatgcccagtactgtcctttcagctgtgaaacacaagcctggtcaattgctactattcttgagacactttatgatttatagtttattacagatattaagtatgcaattacttgtattataggatgcaaggtcatcatatgtaaatgccttatatgcacaggctcaagttgttttaaaaatctcatttattataatattgatgctcaattaggtaagattgtaaaagcattgattttttttaatgtacagaggtagatttcaatttgaatcagaaagaaatatcattaccaatgaaatgtgtttgagttcagtaagaattattcaaatgcctagaaatccatagtttggaaaagaaaaatcatgtcatcttctatttgtacagaaatgaaaataaaatatgaaaataatgaaagaaatgaaaagatagcttttaattgtggtatatataatcttcagtaacaatacatactgaatacgctgtggttcattaatattaacaccacgtactatagtattcttaatacagtgctcactgcatttaataaatatttaataaatgatgaatgatagaagtttccatctacaatatatgttcctaaatggagcacagatgttcaaactatgctttcattttttcactgatatattaatttttgtgtaatgaatgccaacagtatattttatatgatttacttatgtgaggaaacatgcaaagcattaggaaatttatttcctaaaaacagttttgtaaaattagtattgagttctattgagtattataagatagcttacattttcaaaatggaaattgtcggtcatatttctagaactttaaagaaaaaagaatgttatattagttttctaaaactcaactatctttagtcatgttcaaaaatctattgctagatcatagtagatactggttttctattaactcaaaacctacattgacaagtttaacattgagaagaatcttaacaaaaatatggatatgaattcagtagatatcttaaattcaataaaatcactggaagtttttcatgataacttattttaagatgccttaaaaatcttaaagtcacaaaaggaaaaaggtttttaacatttacatgagttaacattttttcatagaacttatttcctagatagaattttttactgttttttactgttttcttaagaaaacagttaaatcattatgcattcagttggaagaaagtagtggcaagaattctttcattgctatataatattcagtggctcatttatacctaataaaataatggtattttaaaataatgctactttcaaagtagcatttttttagttagtttacaggttacatacccaaaaccttaactatgactaagaaattaaagaagaaaaccagcaaactaaaacttctgggcagcaaaaatatataaatgcttcagatgtcaaatacccatgcttgaaagctcgtgtaatttactttaagattatctgcctgctcttcttcaaagctgaccttgctttagaaatagttttaactagcttagttttctggtttccaaaactaaaatagattaaatcctacaaatttaaggacagttgtgacagtaatctgaccactatctataaatacattggacattggtttccaaatctccctttcttcttcagttccttccttgttcaatatatacccttctctaaactgtgcgggtaaaaggaatgactgtccttgagagaaccattagtttatcaaaggtttatgtagttttgttgctgtaccctaactttgatattcagggaggtaggaaaggtaacagaaaaccagcatatttaatcaaagcaagaagtaatcgctgacagttaaatgtgaccaaaaaaattaaaagttcacaatttttttaatgtagccatttggggttatctctagtaaggcagatacccacgttggtaaatttttaggatattgtgttgcactagaaaactaagtggttcatatttctaatgaggaagattaatgaaagaacattgttatattctgcgtggtatattttaaagtttaagaaggcatgttaaacattatttcctctatggtagttaaaatacagaattagatttttaacaggtgtcatttgactaaacgtttcggtagaatgcttcatacttgagtgatgctggataaggtattgtatttcaacaatggactatgccttggtttttcactaatcaaaatcaaaattactctttaacatgataaatgaatttaccagtttagtatgctgtggtattttaataagttttcaaagataattgggaaaacatgagactggtcatattgatgaatattgtaacatgtgaattgtgatccatttctgatatgtcttgaactactgtgtctagtgggcaaatgtcattgttacctctgtgtgttaagaaaataaaaatattttctaaaggtc

SEQ ID NO: 194 - DNA, 6923 bp, Homo sapiens
  source 1..6923: mol_type = genomic DNA
atggccccaattctgagcattaatttatttattgggtatgagctacagttccgattaggcccaactttacagggaaaagcagttaccgtgtatacaaattacccatttcctggagaaacatttaatagagaaaaattccgttctctggattgggaaaatccaacagaaagagaagatgattctgataaatactgtaaacttaatctgcaacaatctggttcatttcagtattatttccttcaaggaaatgagaaaagtggtggaggttacatagttgtggaccccattttacgtgttggtgctgataatcatgtgctacccttggactgtgttactcttcagacatttttagctaagtgtttgggaccttttgatgaatgggaaagcagacttagggttgcaaaagaatcaggctacaacatgattcattttaccccattgcagactcttggactatctaggtcatgctactcccttgccaatcagttagaattaaatcctgacttttcaagacctaatagaaagtatacctggaatgatgttggacagctagtggaaaaattaaaaaaggaatggaatgttatttgtattactgatgttgtctacaatcatactgctgctaatagtaaatggatccaggaacatccagaatgtgcctataatcttgtgaattctccacacttaaaacctgcctgggtcttagacagagcactttggcgtttctcctgtgatgttgcagaagggaaatacaaagaaaagggaatacctgctttgattgaaaatgatcaccatatgaattccatccgaaaaataatttgggaggatatttttccaaagcttaaactctgggaatttttccaagtagatgtcaacaaagcggttgagcaatttagaagacttcttacacaagaaaataggcgagtaaccaagtctgatccaaaccaacaccttacgattattcaagatcctgaatacagacggtttggctgtactgtagatatgaacattgcactaacgactttcataccacatgacaaggggccagcagcaattgaagaatgctgtaattggtttcataaaagaatggaggaattaaattcagagaagcatcgactcattaactatcatcaggaacaggcagttaattgccttttgggaaatgtgttttatgaacgactggctggccatggtccaaaactaggacctgtcactagaaagcatcctttagttaccaggtattttactttcccatttgaagagatagacttctccatggaagaatctatgattcatctgccaaataaagcttgttttctgatggcacacaatggatgggtaatgggagatgatcctcttcgaaactttgctgaaccgggttcagaagtttacctaaggagagaacttatttgctggggagacagtgttaaattacgctatgggaataaaccagaggactgtccttatctctgggcacacatgaaaaaatacactgaaataactgcaacttatttccagggagtacgtcttgataactgccactcaacacctcttcacgtagctgagtacatgttggatgctgctaggaatttgcaacccaatttatatgtagtagctgaactgttcacaggaagtgaagatctggacaatgtctttgttactagactgggcattagttccttaataagagaggcaatgagtgcatataatagtcatgaagagggcagattagtttaccgatatggaggagaacctgttggatcctttgttcagccctgtttgaggcctttaatgccagctattgcacatgccctgtttatggatattacgcatgataatgagtgtcctattgtgcatagatcagcgtatgatgctcttccaagtactacaattgtttctatggcatgttgtgctagtggaagtacaagaggctatgatgaattagtgcctcatcagatttcagtggtttctgaagaacggttttacactaagtggaatcctgaagcattgccttcaaacacaggtgaagttaatttccaaagcggcattattgcagccaggtgtgctatcagtaaacttcatcaggagcttggagccaagggttttattcaggtgtatgtggatcaagttgatgaagacatagtggcagtaacaagacactcacctagcatccatcagtctgttgtggctgtatctagaactgctttcaggaatcccaagacttcattttacagcaaggaagtgcctcaaatgtgcatccctggcaaaattgaagaagtagttcttgaagctagaactattgagagaaacacgaaaccttataggaaggatgagaattcaatcaatggaacaccagatatcacagtagaaattagagaacatattcagcttaatgaaagtaaaattgttaaacaagctggagttgccacaaaagggcccaatgaatatattcaagaaatagaatttgaaaacttgtctccaggaagtgttattatattcagagttagtcttgatccacatgcacaagtcgctgttggaattcttcgaaatcatctgacacaattcagtcctcactttaaatctggcagcctagctgttgacaatgcagatcctatattaaaaattccttttgcttctcttgcctccagattaactttggctgagctaaatcagatcctttaccgatgtgaatcagaagaaaaggaagatggtggagggtgctatgacataccaaactggtcagcccttaaatatgcaggtcttcaaggtttaatgtctgtattggcagaaataagaccaaagaatgacttggggcatcctttttgtaataatttgagatctggagattggatgattgactatgtcagtaaccggcttatttcacgatcaggaactattgctgaagttggtaaatggttgcaggctatgttcttctacctgaagcagatcccacgttaccttatcccatgttactttgatgctatattaattggtgcatataccactcttctggatacagcatggaagcagatgtcaagctttgttcagaatggttcaacctttgtgaaacacctttcattgggttcagttcaactgtgtggagtaggaaaattcccttccctgccaattctttcacctgccctaatggatgtaccttataggttaaatgagatcacaaaagaaaaggagcaatgttgtgtttctctagctgcaggcttacctcatttttcttctggtattttccgctgctggggaagggatacttttattgcacttagaggtatactgctgattactggacgctatgtagaagccaggaatattattttagcatttgcgggtaccctgaggcatggtctcattcctaatctactgggtgaaggaatttatgccagatacaattgtcgggatgctgtgtggtggtggctgcagtgtatccaggattactgtaaaatggttccaaatggtctagacattctcaagtgcccagtttccagaatgtatcctacagatgattctgctcctttgcctgctggcacactggatcagccattgtttgaagtcatacaggaagcaatgcaaaaacacatgcagggcatacagttccgagaaaggaatgctggtccccagatagatcgaaacatgaaggacgaaggttttaatataactgcaggagttgatgaagaaacaggatttgtttatggaggaaatcgtttcaattgtggcacatggatggataaaatgggagaaagtgacagagctagaaacagaggaatcccagccacaccaagagatgggtctgctgtggaaattgtgggcctgagtaaatctgctgttcgctggttgctggaattatccaaaaaaaatattttcccttatcatgaagtcacagtaaaaagacatggaaaggctataaaggtctcatatgatgagtggaacagaaaaatacaagacaactttgaaaagctatttcatgtttccgaagacccttcagatttaaatgaaaagcatccaaatctggttcacaaacgtggcatatacaaagatagttatggagcttcaagtccttggtgtgactatcagctcaggcctaattttaccatagcaatggttgtggcccctgagctctttactacagaaaaagcatggaaagctttggagattgcagaaaaaaaattgcttggtccccttggcatgaaaactttagatccagatgatatggtttactgtggaatttatgacaatgcattagacaatgacaactacaatcttgctaaaggtttcaattatcaccaaggacctgagtggctgtggcctattgggtattttcttcgtgcaaaattatatttttccagattgatgggcccggagactactgcaaagactatagttttggttaaaaatgttctttcccgacattatgttcatcttgagagatccccttggaaaggacttccagaactgaccaatgagaatgcccagtactgtcctttcagctgtgaaacacaagcctggtcaattgctactattcttgagacactttatgatttatagtttattacagatattaagtatgcaattacttgtattataggatgcaaggtcatcatatgtaaatgccttatatgcacaggctcaagttgttttaaaaatctcatttattataatattgatgctcaattaggtaagattgtaaaagcattgattttttttaatgtacagaggtagatttcaatttgaatcagaaagaaatatcattaccaatgaaatgtgtttgagttcagtaagaattattcaaatgcctagaaatccatagtttggaaaagaaaaatcatgtcatcttctatttgtacagaaatgaaaataaaatatgaaaataatgaaagaaatgaaaagatagcttttaattgtggtatatataatcttcagtaacaatacatactgaatacgctgtggttcattaatattaacaccacgtactatagtattcttaatacagtgctcactgcatttaataaatatttaataaatgatgaatgatagaagtttccatctacaatatatgttcctaaatggagcacagatgttcaaactatgctttcattttttcactgatatattaatttttgtgtaatgaatgccaacagtatattttatatgatttacttatgtgaggaaacatgcaaagcattaggaaatttatttcctaaaaacagttttgtaaaattagtattgagttctattgagtattataagatagcttacattttcaaaatggaaattgtcggtcatatttctagaactttaaagaaaaaagaatgttatattagttttctaaaactcaactatctttagtcatgttcaaaaatctattgctagatcatagtagatactggttttctattaactcaaaacctacattgacaagtttaacattgagaagaatcttaacaaaaatatggatatgaattcagtagatatcttaaattcaataaaatcactggaagtttttcatgataacttattttaagatgccttaaaaatcttaaagtcacaaaaggaaaaaggtttttaacatttacatgagttaacattttttcatagaacttatttcctagatagaattttttactgttttttactgttttcttaagaaaacagttaaatcattatgcattcagttggaagaaagtagtggcaagaattctttcattgctatataatattcagtggctcatttatacctaataaaataatggtattttaaaataatgctactttcaaagtagcatttttttagttagtttacaggttacatacccaaaaccttaactatgactaagaaattaaagaagaaaaccagcaaactaaaacttctgggcagcaaaaatatataaatgcttcagatgtcaaatacccatgcttgaaagctcgtgtaatttactttaagattatctgcctgctcttcttcaaagctgaccttgctttagaaatagttttaactagcttagttttctggtttccaaaactaaaatagattaaatcctacaaatttaaggacagttgtgacagtaatctgaccactatctataaatacattggacattggtttccaaatctccctttcttcttcagttccttccttgttcaatatatacccttctctaaactgtgcgggtaaaaggaatgactgtccttgagagaaccattagtttatcaaaggtttatgtagttttgttgctgtaccctaactttgatattcagggaggtaggaaaggtaacagaaaaccagcatatttaatcaaagcaagaagtaatcgctgacagttaaatgtgaccaaaaaaattaaaagttcacaatttttttaatgtagccatttggggttatctctagtaaggcagatacccacgttggtaaatttttaggatattgtgttgcactagaaaactaagtggttcatatttctaatgaggaagattaatgaaagaacattgttatattctgcgtggtatattttaaagtttaagaaggcatgttaaacattatttcctctatggtagttaaaatacagaattagatttttaacaggtgtcatttgactaaacgtttcggtagaatgcttcatacttgagtgatgctggataaggtattgtatttcaacaatggactatgccttggtttttcactaatcaaaatcaaaattactctttaacatgataaatgaatttaccagtttagtatgctgtggtattttaataagttttcaaagataattgggaaaacatgagactggtcatattgatgaatattgtaacatgtgaattgtgatccatttctgatatgtcttgaactactgtgtctagtgggcaaatgtcattgttacctctgtgtgttaagaaaataaaaatattttctaaaggtctgt

SEQ ID NO: 195 - DNA, 7166 bp, Homo sapiens
  source 1..7166: mol_type = genomic DNA
ctgtctacggcagctattccagaggcaacaactgcttccctctgttctcatctccccattggtggctggcgacccgaatttgggaatggggagattgcccacctgttatctttgagcagactaatctcttgggtaactcattcgactgtggagttcttttaattcttatgaaagatttcaaatcctctagaagccaaaatgggacacagtaaacagattcgaattttacttctgaacgaaatggagaaactggaaaagaccctcttcagacttgaacaagggtatgagctacagttccgattaggcccaactttacagggaaaagcagttaccgtgtatacaaattacccatttcctggagaaacatttaatagagaaaaattccgttctctggattgggaaaatccaacagaaagagaagatgattctgataaatactgtaaacttaatctgcaacaatctggttcatttcagtattatttccttcaaggaaatgagaaaagtggtggaggttacatagttgtggaccccattttacgtgttggtgctgataatcatgtgctacccttggactgtgttactcttcagacatttttagctaagtgtttgggaccttttgatgaatgggaaagcagacttagggttgcaaaagaatcaggctacaacatgattcattttaccccattgcagactcttggactatctaggtcatgctactcccttgccaatcagttagaattaaatcctgacttttcaagacctaatagaaagtatacctggaatgatgttggacagctagtggaaaaattaaaaaaggaatggaatgttatttgtattactgatgttgtctacaatcatactgctgctaatagtaaatggatccaggaacatccagaatgtgcctataatcttgtgaattctccacacttaaaacctgcctgggtcttagacagagcactttggcgtttctcctgtgatgttgcagaagggaaatacaaagaaaagggaatacctgctttgattgaaaatgatcaccatatgaattccatccgaaaaataatttgggaggatatttttccaaagcttaaactctgggaatttttccaagtagatgtcaacaaagcggttgagcaatttagaagacttcttacacaagaaaataggcgagtaaccaagtctgatccaaaccaacaccttacgattattcaagatcctgaatacagacggtttggctgtactgtagatatgaacattgcactaacgactttcataccacatgacaaggggccagcagcaattgaagaatgctgtaattggtttcataaaagaatggaggaattaaattcagagaagcatcgactcattaactatcatcaggaacaggcagttaattgccttttgggaaatgtgttttatgaacgactggctggccatggtccaaaactaggacctgtcactagaaagcatcctttagttaccaggtattttactttcccatttgaagagatagacttctccatggaagaatctatgattcatctgccaaataaagcttgttttctgatggcacacaatggatgggtaatgggagatgatcctcttcgaaactttgctgaaccgggttcagaagtttacctaaggagagaacttatttgctggggagacagtgttaaattacgctatgggaataaaccagaggactgtccttatctctgggcacacatgaaaaaatacactgaaataactgcaacttatttccagggagtacgtcttgataactgccactcaacacctcttcacgtagctgagtacatgttggatgctgctaggaatttgcaacccaatttatatgtagtagctgaactgttcacaggaagtgaagatctggacaatgtctttgttactagactgggcattagttccttaataagagaggcaatgagtgcatataatagtcatgaagagggcagattagtttaccgatatggaggagaacctgttggatcctttgttcagccctgtttgaggcctttaatgccagctattgcacatgccctgtttatggatattacgcatgataatgagtgtcctattgtgcatagatcagcgtatgatgctcttccaagtactacaattgtttctatggcatgttgtgctagtggaagtacaagaggctatgatgaattagtgcctcatcagatttcagtggtttctgaagaacggttttacactaagtggaatcctgaagcattgccttcaaacacaggtgaagttaatttccaaagcggcattattgcagccaggtgtgctatcagtaaacttcatcaggagcttggagccaagggttttattcaggtgtatgtggatcaagttgatgaagacatagtggcagtaacaagacactcacctagcatccatcagtctgttgtggctgtatctagaactgctttcaggaatcccaagacttcattttacagcaaggaagtgcctcaaatgtgcatccctggcaaaattgaagaagtagttcttgaagctagaactattgagagaaacacgaaaccttataggaaggatgagaattcaatcaatggaacaccagatatcacagtagaaattagagaacatattcagcttaatgaaagtaaaattgttaaacaagctggagttgccacaaaagggcccaatgaatatattcaagaaatagaatttgaaaacttgtctccaggaagtgttattatattcagagttagtcttgatccacatgcacaagtcgctgttggaattcttcgaaatcatctgacacaattcagtcctcactttaaatctggcagcctagctgttgacaatgcagatcctatattaaaaattccttttgcttctcttgcctccagattaactttggctgagctaaatcagatcctttaccgatgtgaatcagaagaaaaggaagatggtggagggtgctatgacataccaaactggtcagcccttaaatatgcaggtcttcaaggtttaatgtctgtattggcagaaataagaccaaagaatgacttggggcatcctttttgtaataatttgagatctggagattggatgattgactatgtcagtaaccggcttatttcacgatcaggaactattgctgaagttggtaaatggttgcaggctatgttcttctacctgaagcagatcccacgttaccttatcccatgttactttgatgctatattaattggtgcatataccactcttctggatacagcatggaagcagatgtcaagctttgttcagaatggttcaacctttgtgaaacacctttcattgggttcagttcaactgtgtggagtaggaaaattcccttccctgccaattctttcacctgccctaatggatgtaccttataggttaaatgagatcacaaaagaaaaggagcaatgttgtgtttctctagctgcaggcttacctcatttttcttctggtattttccgctgctggggaagggatacttttattgcacttagaggtatactgctgattactggacgctatgtagaagccaggaatattattttagcatttgcgggtaccctgaggcatggtctcattcctaatctactgggtgaaggaatttatgccagatacaattgtcgggatgctgtgtggtggtggctgcagtgtatccaggattactgtaaaatggttccaaatggtctagacattctcaagtgcccagtttccagaatgtatcctacagatgattctgctcctttgcctgctggcacactggatcagccattgtttgaagtcatacaggaagcaatgcaaaaacacatgcagggcatacagttccgagaaaggaatgctggtccccagatagatcgaaacatgaaggacgaaggttttaatataactgcaggagttgatgaagaaacaggatttgtttatggaggaaatcgtttcaattgtggcacatggatggataaaatgggagaaagtgacagagctagaaacagaggaatcccagccacaccaagagatgggtctgctgtggaaattgtgggcctgagtaaatctgctgttcgctggttgctggaattatccaaaaaaaatattttcccttatcatgaagtcacagtaaaaagacatggaaaggctataaaggtctcatatgatgagtggaacagaaaaatacaagacaactttgaaaagctatttcatgtttccgaagacccttcagatttaaatgaaaagcatccaaatctggttcacaaacgtggcatatacaaagatagttatggagcttcaagtccttggtgtgactatcagctcaggcctaattttaccatagcaatggttgtggcccctgagctctttactacagaaaaagcatggaaagctttggagattgcagaaaaaaaattgcttggtccccttggcatgaaaactttagatccagatgatatggtttactgtggaatttatgacaatgcattagacaatgacaactacaatcttgctaaaggtttcaattatcaccaaggacctgagtggctgtggcctattgggtattttcttcgtgcaaaattatatttttccagattgatgggcccggagactactgcaaagactatagttttggttaaaaatgttctttcccgacattatgttcatcttgagagatccccttggaaaggacttccagaactgaccaatgagaatgcccagtactgtcctttcagctgtgaaacacaagcctggtcaattgctactattcttgagacactttatgatttatagtttattacagatattaagtatgcaattacttgtattataggatgcaaggtcatcatatgtaaatgccttatatgcacaggctcaagttgttttaaaaatctcatttattataatattgatgctcaattaggtaagattgtaaaagcattgattttttttaatgtacagaggtagatttcaatttgaatcagaaagaaatatcattaccaatgaaatgtgtttgagttcagtaagaattattcaaatgcctagaaatccatagtttggaaaagaaaaatcatgtcatcttctatttgtacagaaatgaaaataaaatatgaaaataatgaaagaaatgaaaagatagcttttaattgtggtatatataatcttcagtaacaatacatactgaatacgctgtggttcattaatattaacaccacgtactatagtattcttaatacagtgctcactgcatttaataaatatttaataaatgatgaatgatagaagtttccatctacaatatatgttcctaaatggagcacagatgttcaaactatgctttcattttttcactgatatattaatttttgtgtaatgaatgccaacagtatattttatatgatttacttatgtgaggaaacatgcaaagcattaggaaatttatttcctaaaaacagttttgtaaaattagtattgagttctattgagtattataagatagcttacattttcaaaatggaaattgtcggtcatatttctagaactttaaagaaaaaagaatgttatattagttttctaaaactcaactatctttagtcatgttcaaaaatctattgctagatcatagtagatactggttttctattaactcaaaacctacattgacaagtttaacattgagaagaatcttaacaaaaatatggatatgaattcagtagatatcttaaattcaataaaatcactggaagtttttcatgataacttattttaagatgccttaaaaatcttaaagtcacaaaaggaaaaaggtttttaacatttacatgagttaacattttttcatagaacttatttcctagatagaattttttactgttttttactgttttcttaagaaaacagttaaatcattatgcattcagttggaagaaagtagtggcaagaattctttcattgctatataatattcagtggctcatttatacctaataaaataatggtattttaaaataatgctactttcaaagtagcatttttttagttagtttacaggttacatacccaaaaccttaactatgactaagaaattaaagaagaaaaccagcaaactaaaacttctgggcagcaaaaatatataaatgcttcagatgtcaaatacccatgcttgaaagctcgtgtaatttactttaagattatctgcctgctcttcttcaaagctgaccttgctttagaaatagttttaactagcttagttttctggtttccaaaactaaaatagattaaatcctacaaatttaaggacagttgtgacagtaatctgaccactatctataaatacattggacattggtttccaaatctccctttcttcttcagttccttccttgttcaatatatacccttctctaaactgtgcgggtaaaaggaatgactgtccttgagagaaccattagtttatcaaaggtttatgtagttttgttgctgtaccctaactttgatattcagggaggtaggaaaggtaacagaaaaccagcatatttaatcaaagcaagaagtaatcgctgacagttaaatgtgaccaaaaaaattaaaagttcacaatttttttaatgtagccatttggggttatctctagtaaggcagatacccacgttggtaaatttttaggatattgtgttgcactagaaaactaagtggttcatatttctaatgaggaagattaatgaaagaacattgttatattctgcgtggtatattttaaagtttaagaaggcatgttaaacattatttcctctatggtagttaaaatacagaattagatttttaacaggtgtcatttgactaaacgtttcggtagaatgcttcatacttgagtgatgctggataaggtattgtatttcaacaatggactatgccttggtttttcactaatcaaaatcaaaattactctttaacatgataaatgaatttaccagtttagtatgctgtggtattttaataagttttcaaagataattgggaaaacatgagactggtcatattgatgaatattgtaacatgtgaattgtgatccatttctgatatgtcttgaactactgtgtctagtgggcaaatgtcattgttacctctgtgtgttaagaaaataaaaatattttctaaaggtc

SEQ ID NO: 196 - DNA, 7106 bp, Homo sapiens
  source 1..7106: mol_type = genomic DNA
ctgtctacggcagctattccagaggcaacaactgcttccctctgttctcatctccccattggtggctggcgacccgaatttgggaatggggagattgcccacctgttatctttgagcagactaatctcttaagccaaaatgggacacagtaaacagattcgaattttacttctgaacgaaatggagaaactggaaaagaccctcttcagacttgaacaagggtatgagctacagttccgattaggcccaactttacagggaaaagcagttaccgtgtatacaaattacccatttcctggagaaacatttaatagagaaaaattccgttctctggattgggaaaatccaacagaaagagaagatgattctgataaatactgtaaacttaatctgcaacaatctggttcatttcagtattatttccttcaaggaaatgagaaaagtggtggaggttacatagttgtggaccccattttacgtgttggtgctgataatcatgtgctacccttggactgtgttactcttcagacatttttagctaagtgtttgggaccttttgatgaatgggaaagcagacttagggttgcaaaagaatcaggctacaacatgattcattttaccccattgcagactcttggactatctaggtcatgctactcccttgccaatcagttagaattaaatcctgacttttcaagacctaatagaaagtatacctggaatgatgttggacagctagtggaaaaattaaaaaaggaatggaatgttatttgtattactgatgttgtctacaatcatactgctgctaatagtaaatggatccaggaacatccagaatgtgcctataatcttgtgaattctccacacttaaaacctgcctgggtcttagacagagcactttggcgtttctcctgtgatgttgcagaagggaaatacaaagaaaagggaatacctgctttgattgaaaatgatcaccatatgaattccatccgaaaaataatttgggaggatatttttccaaagcttaaactctgggaatttttccaagtagatgtcaacaaagcggttgagcaatttagaagacttcttacacaagaaaataggcgagtaaccaagtctgatccaaaccaacaccttacgattattcaagatcctgaatacagacggtttggctgtactgtagatatgaacattgcactaacgactttcataccacatgacaaggggccagcagcaattgaagaatgctgtaattggtttcataaaagaatggaggaattaaattcagagaagcatcgactcattaactatcatcaggaacaggcagttaattgccttttgggaaatgtgttttatgaacgactggctggccatggtccaaaactaggacctgtcactagaaagcatcctttagttaccaggtattttactttcccatttgaagagatagacttctccatggaagaatctatgattcatctgccaaataaagcttgttttctgatggcacacaatggatgggtaatgggagatgatcctcttcgaaactttgctgaaccgggttcagaagtttacctaaggagagaacttatttgctggggagacagtgttaaattacgctatgggaataaaccagaggactgtccttatctctgggcacacatgaaaaaatacactgaaataactgcaacttatttccagggagtacgtcttgataactgccactcaacacctcttcacgtagctgagtacatgttggatgctgctaggaatttgcaacccaatttatatgtagtagctgaactgttcacaggaagtgaagatctggacaatgtctttgttactagactgggcattagttccttaataagagaggcaatgagtgcatataatagtcatgaagagggcagattagtttaccgatatggaggagaacctgttggatcctttgttcagccctgtttgaggcctttaatgccagctattgcacatgccctgtttatggatattacgcatgataatgagtgtcctattgtgcatagatcagcgtatgatgctcttccaagtactacaattgtttctatggcatgttgtgctagtggaagtacaagaggctatgatgaattagtgcctcatcagatttcagtggtttctgaagaacggttttacactaagtggaatcctgaagcattgccttcaaacacaggtgaagttaatttccaaagcggcattattgcagccaggtgtgctatcagtaaacttcatcaggagcttggagccaagggttttattcaggtgtatgtggatcaagttgatgaagacatagtggcagtaacaagacactcacctagcatccatcagtctgttgtggctgtatctagaactgctttcaggaatcccaagacttcattttacagcaaggaagtgcctcaaatgtgcatccctggcaaaattgaagaagtagttcttgaagctagaactattgagagaaacacgaaaccttataggaaggatgagaattcaatcaatggaacaccagatatcacagtagaaattagagaacatattcagcttaatgaaagtaaaattgttaaacaagctggagttgccacaaaagggcccaatgaatatattcaagaaatagaatttgaaaacttgtctccaggaagtgttattatattcagagttagtcttgatccacatgcacaagtcgctgttggaattcttcgaaatcatctgacacaattcagtcctcactttaaatctggcagcctagctgttgacaatgcagatcctatattaaaaattccttttgcttctcttgcctccagattaactttggctgagctaaatcagatcctttaccgatgtgaatcagaagaaaaggaagatggtggagggtgctatgacataccaaactggtcagcccttaaatatgcaggtcttcaaggtttaatgtctgtattggcagaaataagaccaaagaatgacttggggcatcctttttgtaataatttgagatctggagattggatgattgactatgtcagtaaccggcttatttcacgatcaggaactattgctgaagttggtaaatggttgcaggctatgttcttctacctgaagcagatcccacgttaccttatcccatgttactttgatgctatattaattggtgcatataccactcttctggatacagcatggaagcagatgtcaagctttgttcagaatggttcaacctttgtgaaacacctttcattgggttcagttcaactgtgtggagtaggaaaattcccttccctgccaattctttcacctgccctaatggatgtaccttataggttaaatgagatcacaaaagaaaaggagcaatgttgtgtttctctagctgcaggcttacctcatttttcttctggtattttccgctgctggggaagggatacttttattgcacttagaggtatactgctgattactggacgctatgtagaagccaggaatattattttagcatttgcgggtaccctgaggcatggtctcattcctaatctactgggtgaaggaatttatgccagatacaattgtcgggatgctgtgtggtggtggctgcagtgtatccaggattactgtaaaatggttccaaatggtctagacattctcaagtgcccagtttccagaatgtatcctacagatgattctgctcctttgcctgctggcacactggatcagccattgtttgaagtcatacaggaagcaatgcaaaaacacatgcagggcatacagttccgagaaaggaatgctggtccccagatagatcgaaacatgaaggacgaaggttttaatataactgcaggagttgatgaagaaacaggatttgtttatggaggaaatcgtttcaattgtggcacatggatggataaaatgggagaaagtgacagagctagaaacagaggaatcccagccacaccaagagatgggtctgctgtggaaattgtgggcctgagtaaatctgctgttcgctggttgctggaattatccaaaaaaaatattttcccttatcatgaagtcacagtaaaaagacatggaaaggctataaaggtctcatatgatgagtggaacagaaaaatacaagacaactttgaaaagctatttcatgtttccgaagacccttcagatttaaatgaaaagcatccaaatctggttcacaaacgtggcatatacaaagatagttatggagcttcaagtccttggtgtgactatcagctcaggcctaattttaccatagcaatggttgtggcccctgagctctttactacagaaaaagcatggaaagctttggagattgcagaaaaaaaattgcttggtccccttggcatgaaaactttagatccagatgatatggtttactgtggaatttatgacaatgcattagacaatgacaactacaatcttgctaaaggtttcaattatcaccaaggacctgagtggctgtggcctattgggtattttcttcgtgcaaaattatatttttccagattgatgggcccggagactactgcaaagactatagttttggttaaaaatgttctttcccgacattatgttcatcttgagagatccccttggaaaggacttccagaactgaccaatgagaatgcccagtactgtcctttcagctgtgaaacacaagcctggtcaattgctactattcttgagacactttatgatttatagtttattacagatattaagtatgcaattacttgtattataggatgcaaggtcatcatatgtaaatgccttatatgcacaggctcaagttgttttaaaaatctcatttattataatattgatgctcaattaggtaagattgtaaaagcattgattttttttaatgtacagaggtagatttcaatttgaatcagaaagaaatatcattaccaatgaaatgtgtttgagttcagtaagaattattcaaatgcctagaaatccatagtttggaaaagaaaaatcatgtcatcttctatttgtacagaaatgaaaataaaatatgaaaataatgaaagaaatgaaaagatagcttttaattgtggtatatataatcttcagtaacaatacatactgaatacgctgtggttcattaatattaacaccacgtactatagtattcttaatacagtgctcactgcatttaataaatatttaataaatgatgaatgatagaagtttccatctacaatatatgttcctaaatggagcacagatgttcaaactatgctttcattttttcactgatatattaatttttgtgtaatgaatgccaacagtatattttatatgatttacttatgtgaggaaacatgcaaagcattaggaaatttatttcctaaaaacagttttgtaaaattagtattgagttctattgagtattataagatagcttacattttcaaaatggaaattgtcggtcatatttctagaactttaaagaaaaaagaatgttatattagttttctaaaactcaactatctttagtcatgttcaaaaatctattgctagatcatagtagatactggttttctattaactcaaaacctacattgacaagtttaacattgagaagaatcttaacaaaaatatggatatgaattcagtagatatcttaaattcaataaaatcactggaagtttttcatgataacttattttaagatgccttaaaaatcttaaagtcacaaaaggaaaaaggtttttaacatttacatgagttaacattttttcatagaacttatttcctagatagaattttttactgttttttactgttttcttaagaaaacagttaaatcattatgcattcagttggaagaaagtagtggcaagaattctttcattgctatataatattcagtggctcatttatacctaataaaataatggtattttaaaataatgctactttcaaagtagcatttttttagttagtttacaggttacatacccaaaaccttaactatgactaagaaattaaagaagaaaaccagcaaactaaaacttctgggcagcaaaaatatataaatgcttcagatgtcaaatacccatgcttgaaagctcgtgtaatttactttaagattatctgcctgctcttcttcaaagctgaccttgctttagaaatagttttaactagcttagttttctggtttccaaaactaaaatagattaaatcctacaaatttaaggacagttgtgacagtaatctgaccactatctataaatacattggacattggtttccaaatctccctttcttcttcagttccttccttgttcaatatatacccttctctaaactgtgcgggtaaaaggaatgactgtccttgagagaaccattagtttatcaaaggtttatgtagttttgttgctgtaccctaactttgatattcagggaggtaggaaaggtaacagaaaaccagcatatttaatcaaagcaagaagtaatcgctgacagttaaatgtgaccaaaaaaattaaaagttcacaatttttttaatgtagccatttggggttatctctagtaaggcagatacccacgttggtaaatttttaggatattgtgttgcactagaaaactaagtggttcatatttctaatgaggaagattaatgaaagaacattgttatattctgcgtggtatattttaaagtttaagaaggcatgttaaacattatttcctctatggtagttaaaatacagaattagatttttaacaggtgtcatttgactaaacgtttcggtagaatgcttcatacttgagtgatgctggataaggtattgtatttcaacaatggactatgccttggtttttcactaatcaaaatcaaaattactctttaacatgataaatgaatttaccagtttagtatgctgtggtattttaataagttttcaaagataattgggaaaacatgagactggtcatattgatgaatattgtaacatgtgaattgtgatccatttctgatatgtcttgaactactgtgtctagtgggcaaatgtcattgttacctctgtgtgttaagaaaataaaaatattttctaaaggtc

SEQ ID NO: 197 - DNA, 926 bp, Homo sapiens
  source 1..926: mol_type = genomic DNA
agggcatgaatatcagacgctagggggacagccactgtgttgtctgctaccctcatcctggtcactgcttctgctataacagccctaggccaggaatatgaacaagccgctgctttggatctctgtcctcaccagcctcctggaagcctttgctcacacagacctcagtgggaaggtgtttgtatttcctagagaatctgttactgatcatgtaaacttgatcacaccgctggagaagcctctacagaactttaccttgtgttttcgagcctatagtgatctctctcgtgcctacagcctcttctcctacaatacccaaggcagggataatgagctactagtttataaagaaagagttggagagtatagtctatacattggaagacacaaagttacatccaaagttatcgaaaagttcccggctccagtgcacatctgtgtgagctgggagtcctcatcaggtattgctgaattttggatcaatgggacacctttggtgaaaaagggtctgcgacagggttactttgtagaagctcagcccaagattgtcctggggcaggaacaggattcctatgggggcaagtttgataggagccagtcctttgtgggagagattggggatttgtacatgtgggactctgtgctgcccccagaaaatatcctgtctgcctatcagggtacccctctccctgccaatatcctggactggcaggctctgaactatgaaatcagaggatatgtcatcatcaaacccttggtgtgggtctgaggtcttgactcaacgagagcacttgaaaatgaaatgactgtctaagagatctggtcaaagcaactggatactagatcttacatctgcagctctttcttctttgaatttcctatctgtatgtctgcctaattaaaaaaatatatattgtattatgcta

SEQ ID NO: 198 - DNA, 3393 bp, Homo sapiens
  source 1..3393: mol_type = genomic DNA
cgcccaacccaagttcaaaggctgataagagagaaaatctcatgaggaggttttagtctagggaaagtcattcagtggatgtgatcttggctcacaggggacgatgtcaagctcttcctggctccttctcagccttgttgctgtaactgctgctcagtccaccattgaggaacaggccaagacatttttggacaagtttaaccacgaagccgaagacctgttctatcaaagttcacttgcttcttggaattataacaccaatattactgaagagaatgtccaaaacatgaataatgctggggacaaatggtctgcctttttaaaggaacagtccacacttgcccaaatgtatccactacaagaaattcagaatctcacagtcaagcttcagctgcaggctcttcagcaaaatgggtcttcagtgctctcagaagacaagagcaaacggttgaacacaattctaaatacaatgagcaccatctacagtactggaaaagtttgtaacccagataatccacaagaatgcttattacttgaaccaggtttgaatgaaataatggcaaacagtttagactacaatgagaggctctgggcttgggaaagctggagatctgaggtcggcaagcagctgaggccattatatgaagagtatgtggtcttgaaaaatgagatggcaagagcaaatcattatgaggactatggggattattggagaggagactatgaagtaaatggggtagatggctatgactacagccgcggccagttgattgaagatgtggaacatacctttgaagagattaaaccattatatgaacatcttcatgcctatgtgagggcaaagttgatgaatgcctatccttcctatatcagtccaattggatgcctccctgctcatttgcttggtgatatgtggggtagattttggacaaatctgtactctttgacagttccctttggacagaaaccaaacatagatgttactgatgcaatggtggaccaggcctgggatgcacagagaatattcaaggaggccgagaagttctttgtatctgttggtcttcctaatatgactcaaggattctgggaaaattccatgctaacggacccaggaaatgttcagaaagcagtctgccatcccacagcttgggacctggggaagggcgacttcaggatccttatgtgcacaaaggtgacaatggacgacttcctgacagctcatcatgagatggggcatatccagtatgatatggcatatgctgcacaaccttttctgctaagaaatggagctaatgaaggattccatgaagctgttggggaaatcatgtcactttctgcagccacacctaagcatttaaaatccattggtcttctgtcacccgattttcaagaagacaatgaaacagaaataaacttcctgctcaaacaagcactcacgattgttgggactctgccatttacttacatgttagagaagtggaggtggatggtctttaaaggggaaattcccaaagaccagtggatgaaaaagtggtgggagatgaagcgagagatagttggggtggtggaacctgtgccccatgatgaaacatactgtgaccccgcatctctgttccatgtttctaatgattactcattcattcgatattacacaaggaccctttaccaattccagtttcaagaagcactttgtcaagcagctaaacatgaaggccctctgcacaaatgtgacatctcaaactctacagaagctggacagaaactgttcaatatgctgaggcttggaaaatcagaaccctggaccctagcattggaaaatgttgtaggagcaaagaacatgaatgtaaggccactgctcaactactttgagcccttatttacctggctgaaagaccagaacaagaattcttttgtgggatggagtaccgactggagtccatatgcagaccaaagcatcaaagtgaggataagcctaaaatcagctcttggagataaagcatatgaatggaacgacaatgaaatgtacctgttccgatcatctgttgcatatgctatgaggcagtactttttaaaagtaaaaaatcagatgattctttttggggaggaggatgtgcgagtggctaatttgaaaccaagaatctcctttaatttctttgtcactgcacctaaaaatgtgtctgatatcattcctagaactgaagttgaaaaggccatcaggatgtcccggagccgtatcaatgatgctttccgtctgaatgacaacagcctagagtttctggggatacagccaacacttggacctcctaaccagccccctgtttccatatggctgattgtttttggagttgtgatgggagtgatagtggttggcattgtcatcctgatcttcactgggatcagagatcggaagaagaaaaataaagcaagaagtggagaaaatccttatgcctccatcgatattagcaaaggagaaaataatccaggattccaaaacactgatgatgttcagacctccttttagaaaaatctatgtttttcctcttgaggtgattttgttgtatgtaaatgttaatttcatggtatagaaaatataagatgataaagatatcattaaatgtcaaaactatgactctgttcagaaaaaaaattgtccaaagacaacatggccaaggagagagcatcttcattgacattgctttcagtatttatttctgtctctggatttgacttctgttctgtttcttaataaggattttgtattagagtatattagggaaagtgtgtatttggtctcacaggctgttcagggataatctaaatgtaaatgtctgttgaatttctgaagttgaaaacaaggatatatcattggagcaagtgttggatcttgtatggaatatggatggatcacttgtaaggacagtgcctgggaactggtgtagctgcaaggattgagaatggcatgcattagctcactttcatttaatccattgtcaaggatgacatgctttcttcacagtaactcagttcaagtactatggtgatttgcctacagtgatgtttggaatcgatcatgctttcttcaaggtgacaggtctaaagagagaagaatccagggaacaggtagaggacattgctttttcacttccaaggtgcttgatcaacatctccctgacaacacaaaactagagccaggggcctccgtgaactcccagagcatgcctgatagaaactcatttctactgttctctaactgtggagtgaatggaaattccaactgtatgttcaccctctgaagtgggtacccagtctcttaaatcttttgtatttgctcacagtgtttgagcagtgctgagcacaaagcagacactcaataaatgctagatttacacactc

SEQ ID NO: 199 - DNA, 3507 bp, Homo sapiens
  source 1..3507: mol_type = genomic DNA
gttgttgtgatcccatggctacagaggatcaggagttgacatagatactctttggatttcataccatgtggaggctttcttacttccacgtgaccttgactgagttttgaatagcgcccaacccaagttcaaaggctgataagagagaaaatctcatgaggaggttttagtctagggaaagtcattcagtggatgtgatcttggctcacaggggacgatgtcaagctcttcctggctccttctcagccttgttgctgtaactgctgctcagtccaccattgaggaacaggccaagacatttttggacaagtttaaccacgaagccgaagacctgttctatcaaagttcacttgcttcttggaattataacaccaatattactgaagagaatgtccaaaacatgaataatgctggggacaaatggtctgcctttttaaaggaacagtccacacttgcccaaatgtatccactacaagaaattcagaatctcacagtcaagcttcagctgcaggctcttcagcaaaatgggtcttcagtgctctcagaagacaagagcaaacggttgaacacaattctaaatacaatgagcaccatctacagtactggaaaagtttgtaacccagataatccacaagaatgcttattacttgaaccaggtttgaatgaaataatggcaaacagtttagactacaatgagaggctctgggcttgggaaagctggagatctgaggtcggcaagcagctgaggccattatatgaagagtatgtggtcttgaaaaatgagatggcaagagcaaatcattatgaggactatggggattattggagaggagactatgaagtaaatggggtagatggctatgactacagccgcggccagttgattgaagatgtggaacatacctttgaagagattaaaccattatatgaacatcttcatgcctatgtgagggcaaagttgatgaatgcctatccttcctatatcagtccaattggatgcctccctgctcatttgcttggtgatatgtggggtagattttggacaaatctgtactctttgacagttccctttggacagaaaccaaacatagatgttactgatgcaatggtggaccaggcctgggatgcacagagaatattcaaggaggccgagaagttctttgtatctgttggtcttcctaatatgactcaaggattctgggaaaattccatgctaacggacccaggaaatgttcagaaagcagtctgccatcccacagcttgggacctggggaagggcgacttcaggatccttatgtgcacaaaggtgacaatggacgacttcctgacagctcatcatgagatggggcatatccagtatgatatggcatatgctgcacaaccttttctgctaagaaatggagctaatgaaggattccatgaagctgttggggaaatcatgtcactttctgcagccacacctaagcatttaaaatccattggtcttctgtcacccgattttcaagaagacaatgaaacagaaataaacttcctgctcaaacaagcactcacgattgttgggactctgccatttacttacatgttagagaagtggaggtggatggtctttaaaggggaaattcccaaagaccagtggatgaaaaagtggtgggagatgaagcgagagatagttggggtggtggaacctgtgccccatgatgaaacatactgtgaccccgcatctctgttccatgtttctaatgattactcattcattcgatattacacaaggaccctttaccaattccagtttcaagaagcactttgtcaagcagctaaacatgaaggccctctgcacaaatgtgacatctcaaactctacagaagctggacagaaactgttcaatatgctgaggcttggaaaatcagaaccctggaccctagcattggaaaatgttgtaggagcaaagaacatgaatgtaaggccactgctcaactactttgagcccttatttacctggctgaaagaccagaacaagaattcttttgtgggatggagtaccgactggagtccatatgcagaccaaagcatcaaagtgaggataagcctaaaatcagctcttggagataaagcatatgaatggaacgacaatgaaatgtacctgttccgatcatctgttgcatatgctatgaggcagtactttttaaaagtaaaaaatcagatgattctttttggggaggaggatgtgcgagtggctaatttgaaaccaagaatctcctttaatttctttgtcactgcacctaaaaatgtgtctgatatcattcctagaactgaagttgaaaaggccatcaggatgtcccggagccgtatcaatgatgctttccgtctgaatgacaacagcctagagtttctggggatacagccaacacttggacctcctaaccagccccctgtttccatatggctgattgtttttggagttgtgatgggagtgatagtggttggcattgtcatcctgatcttcactgggatcagagatcggaagaagaaaaataaagcaagaagtggagaaaatccttatgcctccatcgatattagcaaaggagaaaataatccaggattccaaaacactgatgatgttcagacctccttttagaaaaatctatgtttttcctcttgaggtgattttgttgtatgtaaatgttaatttcatggtatagaaaatataagatgataaagatatcattaaatgtcaaaactatgactctgttcagaaaaaaaattgtccaaagacaacatggccaaggagagagcatcttcattgacattgctttcagtatttatttctgtctctggatttgacttctgttctgtttcttaataaggattttgtattagagtatattagggaaagtgtgtatttggtctcacaggctgttcagggataatctaaatgtaaatgtctgttgaatttctgaagttgaaaacaaggatatatcattggagcaagtgttggatcttgtatggaatatggatggatcacttgtaaggacagtgcctgggaactggtgtagctgcaaggattgagaatggcatgcattagctcactttcatttaatccattgtcaaggatgacatgctttcttcacagtaactcagttcaagtactatggtgatttgcctacagtgatgtttggaatcgatcatgctttcttcaaggtgacaggtctaaagagagaagaatccagggaacaggtagaggacattgctttttcacttccaaggtgcttgatcaacatctccctgacaacacaaaactagagccaggggcctccgtgaactcccagagcatgcctgatagaaactcatttctactgttctctaactgtggagtgaatggaaattccaactgtatgttcaccctctgaagtgggtacccagtctcttaaatcttttgtatttgctcacagtgtttgagcagtgctgagcacaaagcagacactcaataaatgctagatttacacactc

SEQ ID NO: 200 - DNA, 1227 bp, Homo sapiens
  source 1..1227: mol_type = genomic DNA
cacaatggacaatggcaactgcccacacactcccatggaggggaaggggatgagtgcagggaaccccgaccccacccgggagacctgcaagcctgcagacactcccctcccgcccccactgaacccttgacccctgccctgcagcccccgcagcttgctgtttgcccactctatttgcccagccccagggacagagctgatccttgaactcttaagttccacattgccaggaccagtgagcagcaacagggccggggctgggcttatcagcctcccagcccagaccctggctgcagacataaataggccctgcaagagctggctgcttagagactgcgagaaggaggtcccccacggcccttcaggatgaaagctgcggtgctgaccttggccgtgctcttcctgacggggagccaggctcggcatttctggcagcaagatgaacccccccagagcccctgggatcgagtgaaggacctggccactgtgtacgtggatgtgctcaaagacagcggcagagactatgtgtcccagtttgaaggctccgccttgggaaaacagctaaacctaaagctccttgacaactgggacagcgtgacctccaccttcagcaagctgcgcgaacagctcggccctgtgacccaggagttctgggataacctggaaaaggagacagagggcctgaggcaggagatgagcaaggatctggaggaggtgaaggccaaggtgcagccctacctggacgacttccagaagaagtggcaggaggagatggagctctaccgccagaaggtggagccgctgcgcgcagagctccaagagggcgcgcgccagaagctgcacgagctgcaagagaagctgagcccactgggcgaggagatgcgcgaccgcgcgcgcgcccatgtggacgcgctgcgcacgcatctggccccctacagcgacgagctgcgccagcgcttggccgcgcgccttgaggctctcaaggagaacggcggcgccagactggccgagtaccacgccaaggccaccgagcatctgagcacgctcagcgagaaggccaagcccgcgctcgaggacctccgccaaggcctgctgcccgtgctggagagcttcaaggtcagcttcctgagcgctctcgaggagtacactaagaagctcaacacccagtgaggcgcccgccgccgccccccttcccggtgctcagaataaacgtttccaaagtgggaa

SEQ ID NO: 201 - DNA, 932 bp, Homo sapiens
  source 1..932: mol_type = genomic DNA
aggaggtgcgtcctgctgcctgccccggtcactctggctccccagctcaaggtcccccacggcccttcaggatgaaagctgcggtgctgaccttggccgtgctcttcctgacggggagccaggctcggcatttctggcagcaagatgaacccccccagagcccctgggatcgagtgaaggacctggccactgtgtacgtggatgtgctcaaagacagcggcagagactatgtgtcccagtttgaaggctccgccttgggaaaacagctaaacctaaagctccttgacaactgggacagcgtgacctccaccttcagcaagctgcgcgaacagctcggccctgtgacccaggagttctgggataacctggaaaaggagacagagggcctgaggcaggagatgagcaaggatctggaggaggtgaaggccaaggtgcagccctacctggacgacttccagaagaagtggcaggaggagatggagctctaccgccagaaggtggagccgctgcgcgcagagctccaagagggcgcgcgccagaagctgcacgagctgcaagagaagctgagcccactgggcgaggagatgcgcgaccgcgcgcgcgcccatgtggacgcgctgcgcacgcatctggccccctacagcgacgagctgcgccagcgcttggccgcgcgccttgaggctctcaaggagaacggcggcgccagactggccgagtaccacgccaaggccaccgagcatctgagcacgctcagcgagaaggccaagcccgcgctcgaggacctccgccaaggcctgctgcccgtgctggagagcttcaaggtcagcttcctgagcgctctcgaggagtacactaagaagctcaacacccagtgaggcgcccgccgccgccccccttcccggtgctcagaataaacgtttccaaagtgggaa

SEQ ID NO: 202 - DNA, 940 bp, Homo sapiens
  source 1..940: mol_type = genomic DNA
cccggtcactctggctccccagctcaaggttcaggccttgccccaggccgggcctctgggtcccccacggcccttcaggatgaaagctgcggtgctgaccttggccgtgctcttcctgacggggagccaggctcggcatttctggcagcaagatgaacccccccagagcccctgggatcgagtgaaggacctggccactgtgtacgtggatgtgctcaaagacagcggcagagactatgtgtcccagtttgaaggctccgccttgggaaaacagctaaacctaaagctccttgacaactgggacagcgtgacctccaccttcagcaagctgcgcgaacagctcggccctgtgacccaggagttctgggataacctggaaaaggagacagagggcctgaggcaggagatgagcaaggatctggaggaggtgaaggccaaggtgcagccctacctggacgacttccagaagaagtggcaggaggagatggagctctaccgccagaaggtggagccgctgcgcgcagagctccaagagggcgcgcgccagaagctgcacgagctgcaagagaagctgagcccactgggcgaggagatgcgcgaccgcgcgcgcgcccatgtggacgcgctgcgcacgcatctggccccctacagcgacgagctgcgccagcgcttggccgcgcgccttgaggctctcaaggagaacggcggcgccagactggccgagtaccacgccaaggccaccgagcatctgagcacgctcagcgagaaggccaagcccgcgctcgaggacctccgccaaggcctgctgcccgtgctggagagcttcaaggtcagcttcctgagcgctctcgaggagtacactaagaagctcaacacccagtgaggcgcccgccgccgccccccttcccggtgctcagaataaacgtttccaaagtgggaa

SEQ ID NO: 203 - DNA, 1088 bp, Homo sapiens
  source 1..1088: mol_type = genomic DNA
cgagaaggaggtgcgtcctgctgcctgccccggtcactctggctccccagctcaaggttcaggccttgccccaggccgggcctctgggtacctgaggtcttctcccgctctgtgcccttctcctcacctggctgcaatgagtgggggagcacggggcttctgcatgctgaaggcaccccactcagccaggcccttcttctcctccaggtcccccacggcccttcaggatgaaagctgcggtgctgaccttggccgtgctcttcctgacggggagccaggctcggcatttctggcagcaagatgaacccccccagagcccctgggatcgagtgaaggacctggccactgtgtacgtggatgtgctcaaagacagcggcagagactatgtgtcccagtttgaaggctccgccttgggaaaacagctaaacctaaagctccttgacaactgggacagcgtgacctccaccttcagcaagctgcgcgaacagctcggccctgtgacccaggagttctgggataacctggaaaaggagacagagggcctgaggcaggagatgagcaaggatctggaggaggtgaaggccaaggtgcagccctacctggacgacttccagaagaagtggcaggaggagatggagctctaccgccagaaggtggagccgctgcgcgcagagctccaagagggcgcgcgccagaagctgcacgagctgcaagagaagctgagcccactgggcgaggagatgcgcgaccgcgcgcgcgcccatgtggacgcgctgcgcacgcatctggccccctacagcgacgagctgcgccagcgcttggccgcgcgccttgaggctctcaaggagaacggcggcgccagactggccgagtaccacgccaaggccaccgagcatctgagcacgctcagcgagaaggccaagcccgcgctcgaggacctccgccaaggcctgctgcccgtgctggagagcttcaaggtcagcttcctgagcgctctcgaggagtacactaagaagctcaacacccagtgaggcgcccgccgccgccccccttcccggtgctcagaataaacgtttccaaagtgggaa

SEQ ID NO: 204 - DNA, 14121 bp, Homo sapiens
  source 1..14121: mol_type = genomic DNA
attcccaccgggacctgcggggctgagtgcccttctcggttgctgccgctgaggagcccgcccagccagccagggccgcgaggccgaggccaggccgcagcccaggagccgccccaccgcagctggcgatggacccgccgaggcccgcgctgctggcgctgctggcgctgcctgcgctgctgctgctgctgctggcgggcgccagggccgaagaggaaatgctggaaaatgtcagcctggtctgtccaaaagatgcgacccgattcaagcacctccggaagtacacatacaactatgaggctgagagttccagtggagtccctgggactgctgattcaagaagtgccaccaggatcaactgcaaggttgagctggaggttccccagctctgcagcttcatcctgaagaccagccagtgcaccctgaaagaggtgtatggcttcaaccctgagggcaaagccttgctgaagaaaaccaagaactctgaggagtttgctgcagccatgtccaggtatgagctcaagctggccattccagaagggaagcaggttttcctttacccggagaaagatgaacctacttacatcctgaacatcaagaggggcatcatttctgccctcctggttcccccagagacagaagaagccaagcaagtgttgtttctggataccgtgtatggaaactgctccactcactttaccgtcaagacgaggaagggcaatgtggcaacagaaatatccactgaaagagacctggggcagtgtgatcgcttcaagcccatccgcacaggcatcagcccacttgctctcatcaaaggcatgacccgccccttgtcaactctgatcagcagcagccagtcctgtcagtacacactggacgctaagaggaagcatgtggcagaagccatctgcaaggagcaacacctcttcctgcctttctcctacaagaataagtatgggatggtagcacaagtgacacagactttgaaacttgaagacacaccaaagatcaacagccgcttctttggtgaaggtactaagaagatgggcctcgcatttgagagcaccaaatccacatcacctccaaagcaggccgaagctgttttgaagactctccaggaactgaaaaaactaaccatctctgagcaaaatatccagagagctaatctcttcaataagctggttactgagctgagaggcctcagtgatgaagcagtcacatctctcttgccacagctgattgaggtgtccagccccatcactttacaagccttggttcagtgtggacagcctcagtgctccactcacatcctccagtggctgaaacgtgtgcatgccaacccccttctgatagatgtggtcacctacctggtggccctgatccccgagccctcagcacagcagctgcgagagatcttcaacatggcgagggatcagcgcagccgagccaccttgtatgcgctgagccacgcggtcaacaactatcataagacaaaccctacagggacccaggagctgctggacattgctaattacctgatggaacagattcaagatgactgcactggggatgaagattacacctatttgattctgcgggtcattggaaatatgggccaaaccatggagcagttaactccagaactcaagtcttcaatcctgaaatgtgtccaaagtacaaagccatcactgatgatccagaaagctgccatccaggctctgcggaaaatggagcctaaagacaaggaccaggaggttcttcttcagactttccttgatgatgcttctccgggagataagcgactggctgcctatcttatgttgatgaggagtccttcacaggcagatattaacaaaattgtccaaattctaccatgggaacagaatgagcaagtgaagaactttgtggcttcccatattgccaatatcttgaactcagaagaattggatatccaagatctgaaaaagttagtgaaagaagctctgaaagaatctcaacttccaactgtcatggacttcagaaaattctctcggaactatcaactctacaaatctgtttctcttccatcacttgacccagcctcagccaaaatagaagggaatcttatatttgatccaaataactaccttcctaaagaaagcatgctgaaaactaccctcactgcctttggatttgcttcagctgacctcatcgagattggcttggaaggaaaaggctttgagccaacattggaagctctttttgggaagcaaggatttttcccagacagtgtcaacaaagctttgtactgggttaatggtcaagttcctgatggtgtctctaaggtcttagtggaccactttggctataccaaagatgataaacatgagcaggatatggtaaatggaataatgctcagtgttgagaagctgattaaagatttgaaatccaaagaagtcccggaagccagagcctacctccgcatcttgggagaggagcttggttttgccagtctccatgacctccagctcctgggaaagctgcttctgatgggtgcccgcactctgcaggggatcccccagatgattggagaggtcatcaggaagggctcaaagaatgacttttttcttcactacatcttcatggagaatgcctttgaactccccactggagctggattacagttgcaaatatcttcatctggagtcattgctcccggagccaaggctggagtaaaactggaagtagccaacatgcaggctgaactggtggcaaaaccctccgtgtctgtggagtttgtgacaaatatgggcatcatcattccggacttcgctaggagtggggtccagatgaacaccaacttcttccacgagtcgggtctggaggctcatgttgccctaaaagctgggaagctgaagtttatcattccttccccaaagagaccagtcaagctgctcagtggaggcaacacattacatttggtctctaccaccaaaacggaggtgatcccacctctcattgagaacaggcagtcctggtcagtttgcaagcaagtctttcctggcctgaattactgcacctcaggcgcttactccaacgccagctccacagactccgcctcctactatccgctgaccggggacaccagattagagctggaactgaggcctacaggagagattgagcagtattctgtcagcgcaacctatgagctccagagagaggacagagccttggtggataccctgaagtttgtaactcaagcagaaggtgcgaagcagactgaggctaccatgacattcaaatataatcggcagagtatgaccttgtccagtgaagtccaaattccggattttgatgttgacctcggaacaatcctcagagttaatgatgaatctactgagggcaaaacgtcttacagactcaccctggacattcagaacaagaaaattactgaggtcgccctcatgggccacctaagttgtgacacaaaggaagaaagaaaaatcaagggtgttatttccataccccgtttgcaagcagaagccagaagtgagatcctcgcccactggtcgcctgccaaactgcttctccaaatggactcatctgctacagcttatggctccacagtttccaagagggtggcatggcattatgatgaagagaagattgaatttgaatggaacacaggcaccaatgtagataccaaaaaaatgacttccaatttccctgtggatctctccgattatcctaagagcttgcatatgtatgctaatagactcctggatcacagagtccctcaaacagacatgactttccggcacgtgggttccaaattaatagttgcaatgagctcatggcttcagaaggcatctgggagtcttccttatacccagactttgcaagaccacctcaatagcctgaaggagttcaacctccagaacatgggattgccagacttccacatcccagaaaacctcttcttaaaaagcgatggccgggtcaaatataccttgaacaagaacagtttgaaaattgagattcctttgccttttggtggcaaatcctccagagatctaaagatgttagagactgttaggacaccagccctccacttcaagtctgtgggattccatctgccatctcgagagttccaagtccctacttttaccattcccaagttgtatcaactgcaagtgcctctcctgggtgttctagacctctccacgaatgtctacagcaacttgtacaactggtccgcctcctacagtggtggcaacaccagcacagaccatttcagccttcgggctcgttaccacatgaaggctgactctgtggttgacctgctttcctacaatgtgcaaggatctggagaaacaacatatgaccacaagaatacgttcacactatcatatgatgggtctctacgccacaaatttctagattcgaatatcaaattcagtcatgtagaaaaacttggaaacaacccagtctcaaaaggtttactaatattcgatgcatctagttcctggggaccacagatgtctgcttcagttcatttggactccaaaaagaaacagcatttgtttgtcaaagaagtcaagattgatgggcagttcagagtctcttcgttctatgctaaaggcacatatggcctgtcttgtcagagggatcctaacactggccggctcaatggagagtccaacctgaggtttaactcctcctacctccaaggcaccaaccagataacaggaagatatgaagatggaaccctctccctcacctccacctctgatctgcaaagtggcatcattaaaaatactgcttccctaaagtatgagaactacgagctgactttaaaatctgacaccaatgggaagtataagaactttgccacttctaacaagatggatatgaccttctctaagcaaaatgcactgctgcgttctgaatatcaggctgattacgagtcattgaggttcttcagcctgctttctggatcactaaattcccatggtcttgagttaaatgctgacatcttaggcactgacaaaattaatagtggtgctcacaaggcgacactaaggattggccaagatggaatatctaccagtgcaacgaccaacttgaagtgtagtctcctggtgctggagaatgagctgaatgcagagcttggcctctctggggcatctatgaaattaacaacaaatggccgcttcagggaacacaatgcaaaattcagtctggatgggaaagccgccctcacagagctatcactgggaagtgcttatcaggccatgattctgggtgtcgacagcaaaaacattttcaacttcaaggtcagtcaagaaggacttaagctctcaaatgacatgatgggctcatatgctgaaatgaaatttgaccacacaaacagtctgaacattgcaggcttatcactggacttctcttcaaaacttgacaacatttacagctctgacaagttttataagcaaactgttaatttacagctacagccctattctctggtaactactttaaacagtgacctgaaatacaatgctctggatctcaccaacaatgggaaactacggctagaacccctgaagctgcatgtggctggtaacctaaaaggagcctaccaaaataatgaaataaaacacatctatgccatctcttctgctgccttatcagcaagctataaagcagacactgttgctaaggttcagggtgtggagtttagccatcggctcaacacagacatcgctgggctggcttcagccattgacatgagcacaaactataattcagactcactgcatttcagcaatgtcttccgttctgtaatggccccgtttaccatgaccatcgatgcacatacaaatggcaatgggaaactcgctctctggggagaacatactgggcagctgtatagcaaattcctgttgaaagcagaacctctggcatttactttctctcatgattacaaaggctccacaagtcatcatctcgtgtctaggaaaagcatcagtgcagctcttgaacacaaagtcagtgccctgcttactccagctgagcagacaggcacctggaaactcaagacccaatttaacaacaatgaatacagccaggacttggatgcttacaacactaaagataaaattggcgtggagcttactggacgaactctggctgacctaactctactagactccccaattaaagtgccacttttactcagtgagcccatcaatatcattgatgctttagagatgagagatgccgttgagaagccccaagaatttacaattgttgcttttgtaaagtatgataaaaaccaagatgttcactccattaacctcccattttttgagaccttgcaagaatattttgagaggaatcgacaaaccattatagttgtactggaaaacgtacagagaaacctgaagcacatcaatattgatcaatttgtaagaaaatacagagcagccctgggaaaactcccacagcaagctaatgattatctgaattcattcaattgggagagacaagtttcacatgccaaggagaaactgactgctctcacaaaaaagtatagaattacagaaaatgatatacaaattgcattagatgatgccaaaatcaactttaatgaaaaactatctcaactgcagacatatatgatacaatttgatcagtatattaaagatagttatgatttacatgatttgaaaatagctattgctaatattattgatgaaatcattgaaaaattaaaaagtcttgatgagcactatcatatccgtgtaaatttagtaaaaacaatccatgatctacatttgtttattgaaaatattgattttaacaaaagtggaagtagtactgcatcctggattcaaaatgtggatactaagtaccaaatcagaatccagatacaagaaaaactgcagcagcttaagagacacatacagaatatagacatccagcacctagctggaaagttaaaacaacacattgaggctattgatgttagagtgcttttagatcaattgggaactacaatttcatttgaaagaataaatgacattcttgagcatgtcaaacactttgttataaatcttattggggattttgaagtagctgagaaaatcaatgccttcagagccaaagtccatgagttaatcgagaggtatgaagtagaccaacaaatccaggttttaatggataaattagtagagttggcccaccaatacaagttgaaggagactattcagaagctaagcaatgtcctacaacaagttaagataaaagattactttgagaaattggttggatttattgatgatgctgtcaagaagcttaatgaattatcttttaaaacattcattgaagatgttaacaaattccttgacatgttgataaagaaattaaagtcatttgattaccaccagtttgtagatgaaaccaatgacaaaatccgtgaggtgactcagagactcaatggtgaaattcaggctctggaactaccacaaaaagctgaagcattaaaactgtttttagaggaaaccaaggccacagttgcagtgtatctggaaagcctacaggacaccaaaataaccttaatcatcaattggttacaggaggctttaagttcagcatctttggctcacatgaaggccaaattccgagagaccctagaagatacacgagaccgaatgtatcaaatggacattcagcaggaacttcaacgatacctgtctctggtaggccaggtttatagcacacttgtcacctacatttctgattggtggactcttgctgctaagaaccttactgactttgcagagcaatattctatccaagattgggctaaacgtatgaaagcattggtagagcaagggttcactgttcctgaaatcaagaccatccttgggaccatgcctgcctttgaagtcagtcttcaggctcttcagaaagctaccttccagacacctgattttatagtccccctaacagatttgaggattccatcagttcagataaacttcaaagacttaaaaaatataaaaatcccatccaggttttccacaccagaatttaccatccttaacaccttccacattccttcctttacaattgactttgtagaaatgaaagtaaagatcatcagaaccattgaccagatgctgaacagtgagctgcagtggcccgttccagatatatatctcagggatctgaaggtggaggacattcctctagcgagaatcaccctgccagacttccgtttaccagaaatcgcaattccagaattcataatcccaactctcaaccttaatgattttcaagttcctgaccttcacataccagaattccagcttccccacatctcacacacaattgaagtacctacttttggcaagctatacagtattctgaaaatccaatctcctcttttcacattagatgcaaatgctgacatagggaatggaaccacctcagcaaacgaagcaggtatcgcagcttccatcactgccaaaggagagtccaaattagaagttctcaattttgattttcaagcaaatgcacaactctcaaaccctaagattaatccgctggctctgaaggagtcagtgaagttctccagcaagtacctgagaacggagcatgggagtgaaatgctgttttttggaaatgctattgagggaaaatcaaacacagtggcaagtttacacacagaaaaaaatacactggagcttagtaatggagtgattgtcaagataaacaatcagcttaccctggatagcaacactaaatacttccacaaattgaacatccccaaactggacttctctagtcaggctgacctgcgcaacgagatcaagacactgttgaaagctggccacatagcatggacttcttctggaaaagggtcatggaaatgggcctgccccagattctcagatgagggaacacatgaatcacaaattagtttcaccatagaaggacccctcacttcctttggactgtccaataagatcaatagcaaacacctaagagtaaaccaaaacttggtttatgaatctggctccctcaacttttctaaacttgaaattcaatcacaagtcgattcccagcatgtgggccacagtgttctaactgctaaaggcatggcactgtttggagaagggaaggcagagtttactgggaggcatgatgctcatttaaatggaaaggttattggaactttgaaaaattctcttttcttttcagcccagccatttgagatcacggcatccacaaacaatgaagggaatttgaaagttcgttttccattaaggttaacagggaagatagacttcctgaataactatgcactgtttctgagtcccagtgcccagcaagcaagttggcaagtaagtgctaggttcaatcagtataagtacaaccaaaatttctctgctggaaacaacgagaacattatggaggcccatgtaggaataaatggagaagcaaatctggatttcttaaacattcctttaacaattcctgaaatgcgtctaccttacacaataatcacaactcctccactgaaagatttctctctatgggaaaaaacaggcttgaaggaattcttgaaaacgacaaagcaatcatttgatttaagtgtaaaagctcagtataagaaaaacaaacacaggcattccatcacaaatcctttggctgtgctttgtgagtttatcagtcagagcatcaaatcctttgacaggcattttgaaaaaaacagaaacaatgcattagattttgtcaccaaatcctataatgaaacaaaaattaagtttgataagtacaaagctgaaaaatctcacgacgagctccccaggacctttcaaattcctggatacactgttccagttgtcaatgttgaagtgtctccattcaccatagagatgtcggcattcggctatgtgttcccaaaagcagtcagcatgcctagtttctccatcctaggttctgacgtccgtgtgccttcatacacattaatcctgccatcattagagctgccagtccttcatgtccctagaaatctcaagctttctcttccagatttcaaggaattgtgtaccataagccatatttttattcctgccatgggcaatattacctatgatttctcctttaaatcaagtgtcatcacactgaataccaatgctgaactttttaaccagtcagatattgttgctcatctcctttcttcatcttcatctgtcattgatgcactgcagtacaaattagagggcaccacaagattgacaagaaaaaggggattgaagttagccacagctctgtctctgagcaacaaatttgtggagggtagtcataacagtactgtgagcttaaccacgaaaaatatggaagtgtcagtggcaacaaccacaaaagcccaaattccaattttgagaatgaatttcaagcaagaacttaatggaaataccaagtcaaaacctactgtctcttcctccatggaatttaagtatgatttcaattcttcaatgctgtactctaccgctaaaggagcagttgaccacaagcttagcttggaaagcctcacctcttacttttccattgagtcatctaccaaaggagatgtcaagggttcggttctttctcgggaatattcaggaactattgctagtgaggccaacacttacttgaattccaagagcacacggtcttcagtgaagctgcagggcacttccaaaattgatgatatctggaaccttgaagtaaaagaaaattttgctggagaagccacactccaacgcatatattccctctgggagcacagtacgaaaaaccacttacagctagagggcctctttttcaccaacggagaacatacaagcaaagccaccctggaactctctccatggcaaatgtcagctcttgttcaggtccatgcaagtcagcccagttccttccatgatttccctgaccttggccaggaagtggccctgaatgctaacactaagaaccagaagatcagatggaaaaatgaagtccggattcattctgggtctttccagagccaggtcgagctttccaatgaccaagaaaaggcacaccttgacattgcaggatccttagaaggacacctaaggttcctcaaaaatatcatcctaccagtctatgacaagagcttatgggatttcctaaagctggatgtaaccaccagcattggtaggagacagcatcttcgtgtttcaactgcctttgtgtacaccaaaaaccccaatggctattcattctccatccctgtaaaagttttggctgataaattcattattcctgggctgaaactaaatgatctaaattcagttcttgtcatgcctacgttccatgtcccatttacagatcttcaggttccatcgtgcaaacttgacttcagagaaatacaaatctataagaagctgagaacttcatcatttgccctcaacctaccaacactccccgaggtaaaattccctgaagttgatgtgttaacaaaatattctcaaccagaagactccttgattcccttttttgagataaccgtgcctgaatctcagttaactgtgtcccagttcacgcttccaaaaagtgtttcagatggcattgctgctttggatctaaatgcagtagccaacaagatcgcagactttgagttgcccaccatcatcgtgcctgagcagaccattgagattccctccattaagttctctgtacctgctggaattgtcattccttcctttcaagcactgactgcacgctttgaggtagactctcccgtgtataatgccacttggagtgccagtttgaaaaacaaagcagattatgttgaaacagtcctggattccacatgcagctcaaccgtacagttcctagaatatgaactaaatgttttgggaacacacaaaatcgaagatggtacgttagcctctaagactaaaggaacatttgcacaccgtgacttcagtgcagaatatgaagaagatggcaaatatgaaggacttcaggaatgggaaggaaaagcgcacctcaatatcaaaagcccagcgttcaccgatctccatctgcgctaccagaaagacaagaaaggcatctccacctcagcagcctccccagccgtaggcaccgtgggcatggatatggatgaagatgacgacttttctaaatggaacttctactacagccctcagtcctctccagataaaaaactcaccatattcaaaactgagttgagggtccgggaatctgatgaggaaactcagatcaaagttaattgggaagaagaggcagcttctggcttgctaacctctctgaaagacaacgtgcccaaggccacaggggtcctttatgattatgtcaacaagtaccactgggaacacacagggctcaccctgagagaagtgtcttcaaagctgagaagaaatctgcagaacaatgctgagtgggtttatcaaggggccattaggcaaattgatgatatcgacgtgaggttccagaaagcagccagtggcaccactgggacctaccaagagtggaaggacaaggcccagaatctgtaccaggaactgttgactcaggaaggccaagccagtttccagggactcaaggataacgtgtttgatggcttggtacgagttactcaagaattccatatgaaagtcaagcatctgattgactcactcattgattttctgaacttccccagattccagtttccggggaaacctgggatatacactagggaggaactttgcactatgttcataagggaggtagggacggtactgtcccaggtatattcgaaagtccataatggttcagaaatactgttttcctatttccaagacctagtgattacacttcctttcgagttaaggaaacataaactaatagatgtaatctcgatgtatagggaactgttgaaagatttatcaaaagaagcccaagaggtatttaaagccattcagtctctcaagaccacagaggtgctacgtaatcttcaggaccttttacaattcattttccaactaatagaagataacattaaacagctgaaagagatgaaatttacttatcttattaattatatccaagatgagatcaacacaatcttcagtgattatatcccatatgtttttaaattgttgaaagaaaacctatgccttaatcttcataagttcaatgaatttattcaaaacgagcttcaggaagcttctcaagagttacagcagatccatcaatacattatggcccttcgtgaagaatattttgatccaagtatagttggctggacagtgaaatattatgaacttgaagaaaagatagtcagtctgatcaagaacctgttagttgctcttaaggacttccattctgaatatattgtcagtgcctctaactttacttcccaactctcaagtcaagttgagcaatttctgcacagaaatattcaggaatatcttagcatccttaccgatccagatggaaaagggaaagagaagattgcagagctttctgccactgctcaggaaataattaaaagccaggccattgcgacgaagaaaataatttctgattaccaccagcagtttagatataaactgcaagatttttcagaccaactctctgattactatgaaaaatttattgctgaatccaaaagattgattgacctgtccattcaaaactaccacacatttctgatatacatcacggagttactgaaaaagctgcaatcaaccacagtcatgaacccctacatgaagcttgctccaggagaacttactatcatcctctaattttttaaaagaaatcttcatttattcttcttttccaattgaactttcacatagcacagaaaaaattcaaactgcctatattgataaaaccatacagtgagccagccttgcagtaggcagtagactataagcagaagcacatatgaactggacctgcaccaaagctggcaccagggctcggaaggtctctgaactcagaaggatggcattttttgcaagttaaagaaaatcaggatctgagttattttgctaaacttgggggaggaggaacaaataaatggagtctttattgtgtatcata

SEQ ID NO: 205 - DNA, 13991 bp, Homo sapiens
  source 1..13991: mol_type = genomic DNA
atggacccgccgaggcccgcgctgctggcgctgctggcgctgcctgcgctgctgctgctgctgctggcgggcgccagggccgaagaggaaatgctggaaaatgtcagcctggtctgtccaaaagatgcgacccgattcaagcacctccggaagtacacatacaactatgaggctgagagttccagtggagtccctgggactgctgattcaagaagtgccaccaggatcaactgcaaggttgagctggaggttccccagctctgcagcttcatcctgaagaccagccagtgcaccctgaaagaggtgtatggcttcaaccctgagggcaaagccttgctgaagaaaaccaagaactctgaggagtttgctgcagccatgtccaggtatgagctcaagctggccattccagaagggaagcaggttttcctttacccggagaaagatgaacctacttacatcctgaacatcaagaggggcatcatttctgccctcctggttcccccagagacagaagaagccaagcaagtgttgtttctggataccgtgtatggaaactgctccactcactttaccgtcaagacgaggaagggcaatgtggcaacagaaatatccactgaaagagacctggggcagtgtgatcgcttcaagcccatccgcacaggcatcagcccacttgctctcatcaaaggcatgacccgccccttgtcaactctgatcagcagcagccagtcctgtcagtacacactggacgctaagaggaagcatgtggcagaagccatctgcaaggagcaacacctcttcctgcctttctcctacaagaataagtatgggatggtagcacaagtgacacagactttgaaacttgaagacacaccaaagatcaacagccgcttctttggtgaaggtactaagaagatgggcctcgcatttgagagcaccaaatccacatcacctccaaagcaggccgaagctgttttgaagactctccaggaactgaaaaaactaaccatctctgagcaaaatatccagagagctaatctcttcaataagctggttactgagctgagaggcctcagtgatgaagcagtcacatctctcttgccacagctgattgaggtgtccagccccatcactttacaagccttggttcagtgtggacagcctcagtgctccactcacatcctccagtggctgaaacgtgtgcatgccaacccccttctgatagatgtggtcacctacctggtggccctgatccccgagccctcagcacagcagctgcgagagatcttcaacatggcgagggatcagcgcagccgagccaccttgtatgcgctgagccacgcggtcaacaactatcataagacaaaccctacagggacccaggagctgctggacattgctaattacctgatggaacagattcaagatgactgcactggggatgaagattacacctatttgattctgcgggtcattggaaatatgggccaaaccatggagcagttaactccagaactcaagtcttcaatcctgaaatgtgtccaaagtacaaagccatcactgatgatccagaaagctgccatccaggctctgcggaaaatggagcctaaagacaaggaccaggaggttcttcttcagactttccttgatgatgcttctccgggagataagcgactggctgcctatcttatgttgatgaggagtccttcacaggcagatattaacaaaattgtccaaattctaccatgggaacagaatgagcaagtgaagaactttgtggcttcccatattgccaatatcttgaactcagaagaattggatatccaagatctgaaaaagttagtgaaagaagctctgaaagaatctcaacttccaactgtcatggacttcagaaaattctctcggaactatcaactctacaaatctgtttctcttccatcacttgacccagcctcagccaaaatagaagggaatcttatatttgatccaaataactaccttcctaaagaaagcatgctgaaaactaccctcactgcctttggatttgcttcagctgacctcatcgagattggcttggaaggaaaaggctttgagccaacattggaagctctttttgggaagcaaggatttttcccagacagtgtcaacaaagctttgtactgggttaatggtcaagttcctgatggtgtctctaaggtcttagtggaccactttggctataccaaagatgataaacatgagcaggatatggtaaatggaataatgctcagtgttgagaagctgattaaagatttgaaatccaaagaagtcccggaagccagagcctacctccgcatcttgggagaggagcttggttttgccagtctccatgacctccagctcctgggaaagctgcttctgatgggtgcccgcactctgcaggggatcccccagatgattggagaggtcatcaggaagggctcaaagaatgacttttttcttcactacatcttcatggagaatgcctttgaactccccactggagctggattacagttgcaaatatcttcatctggagtcattgctcccggagccaaggctggagtaaaactggaagtagccaacatgcaggctgaactggtggcaaaaccctccgtgtctgtggagtttgtgacaaatatgggcatcatcattccggacttcgctaggagtggggtccagatgaacaccaacttcttccacgagtcgggtctggaggctcatgttgccctaaaagctgggaagctgaagtttatcattccttccccaaagagaccagtcaagctgctcagtggaggcaacacattacatttggtctctaccaccaaaacggaggtgatcccacctctcattgagaacaggcagtcctggtcagtttgcaagcaagtctttcctggcctgaattactgcacctcaggcgcttactccaacgccagctccacagactccgcctcctactatccgctgaccggggacaccagattagagctggaactgaggcctacaggagagattgagcagtattctgtcagcgcaacctatgagctccagagagaggacagagccttggtggataccctgaagtttgtaactcaagcagaaggtgcgaagcagactgaggctaccatgacattcaaatataatcggcagagtatgaccttgtccagtgaagtccaaattccggattttgatgttgacctcggaacaatcctcagagttaatgatgaatctactgagggcaaaacgtcttacagactcaccctggacattcagaacaagaaaattactgaggtcgccctcatgggccacctaagttgtgacacaaaggaagaaagaaaaatcaagggtgttatttccataccccgtttgcaagcagaagccagaagtgagatcctcgcccactggtcgcctgccaaactgcttctccaaatggactcatctgctacagcttatggctccacagtttccaagagggtggcatggcattatgatgaagagaagattgaatttgaatggaacacaggcaccaatgtagataccaaaaaaatgacttccaatttccctgtggatctctccgattatcctaagagcttgcatatgtatgctaatagactcctggatcacagagtccctcaaacagacatgactttccggcacgtgggttccaaattaatagttgcaatgagctcatggcttcagaaggcatctgggagtcttccttatacccagactttgcaagaccacctcaatagcctgaaggagttcaacctccagaacatgggattgccagacttccacatcccagaaaacctcttcttaaaaagcgatggccgggtcaaatataccttgaacaagaacagtttgaaaattgagattcctttgccttttggtggcaaatcctccagagatctaaagatgttagagactgttaggacaccagccctccacttcaagtctgtgggattccatctgccatctcgagagttccaagtccctacttttaccattcccaagttgtatcaactgcaagtgcctctcctgggtgttctagacctctccacgaatgtctacagcaacttgtacaactggtccgcctcctacagtggtggcaacaccagcacagaccatttcagccttcgggctcgttaccacatgaaggctgactctgtggttgacctgctttcctacaatgtgcaaggatctggagaaacaacatatgaccacaagaatacgttcacactatcatatgatgggtctctacgccacaaatttctagattcgaatatcaaattcagtcatgtagaaaaacttggaaacaacccagtctcaaaaggtttactaatattcgatgcatctagttcctggggaccacagatgtctgcttcagttcatttggactccaaaaagaaacagcatttgtttgtcaaagaagtcaagattgatgggcagttcagagtctcttcgttctatgctaaaggcacatatggcctgtcttgtcagagggatcctaacactggccggctcaatggagagtccaacctgaggtttaactcctcctacctccaaggcaccaaccagataacaggaagatatgaagatggaaccctctccctcacctccacctctgatctgcaaagtggcatcattaaaaatactgcttccctaaagtatgagaactacgagctgactttaaaatctgacaccaatgggaagtataagaactttgccacttctaacaagatggatatgaccttctctaagcaaaatgcactgctgcgttctgaatatcaggctgattacgagtcattgaggttcttcagcctgctttctggatcactaaattcccatggtcttgagttaaatgctgacatcttaggcactgacaaaattaatagtggtgctcacaaggcgacactaaggattggccaagatggaatatctaccagtgcaacgaccaacttgaagtgtagtctcctggtgctggagaatgagctgaatgcagagcttggcctctctggggcatctatgaaattaacaacaaatggccgcttcagggaacacaatgcaaaattcagtctggatgggaaagccgccctcacagagctatcactgggaagtgcttatcaggccatgattctgggtgtcgacagcaaaaacattttcaacttcaaggtcagtcaagaaggacttaagctctcaaatgacatgatgggctcatatgctgaaatgaaatttgaccacacaaacagtctgaacattgcaggcttatcactggacttctcttcaaaacttgacaacatttacagctctgacaagttttataagcaaactgttaatttacagctacagccctattctctggtaactactttaaacagtgacctgaaatacaatgctctggatctcaccaacaatgggaaactacggctagaacccctgaagctgcatgtggctggtaacctaaaaggagcctaccaaaataatgaaataaaacacatctatgccatctcttctgctgccttatcagcaagctataaagcagacactgttgctaaggttcagggtgtggagtttagccatcggctcaacacagacatcgctgggctggcttcagccattgacatgagcacaaactataattcagactcactgcatttcagcaatgtcttccgttctgtaatggccccgtttaccatgaccatcgatgcacatacaaatggcaatgggaaactcgctctctggggagaacatactgggcagctgtatagcaaattcctgttgaaagcagaacctctggcatttactttctctcatgattacaaaggctccacaagtcatcatctcgtgtctaggaaaagcatcagtgcagctcttgaacacaaagtcagtgccctgcttactccagctgagcagacaggcacctggaaactcaagacccaatttaacaacaatgaatacagccaggacttggatgcttacaacactaaagataaaattggcgtggagcttactggacgaactctggctgacctaactctactagactccccaattaaagtgccacttttactcagtgagcccatcaatatcattgatgctttagagatgagagatgccgttgagaagccccaagaatttacaattgttgcttttgtaaagtatgataaaaaccaagatgttcactccattaacctcccattttttgagaccttgcaagaatattttgagaggaatcgacaaaccattatagttgtactggaaaacgtacagagaaacctgaagcacatcaatattgatcaatttgtaagaaaatacagagcagccctgggaaaactcccacagcaagctaatgattatctgaattcattcaattgggagagacaagtttcacatgccaaggagaaactgactgctctcacaaaaaagtatagaattacagaaaatgatatacaaattgcattagatgatgccaaaatcaactttaatgaaaaactatctcaactgcagacatatatgatacaatttgatcagtatattaaagatagttatgatttacatgatttgaaaatagctattgctaatattattgatgaaatcattgaaaaattaaaaagtcttgatgagcactatcatatccgtgtaaatttagtaaaaacaatccatgatctacatttgtttattgaaaatattgattttaacaaaagtggaagtagtactgcatcctggattcaaaatgtggatactaagtaccaaatcagaatccagatacaagaaaaactgcagcagcttaagagacacatacagaatatagacatccagcacctagctggaaagttaaaacaacacattgaggctattgatgttagagtgcttttagatcaattgggaactacaatttcatttgaaagaataaatgacattcttgagcatgtcaaacactttgttataaatcttattggggattttgaagtagctgagaaaatcaatgccttcagagccaaagtccatgagttaatcgagaggtatgaagtagaccaacaaatccaggttttaatggataaattagtagagttggcccaccaatacaagttgaaggagactattcagaagctaagcaatgtcctacaacaagttaagataaaagattactttgagaaattggttggatttattgatgatgctgtcaagaagcttaatgaattatcttttaaaacattcattgaagatgttaacaaattccttgacatgttgataaagaaattaaagtcatttgattaccaccagtttgtagatgaaaccaatgacaaaatccgtgaggtgactcagagactcaatggtgaaattcaggctctggaactaccacaaaaagctgaagcattaaaactgtttttagaggaaaccaaggccacagttgcagtgtatctggaaagcctacaggacaccaaaataaccttaatcatcaattggttacaggaggctttaagttcagcatctttggctcacatgaaggccaaattccgagagaccctagaagatacacgagaccgaatgtatcaaatggacattcagcaggaacttcaacgatacctgtctctggtaggccaggtttatagcacacttgtcacctacatttctgattggtggactcttgctgctaagaaccttactgactttgcagagcaatattctatccaagattgggctaaacgtatgaaagcattggtagagcaagggttcactgttcctgaaatcaagaccatccttgggaccatgcctgcctttgaagtcagtcttcaggctcttcagaaagctaccttccagacacctgattttatagtccccctaacagatttgaggattccatcagttcagataaacttcaaagacttaaaaaatataaaaatcccatccaggttttccacaccagaatttaccatccttaacaccttccacattccttcctttacaattgactttgtagaaatgaaagtaaagatcatcagaaccattgaccagatgctgaacagtgagctgcagtggcccgttccagatatatatctcagggatctgaaggtggaggacattcctctagcgagaatcaccctgccagacttccgtttaccagaaatcgcaattccagaattcataatcccaactctcaaccttaatgattttcaagttcctgaccttcacataccagaattccagcttccccacatctcacacacaattgaagtacctacttttggcaagctatacagtattctgaaaatccaatctcctcttttcacattagatgcaaatgctgacatagggaatggaaccacctcagcaaacgaagcaggtatcgcagcttccatcactgccaaaggagagtccaaattagaagttctcaattttgattttcaagcaaatgcacaactctcaaaccctaagattaatccgctggctctgaaggagtcagtgaagttctccagcaagtacctgagaacggagcatgggagtgaaatgctgttttttggaaatgctattgagggaaaatcaaacacagtggcaagtttacacacagaaaaaaatacactggagcttagtaatggagtgattgtcaagataaacaatcagcttaccctggatagcaacactaaatacttccacaaattgaacatccccaaactggacttctctagtcaggctgacctgcgcaacgagatcaagacactgttgaaagctggccacatagcatggacttcttctggaaaagggtcatggaaatgggcctgccccagattctcagatgagggaacacatgaatcacaaattagtttcaccatagaaggacccctcacttcctttggactgtccaataagatcaatagcaaacacctaagagtaaaccaaaacttggtttatgaatctggctccctcaacttttctaaacttgaaattcaatcacaagtcgattcccagcatgtgggccacagtgttctaactgctaaaggcatggcactgtttggagaagggaaggcagagtttactgggaggcatgatgctcatttaaatggaaaggttattggaactttgaaaaattctcttttcttttcagcccagccatttgagatcacggcatccacaaacaatgaagggaatttgaaagttcgttttccattaaggttaacagggaagatagacttcctgaataactatgcactgtttctgagtcccagtgcccagcaagcaagttggcaagtaagtgctaggttcaatcagtataagtacaaccaaaatttctctgctggaaacaacgagaacattatggaggcccatgtaggaataaatggagaagcaaatctggatttcttaaacattcctttaacaattcctgaaatgcgtctaccttacacaataatcacaactcctccactgaaagatttctctctatgggaaaaaacaggcttgaaggaattcttgaaaacgacaaagcaatcatttgatttaagtgtaaaagctcagtataagaaaaacaaacacaggcattccatcacaaatcctttggctgtgctttgtgagtttatcagtcagagcatcaaatcctttgacaggcattttgaaaaaaacagaaacaatgcattagattttgtcaccaaatcctataatgaaacaaaaattaagtttgataagtacaaagctgaaaaatctcacgacgagctccccaggacctttcaaattcctggatacactgttccagttgtcaatgttgaagtgtctccattcaccatagagatgtcggcattcggctatgtgttcccaaaagcagtcagcatgcctagtttctccatcctaggttctgacgtccgtgtgccttcatacacattaatcctgccatcattagagctgccagtccttcatgtccctagaaatctcaagctttctcttccagatttcaaggaattgtgtaccataagccatatttttattcctgccatgggcaatattacctatgatttctcctttaaatcaagtgtcatcacactgaataccaatgctgaactttttaaccagtcagatattgttgctcatctcctttcttcatcttcatctgtcattgatgcactgcagtacaaattagagggcaccacaagattgacaagaaaaaggggattgaagttagccacagctctgtctctgagcaacaaatttgtggagggtagtcataacagtactgtgagcttaaccacgaaaaatatggaagtgtcagtggcaacaaccacaaaagcccaaattccaattttgagaatgaatttcaagcaagaacttaatggaaataccaagtcaaaacctactgtctcttcctccatggaatttaagtatgatttcaattcttcaatgctgtactctaccgctaaaggagcagttgaccacaagcttagcttggaaagcctcacctcttacttttccattgagtcatctaccaaaggagatgtcaagggttcggttctttctcgggaatattcaggaactattgctagtgaggccaacacttacttgaattccaagagcacacggtcttcagtgaagctgcagggcacttccaaaattgatgatatctggaaccttgaagtaaaagaaaattttgctggagaagccacactccaacgcatatattccctctgggagcacagtacgaaaaaccacttacagctagagggcctctttttcaccaacggagaacatacaagcaaagccaccctggaactctctccatggcaaatgtcagctcttgttcaggtccatgcaagtcagcccagttccttccatgatttccctgaccttggccaggaagtggccctgaatgctaacactaagaaccagaagatcagatggaaaaatgaagtccggattcattctgggtctttccagagccaggtcgagctttccaatgaccaagaaaaggcacaccttgacattgcaggatccttagaaggacacctaaggttcctcaaaaatatcatcctaccagtctatgacaagagcttatgggatttcctaaagctggatgtaaccaccagcattggtaggagacagcatcttcgtgtttcaactgcctttgtgtacaccaaaaaccccaatggctattcattctccatccctgtaaaagttttggctgataaattcattattcctgggctgaaactaaatgatctaaattcagttcttgtcatgcctacgttccatgtcccatttacagatcttcaggttccatcgtgcaaacttgacttcagagaaatacaaatctataagaagctgagaacttcatcatttgccctcaacctaccaacactccccgaggtaaaattccctgaagttgatgtgttaacaaaatattctcaaccagaagactccttgattcccttttttgagataaccgtgcctgaatctcagttaactgtgtcccagttcacgcttccaaaaagtgtttcagatggcattgctgctttggatctaaatgcagtagccaacaagatcgcagactttgagttgcccaccatcatcgtgcctgagcagaccattgagattccctccattaagttctctgtacctgctggaattgtcattccttcctttcaagcactgactgcacgctttgaggtagactctcccgtgtataatgccacttggagtgccagtttgaaaaacaaagcagattatgttgaaacagtcctggattccacatgcagctcaaccgtacagttcctagaatatgaactaaatgttttgggaacacacaaaatcgaagatggtacgttagcctctaagactaaaggaacatttgcacaccgtgacttcagtgcagaatatgaagaagatggcaaatatgaaggacttcaggaatgggaaggaaaagcgcacctcaatatcaaaagcccagcgttcaccgatctccatctgcgctaccagaaagacaagaaaggcatctccacctcagcagcctccccagccgtaggcaccgtgggcatggatatggatgaagatgacgacttttctaaatggaacttctactacagccctcagtcctctccagataaaaaactcaccatattcaaaactgagttgagggtccgggaatctgatgaggaaactcagatcaaagttaattgggaagaagaggcagcttctggcttgctaacctctctgaaagacaacgtgcccaaggccacaggggtcctttatgattatgtcaacaagtaccactgggaacacacagggctcaccctgagagaagtgtcttcaaagctgagaagaaatctgcagaacaatgctgagtgggtttatcaaggggccattaggcaaattgatgatatcgacgtgaggttccagaaagcagccagtggcaccactgggacctaccaagagtggaaggacaaggcccagaatctgtaccaggaactgttgactcaggaaggccaagccagtttccagggactcaaggataacgtgtttgatggcttggtacgagttactcaagaattccatatgaaagtcaagcatctgattgactcactcattgattttctgaacttccccagattccagtttccggggaaacctgggatatacactagggaggaactttgcactatgttcataagggaggtagggacggtactgtcccaggtatattcgaaagtccataatggttcagaaatactgttttcctatttccaagacctagtgattacacttcctttcgagttaaggaaacataaactaatagatgtaatctcgatgtatagggaactgttgaaagatttatcaaaagaagcccaagaggtatttaaagccattcagtctctcaagaccacagaggtgctacgtaatcttcaggaccttttacaattcattttccaactaatagaagataacattaaacagctgaaagagatgaaatttacttatcttattaattatatccaagatgagatcaacacaatcttcagtgattatatcccatgtttttaaattgttgaaagaaaacctatgccttaatcttcataagttcaatgaatttattcaaaacgagcttcaggaagcttctcaagagttacagcagatccatcaatacattatggcccttcgtgaagaatattttgatccaagtatagttggctggacagtgaaatattatgaacttgaagaaaagatagtcagtctgatcaagaacctgttagttgctcttaaggacttccattctgaatatattgtcagtgcctctaactttacttcccaactctcaagtcaagttgagcaatttctgcacagaaatattcaggaatatcttagcatccttaccgatccagatggaaaagggaaagagaagattgcagagctttctgccactgctcaggaaataattaaaagccaggccattgcgacgaagaaaataatttctgattaccaccagcagtttagatataaactgcaagatttttcagaccaactctctgattactatgaaaaatttattgctgaatccaaaagattgattgacctgtccattcaaaactaccacacatttctgatatacatcacggagttactgaaaaagctgcaatcaaccacagtcatgaacccctacatgaagcttgctccaggagaacttactatcatcctctaattttttaaaagaaatcttcatttattcttcttttccaattgaactttcacatagcacagaaaaaattcaaactgcctatattgataaaaccatacagtgagccagccttgcagtaggcagtagactataagcagaagcacatatgaactggacctgcaccaaagctggcaccagggctcggaaggtctctgaactcagaaggatggcattttttgcaagttaaagaaaatcaggatctgagttattttgctaaacttgggggaggaggaacaaataaatggagtctttattgtgtatcata

SEQ ID NO: 206 - DNA, 1420 bp, Homo sapiens
  source 1..1420: mol_type = genomic DNA
ccaggccgccagcctcggagtgggcgcgggacagtgcgcggcgccccgcagccaggcccccgcccccgccgcatccacctcctccgccgcctgcgacccaacgggcgccccccgccgcggcagctgccgccgggcccccgcggccaccatgaagaaggaggtgtgctccgtggccttcctcaaggccgtgttcgcagagttcttggccaccctcatcttcgtcttctttggcctgggctcggccctcaagtggccgtcggcgctgcctaccatcctgcagatcgcgctggcgtttggcctggccataggcacgctggcccaggccctgggacccgtgagcggcggccacatcaaccccgccatcaccctggccctcttggtgggcaaccagatctcgctgctccgggctttcttctacgtggcggcccagctggtgggcgccattgccggggctggcatcctctacggtgtggcaccgctcaatgcccggggcaatctggccgtcaacgcgctcaacaacaacacaacgcagggccaggccatggtggtggagctgattctgaccttccagctggcactctgcatcttcgcctccactgactcccgccgcaccagccctgtgggctccccagccctgtccattggcctgtctgtcaccctgggccaccttgtcggaatctacttcactggctgctccatgaacccagcccgctcttttggccctgcggtggtcatgaatcggttcagccccgctcactgggttttctgggtagggcccatcgtgggggcggtcctggctgccatcctttacttctacctgctcttccccaactccctgagcctgagtgagcgtgtggccatcatcaaaggcacgtatgagcctgacgaggactgggaggagcagcgggaagagcggaagaagaccatggagctgaccacccgctgaccagtgtcaggcaggggccagcccctcagcccctgagccaagggggaaaagaagaaaaagtacctaacacaagcttcctttttgcacaaccggtcctcttggctgaggaggaggagctggtcaccctggctgcacagttagagaggggagaaggaacccatgatgggactcctggggtaggggccaggggctggggtctgctggggacaggtctctctgggacagacctcagagattgtgaatgcagtgccaagctcacaggctgcaagggccaggccagaaaagggcgggcctgcagcctgcaccccccaccttccccaacccttcctcaagagctgaagggatcccagcccctaggtgggcagaggcagaccctccccagagctccttaggaagaagacagactggttcattgaatgccgccttatttatttctggtgaggatgcatgcgtggggctgctggtgtttagagt

SEQ ID NO: 207 - DNA, 1468 bp, Homo sapiens
  source 1..1468: mol_type = genomic DNA
tgtcactgagggttgactgactggagagctcaagtgcagcaaagagaagtgtcagagcatgagcgccaagtccagaaccatagggattattggagctcctttctcaaagggacagccacgaggaggggtggaagaaggccctacagtattgagaaaggctggtctgcttgagaaacttaaagaacaagtaactcaaaactttttaattttagagtgtgatgtgaaggattatggggacctgccctttgctgacatccctaatgacagtccctttcaaattgtgaagaatccaaggtctgtgggaaaagcaagcgagcagctggctggcaaggtggcagaagtcaagaagaacggaagaatcagcctggtgctgggcggagaccacagtttggcaattggaagcatctctggccatgccagggtccaccctgatcttggagtcatctgggtggatgctcacactgatatcaacactccactgacaaccacaagtggaaacttgcatggacaacctgtatctttcctcctgaaggaactaaaaggaaagattcccgatgtgccaggattctcctgggtgactccctgtatatctgccaaggatattgtgtatattggcttgagagacgtggaccctggggaacactacattttgaaaactctaggcattaaatacttttcaatgactgaagtggacagactaggaattggcaaggtgatggaagaaacactcagctatctactaggaagaaagaaaaggccaattcatctaagttttgatgttgacggactggacccatctttcacaccagctactggcacaccagtcgtgggaggtctgacatacagagaaggtctctacatcacagaagaaatctacaaaacagggctactctcaggattagatataatggaagtgaacccatccctggggaagacaccagaagaagtaactcgaacagtgaacacagcagttgcaataaccttggcttgtttcggacttgctcgggagggtaatcacaagcctattgactaccttaacccacctaagtaaatgtggaaacatccgatataaatctcatagttaatggcataattagaaagctaatcattttcttaagcatagagttatccttctaaagacttgttctttcagaaaaatgtttttccaattagtataaactctacaaattccctcttggtgtaaaattcaagatgtggaaattctaacttttttgaaatttaaaagcttatattttctaacttggcaaaagacttatccttagaaagagaagtgtacattgatttccaattaaaaatttgctggcattaaaaataagcacacttacataagcccccatacatagagtgggactcttggaatcaggagacaaagctaccacatgtggaaaggtactatgtgtccatgtcattcaaaaaatgtgattttttataataaactctttataac

SEQ ID NO: 208 - DNA, 1532 bp, Homo sapiens
  source 1..1532: mol_type = genomic DNA
agtgggtggagccagctgtcctcattagataaaggttgtttattcaacccaagtataaatggaaaaaaaagatgcgccctctgtcactgagggttgactgactggagagctcaagtgcagcaaagagaagtgtcagagcatgagcgccaagtccagaaccatagggattattggagctcctttctcaaagggacagccacgaggaggggtggaagaaggccctacagtattgagaaaggctggtctgcttgagaaacttaaagaacaagagtgtgatgtgaaggattatggggacctgccctttgctgacatccctaatgacagtccctttcaaattgtgaagaatccaaggtctgtgggaaaagcaagcgagcagctggctggcaaggtggcagaagtcaagaagaacggaagaatcagcctggtgctgggcggagaccacagtttggcaattggaagcatctctggccatgccagggtccaccctgatcttggagtcatctgggtggatgctcacactgatatcaacactccactgacaaccacaagtggaaacttgcatggacaacctgtatctttcctcctgaaggaactaaaaggaaagattcccgatgtgccaggattctcctgggtgactccctgtatatctgccaaggatattgtgtatattggcttgagagacgtggaccctggggaacactacattttgaaaactctaggcattaaatacttttcaatgactgaagtggacagactaggaattggcaaggtgatggaagaaacactcagctatctactaggaagaaagaaaaggccaattcatctaagttttgatgttgacggactggacccatctttcacaccagctactggcacaccagtcgtgggaggtctgacatacagagaaggtctctacatcacagaagaaatctacaaaacagggctactctcaggattagatataatggaagtgaacccatccctggggaagacaccagaagaagtaactcgaacagtgaacacagcagttgcaataaccttggcttgtttcggacttgctcgggagggtaatcacaagcctattgactaccttaacccacctaagtaaatgtggaaacatccgatataaatctcatagttaatggcataattagaaagctaatcattttcttaagcatagagttatccttctaaagacttgttctttcagaaaaatgtttttccaattagtataaactctacaaattccctcttggtgtaaaattcaagatgtggaaattctaacttttttgaaatttaaaagcttatattttctaacttggcaaaagacttatccttagaaagagaagtgtacattgatttccaattaaaaatttgctggcattaaaaataagcacacttacataagcccccatacatagagtgggactcttggaatcaggagacaaagctaccacatgtggaaaggtactatgtgtccatgtcattcaaaaaatgtgattttttataataaactctttataacaagatta

SEQ ID NO: 209 - DNA, 1185 bp, Homo sapiens
  source 1..1185: mol_type = genomic DNA
gtcactgagggttgactgactggagagctcaagtgcagcaaagagaagtgtcagagcatgagcgccaagtccagaaccatagggattattggagctcctttctcaaagggacagccacgaggaggggtggaagaaggccctacagtattgagaaaggctggtctgcttgagaaacttaaagaacaagagtgtgatgtgaaggattatggggacctgccctttgctgacatccctaatgacagtccctttcaaattgtgaagaatccaaggtctgtgggaaaagcaagcgagcagctggctggcaaggtggcagaagtcaagaagaacggaagaatcagcctggtgctgggcggagaccacagtttggcaattggaagcatctctggccatgccagggtccaccctgatcttggagtcatctgggtggatgctcacactgatatcaacactccactgacaaccacaagtggaaacttgcatggacaacctgtatctttcctcctgaaggaactaaaaggaaagattcccgatgtgccaggattctcctgggtgactccctgtatatctgccaaggatattgtgtatattggcttgagagacgtggaccctggggaacactacattttgaaaactctaggcattaaatacttttcaatgactgaagtaactcgaacagtgaacacagcagttgcaataaccttggcttgtttcggacttgctcgggagggtaatcacaagcctattgactaccttaacccacctaagtaaatgtggaaacatccgatataaatctcatagttaatggcataattagaaagctaatcattttcttaagcatagagttatccttctaaagacttgttctttcagaaaaatgtttttccaattagtataaactctacaaattccctcttggtgtaaaattcaagatgtggaaattctaacttttttgaaatttaaaagcttatattttctaacttggcaaaagacttatccttagaaagagaagtgtacattgatttccaattaaaaatttgctggcattaaaaataagcacacttacataagcccccatacatagagtgggactcttggaatcaggagacaaagctaccacatgtggaaaggtactatgtgtccatgtcattcaaaaaatgtgattttttataataaactctttataac

SEQ ID NO: 210 - DNA, 2143 bp, Homo sapiens
  source 1..2143: mol_type = genomic DNA
ccggccagaaaagccctggccagtggcgggcgcgacactatccgtgcggccaggcggagacccggaggaccgaagcttccggacgacgaggaaccgcccaacatggcctcggagagtgggaagctttggggtggccggtttgtgggtgcagtggaccccatcatggagaagttcaacgcgtccattgcctacgaccggcacctttgggaggtggatgttcaaggcagcaaagcctacagcaggggcctggagaaggcagggctcctcaccaaggccgagatggaccagatactccatggcctagacaaggtggctgaggagtgggcccagggcaccttcaaactgaactccaatgatgaggacatccacacagccaatgagcgccgcctgaaggagctcattggtgcaacggcagggaagctgcacacgggacggagccggaatgaccaggtggtcacagacctcaggctgtggatgcggcagacctgctccacgctctcgggcctcctctgggagctcattaggaccatggtggatcgggcagaggcggaacgtgatgttctcttcccggggtacacccatttgcagagggcccagcccatccgctggagccactggattctgagccacgccgtggcactgacccgagactctgagcggctgctggaggtgcggaagcggatcaatgtcctgcccctggggagtggggccattgcaggcaatcccctgggtgtggaccgagagctgctccgagcagaactcaactttggggccatcactctcaacagcatggatgccactagtgagcgggactttgtggccgagttcctgttctgggcttcgctgtgcatgacccatctcagcaggatggccgaggacctcatcctctactgcaccaaggaattcagcttcgtgcagctctcagatgcctacagcacgggaagcagcctgatgccccagaagaaaaaccccgacagtttggagctgatccggagcaaggctgggcgtgtgtttgggcggtgtgccgggctcctgatgaccctcaagggacttcccagcacctacaacaaagacttacaggaggacaaggaagctgtgtttgaagtgtcagacactatgagtgccgtgctccaggtggccactggcgtcatctctacgctgcagattcaccaagagaacatgggacaggctctcagccccgacatgctggccactgaccttgcctattacctggtccgcaaagggatgccattccgccaggcccacgaggcctccgggaaagctgtgttcatggccgagaccaagggggtcgccctcaaccagctgtcactgcaggagctgcagaccatcagccccctgttctcgggcgacgtgatctgcgtgtgggactacgggcacagtgtggagcagtatggtgccctgggcggcactgcgcgctccagcgtcgactggcagatccgccaggtgcgggcgctactgcaggcacagcaggcctaggtcctcccacacctgccccctaataaagtgggcgcgagaggaggctgctgtgtgtttcctgccccagcctggctccctcgttgctgggctttcggggctggccagtggggacagtcagggactggagaggcagggcagggtggcctgtaatcccagcactttggaagggcaaggtgcgaggatgcttgaggccaggagtttgacacagcctgggcaacacagggagacccccatctctactcaataataaaacaaatagcctggcgtggtggcccatgcatatagtcccagctacttgtaaggctgaggtgagaggacacttgtgcccaggagtggaggctgcagtgagctatgatcacgccactgcattccagcctggataacagagtgagaacctatctctaaaaataaataaataaacgaaaaataaatggaagcggagaaaactgggcaagggcaatgagagtcgtagacgggaagggaagagggggctcccatcatagcctctgctctgtccaggccccatccccttcagacagggtatcacagtgacctcctaggccaggagcgatggctcacgcctgtaatcctagcattttgggaggcctgggcaacaggaagactccaactaccatattaaaaaaaa

SEQ ID NO: 211 - DNA, 1765 bp, Homo sapiens
  source 1..1765: mol_type = genomic DNA
cggcggccggatgggcgggacgggcgtggaggacgccgagcaccgtggcgcgcgctcacgtccgcgtccccaagggctgcgctccctcaagcgcagtgcccagaactcggagccagcccggcccgggggaccctgctggccaaggaggtcgtcagtccggtcttgtcttccagacccggaggaccgaagcttccggacgacgaggaaccgcccaacatggcctcggagagtgggaagctttggggtggccggtttgtgggtgcagtggaccccatcatggagaagttcaacgcgtccattgcctacgaccggcacctttgggaggtggatgttcaaggcagcaaagcctacagcaggggcctggagaaggcagggctcctcaccaaggccgagatggaccagatactccatggcctagacaaggtggctgaggagtgggcccagggcaccttcaaactgaactccaatgatgaggacatccacacagccaatgagcgccgcctgaaggagctcattggtgcaacggcagggaagctgcacacgggacggagccggaatgaccaggtggtcacagacctcaggctgtggatgcggcagacctgctccacgctctcgggcctcctctgggagctcattaggaccatggtggatcgggcagaggcggaacgtgatgttctcttcccggggtacacccatttgcagagggcccagcccatccgctggagccactggattctgagtggggccattgcaggcaatcccctgggtgtggaccgagagctgctccgagcagaactcaactttggggccatcactctcaacagcatggatgccactagtgagcgggactttgtggccgagttcctgttctgggcttcgctgtgcatgacccatctcagcaggatggccgaggacctcatcctctactgcaccaaggaattcagcttcgtgcagctctcagatgcctacagcacgggaagcagcctgatgccccagaagaaaaaccccgacagtttggagctgatccggagcaaggctgggcgtgtgtttgggcggtgtgccgggctcctgatgaccctcaagggacttcccagcacctacaacaaagacttacaggaggacaaggaagctgtgtttgaagtgtcagacactatgagtgccgtgctccaggtggccactggcgtcatctctacgctgcagattcaccaagagaacatgggacaggctctcagccccgacatgctggccactgaccttgcctattacctggtccgcaaagggatgccattccgccaggcccacgaggcctccgggaaagctgtgttcatggccgagaccaagggggtcgccctcaaccagctgtcactgcaggagctgcagaccatcagccccctgttctcgggcgacgtgatctgcgtgtgggactacgggcacagtgtggagcagtatggtgccctgggcggcactgcgcgctccagcgtcgactggcagatccgccaggtgcgggcgctactgcaggcacagcaggcctaggtcctcccacacctgccccctaataaagtgggcgcgagaggaggctgctgtgtgtttcctgccccagcctggctccctcgttgctgggctttcggggctggccagtggggacagtcagggactggagaggcagggcagggtggcctgtaatcccagcactttggaagggcaaggtgcgaggatgcttgaggccaggagtttgacacagcctgggcaacacagggagaccccc

SEQ ID NO: 212 - DNA, 1538 bp, Homo sapiens
  source 1..1538: mol_type = genomic DNA
gacgggcgtggaggacgccgagcaccgtggcgcgcgctcacgtccgcgtccccaagggctgcgctccctcaagcgcagtgcccagaactcggagccagcccggcccgggggaccctgctggccaaggaggtcgtcagtccggtcttgtcttccagacccggaggaccgaagcttccggacgacgaggaaccgcccaacatggcctcggagagtgggaagctttggggtggccggtttgtgggtgcagtggaccccatcatggagaagttcaacgcgtccattgcctacgaccggcacctttgggaggtggatgttcaaggcagcaaagcctacagcaggggcctggagaaggcagggctcctcaccaaggccgagatggaccagatactccatggcctagacaaggtggctgaggagtgggcccagggcaccttcaaactgaactccaatgatgaggacatccacacagccaatgagcgccgcctgaaggagctcattggtgcaacggcagggaagctgcacacgggacggagccggaatgaccaggtggtcacagacctcaggctgtggatgcggcagacctgctccacgctctcgggcctcctctgggagctcattaggaccatggtggatcgggcagaggcggaacgtgatgttctcttcccggggtacacccatttgcagagggcccagcccatccgctggagccactggattctgagccacgccgtggcactgacccgagactctgagcggctgctggaggtgcggaagcggatcaatgtcctgcccctggggagtggggccattgcaggcaatcccctgggtgtggaccgagagctgctccgagcagaactcaactttggggccatcactctcaacagcatggatgccactagtgagcgggactttgtggccgagttcctgttctgggcttcgctgtgcatgacccatctcagcaggatggccgaggacctcatcctctactgcaccaaggaattcagcttcgtgcagctctcagatgcctacagcacgggaagcagcctgatgccccagaagaaaaaccccgacagtttggagctgatccggagcaaggctgggcgtgtgtttgggcgggaggacaaggaagctgtgtttgaagtgtcagacactatgagtgccgtgctccaggtggccactggcgtcatctctacgctgcagattcaccaagagaacatgggacaggctctcagccccgacatgctggccactgaccttgcctattacctggtccgcaaagggatgccattccgccaggcccacgaggcctccgggaaagctgtgttcatggccgagaccaagggggtcgccctcaaccagctgtcactgcaggagctgcagaccatcagccccctgttctcgggcgacgtgatctgcgtgtgggactacgggcacagtgtggagcagtatggtgccctgggcggcactgcgcgctccagcgtcgactggcagatccgccaggtgcgggcgctactgcaggcacagcaggcctaggtcct

SEQ ID NO: 213 - DNA, 1622 bp, Homo sapiens
  source 1..1622: mol_type = genomic DNA
ggatgggcgggacgggcgtggaggacgccgagcaccgtggcgcgcgctcacgtccgcgtccccaagggctgcgctccctcaagcgcagtgcccagaactcggagccagcccggcccgggggaccctgctggccaaggaggtcgtcagtccggtcttgtcttccagacccggaggaccgaagcttccggacgacgaggaaccgcccaacatggcctcggagagtgggaagctttggggtggccggtttgtgggtgcagtggaccccatcatggagaagttcaacgcgtccattgcctacgaccggcacctttgggaggtggatgttcaaggcagcaaagcctacagcaggggcctggagaaggcagggctcctcaccaaggccgagatggaccagatactccatggcctagacaaggtggctgaggagtgggcccagggcaccttcaaactgaactccaatgatgaggacatccacacagccaatgagcgccgcctgaaggagctcattggtgcaacggcagggaagctgcacacgggacggagccggaatgaccaggtggtcacagacctcaggctgtggatgcggcagacctgctccacgctctcgggcctcctctgggagctcattaggaccatggtggatcgggcagaggcggaacgtgatgttctcttcccggggtacacccatttgcagagggcccagcccatccgctggagccactggattctgagccacgccgtggcactgacccgagactctgagcggctgctggaggtgcggaagcggatcaatgtcctgcccctggggagtggggccattgcaggcaatcccctgggtgtggaccgagagctgctccgagcagaactcaactttggggccatcactctcaacagcatggatgccactagtgagcgggactttgtggccgagttcctgttctgggcttcgctgtgcatgacccatctcagcaggatggccgaggacctcatcctctactgcaccaaggaattcagcttcgtgcagctctcagatgcctacagcacgggaagcagcctgatgccccagaagaaaaaccccgacagtttggagctgatccggagcaaggctgggcgtgtgtttgggcggtgtgccgggctcctgatgaccctcaagggacttcccagcacctacaacaaagacttacaggaggacaaggaagctgtgtttgaagtgtcagacactatgagtgccgtgctccaggtggccactggcgtcatctctacgctgcagattcaccaagagaacatgggacaggctctcagccccgacatgctggccactgaccttgcctattacctggtccgcaaagggatgccattccgccaggcccacgaggcctccgggaaagctgtgttcatggccgagaccaagggggtcgccctcaaccagctgtcactgcaggagctgcagaccatcagccccctgttctcgggcgacgtgatctgcgtgtgggactacgggcacagtgtggagcagtatggtgccctgggcggcactgcgcgctccagcgtcgactggcagatccgccaggtgcgggcgctactgcaggcacagcaggcctaggtcctcccacacctgcccc

SEQ ID NO: 214 - DNA, 2205 bp, Homo sapiens
  source 1..2205: mol_type = genomic DNA
gatgtgtcctggcttggagtagcaccttctgctaccacactaggcctccactctcctcagtgcccaaggggaggcacctcactctgatctccctgtggggtcctcttatgcctgccagtaaggataggagtttggttctagagcagagtggtctggcttccaacaagcccagtgttctaggtgacctcaggttgccccaggccttcctgtaggttggcactaattggtttggctgcagctccacttattaagtagttatttttattactaacaacctaggcagggtggcccaggagcccgctgggggaggcggtgccaggctcctggctgaggggcaggctggccccaattctgactggctggctccagtgatcaggaccagggccccacgtggtgctttgctggagatctaggcttggtggggcagctgtggggtaaggggcaggaccagctcaaagatggggtgggggcggaggctgcctctgcagggcagagtcctttggcagtcgggactgttgggcatagaggagtcagctcacagctcagggccagagcactggagaggtctctggggtgcatacaggaaccaggagtggagctgaagcatgtcctatcccctgccagccctcccttagtaacagctggcatttctcgagtccttcctgagcaccaggcaccgtgttatgtatgcaatttgcaaatattatctgattaaatgctcacaataaggctatcagagaggtactattattatccttatcttattattattattattattatttttaagaaggagtctgaggcaggagaatctcttgaacctgggaggcagagtttgcagtgagctgagatggcaccactgtactccagcctggccgacaaagtgagactctgtctcaaaaaaaaaaaaaaagaacccaaacttttggtgttcagccatgttcccatgctcactcccagggtggtgactctgggaaggtctcagcctccttgtctgcccagttagaatgatctgatgcccctgctaccatcagacttgataagtttcccaaagactctttgcaagaagcactgttctggagggtggaggagagactaattgttcttgctctcctggccagagtgggaagctttggggtggccggtttgtgggtgcagtggaccccatcatggagaagttcaacgcgtccattgcctacgaccggcacctttgggaggtggatgttcaaggcagcaaagcctacagcaggggcctggagaaggcagggctcctcaccaaggccgagatggaccagatactccatggcctagacaaggtggctgaggagtgggcccagggcaccttcaaactgaactccaatgatgaggacatccacacagccaatgagcgccgcctgaaggagctcattggtgcaacggcagggaagctgcacacgggacggagccggaatgaccaggtgctttagcccctccaccccctgctccgtgttgtcccaaccttgaggagcccagggggcagttagagttctgcagcggtcctggctcctcagggaagcaacacatcggcctccctgagcaccatctcctccttgcacaggtggtcacagacctcaggctgtggatgcggcagacctgctccacgctctcgggcctcctctgggagctcattaggaccatggtggatcgggcagaggcgtgagtcctacagggacacccagggggcagacagaggtgtgatggaagcctgaacaggagacctagggggcaggggtgaacagcgtgggggtgccaggccctgggggacaggggcatcccagaactccaggatcgaggcagagcagccaggagtgggccatttcctgcaggccccaatactcccatgccagtctagctcagcaggcagagaagactaacccttcgtggggctgggtgcggtggctcacgcctgtaatctcagcactttgggaggccgaggtgggtggatcacctgaggtcaggagttcgagaccagcctggccaacatgggaaaactctgtctctactaaaaatacaaaaattaggcaatgtggtggtgtgcgcctgtaatcccagctactcgggagcctgaggcagaagaactgcttgaacccgggaggaggaggttgcaatgagccgagatcgcgccattgcactccagcctgggctacagagcgagactcctgtctc

SEQ ID NO: 215 - DNA, 1847 bp, Homo sapiens
  source 1..1847: mol_type = genomic DNA
gccggcgcgcccctgggagggtgagccggcgccgggcccaggcccggacctggtgggaggcggggggaggtggggacgaggcctggggaggcgggccccgcccatctgcaggtggctgtgaacgctgagcggctccaggcgggggccgggcccgggggcggggtctgtggcgcgcgtccccgccacgtgtccccggtcaccggccctgcccccgggccctgtgcttataacctgggatgggcacccctgccagtcctgctctgccgcctgccaccgctgcccgagcccgagtggttcactgcactgtgaaaacagattccagacgccgggaactcacgcctccaatcccagacgctatgtccagcaaaggctccgtggttctggcctacagtggcggcctggacacctcgtgcatcctcgtgtggctgaaggaacaaggctatgacgtcattgcctatctggccaacattggccagaaggaagacttcgaggaagccaggaagaaggcactgaagcttggggccaaaaaggtgttcattgaggatgtcagcagggagtttgtggaggagttcatctggccggccatccagtccagcgcactgtatgaggaccgctacctcctgggcacctctcttgccaggccctgcatcgcccgcaaacaagtggaaatcgcccagcgggagggggccaagtatgtgtcccacggcgccacaggaaaggggaacgatcaggtccggtttgagctcagctgctactcactggccccccagataaaggtcattgctccctggaggatgcctgaattctacaaccggttcaagggccgcaatgacctgatggagtacgcaaagcaacacgggattcccatcccggtcactcccaagaacccgtggagcatggatgagaacctcatgcacatcagctacgaggctggaatcctggagaaccccaagaaccaagcgcctccaggtctctacacgaagacccaggacccagccaaagcccccaacacccctgacattctcgagatcgagttcaaaaaaggggtccctgtgaaggtgaccaacgtcaaggatggcaccacccaccagacctccttggagctcttcatgtacctgaacgaagtcgcgggcaagcatggcgtgggccgtattgacatcgtggagaaccgcttcattggaatgaagtcccgaggtatctacgagaccccagcaggcaccatcctttaccatgctcatttagacatcgaggccttcaccatggaccgggaagtgcgcaaaatcaaacaaggcctgggcttgaaatttgctgagctggtgtataccggtttctggcacagccctgagtgtgaatttgtccgccactgcatcgccaagtcccaggagcgagtggaagggaaagtgcaggtgtccgtcctcaagggccaggtgtacatcctcggccgggagtccccactgtctctctacaatgaggagctggtgagcatgaacgtgcagggtgattatgagccaactgatgccaccgggttcatcaacatcaattccctcaggctgaaggaatatcatcgtctccagagcaaggtcactgccaaatagacccgtgtacaatgaggagctggggcctcctcaatttgcagatcccccaagtacaggcgctaattgttgtgataatttgtaattgtgacttgttctccccggctggcagcgtagtggggctgccaggccccagctttgttccctggtccccctgaagcctgcaaacgttgtcatcgaagggaagggtggggggcagctgcggtggggagctataaaaatgacaattaaaagagacactagtcttttatttct

SEQ ID NO: 216 - DNA, 1564 bp, Homo sapiens
  source 1..1564: mol_type = genomic DNA
gcttataacctgggatgggcacccctgccagtcctgctctgccgcctgccaccgctgcccgagcccgacgctatgtccagcaaaggctccgtggttctggcctacagtggcggcctggacacctcgtgcatcctcgtgtggctgaaggaacaaggctatgacgtcattgcctatctggccaacattggccagaaggaagacttcgaggaagccaggaagaaggcactgaagcttggggccaaaaaggtgttcattgaggatgtcagcagggagtttgtggaggagttcatctggccggccatccagtccagcgcactgtatgaggaccgctacctcctgggcacctctcttgccaggccctgcatcgcccgcaaacaagtggaaatcgcccagcgggagggggccaagtatgtgtcccacggcgccacaggaaaggggaacgatcaggtccggtttgagctcagctgctactcactggccccccagataaaggtcattgctccctggaggatgcctgaattctacaaccggttcaagggccgcaatgacctgatggagtacgcaaagcaacacgggattcccatcccggtcactcccaagaacccgtggagcatggatgagaacctcatgcacatcagctacgaggctggaatcctggagaaccccaagaaccaagcgcctccaggtctctacacgaagacccaggacccagccaaagcccccaacacccctgacattctcgagatcgagttcaaaaaaggggtccctgtgaaggtgaccaacgtcaaggatggcaccacccaccagacctccttggagctcttcatgtacctgaacgaagtcgcgggcaagcatggcgtgggccgtattgacatcgtggagaaccgcttcattggaatgaagtcccgaggtatctacgagaccccagcaggcaccatcctttaccatgctcatttagacatcgaggccttcaccatggaccgggaagtgcgcaaaatcaaacaaggcctgggcttgaaatttgctgagctggtgtataccggtttctggcacagccctgagtgtgaatttgtccgccactgcatcgccaagtcccaggagcgagtggaagggaaagtgcaggtgtccgtcctcaagggccaggtgtacatcctcggccgggagtccccactgtctctctacaatgaggagctggtgagcatgaacgtgcagggtgattatgagccaactgatgccaccgggttcatcaacatcaattccctcaggctgaaggaatatcatcgtctccagagcaaggtcactgccaaatagacccgtgtacaatgaggagctggggcctcctcaatttgcagatcccccaagtacaggcgctaattgttgtgataatttgtaattgtgacttgttctccccggctggcagcgtagtggggctgccaggccccagctttgttccctggtccccctgaagcctgcaaacgttgtcatcgaagggaagggtggggggcagctgcggtggggagctataaaaatgacaattaaaagagacactagtcttttatttcta

SEQ ID NO: 217 - DNA, 667 bp, Homo sapiens
  source 1..667: mol_type = genomic DNA
gagcctggaccgttgcagctaatggttgtggctgaggctcaggggggcaagcatggcgtgggccgtattgacatcgtggagaaccgcttcattggaatgaagtcccgaggtatctacgagaccccagcaggcaccatcctttaccatgctcatttagacatcgaggccttcaccatggaccgggaagtgcgcaaaatcaaacaaggcctgggcttgaaatttgctgagctggtgtataccggtttctggcacagccctgagtgtgaatttgtccgccactgcatcgccaagtcccaggagcgagtggaagggaaagtgcaggtgtccgtcctcaagggccaggtgtacatcctcggccgggagtccccactgtctctctacaatgaggagctggtgagcatgaacgtgcagggtgattatgagccaactgatgccaccgggttcatcaacatcaattccctcaggctgaaggaatatcatcgtctccagagcaaggtcactgccaaatagacccgtgtacaatgaggagctggggcctcctcaatttgcagatcccccaagtacaggcgctaattgttgtgataatttgtaattgtgacttgttctccccggctggcagcgtagtggggctgccaggccccagctttgttccctggtccccctgaag

SEQ ID NO: 218 - DNA, 1565 bp, Homo sapiens
  source 1..1565: mol_type = genomic DNA
cgagcccgtggttcactgcactgtgaaaacagattccagacgccgggaactcacgcctccaatcccagacgctatgtccagcaaaggctccgtggttctggcctacagtggcggcctggacacctcgtgcatcctcgtgtggctgaaggaacaaggctatgacgtcattgcctatctggccaacattggccagaaggaagacttcgaggaagccaggaagaaggcactgaagcttggggccaaaaaggtgttcattgaggatgtcagcagggagtttgtggaggagttcatctggccggccatccagtccagcgcactgtatgaggaccgctacctcctgggcacctctcttgccaggccctgcatcgcccgcaaacaagtggaaatcgcccagcgggagggggccaagtatgtgtcccacggcgccacaggaaaggggaacgatcaggtccggtttgagctcagctgctactcactggccccccagataaaggtcattgctccctggaggatgcctgaattctacaaccggttcaagggccgcaatgacctgatggagtacgcaaagcaacacgggattcccatcccggtcactcccaagaacccgtggagcatggatgagaacctcatgcacatcagctacgaggctggaatcctggagaaccccaagaaccaagcgcctccaggtctctacacgaagacccaggacccagccaaagcccccaacacccctgacattctcgagatcgagttcaaaaaaggggtccctgtgaaggtgaccaacgtcaaggatggcaccacccaccagacctccttggagctcttcatgtacctgaacgaagtcgcgggcaagcatggcgtgggccgtattgacatcgtggagaaccgcttcattggaatgaagtcccgaggtatctacgagaccccagcaggcaccatcctttaccatgctcatttagacatcgaggccttcaccatggaccgggaagtgcgcaaaatcaaacaaggcctgggcttgaaatttgctgagctggtgtataccggtttctggcacagccctgagtgtgaatttgtccgccactgcatcgccaagtcccaggagcgagtggaagggaaagtgcaggtgtccgtcctcaagggccaggtgtacatcctcggccgggagtccccactgtctctctacaatgaggagctggtgagcatgaacgtgcagggtgattatgagccaactgatgccaccgggttcatcaacatcaattccctcaggctgaaggaatatcatcgtctccagagcaaggtcactgccaaatagacccgtgtacaatgaggagctggggcctcctcaatttgcagatcccccaagtacaggcgctaattgttgtgataatttgtaattgtgacttgttctccccggctggcagcgtagtggggctgccaggccccagctttgttccctggtccccctgaagcctgcaaacgttgtcatcgaagggaagggtggggggcagctgcggtggggagctataaaaatgacaattaaaagagacactagtcttttatttcta

SEQ ID NO: 219 - DNA, 1973 bp, Homo sapiens
  source 1..1973: mol_type = genomic DNA
ctgctctgccgcctgccaccgctgcccgagcccggtgggcggcggcactgcgtgctggggaagcacagattcttgtgccctctgtgaccttgagcctgccactgacctctctgagccctgctggctgcctccccaataggaatgacaactcctacttcatgaggttgtagtgggggctcaggggcacagggagatcccgctgaggctcccagggccctgcctggtgcttggcaaggagcagttctgatgggggatgtgtcagctgccagaggctcagagccaaggcccctcccacatctcctgcctgcgtgcattcctcacatcctggccttgggccaaactgctcagcctcagccgccttccctcgatgctggaggatcaggtccaagagatgcctctccccgaccagcctaggactgcagtcagcattcccaggccccagtgtggtctgtggggctgtgtgcagagtgtgcgagacgctatgtccagcaaaggctccgtggttctggcctacagtggcggcctggacacctcgtgcatcctcgtgtggctgaaggaacaaggctatgacgtcattgcctatctggccaacattggccagaaggaagacttcgaggaagccaggaagaaggcactgaagcttggggccaaaaaggtgttcattgaggatgtcagcagggagtttgtggaggagttcatctggccggccatccagtccagcgcactgtatgaggaccgctacctcctgggcacctctcttgccaggccctgcatcgcccgcaaacaagtggaaatcgcccagcgggagggggccaagtatgtgtcccacggcgccacaggaaaggggaacgatcaggtccggtttgagctcagctgctactcactggccccccagataaaggtcattgctccctggaggatgcctgaattctacaaccggttcaagggccgcaatgacctgatggagtacgcaaagcaacacgggattcccatcccggtcactcccaagaacccgtggagcatggatgagaacctcatgcacatcagctacgaggctggaatcctggagaaccccaagaaccaagcgcctccaggtctctacacgaagacccaggacccagccaaagcccccaacacccctgacattctcgagatcgagttcaaaaaaggggtccctgtgaaggtgaccaacgtcaaggatggcaccacccaccagacctccttggagctcttcatgtacctgaacgaagtcgcgggcaagcatggcgtgggccgtattgacatcgtggagaaccgcttcattggaatgaagtcccgaggtatctacgagaccccagcaggcaccatcctttaccatgctcatttagacatcgaggccttcaccatggaccgggaagtgcgcaaaatcaaacaaggcctgggcttgaaatttgctgagctggtgtataccggtttctggcacagccctgagtgtgaatttgtccgccactgcatcgccaagtcccaggagcgagtggaagggaaagtgcaggtgtccgtcctcaagggccaggtgtacatcctcggccgggagtccccactgtctctctacaatgaggagctggtgagcatgaacgtgcagggtgattatgagccaactgatgccaccgggttcatcaacatcaattccctcaggctgaaggaatatcatcgtctccagagcaaggtcactgccaaatagacccgtgtacaatgaggagctggggcctcctcaatttgcagatcccccaagtacaggcgctaattgttgtgataatttgtaattgtgacttgttctccccggctggcagcgtagtggggctgccaggccccagctttgttccctggtccccctgaagcctgcaaacgttgtcatcgaagggaagggtggggggcagctgcggtggggagctataaaaatgacaattaaaagagacactagtcttttatttcta

SEQ ID NO: 220 - DNA, 807 bp, Homo sapiens
  source 1..807: mol_type = genomic DNA
cccggtaaggagccctcggcccctctcgctgcccactccctagccgagagcacccgcttcccgggcccagaggaggaggcgtagaagacgcccgccccggggcccgcggaggcagagggcggaccccgatcgccactcgccggggactgggaccgaggcaggagggaaggggctcccgatgctcaaacgcctggcaccggattccagacgctatgtccagcaaaggctccgtggttctggcctacagtggcggcctggacacctcgtgcatcctcgtgtggctgaaggaacaaggctatgacgtcattgcctatctggccaacattggccagaaggaagacttcgaggaagccaggaagaaggcactgaagcttggggccaaaaaggtgttcattgaggatgtcagcagggagtttgtggaggagttcatctggccggccatccagtccagcgcactgtatgaggaccgctacctcctgggcacctctcttgccaggccctgcatcgcccgcaaacaagtggaaatcgcccagcgggagggggccaagtatgtgtcccacggcgccacaggaaaggggaacgatcaggtccggtttgagctcagctgctactcactggccccccagataaaggtcattgctccctggaggatgcctgaattctacaaccggttcaagggccgcaatgacctgatggagtacgcaaagcaacacgggattcccatcccggtcactcccaagaacccgtggagcatggatgagaacctcatgcacatcagctacgaggctggaatcctggagaacccca

SEQ ID NO: 221 - DNA, 545 bp, Homo sapiens
  source 1..545: mol_type = genomic DNA
gacgctatgtccagcaaaggctccgtggttctggcctacagtggcggcctggacacctcgtgcatcctcgtgtggctgaaggaacaaggctatgacgtcattgcctatctggccaacattggccagaaggaagacttcgaggaagccaggaagaaggcactgaagcttggggccaaaaaggtgttcattgaggatgtcagcagggagtttgtggaggagttcatctggccggccatccagtccagcgcactgtatgaggaccgctacctcctgggcacctctcttgccaggccctgcatcgcccgcaaacaagtggaaatcgcccagcgggagggggccaagtatgtgtcccacggcgccacaggaaaggtcattgctccctggaggatgcctgaattctacaaccggttcaagggccgcaatgacctgatggagtacgcaaagcaacacgggattcccatcccggtcactcccaagaacccgtggagcatggatgagaacctcatgcacatcagctacgaggctggaatcctggagaaccccaa

SEQ ID NO: 222 - DNA, 1003 bp, Homo sapiens
  source 1..1003: mol_type = genomic DNA
ctctgagcttctctgagccttgtttgctcatctggaaaaaggggattaaaccatttacctcatggagttgtgaaagaatagctgcaaagcacctaacacatagtaaggttcccagtgcagctacttctgctgggttgagtctagctgtgtaggccccttgttcctcacctggagaaactggggtggcaggccggtcccccacaaaagataactcatctcttaatttgcaagctgcctcaacaggagggtgggggaacagctcaacaatggctgatgggcgctcctggtgttgatagagatggaacttggacttggaggcctctccacgctgtcccactgcccctggcctaggcagcagcctgccctgtggcccaccctggccgctctggctctgctgagcagcgtcgcagaggcctccctgggctccgcgccccgcagccctgccccccgcgaaggccccccgcctgtcctggcgtcccccgccggccacctgccggggggacgcacggcccgctggtgcagtggaagagcccggcggccgccgccgcagccttctcggcccgcgcccccgccgcctgcacccccatctgctcttccccgcgggggccgcgcggcgcgggctgggggcccgggcagccgcgctcgggcagcgggggcgcggggctgccgcctgcgctcgcagctggtgccggtgcgcgcgctcggcctgggccaccgctccgacgagctggtgcgtttccgcttctgcagcggctcctgccgccgcgcgcgctctccacacgacctcagcctggccagcctactgggcgccggggccctgcgaccgcccccgggctcccggcccgtcagccagccctgctgccgacccacgcgctacgaagcggtctccttcatggacgtcaacagcacctggagaaccgtggaccgcctctccgccaccgcctgcggctgcctgggctgagggctcgctccagggctttgcagactggacccttaccggtgg

SEQ ID NO: 223 - DNA, 1921 bp, Homo sapiens
  source 1..1921: mol_type = genomic DNA
actggccgctgagagaagaatcgggtggagcagagagcagctgctgcagggcagacagccggacccccaaatctgcacgtaccagcagtcagccgccccacgcagggaccggcttacccctcgctccccgccctcactcactttctcccgccctcggcccggcctcccagctctctacttcgcgagtctacaaactcaactcccggtttccgtgcctctccaccgctcgagttctctactctccatatccgaggggcccctcccagcatctacccccctcccaacctcgggggacctagccaagctaggggggactggatccgacgggtggagcagccaggtgagccccgaaaggtggggcggggcaggggcgctcccagccccaccccgggatctggtgacgctggggctggaatttgacaccggacggctgcggcggcgggcaggaggctgctgagggatggagttgggcccggcccccagacaaggcccgggggctccgccagcagcaggtccctcgggccccagccctcgctgccacccgggcctggagccccacacccgagggtgcagactggctgccaaggccacacttttggctaaaagaggcactgccaggtgtacagtcctgggcatgcgctgtttgagcttcgggggagagcccagcactggtccccggaaaggtgcctagaagaacaaggtgcaggaccccgtgctgcctcaacaggagggtgggggaacagctcaacaatggctgatgggcgctcctggtgttgatagagatggaacttggacttggaggcctctccacgctgtcccactgcccctggcctaggcagcagcctgccctgtggcccaccctggccgctctggctctgctgagcagcgtcgcagaggcctccctgggctccgcgccccgcagccctgccccccgcgaaggccccccgcctgtcctggcgtcccccgccggccacctgccggggggacgcacggcccgctggtgcagtggaagagcccggcggccgccgccgcagccttctcggcccgcgcccccgccgcctgcacccccatctgctcttccccgcgggggccgcgcggcgcgggctgggggcccgggcagccgcgctcgggcagcgggggcgcggggctgccgcctgcgctcgcagctggtgccggtgcgcgcgctcggcctgggccaccgctccgacgagctggtgcgtttccgcttctgcagcggctcctgccgccgcgcgcgctctccacacgacctcagcctggccagcctactgggcgccggggccctgcgaccgcccccgggctcccggcccgtcagccagccctgctgccgacccacgcgctacgaagcggtctccttcatggacgtcaacagcacctggagaaccgtggaccgcctctccgccaccgcctgcggctgcctgggctgagggctcgctccagggctttgcagactggacccttaccggtggctcttcctgcctgggaccctcccgcagagtcccactagccagcggcctcagccagggacgaaggcctcaaagctgagaggcccctgccggtgggtgatggatatcatccccgaacaggtgaagggacaactgactagcagccccagagccctcaccctgcggatcccagcctaaaagacaccagagacctcagctatggagcccttcggacccacttctcacagactctggcactggccaggcctcgaacctgggacccctcctctgatgaacactacagtggctgaggcatcagcccccgcccaggccctgtagggacagcatttgaaggacacatattgcagttgcttggttgaaagtgcctgtgctggaactggcctgtactcactcatgggagctggcccctatttattatttctaagttatttatttac

SEQ ID NO: 224 - DNA, 1943 bp, Homo sapiens
  source 1..1943: mol_type = genomic DNA
actggccgctgagagaagaatcgggtggagcagagagcagctgctgcagggcagacagccggacccccaaatctgcacgtaccagcagtcagccgccccacgcagggaccggcttacccctcgctccccgccctcactcactttctcccgccctcggcccggcctcccagctctctacttcgcgagtctacaaactcaactcccggtttccgtgcctctccaccgctcgagttctctactctccatatccgaggggcccctcccagcatctacccccctcccaacctcgggggacctagccaagctaggggggactggatccgacgggtggagcagccaggtgagccccgaaaggtggggcggggcaggggcgctcccagccccaccccgggatctggtgacgctggggctggaatttgacaccggacggctgcggcggcgggcaggaggctgctgagggatggagttgggcccggcccccagacaaggcccgggggctccgccagcagcaggtccctcgggccccagccctcgctgccacccgggcctggagccccacacccgagggtgcagactggctgccaaggccacacttttggctaaaagaggcactgccaggtgtacagtcctgggcatgcgctgtttgagcttcgggggagagcccagcactggtccccggaaaggtgcctagaagaacaaggtgcaggaccccgtgctgcctcaacaggagggtgggggaacagctcaacaatggctgatgggcgctcctggtgttgatagagatggaacttggacttggaggcctctccacgctgtcccactgcccctggcctaggcagcaggctccacttggtctctccgcgcagcctgccctgtggcccaccctggccgctctggctctgctgagcagcgtcgcagaggcctccctgggctccgcgccccgcagccctgccccccgcgaaggccccccgcctgtcctggcgtcccccgccggccacctgccggggggacgcacggcccgctggtgcagtggaagagcccggcggccgccgccgcagccttctcggcccgcgcccccgccgcctgcacccccatctgctcttccccgcgggggccgcgcggcgcgggctgggggcccgggcagccgcgctcgggcagcgggggcgcggggctgccgcctgcgctcgcagctggtgccggtgcgcgcgctcggcctgggccaccgctccgacgagctggtgcgtttccgcttctgcagcggctcctgccgccgcgcgcgctctccacacgacctcagcctggccagcctactgggcgccggggccctgcgaccgcccccgggctcccggcccgtcagccagccctgctgccgacccacgcgctacgaagcggtctccttcatggacgtcaacagcacctggagaaccgtggaccgcctctccgccaccgcctgcggctgcctgggctgagggctcgctccagggctttgcagactggacccttaccggtggctcttcctgcctgggaccctcccgcagagtcccactagccagcggcctcagccagggacgaaggcctcaaagctgagaggcccctgccggtgggtgatggatatcatccccgaacaggtgaagggacaactgactagcagccccagagccctcaccctgcggatcccagcctaaaagacaccagagacctcagctatggagcccttcggacccacttctcacagactctggcactggccaggcctcgaacctgggacccctcctctgatgaacactacagtggctgaggcatcagcccccgcccaggccctgtagggacagcatttgaaggacacatattgcagttgcttggttgaaagtgcctgtgctggaactggcctgtactcactcatgggagctggcccctatttattatttctaagttatttattt

SEQ ID NO: 225 - DNA, 517 bp, Homo sapiens
  source 1..517: mol_type = genomic DNA
gacgctggggctggaatttgacaccggacggctgcggcggcgggcaggaggctgctgagggatggagttgggcccggcccccagacaaggcccgggggctccgccagcagcaggtccctcgggccccagccctcgctgccacccgggcctggagccccacacccgagggtgcagactggctgccaaggccacacttttggctaaaagaggcactgccaggtgtacagtcctgggcatgcgctgtttgagcttcgggggagagcccagcactggtccccggaaaggtgcctagaagaacaaggtgcaggaccccgtgagatggaacttggacttggaggcctctccacgctgtcccactgcccctggcctaggcagcagcctgccctgtggcccaccctggccgctctggctctgctgagcagcgtcgcagaggcctccctgggctccgcgccccgcagccctgccccccgcgaaggccccccgcctgtcctggcgtcccccgccggccacctgccgg

SEQ ID NO: 226 - DNA, 485 bp, Homo sapiens
  source 1..485: mol_type = genomic DNA
gagggctcctaaggctgccctgcctgcctttccctccatcacggacaacagtcactggcctggctcggaggccttgattccacttagccaagaggcacacaccaggacctggaggacaaccccgggaaggcctgggggtctgttccacagctgcctcaacaggagggtgggggaacagctcaacaatggctgatgggcgctcctggtgttgatagagatggaacttggacttggaggcctctccacgctgtcccactgcccctggcctaggcagcaggctccacttggtctctccgcgcagcctgccctgtggcccaccctggccgctctggctctgctgagcagcgtcgcagaggcctccctgggctccgcgccccgcagccctgccccccgcgaaggccccccgcctgtcctggcgtcccccgccggccacctgccggggggacgcacggcccgctggtgcagtggaagagcccggcggccgc

SEQ ID NO: 227 - DNA, 477 bp, Homo sapiens
  source 1..477: mol_type = genomic DNA
tggggcggggcaggggcgctcccagccccaccccgggatctggtgacgctggggctggaatttgacaccggacggctgcggcggcgggcaggaggctgctgagggatggagttgggcccggcccccagacaaggcccgggggctccgccagcagcaggtccctcgggccccagccctcgctgccacccgggcctggagccccacacccgagctgcctcaacaggagggtgggggaacagctcaacaatggctgatgggcgctcctggtgttgatagagatggaacttggacttggaggcctctccacgctgtcccactgcccctggcctaggcagcagcctgccctgtggcccaccctggccgctctggctctgctgagcagcgtcgcagaggcctccctgggctccgcgccccgcagccctgccccccgcgaaggccccccgcctgtcctggcgtcccccgccggccacctgccgg

SEQ ID NO: 228 - DNA, 524 bp, Homo sapiens
  source 1..524: mol_type = genomic DNA
agccctcgctgccacccgggcctggagccccacacccgagggtgcagactggctgccaaggccacacttttggctaaaagaggcactgccaggtgtacagtcctgggcatgcgctgtttgagcttcgggggagagcccagcactggtccccggaaaggtgcctagaagaacaaggtgcaggaccccgtgctgcctcaacaggagggtgggggaacagctcaacaatggctgatgggcgctcctggtgttgatagagatggaacttggacttggaggcctctccacgctgtcccactgcccctggcctaggcagcaggctccacttggtctctccgcgcagcctgccctgtggcccaccctggccgctctggctctgctgagcagcgtcgcagaggcctccctgggctccgcgccccgcagccctgccccccgcgaaggccccccgcctgtcctggcgtcccccgccggccacctgccggggggacgcacggcccgctggtgcagtggaagagcccggcggccgc

SEQ ID NO: 229 - DNA, 1303 bp, Homo sapiens
  source 1..1303: mol_type = genomic DNA
gggggctccgccagcagcaggtccctcgggccccagccctcgctgccacccgggcctggagccccacacccgagctgcctcaacaggagggtgggggaacagctcaacaatggctgatgggcgctcctggtgttgatagagatggaacttggacttggaggcctctccacgctgtcccactgcccctggcctaggcagcaggctccacttggtctctccgcgcagcctgccctgtggcccaccctggccgctctggctctgctgagcagcgtcgcagaggcctccctgggctccgcgccccgcagccctgccccccgcgaaggccccccgcctgtcctggcgtcccccgccggccacctgccggggggacgcacggcccgctggtgcagtggaagagcccggcggccgccgccgcagccttctcggcccgcgcccccgccgcctgcacccccatctgctcttccccgcgggggccgcgcggcgcgggctgggggcccgggcagccgcgctcgggcagcgggggcgcggggctgccgcctgcgctcgcagctggtgccggtgcgcgcgctcggcctgggccaccgctccgacgagctggtgcgtttccgcttctgcagcggctcctgccgccgcgcgcgctctccacacgacctcagcctggccagcctactgggcgccggggccctgcgaccgcccccgggctcccggcccgtcagccagccctgctgccgacccacgcgctacgaagcggtctccttcatggacgtcaacagcacctggagaaccgtggaccgcctctccgccaccgcctgcggctgcctgggctgagggctcgctccagggctttgcagactggacccttaccggtggctcttcctgcctgggaccctcccgcagagtcccactagccagcggcctcagccagggacgaaggcctcaaagctgagaggcccctgccggtgggtgatggatatcatccccgaacaggtgaagggacaactgactagcagccccagagccctcaccctgcggatcccagcctaaaagacaccagagacctcagctatggagcccttcggacccacttctcacagactctggcactggccaggcctcgaacctgggacccctcctctgatgaacactacagtggctgaggcatcagcccccgcccaggccctgtagggacagcatttgaaggacacatattgcagttgcttggttgaaagtgcctgtgctggaactggcctgtactcactcatgggagctggcccctatttattatttctaagttatttattta

SEQ ID NO: 230 - DNA, 5327 bp, Homo sapiens
  source 1..5327: mol_type = genomic DNA
ctgccacaggctgggctcttgtgctagaaatgacttgctagctagacatcatggttcaggatctgagtcagaggtttaaccatttataagcttttttcttatgaaaaattggcactaattataatgtctaactgtcagagttgttgcaggctttacaggagacgcgggctgtgaagatgctttgtaaattgtgaagcgttattaaagaacacatcttttttttttaggaaaccacagtgcaaatttaattgccggggaagataacgggccttggtgccctccaagcgtcagctgagtttccaagaagccgggcagcgggcgcccgcgggttcgtctctggctcctcctccgccacagcagccgggggcccgggtcggaggcggcgggggccgagcgcccggcctcgcaagcccacggcccgctgggggtgccgtcccgcgccggggcggagcaggccccggcagcccagttcctcattctatcagcggtacaaggggctggtggcgccacaggcgctgggaccgcgggcggacaaggatgggtccgcgcggcgcggcgagcttgccccgaggccccggacctcggcggctgctcctccccgtcgtcctcccgctgctgctgctgctgttgttggcgccgccgggctcgggcgccggggccagccggccgccccacctggtcttcttgctggcagacgacctaggctggaacgacgtcggcttccacggctcccgcatccgcacgccgcacctggacgcgctggcggccggcggggtgctcctggacaactactacacgcagccgctgtgcacgccgtcgcggagccagctgctcactggccgctaccagatccgtacaggtttacagcaccaaataatctggccctgtcagcccagctgtgttcctctggatgaaaaactcctgccccagctcctaaaagaagcaggttatactacccatatggtcggaaaatggcacctgggaatgtaccggaaagaatgccttccaacccgccgaggatttgatacctactttggatatctcctgggtagtgaagattattattcccatgaacgctgtacattaattgacgctctgaatgtcacacgatgtgctcttgattttcgagatggcgaagaagttgcaacaggatataaaaatatgtattcaacaaacatattcaccaaaagggctatagccctcataactaaccatccaccagagaagcctctgtttctctaccttgctctccagtctgtgcatgagccccttcaggtccctgaggaatacttgaagccatatgactttatccaagacaagaacaggcatcactatgcaggaatggtgtcccttatggatgaagcagtaggaaatgtcactgcagctttaaaaagcagtgggctctggaacaacacggtgttcatcttttctacagataacggagggcagactttggcagggggtaataactggccccttcgaggaagaaaatggagcctgtgggaaggaggcgtccgaggggtgggctttgtggcaagccccttgctgaagcagaagggcgtgaagaaccgggagctcatccacatctctgactggctgccaacactcgtgaagctggccaggggacacaccaatggcacaaagcctctggatggcttcgacgtgtggaaaaccatcagtgaaggaagcccatcccccagaattgagctgctgcataatattgacccgaacttcgtggactcttcaccgtgtcccaggaacagcatggctccagcaaaggatgactcttctcttccagaatattcagcctttaacacatctgtccatgctgcaattagacatggaaattggaaactcctcacgggctacccaggctgtggttactggttccctccaccgtctcaatacaatgtttctgagataccctcatcagacccaccaaccaagaccctctggctctttgatattgatcgggaccctgaagaaagacatgacctgtccagagaatatcctcacatcgtcacaaagctcctgtcccgcctacagttctaccataaacactcagtccccgtgtacttccctgcacaggacccccgctgtgatcccaaggccactggggtgtggggcccttggatgtaggatttcagggaggctagaaaacctttcaattggaagttggacctcaggccttttctcacgactcttgtctcatttgttatcccaacctgggttcacttggcccttctcttgctcttaaaccacaccgaggtgtctaatttcaacccctaatgcatttaagaagctgataaaatctgcaacactcctgctgttggctggagcatgtgtctagaggtgggggtggctgggtttatccccctttcctaagccttgggacagctgggaacttaacttgaaataggaagttctcactgaatcctggaggctggaacagctggctcttttagactcacaagtcagacgttcgattcccctctgccaatagccagttttattggagtgaatcacatttcttacgcaaatgaagggagcagacagtgattaatggttctgttggccaaggcttctccctgtcggtgaaggatcatgttcaggcactccaagtgaaccacccctcttggttcaccccttactcacttatctcatcacagagcataaggcccattttgttgttcaggtcaacagcaaaatgcctgcaccatgactgtggcttttaaaataaagaaatgtgtttttatcgtaatttatttccccccagccattgctcactctgtctagacttcctgccacttccaattcttctgtggcttttcctgcctttccttttgacctcagtagtcctatccctgggaaggccactttgcttctctacctgagcacccctgatttctggaacgctgctgagccctgccttacttttgcccctagggctgaagctagaggcctccccgtaataggcggtggagttgctctgtgaggatgttcatggtagacactaagagggctgggtgggagatgcttggctctgtggcatctgttcagcgaggcttttcctatattgcatggagttagtcattgtgattgtagctttatttcataatatattaagacttgcactgctatttactagcagtgagaagaaacctcaggaaaggatatgaaaaagcaagtggccagtgtctgggatactgggccttggtaaagcagaggagggcacacccacagtcctcttattctctgttttactgcttgttttgaggttctggggtctggcaaagaggatgcagtttgacacctgcagccctttctcaatcccactaatgtcttactaatgtggaacagtccatattagctccagagagtgtcaaacccagagaaatgtgtgcaaaaatgatactcttttctgcattagccccaccattgtgttcaccaatgcttggaacactgcctgaaggcactcattttttaatttttattttatttttaattttttatatctttatgagacgatctcactctgtcaccaggttggagtacagtggtacaatcacaactcaccgtagcctcaaactcctgggctcaagtgattctcccacctcaggcacccaaatagctggaactacaggcatataccgccacacccagctaattttattttttgaaaagacaaggttccctatgttgcccagctggtcttaaactcctgggctccagcaattatcccagcttgggctccaaaagtgctgggattacaggcatgagtcaccatgcctggcctcattttttaaaacaaatgaataaatggacaaatgagtaaatgagaaagtctcacaccatgaaagatgctagtccaatgagctgaatacagaggtaatataaatgtcttccagctgttgcttttctgttctcaagctgcccctcctggggtaggagcataatctacatcactgggcagtcacaggacactctatagcaaggttgtagcgtcctctccagtggggggagaaaaggaactgtgcctaccaaaggtactctcttgtcagcaatttccatttctatactttatgggacactagaaactaaaagcaacaaataatctgatataagtccttgtatagtcatccttcaattcagtagcaatattttctggtcactactaacctgtattgtattaaaatgagactattggaaggaaatggtgctaaaactaataacatctcttaccaacctttacccaactcctgggttggcaaacagctgaccaaactgccatcacctcccacttggaagtgtatggccgacagcatgaaatagctgagcccagatgttccttctgcatcctccgaatcccagggctgggtgtaggtagccgttggaggccatcgctacagggcacctatctgttatcgctgctgtcctcccaacagctgtctccagttctagttccttggttttcaggcacagtgggggatgttctgcacccagtggacttcaaaagagttttgaagacttaattttttgtaaaacaagtacttgagattttggtttatccataatagaatgtatttcattagattctctgattctatataagaatgtgaaaagattgatatattgttgttagaaataatgttatttctttccaattttttttttttttttttttgagatggagtctcgctctgtcacccaggctggagtgcagtggtgtgatctcggctcactgcagcctctaactcccaggttcaagctattctcctgcctcagcctcccaagtagctggattacaggcatacaccaccacgcctggctatgttttgtatttttcgtagagatagggtttcaccatgttggccaggctggtctcaaactcctgacctcaagtgatccacccacttcagcttcccaaagcactgggattacaggtgtgagccactgtgcccggcaaatttttttacctttacagaaggttttgcttatttaattgtgagctcatttttctttgttacttttgtccccccagatttgggggacaaaataaaattaatcttttaaaatgtgtcagccatatgtatggggcttccatttggggtgaggagaaagttctggaactagatagtggtcatggttatacaacatcataaatgcaattactgccactgaattgtatgttttaaagtggttaaaatgttaagttttatgttttattacaatttttaaatgtgtcaaccaactttatagtacataaattatatctcagtaaagctgttaaataaataaatatagtaaaaattttagaactaaaaaaa

SEQ ID NO: 231 - DNA, 5327 bp, Homo sapiens; identical to SEQ ID NO: 230
  source 1..5327: mol_type = genomic DNA

SEQ ID NO: 232 - DNA, 2316 bp, Homo sapiens
  source 1..2316: mol_type = genomic DNA
agatatttcaggctaactagatactgtgtgcttcttagtgtcactgcttagtgggggagccagctctgagtggggtcatatccggacaagcgaatgagctatttattcaatgaccacgcaacactccaaatcctcccagggcaacttgaaagtaaccgcaccttccaaagggcaccgtgcaatcagactgaaaccacagtgcaaatttaattgccggggaagataacgggccttggtgccctccaagcgtcagctgagtttccaagaagccgggcagcgggcgcccgcgggttcgtctctggctcctcctccgccacagcagccgggggcccgggtcggaggcggcgggggccgagcgcccggcctcgcaagcccacggcccgctgggggtgccgtcccgcgccggggcggagcaggccccggcagcccagttcctcattctatcagcggtacaaggggctggtggcgccacaggcgctgggaccgcgggcggacaaggatgggtccgcgcggcgcggcgagcttgccccgaggccccggacctcggcggctgctcctccccgtcgtcctcccgctgctgctgctgctgttgttggcgccgccgggctcgggcgccggggccagccggccgccccacctggtcttcttgctggcagacgacctaggctggaacgacgtcggcttccacggctcccgcatccgcacgccgcacctggacgcgctggcggccggcggggtgctcctggacaactactacacgcagccgctgtgcacgccgtcgcggagccagctgctcactggccgctaccagatccgtacaggtttacagcaccaaataatctggccctgtcagcccagctgtgttcctctggatgaaaaactcctgccccagctcctaaaagaagcaggttatactacccatatggtcggaaaatggcacctgggaatgtaccggaaagaatgccttccaacccgccgaggatttgatacctactttggatatctcctgggtagtgaagattattattcccatgaacgctgtacattaattgacgctctgaatgtcacacgatgtgctcttgattttcgagatggcgaagaagttgcaacaggatataaaaatatgtattcaacaaacatattcaccaaaagggctatagccctcataactaaccatccaccagagaagcctctgtttctctaccttgctctccagtctgtgcatgagccccttcaggtccctgaggaatacttgaagccatatgactttatccaagacaagaacaggcatcactatgcaggaatggtgtcccttatggatgaagcagtaggaaatgtcactgcagctttaaaaagcagtgggctctggaacaacacggtgttcatcttttctacagataacggagggcagactttggcagggggtaataactggccccttcgaggaagaaaatggagcctgtgggaaggaggcgtccgaggggtgggctttgtggcaagccccttgctgaagcagaagggcgtgaagaaccgggagctcatccacatctctgactggctgccaacactcgtgaagctggccaggggacacaccaatggcacaaagcctctggatggcttcgacgtgtggaaaaccatcagtgaaggaagcccatcccccagaattgagctgctgcataatattgacccgaacttcgtggactcttcaccgtactggcctgagtgctcgctgctgttgtagctaccaccaactttctactgaagatgataacccagggcataagaaatgacttcagacccaaggttctgaaagggcccctcaaggcctcgggtggctcctgcagaagtggcagaagaggcgggaactaggaacctggcatcataggaaaagtgccttctccaagaaagaaggggccccaggaggctgtcttacttagatcaaccataaactaccacagatgggtcatttcttatattatttcaaaatatctttgaagatgagaattcatttgtgtccttcatagaccaaagttctttgtgttaccttttcccaaaagtaaattcctttccctttattcattccttgtggaaataaaatgcaagccctttatacttgtcttacagtaatatggcacatgtagcttacttttgagcatcccagtgaataatgtttggaacttttcttattacctaatagcatatagagaagagtgaagtcagctaaaaacagaaattttgaaaagccatcttcaggaaaatgtaggcccagatgctttcctccaccttttttgacaggctgccacatacagtttcaca

SEQ ID NO: 233 - DNA, 573 bp, Homo sapiens
  source 1..573: mol_type = genomic DNA
ataaatgaatgtgaaaggctatttagacctctgccttttcaccgtcctcccacctgccacaggctgggctcttgtgctagaaatgacttgctagctagacatcatggttcaggatctgagtcagaggaaaccacagtgcaaatttaattgccggggaagataacgggccttggtgccctccaagcgtcagctgagtttccaagaagccgggcagcgggcgcccgcgggttcgtctctggctcctcctccgccacagcagccgggggcccgggtcggaggcggcgggggccgagcgcccggcctcgcaagcccacggcccgctgggggtgccgtcccgcgccggggcggagcaggccccggcagcccagttcctcattctatcagcggtacaaggggctggtggcgccacaggcgctgggaccgcgggcggacaaggatgggtccgcgcggcgcggcgagcttgccccgaggccccggacctcggcggctgctcctccccgtcgtcctcccgctgctgctgctgctgttgttggcgccgccgggctcgggcgccggggccagccggccgcccca

SEQ ID NO: 234 - DNA, 2535 bp, Homo sapiens
  source 1..2535: mol_type = genomic DNA
ggcctcctccgcgcagtccctgagtcccgcaggccctgcgtccccgctgcacacccccgtccactcccgtggtccccggtccggcatggcgcgcgcggtggggcccgagcggaggctgctggccgtctacaccggcggcaccattggcatgcggagtgagctcggcgtgcttgtgcccgggacgggcctggctgccatcctgaggacactgcccatgttccatgacgaggagcacgcccgagcccgcggcctctctgaggacaccctggtgctaccgtgagtgtgggctcctcccagtcccggacagggcatggctgctgaggggcaccgatcctgaggctgggcactgctggccaggcccacgtgagccatttgctcacccctgtctctaacatcccctcagcttacagggctttaggactgaccagcagtcgccttccaccagagcctgaacctctgagggtgccccgtgcctggtcccaccttccctccccaccctcctcccacacccccagccaggctgcttcggcaagtgtgatgagggcgccccgtctagggatcctgtatatcaggagccagctggcccaggtggccttgcccccagcatagaggtccttccatttctcagctctgggcccagctccctgatgtcccccacagctgggggtgagctgggagttgccctcgtggtggctgaccaccacagccgccacaggcgagcctcctgcaagcatcctctcctgcctggggatggctggtcccagcccccctcttcgagctggtgtgggaagaagactgctgggagtggcccatcctgacctacgtccttgcctctgtggggagctccaggtggaaggggggccgggccccgtacctgggatgctgagaacttgctatgtgcggagcccttggcgtaggggccccagctctgccagaggggaacagagcgggtcagggcatttagagcaggaggaggtgcagagcgggagcctgctgttccgcctcctgctgtttctgtcccgcagcccggccagccgcaaccagaggattctctacaccgtgctggagtgccagcccctcttcgactccagtgacatgaccatcgctgagtgggtttgccttgcccagaccatcaagaggcactacgagcagtaccacggctttgtggtcatccacggcaccgacaccatggcctttgctgcctcgatgctgtccttcatgctggagaacctgcagaagactgtcatcctcactggggcccaggtgcccatccatgccctgtggagcgacggccgtgagaacctgctgggggcactgctcatggctggccagtatgtgatcccagaggtctgccttttcttccagaatcagctgtttcggggcaaccgggcaaccaaggtagacgctcggaggttcgcagctttctgctccccgaacctgctgcctctggccacagtgggtgctgacatcacaatcaacagggagctggtgcggaaggtggacgggaaggctgggctggtggtgcacagcagcatggagcaggacgtgggcctgctgcgcctctaccctgggatccctgccgccctggttcgggccttcttgcagcctcccctgaagggcgtggtcatggagaccttcggttcagggaacggacccaccaagcccgacctgctgcaggagctgcgggtggccaccgagcgcggcctggtcatcgtcaactgtacccactgcctccagggggctgtgaccacagactatgcagctggcatggccatggcgggagccggcgtcatctcaggcttcgacatgacatcggaggccgccctggccaagctatcgtatgtgctgggccagccagggctgagcctggatgtcaggaaggagctgctgaccaaggaccttcggggggagatgacgccaccctcggtggaagagcgccggccctcactgcagggcaacacgctgggcggtggggtctcctggctcctcagtctgagcggcagccaggaggcagatgccctgcggaatgccctggtgcccagcctggcctgtgctgctgcccacgccggtgacgtggaggcgctgcaggcgcttgtggagctgggcagtgacctgggcctggtggactttaacggccaaaccccactgcacgcggccgcccggggaggccacacagaggcagtcaccatgctgctgcagagaggtgtggacgtgaacacccgggacacggatggcttcagcccgctgctgctggccgtgcggggcaggcatccgggtgtcattgggttgctgcgggaagccggggcctccctgtccacccaggagctggaggaagcagggacggagctgtgcaggctggcatacagggccgacctcgaaggcctgcaggtgtggtggcaggcaggggctgacctggggcagccgggctatgacgggcacagcgccctgcacgtcgcagaggcagccgggaacctggcagtggtggcctttctacagagcctggagggtgcggttggtgcccaggccccatgccca

SEQ ID NO: 235 - DNA, 1844 bp, Homo sapiens
  source 1..1844: mol_type = genomic DNA
cccgcaggccctgcgtccccgctgcacacccccgtccactcccgtggtccccggtccggcatggcgcgcgcggtggggcccgagcggaggctgctggccgtctacaccggcggcaccattggcatgcggagtgagctcggcgtgcttgtgcccgggacgggcctggctgccatcctgaggacactgcccatgttccatgacgaggagcacgcccgagcccgcggcctctctgaggacaccctggtgctacccccggccagccgcaaccagaggattctctacaccgtgctggagtgccagcccctcttcgactccagtgacatgaccatcgctgagtgggtttgccttgcccagaccatcaagaggcactacgagcagtaccacggctttgtggtcatccacggcaccgacaccatggcctttgctgcctcgatgctgtccttcatgctggagaacctgcagaagactgtcatcctcactggggcccaggtgcccatccatgccctgtggagcgacggccgtgagaacctgctgggggcactgctcatggctggccagtatgtgatcccagaggtctgccttttcttccagaatcagctgtttcggggcaaccgggcaaccaaggtagacgctcggaggttcgcagctttctgctccccgaacctgctgcctctggccacagtgggtgctgacatcacaatcaacagggagctggtgcggaaggtggacgggaaggctgggctggtggtgcacagcagcatggagcaggacgtgggcctgctgcgcctctaccctgggatccctgccgccctggttcgggccttcttgcagcctcccctgaagggcgtggtcatggagaccttcggttcagggaacggacccaccaagcccgacctgctgcaggagctgcgggtggccaccgagcgcggcctggtcatcgtcaactgtacccactgcctccagggggctgtgaccacagactatgcagctggcatggccatggcgggagccggcgtcatctcaggcttcgacatgacatcggaggccgccctggccaagctatcgtatgtgctgggccagccagggctgagcctggatgtcaggaaggagctgctgaccaaggaccttcggggggagatgacgccaccctcggtggaagagcgccggccctcactgcagggcaacacgctgggcggtggggtctcctggctcctcagtctgagcggcagccaggaggcagatgccctgcggaatgccctggtgcccagcctggcctgtgctgctgcccacgccggtgacgtggaggcgctgcaggcgcttgtggagctgggcagtgacctgggcctggtggactttaacggccaaaccccactgcacgcggccgcccggggaggccacacagaggcagtcaccatgctgctgcagagaggtgtggacgtgaacacccgggacacggatggcttcagcccgctgctgctggccgtgcggggcaggcatccgggtgtcattgggttgctgcgggaagccggggcctccctgtccacccaggagctggaggaagcagggacggagctgtgcaggctggcatacagggccgacctcgaaggcctgcaggtgtggtggcaggcaggggctgacctggggcagccgggctatgacgggcacagcgccctgcacgtcgcagaggcagccgggaacctggcagtggtggcctttctacagagcctggagggtgcggttggtgcccaggccccatgcccagagccctcatgttttcaggaagtgctgcctggtgtctaacctgaaggcgtcctgctgcagtataagccattccttcctcccat

SEQ ID NO: 236 - DNA, 467 bp, Homo sapiens
  source 1..467: mol_type = genomic DNA
gcggccgcccggggaggccacacagaggcagtcaccatgctgctgcagagaggtgtggacgtgaacacccgggacacggatggcttcagcccgctgctgctggccgtgcggggcaggcatccgggtgtcattgggttgctgcgggaagccggggcctccctgtccacccaggagctggaggaagcagggacggagctgtgcaggctggcatacagggccgacctcgaaggcctgcaggtgtggtggcaggcaggggctgacctggggcagccgggctatgacgggcacagcgccctgcacgtcgcagaggcagccgggaacctggcagtggtggcctttctacagagcctggagggtgcggttggtgcccaggccccatgcccagagccctcatgttttcaggaagtgctgcctggtgtctaacctgaaggcgtcctgctgcagtataagccattccttcctcccat

SEQ ID NO: 237 - DNA, 2031 bp, Homo sapiens
  source 1..2031: mol_type = genomic DNA
cgccccgggcctcctccgcgcagtccctgagtcccgcaggccctgcgtccccgctgcacacccccgtccactcccgtggtccccggtccggcatggcgcgcgcggtggggcccgagcggaggctgctggccgtctacaccggcggcaccattggcatgcggagtgagctcggcgtgcttgtgcccgggacgggcctggctgccatcctgaggacactgcccatgttccatgacgaggagcacgcccgagcccgcggcctctctgaggacaccctggtgctacccccggccagccgcaaccagaggattctctacaccgtgctggagtgccagcccctcttcgactccagtgacatgaccatcgctgagtgggtttgccttgcccagaccatcaagaggcactacgagcagtaccacggctttgtggtcatccacggcaccgacaccatggcctttgctgcctcgatgctgtccttcatgctggagaacctgcagaagactgtcatcctcactggggcccaggtgcccatccatgccctgtggagcgacggccgtgagaacctgctgggggcactgctcatggctggccagtatgtgatcccagaggtctgccttttcttccagaatcagctgtttcggggcaaccgggcaaccaaggtagacgctcggaggttcgcagctttctgctccccgaacctgctgcctctggccacagtgggtgctgacatcacaatcaacagggagctggtgcggaaggtggacgggaaggctgggctggtggtgcacagcagcatggagcaggacgtgggcctgctgcgcctctaccctgggatccctgccgccctggttcgggccttcttgcagcctcccctgaagggcgtggtcatggagaccttcggttcagggaacggacccaccaagcccgacctgctgcaggagctgcgggtggccaccgagcgcggcctggtcatcgtcaactgtacccactgcctccagggggctgtgaccacagactatgcagctggcatggccatggcgggagccggcgtcatctcaggcttcgacatgacatcggaggccgccctggccaagctatcgtatgtgctgggccagccagggctgagcctggatgtcaggaaggagctgctgaccaaggaccttcggggggagatgacgccaccctcggtggaagagcgccggccctcactgcagggcaacacgctgggcggtggggtctcctggctcctcagtctgagcggcagccaggaggcagatgccctgcggaatgccctggtgcccagcctggcctgtgctgctgcccacgccggtgacgtggaggcgctgcaggcgcttgtggagctgggcagtgacctgggcctggtggactttaacggccaaaccccactgcacgcggccgcccggggaggccacacagaggcagtcaccatgctgctgcagagaggtgtggacgtgaacacccgggacacggatggcttcagcccgctgctgctggccgtgcggggcaggcatccgggtgtcattgggttgctgcgggaagccggggcctccctgtccacccaggagctggaggaagcagggacggagctgtgcaggctggcatacagggccgacctcgaaggcctgcaggtgtggtggcaggcaggggctgacctggggcagccgggctatgacgggcacagcgccctgcacgtcgcagaggcagccgggaacctggcagtggtggcctttctacagagcctggagggtgcggttggtgcccaggccccatgcccagaagtgctgcctggtgtctaacctgaaggcgtcctgctgcagtataagccattccttcctcccatgacctgctggaggggtctcaggcatgaccccactgctggggctgcttcccagcctgctctcatgtaaagcctgaaggcctttgttgggcaggacggcaataaagtctctgacatcccctcaccaggtctgtacagcctggctctgagaggctctgtctgggtccgggactgtg

SEQ ID NO: 238 - DNA, 5431 bp, Homo sapiens
  source 1..5431: mol_type = genomic DNA
ttgtaacagaaaattaaaatatactccactcaagggaattctgtactttgccctttgggtaaagtctcatttacatttctaaacctttcttaagaaaatcgaatttcctttgatctctcttctgaattgcagaaatcagataaaaactacttggtgaaatgacttcttgtcacattgctgaagaacatatacaaaaggttgctatctttggaggaacccatgggaatgagctaaccggagtatttctggttaagcattggctagagaatggcgctgagattcagagaacagggctggaggtaaaaccatttattactaaccccagagcagtgaagaagtgtaccagatatattgactgtgacctgaatcgcatttttgaccttgaaaatcttggcaaaaaaatgtcagaagatttgccatatgaagtgagaagggctcaagaaataaatcatttatttggtccaaaagacagtgaagattcctatgacattatttttgaccttcacaacaccacctctaacatggggtgcactcttattcttgaggattccaggaataactttttaattcagatgtttcattacattaagacttctctggctccactaccctgctacgtttatctgattgagcatccttccctcaaatatgcgaccactcgttccatagccaagtatcctgtgggtatagaagttggtcctcagcctcaaggggttctgagagctgatatcttggatcaaatgagaaaaatgattaaacatgctcttgattttatacatcatttcaatgaaggaaaagaatttcctccctgcgccattgaggtctataaaattatagagaaagttgattacccccgggatgaaaatggagaaattgctgctatcatccatcctaatctgcaggatcaagactggaaaccactgcatcctggggatcccatgtttttaactcttgatgggaagacgatcccactgggcggagactgtaccgtgtaccccgtgtttgtgaatgaggccgcatattacgaaaagaaagaagcttttgcaaagacaactaaactaacgctcaatgcaaaaagtattcgctgctgtttacattagaaatcacttccagcttacatcttacacggtgtcttacaaattctgctagtctgtaagctccttaagagtagggttgtgccttattcaactgcatacatagctcctagcacagtgccttattcggtaggcatctaagcacatttcttaaattaattaatatatctttaaagatatcatattttatgtatgtagcttattcaaagaagtgtttcctatttctatatagtttattatacatgatacttgggtagctcaacattcttaataaacagcctttgtattcagaatataaaattgaaatagatatatataaagttatttgttttattgtgctttgccttactacacttcacggatactgtacttgtactttttttccaaattgaaggtttttggcaaccctgtgtctagaaagtctaacagtgccatgtttccaacagcatgtgctcactccttgtctctgtgtcaccctttgataatatttcaagcttttttatgatttatttattatatctgctatggtgatctgtgatcagtggcctttgatgttactgttgttaagtgttttggggcaccatgaatcgtgcccatgtgagactgcgaacttagtgaatgttgtgtgagttctaactgctctactgaccggccatttccttgtctctctccctgtcctctggcctccctgttccttgagacacaataattaataagtctacagcagactctgtgtgttcaagtgaaagaaagggtcatacttctagaaattaagcttagtaaggaaggcatgtcaaaagctgagacaggctgaaagctaggcctcttgcactggttagccaagttgtgaattcaaagaaaaggatcttgaagaaaattaaaaattctactccagtgcacacacacaaatgataagaaagcaaaacaaccttattgctgatatggagacagttttagtggtctggatagaagatcaaaccagccacacattaagccaaagcatgacccacagcaaggccctaactctcttcaattctgtgaaggctgagagaggtgaggaagctgcaggaagctgggagaggttggttcacaaggtttaaggaaagaagacagctctaaaacctacaagtggaaagcgaaccagcaagttgctgatgtggaagctgtagcaagttatccagaagatgtagctaaaatcattgacaaagatggctacactaaacaacggatcttcagtgtagttgaaacagccttctattggaagaagatgctatctaggactttcctagctagaggggagaaatgaatgcctagcttcaaagcttcaaaggacagcctgactctcttaagagctaacacagctggtgactttgggttaaagccaaagctcattaactgtttcaaaaatcctaaaactcttgttttttgttttttttttgagacggagtcttgctctgtcgtccaggctggagtgcagtggcgcaatctcggctcactgcaagctccgcctcccaggttcatgccattctcctgcctcagcctccccagtagctgagattacaggtgcctgccaccacgcccggctaattttttgcatttttttagtagagatggggtttcactctgctagccaggatggtctcgatctcctgacctcatgatccgcctgcctcggcctcccaaagtgctgggattacaggcatgagccaccacgcccggcccaaaaatcgtaggactctgaagactgatgctaaacctgctgtgtctgagctctataaatggaacaacaaagcctcgctggcagcacatctgtttgcggcatggtttactgtatattttaagcccactgttgagacctactgcttgggaaaaaaaaaaattcctttcaaaatactactgctgattgacaatacaccatgttacccaagagctctgctggagatgtgcgaagagattagcattgttttcgcgcctgctaccacgacatccagccgaagcccatggatcaaggcgtcattgtgactttcaaatctaactatttaagaaatacatttcaggctgggggaggggagaaaaaagaaaaaaaagaaaggaagaaaaaaatcatttcataaggctatagctgccatagatagtgattcctctgatggagctgggcaaagtaaacagaaaacctctggaaaggattcagcattccagatgccattaagaacattcaggatccgtgggaggagatcaaaatatcaacattaacaggagtttggaaaaagtgaattccaaccctcttggatgactctgaggaattcgagacttgagtaaaggaagtcatgcagatgtacagcaagagaatgagaagtggagcctgaagatgtaactgaactgctgcaatctcatgatcacacttgaatggatgaggagtcgcttcttataaatgagcaaaaaagtggtttcttggctgcaatcaactcttgttgcagatgctgtgaacactgttgaaatgacaaaggatttagaatattacgtaaacatagttgataaagcagcagcagggtttaagaggattgactcctattttgaaatgagttcggctgggagaagtggctcatgcctgtcgtcctagcactttgggaggccaaggcagacagagcacctgaggtaaggagttcgagaccagcctggccaacatggtgaaaccccctctctactaaaaataccaacatattagccaggcgtggtggcacgtgcctgtagtcccagctacttgggaggctgaggcagaaggatcacttgaacccaggaggcagaggttgcagtaagccaagactgcgccactgcactccagcctggtggacacagcaagcctccatctcaaaaaaaaaaaaaaaaaaaaaatgagttctactgtgaataaaatgttattaaacagcatttcatgctacagagaaatctttcacgaaaggaagagtcaatcaatgcagcgaacttgttgttttattttaagaaattgtcacggccatcccaaccctcagtgcccaaccaccctgatcaggcagccatcatcaaggcaaggccctccaccagcaaaaagatcatgaattgctgaaagctcaaatgatggttagcttttttagcaataaagcatttttaatgaaggaatgtacatgttttagatataatgctattacacatttaacatactacatatagtgtgagcataacttttacacgtactggaaaatcaaaaaatatgtgtggctcatctgttataatgtttgttttattgtggtgatctggagccaaggctgaaatatctctgaggtatgcctgtaatgtataagtgctagtagaaatgagttgtgcagaattgctatttttttcaatttttatatttgggttaatggtaatatactaagcgtccagtctataaacttcagcattcgttgcgaaatccagaggagacttttaagtgctgttttgtagatgaaatatgaaagagaaacaagggcttaatggtaaagatgacatatgactatattaagaaactgaatggccctttgtccacaaacagtaacccacacagcattgctactgtggcatgcccactgctctgcactgacctcatggagcagagaacctccttcagacacctcacgcaccccctgaggagctaatgtttcttcccaacatggaaaatttggaagaggcctattcttcacagctgtcacttctcattttgaaagaatatgcccacccttattcgcaggcaaggtgtgaggaggtctttgggctccagctgttgccagcagaggtggtgaaagtcaacaacagggcactggacacacatagaaatgtgacccacagctatggtttgcaaatacagtctttcaagaagtcctgccatgtcctaaatgcccaaaccccttgcctcccatgattcttctcctcaaaggaccttctgctggacgccgccccctccctctccagccccaccagggccctccccgccatcctcttaggccacagcagccaataaagagtgtttttattccatgatctgtacccccaatgaatccataatcatagtttcaaatgtatttaccaaaaatactaacattatctggaatgaatgaatgaatgaatgaatgaataaatattatatatttatacattttcattcttccaaagtgaaccccactatgccagttttactccatactcagtgttctggaaagcccatattctttctaaatttttcagcatttttttctatttttgtactttaccaaaattatttacattggaataaactctcttccttctgaattctgtagtaaaaa

SEQ ID NO: 239 - DNA, 1350 bp, Homo sapiens
  source 1..1350: mol_type = genomic DNA
gaaatgctctcctttttcctaataaagctttccacagaagacaaactctgtacacaaaaaacaagaaatcagataaaaactacttggtgaaatgacttcttgtcacattgctgaagaacatatacaaaaggttgctatctttggaggaacccatgggaatgagctaaccggagtatttctggttaagcattggctagagaatggcgctgagattcagagaacagggctggaggtaaaaccatttattactaaccccagagcagtgaagaagtgtaccagatatattgactgtgacctgaatcgcatttttgaccttgaaaatcttggcaaaaaaatgtcagaagatttgccatatgaagtgagaagggctcaagaaataaatcatttatttggtccaaaagacagtgaagattcctatgacattatttttgaccttcacaacaccacctctaacatggggtgcactcttattcttgaggattccaggaataactttttaattcagatgtttcattacattaagacttctctggctccactaccctgctacgtttatctgattgagcatccttccctcaaatatgcgaccactcgttccatagccaagtatcctgtgggtatagaagttggtcctcagcctcaaggggttctgagagctgatatcttggatcaaatgagaaaaatgattaaacatgctcttgattttatacatcatttcaatgaaggaaaagaatttcctccctgcgccattgaggtctataaaattatagagaaagttgattacccccgggatgaaaatggagaaattgctgctatcatccatcctaatctgcaggatcaagactggaaaccactgcatcctggggatcccatgtttttaactcttgatgggaagacgatcccactgggcggagactgtaccgtgtaccccgtgtttgtgaatgaggccgcatattacgaaaagaaagaagcttttgcaaagacaactaaactaacgctcaatgcaaaaagtattcgctgctgtttacattagaaatcacttccagcttacatcttacacggtgtcttacaaattctgctagtctgtaagctccttaagagtagggttgtgccttattcaactgcatacatagctcctagcacagtgccttattcggtaggcatctaagcacatttcttaaattaattaatatatctttaaagatatcatattttatgtatgtagcttattcaaagaagtgtttcctatttctatatagtttattatacatgatacttgggtagctcaacattcttaataaacagcctttgtattcagaatataaaattgaaatagatatatataaagtt

SEQ ID NO: 240 - DNA, 5818 bp, Homo sapiens
  source 1..5818: mol_type = genomic DNA
atgagtacagaaagagactcagaaacgacatttgacgaggattctcagcctaatgacgaagtggttccctacagtgatgatgaaacagaagatgaacttgatgaccaggggtctgctgttgaaccagaacaaaaccgagtcaacagggaagcagaggagaaccgggagccattcagaaaagaatgtacatggcaagtcaaagcaaacgatcgcaagtaccacgaacaacctcactttatgaacacaaaattcttgtgtattaaggagagtaaatatgcgaataatgcaattaaaacatacaagtacaacgcatttacctttataccaatgaatctgtttgagcagtttaagagagcagccaatttatatttcctggctcttcttatcttacaggcagttcctcaaatctctaccctggcttggtacaccacactagtgcccctgcttgtggtgctgggcgtcactgcaatcaaagacctggtggacgatgtggctcgccataaaatggataaggaaatcaacaataggacgtgtgaagtcattaaggatggcaggttcaaagttgctaagtggaaagaaattcaagttggagacgtcattcgtctgaaaaaaaatgattttgttccagctgacattctcctgctgtctagctctgagcctaacagcctctgctatgtggaaacagcagaactggatggagaaaccaatttaaaatttaagatgtcacttgaaatcacagaccagtacctccaaagagaagatacattggctacatttgatggttttattgaatgtgaagaacccaataacagactagataagtttacaggaacactattttggagaaacacaagttttcctttggatgctgataaaattttgttacgtggctgtgtaattaggaacaccgatttctgccacggcttagtcatttttgcaggtgctgacactaaaataatgaagaatagtgggaaaaccagatttaaaagaactaaaattgattacttgatgaactacatggtttacacgatctttgttgttcttattctgctttctgctggtcttgccatcggccatgcttattgggaagcacaggtgggcaattcctcttggtacctctatgatggagaagacgatacaccctcctaccgtggattcctcattttctggggctatatcattgttctcaacaccatggtacccatctctctctatgtcagcgtggaagtgattcgtcttggacagagtcacttcatcaactgggacctgcaaatgtactatgctgagaaggacacacccgcaaaagctagaaccaccacactcaatgaacagctcgggcagatccattatatcttctctgataagacggggacactcacacaaaatatcatgacctttaaaaagtgctgtatcaacgggcagatatatggggaccatcgggatgcctctcaacacaaccacaacaaaatagagcaagttgattttagctggaatacatatgctgatgggaagcttgcattttatgaccactatcttattgagcaaatccagtcagggaaagagccagaagtacgacagttcttcttcttgctcgcagtttgccacacagtcatggtggataggactgatggtcagctcaactaccaggcagcctctcccgatgaaggtgccctggtaaacgctgccaggaactttggctttgccttcctcgccaggacccagaacaccatcaccatcagtgaactgggcactgaaaggacttacaatgttcttgccattttggacttcaacagtgaccggaagcgaatgtctatcattgtaagaaccccagaaggcaatatcaagctttactgtaaaggtgctgacactgttatttatgaacggttacatcgaatgaatcctactaagcaagaaacacaggatgccctggatatctttgcaaatgaaactcttagaaccctatgcctttgctacaaggaaattgaagaaaaagaatttacagaatggaataaaaagtttatggctgccagtgtggcctccaccaaccgggacgaagctctggataaagtatatgaggagattgaaaaagacttaattctcctgggagctacagctattgaagacaagctacaggatggagttccagaaaccatttcaaaacttgcaaaagctgacattaagatctgggtgcttactggagacaaaaaggaaactgctgaaaatataggatttgcttgtgaacttctgactgaagacaccaccatctgctatggggaggatattaattctcttcttcatgcaaggatggaaaaccagaggaatagaggtggcgtctacgcaaagtttgcacctcctgtgcaggaatctttttttccacccggtggaaaccgtgccttaatcatcactggttcttggttgaatgaaattcttctcgagaaaaagaccaagagaaataagattctgaagctgaagttcccaagaacagaagaagaaagacggatgcggacccaaagtaaaaggaggctagaagctaagaaagagcagcggcagaaaaactttgtggacctggcctgcgagtgcagcgcagtcatctgctgccgcgtcacccccaagcagaaggccatggtggtggacctggtgaagaggtacaagaaagccatcacgctggccatcggagatggggccaatgacgtgaacatgatcaaaactgcccacattggcgttggaataagtggacaagaaggaatgcaagctgtcatgtcgagtgactattcctttgctcagttccgatatctgcagaggctactgctggtgcatggccgatggtcttacataaggatgtgcaagttcctacgatacttcttttacaaaaactttgcctttactttggttcatttctggtactccttcttcaatggctactctgcgcagactgcatacgaggattggttcatcaccctctacaacgtgctgtacaccagcctgcccgtgctcctcatggggctgctcgaccaggatgtgagtgacaaactgagcctccgattccctgggttatacatagtgggacaaagagacttactattcaactataagagattctttgtaagcttgttgcatggggtcctaacatcgatgatcctcttcttcatacctcttggagcttatctgcaaaccgtagggcaggatggagaggcaccttccgactaccagtcttttgccgtcaccattgcctctgctcttgtaataacagtcaatttccagattggcttggatacttcttattggacttttgtgaatgctttttcaatttttggaagcattgcactttattttggcatcatgtttgactttcatagtgctggaatacatgttctctttccatctgcatttcaatttacaggcacagcttcaaacgctctgagacagccatacatttggttaactatcatcctggctgttgctgtgtgcttactacccgtcgttgccattcgattcctgtcaatgaccatctggccatcagaaagtgataagatccagaagcatcgcaagcggttgaaggcggaggagcagtggcagcgacggcagcaggtgttccgccggggcgtgtcaacgcggcgctcggcctacgccttctcgcaccagcggggctacgcggacctcatctcctccgggcgcagcatccgcaagaagcgctcgccgcttgatgccatcgtggcggatggcaccgcggagtacaggcgcaccggggacagctgatcccttacccccaggctgggatgcggccacaaagcacgtctatttttttatgaaagactctcaggactttgtgtgtgtgtgtgaattgcattcatcacaaagatattgaagacaataaataatctttataacaaactccttgggttggactattaaacaatagcagagccaagaaataggacttttaaaagtcctattattcggccgggcgtggtggctcaggtctgtaatcccagcactttaggaggctgaggaggggagatcacctgaggccaggagttcgagaccagcccagccaacatggtgaaaccctgtctctaccataaattaaaaattagccgggcttggtggtgggcacccgtaatcccacctatttgagaagctgaagcagaagaatcgcttgaacctgggagatggaggttacagtgagccgagattgcgccactgcactccagcctgggtgacagagcaagactctgtcttaagaaaaatttaaaaataggccgggcatggtggctcatgcctgtcatcctagcactttgggaggccaaggcaggtggatcacttgaggtcaggagaccagcccggccaacatggtgaaaccccatctctactaaaaatacaaaaattagctggaaatcgcttgaacctgggaggtggaggttccagtgagccgagatcgtggcactgcactccaacctgagcaacagagtgagacaccagctcaaaaaaaattttttaataataataaaagtcctattattcaactggttatgtacattatggttgaaagggaacgttttaatccagtctcaatccagggcaatagaattacaaagcatgttgtatttcagttcaaatggtattgtattataaaattacagttacattttcctttcggtgatcttcagcataatttcccagaggcccctttttcctccctataggccatcttattaacagattttaaaatttatagtaatgacaaatgacttatcagtgttcatcatctgaaagctaagtggttcgttcaatcactttttcaaagttgatagtagattgcatggtttcatgtttcctcatattggtttattaattctatttaatcaaggaaaataacttcagattccataaagtttcagtttatttttagtttactactaggtgagatagcacattacatacttttactatcaaatattattttagcagcttcccatagtaccaaatgatttgattccctactctcattttttaaagcatataaatatttatgggcttaaaaagggggtttttaaaaactgaggatatcagtaataaattgcagaatattttgcaaagctttcttttggaaagcaaacttttgtgcctgcctatatgcaaagtattttatcagggacttgaacaaagacctcactctttttcacttgtcttatgtcgagagaaaaggttattggcagccacattcctaagactggggaatggtgtgtccttttaaatttgaagataactttaggtaattatggaaactcctcaaagaggagaaagtaatttttttccagacatttttctcattctgtgtctttcacacactagtttccatagttcgagaattctgttttttaccattgggctgtgaatgttcacaatatcagtcctgttgaattcctatgaggtaatcacaatgtgtatatgttcattttctaggtatgataaaagaatgtatggctttttattctgtggaagtaaaatcctgaacgtttacaacttttccttaacttgtaaataaaaaattgtaagttttttctttttttacagaaaacttagcttgtgtaattctgttagtttcagatttctctcctgtttttgcaaattgtgggaaagattgacaatgcaaatgtgtcaaagacatactgttgggtgcaatattaacaattttaaatgcaaatttctttggataaattatttctatattctgtaaatctgagatttaatgtatattttgtttaaaaaaatgatttagtaaaatctttgaaaagtatgatcttctaaagtatttaaa

SEQ ID NO: 241 - DNA, 5935 bp, Homo sapiens
  source 1..5935: mol_type = genomic DNA
tggggccgggcgggcggcggcagcggccaggtgcgcagcgagcgctccgagcggcgcgcaccaggcggatgccccagccggggcccagcgaacgccaggtagttccaatttgccagcagaatgagtacagaaagagactcagaaacgacatttgacgaggattctcagcctaatgacgaagtggttccctacagtgatgatgaaacagaagatgaacttgatgaccaggggtctgctgttgaaccagaacaaaaccgagtcaacagggaagcagaggagaaccgggagccattcagaaaagaatgtacatggcaagtcaaagcaaacgatcgcaagtaccacgaacaacctcactttatgaacacaaaattcttgtgtattaaggagagtaaatatgcgaataatgcaattaaaacatacaagtacaacgcatttacctttataccaatgaatctgtttgagcagtttaagagagcagccaatttatatttcctggctcttcttatcttacaggcagttcctcaaatctctaccctggcttggtacaccacactagtgcccctgcttgtggtgctgggcgtcactgcaatcaaagacctggtggacgatgtggctcgccataaaatggataaggaaatcaacaataggacgtgtgaagtcattaaggatggcaggttcaaagttgctaagtggaaagaaattcaagttggagacgtcattcgtctgaaaaaaaatgattttgttccagctgacattctcctgctgtctagctctgagcctaacagcctctgctatgtggaaacagcagaactggatggagaaaccaatttaaaatttaagatgtcacttgaaatcacagaccagtacctccaaagagaagatacattggctacatttgatggttttattgaatgtgaagaacccaataacagactagataagtttacaggaacactattttggagaaacacaagttttcctttggatgctgataaaattttgttacgtggctgtgtaattaggaacaccgatttctgccacggcttagtcatttttgcaggtgctgacactaaaataatgaagaatagtgggaaaaccagatttaaaagaactaaaattgattacttgatgaactacatggtttacacgatctttgttgttcttattctgctttctgctggtcttgccatcggccatgcttattgggaagcacaggtgggcaattcctcttggtacctctatgatggagaagacgatacaccctcctaccgtggattcctcattttctggggctatatcattgttctcaacaccatggtacccatctctctctatgtcagcgtggaagtgattcgtcttggacagagtcacttcatcaactgggacctgcaaatgtactatgctgagaaggacacacccgcaaaagctagaaccaccacactcaatgaacagctcgggcagatccattatatcttctctgataagacggggacactcacacaaaatatcatgacctttaaaaagtgctgtatcaacgggcagatatatggggaccatcgggatgcctctcaacacaaccacaacaaaatagagcaagttgattttagctggaatacatatgctgatgggaagcttgcattttatgaccactatcttattgagcaaatccagtcagggaaagagccagaagtacgacagttcttcttcttgctcgcagtttgccacacagtcatggtggataggactgatggtcagctcaactaccaggcagcctctcccgatgaaggtgccctggtaaacgctgccaggaactttggctttgccttcctcgccaggacccagaacaccatcaccatcagtgaactgggcactgaaaggacttacaatgttcttgccattttggacttcaacagtgaccggaagcgaatgtctatcattgtaagaaccccagaaggcaatatcaagctttactgtaaaggtgctgacactgttatttatgaacggttacatcgaatgaatcctactaagcaagaaacacaggatgccctggatatctttgcaaatgaaactcttagaaccctatgcctttgctacaaggaaattgaagaaaaagaatttacagaatggaataaaaagtttatggctgccagtgtggcctccaccaaccgggacgaagctctggataaagtatatgaggagattgaaaaagacttaattctcctgggagctacagctattgaagacaagctacaggatggagttccagaaaccatttcaaaacttgcaaaagctgacattaagatctgggtgcttactggagacaaaaaggaaactgctgaaaatataggatttgcttgtgaacttctgactgaagacaccaccatctgctatggggaggatattaattctcttcttcatgcaaggatggaaaaccagaggaatagaggtggcgtctacgcaaagtttgcacctcctgtgcaggaatctttttttccacccggtggaaaccgtgccttaatcatcactggttcttggttgaatgaaattcttctcgagaaaaagaccaagagaaataagattctgaagctgaagttcccaagaacagaagaagaaagacggatgcggacccaaagtaaaaggaggctagaagctaagaaagagcagcggcagaaaaactttgtggacctggcctgcgagtgcagcgcagtcatctgctgccgcgtcacccccaagcagaaggccatggtggtggacctggtgaagaggtacaagaaagccatcacgctggccatcggagatggggccaatgacgtgaacatgatcaaaactgcccacattggcgttggaataagtggacaagaaggaatgcaagctgtcatgtcgagtgactattcctttgctcagttccgatatctgcagaggctactgctggtgcatggccgatggtcttacataaggatgtgcaagttcctacgatacttcttttacaaaaactttgcctttactttggttcatttctggtactccttcttcaatggctactctgcgcagactgcatacgaggattggttcatcaccctctacaacgtgctgtacaccagcctgcccgtgctcctcatggggctgctcgaccaggatgtgagtgacaaactgagcctccgattccctgggttatacatagtgggacaaagagacttactattcaactataagagattctttgtaagcttgttgcatggggtcctaacatcgatgatcctcttcttcatacctcttggagcttatctgcaaaccgtagggcaggatggagaggcaccttccgactaccagtcttttgccgtcaccattgcctctgctcttgtaataacagtcaatttccagattggcttggatacttcttattggacttttgtgaatgctttttcaatttttggaagcattgcactttattttggcatcatgtttgactttcatagtgctggaatacatgttctctttccatctgcatttcaatttacaggcacagcttcaaacgctctgagacagccatacatttggttaactatcatcctggctgttgctgtgtgcttactacccgtcgttgccattcgattcctgtcaatgaccatctggccatcagaaagtgataagatccagaagcatcgcaagcggttgaaggcggaggagcagtggcagcgacggcagcaggtgttccgccggggcgtgtcaacgcggcgctcggcctacgccttctcgcaccagcggggctacgcggacctcatctcctccgggcgcagcatccgcaagaagcgctcgccgcttgatgccatcgtggcggatggcaccgcggagtacaggcgcaccggggacagctgatcccttacccccaggctgggatgcggccacaaagcacgtctatttttttatgaaagactctcaggactttgtgtgtgtgtgtgaattgcattcatcacaaagatattgaagacaataaataatctttataacaaactccttgggttggactattaaacaatagcagagccaagaaataggacttttaaaagtcctattattcggccgggcgtggtggctcaggtctgtaatcccagcactttaggaggctgaggaggggagatcacctgaggccaggagttcgagaccagcccagccaacatggtgaaaccctgtctctaccataaattaaaaattagccgggcttggtggtgggcacccgtaatcccacctatttgagaagctgaagcagaagaatcgcttgaacctgggagatggaggttacagtgagccgagattgcgccactgcactccagcctgggtgacagagcaagactctgtcttaagaaaaatttaaaaataggccgggcatggtggctcatgcctgtcatcctagcactttgggaggccaaggcaggtggatcacttgaggtcaggagaccagcccggccaacatggtgaaaccccatctctactaaaaatacaaaaattagctggaaatcgcttgaacctgggaggtggaggttccagtgagccgagatcgtggcactgcactccaacctgagcaacagagtgagacaccagctcaaaaaaaattttttaataataataaaagtcctattattcaactggttatgtacattatggttgaaagggaacgttttaatccagtctcaatccagggcaatagaattacaaagcatgttgtatttcagttcaaatggtattgtattataaaattacagttacattttcctttcggtgatcttcagcataatttcccagaggcccctttttcctccctataggccatcttattaacagattttaaaatttatagtaatgacaaatgacttatcagtgttcatcatctgaaagctaagtggttcgttcaatcactttttcaaagttgatagtagattgcatggtttcatgtttcctcatattggtttattaattctatttaatcaaggaaaataacttcagattccataaagtttcagtttatttttagtttactactaggtgagatagcacattacatacttttactatcaaatattattttagcagcttcccatagtaccaaatgatttgattccctactctcattttttaaagcatataaatatttatgggcttaaaaagggggtttttaaaaactgaggatatcagtaataaattgcagaatattttgcaaagctttcttttggaaagcaaacttttgtgcctgcctatatgcaaagtattttatcagggacttgaacaaagacctcactctttttcacttgtcttatgtcgagagaaaaggttattggcagccacattcctaagactggggaatggtgtgtccttttaaatttgaagataactttaggtaattatggaaactcctcaaagaggagaaagtaatttttttccagacatttttctcattctgtgtctttcacacactagtttccatagttcgagaattctgttttttaccattgggctgtgaatgttcacaatatcagtcctgttgaattcctatgaggtaatcacaatgtgtatatgttcattttctaggtatgataaaagaatgtatggctttttattctgtggaagtaaaatcctgaacgtttacaacttttccttaacttgtaaataaaaaattgtaagttttttctttttttacagaaaacttagcttgtgtaattctgttagtttcagatttctctcctgtttttgcaaattgtgggaaagattgacaatgcaaatgtgtcaaagacatactgttgggtgcaatattaacaattttaaatgcaaatttctttggataaattatttctatattctgtaaatctgagatttaatgtatattttgtttaaaaaaatgatttagtaaaatctttgaaaagtatgatcttctaaagtattt

SEQ ID NO: 242 - DNA, 6638 bp, Homo sapiens
  source 1..6638: mol_type = genomic DNA
ttcccggacccctgtttgctttagagccgagccgcgccgatgccctcacactctgcgcctcctctcccgggactttaacaccccgctctcctccaccgaccaggtgaccttttgctctgagccagatcagagaagaattcggtgtccgtgcgggacgatgcctgagcaggagagacagatcacagccagagaaggggccagtcggaaaatcttatctaagctttctttgcctacccgtgcctgggaaccagcaatgaagaagagttttgcttttgacaatgttggctatgaaggtggtctggatggcctgggcccttcttctcaggtggccaccagcacagtcaggatcttgggcatgacttgccagtcatgtgtgaagtccattgaggacaggatttccaatttgaaaggcatcatcagcatgaaggtttccctggaacaaggcagtgccactgtgaaatatgtgccatcggttgtgtgcctgcaacaggtttgccatcaaattggggacatgggcttcgaggccagcattgcagaaggaaaggcagcctcctggccctcaaggtccttgcctgcccaggaggctgtggtcaagctccgggtggagggcatgacctgccagtcctgtgtcagctccattgaaggcaaggtccggaaactgcaaggagtagtgagagtcaaagtctcactcagcaaccaagaggccgtcatcacttatcagccttatctcattcagcccgaagacctcagggaccatgtaaatgacatgggatttgaagctgccatcaagagcaaagtggctcccttaagcctgggaccaattgatattgagcggttacaaagcactaacccaaagagacctttatcttctgctaaccagaattttaataattctgagaccttggggcaccaaggaagccatgtggtcaccctccaactgagaatagatggaatgcattgtaagtcttgcgtcttgaatattgaagaaaatattggccagctcctaggggttcaaagtattcaagtgtccttggagaacaaaactgcccaagtaaagtatgacccttcttgtaccagcccagtggctctgcagagggctatcgaggcacttccacctgggaattttaaagtttctcttcctgatggagccgaagggagtgggacagatcacaggtcttccagttctcattcccctggctccccaccgagaaaccaggtccagggcacatgcagtaccactctgattgccattgccggcatgacctgtgcatcctgtgtccattccattgaaggcatgatctcccaactggaaggggtgcagcaaatatcggtgtctttggccgaagggactgcaacagttctttataatccctctgtaattagcccagaagaactcagagctgctatagaagacatgggatttgaggcttcagtcgtttctgaaagctgttctactaaccctcttggaaaccacagtgctgggaattccatggtgcaaactacagatggtacacctacatctgtgcaggaagtggctccccacactgggaggctccctgcaaaccatgccccggacatcttggcaaagtccccacaatcaaccagagcagtggcaccgcagaagtgcttcttacagatcaaaggcatgacctgtgcatcctgtgtgtctaacatagaaaggaatctgcagaaagaagctggtgttctctccgtgttggttgccttgatggcaggaaaggcagagatcaagtatgacccagaggtcatccagcccctcgagatagctcagttcatccaggacctgggttttgaggcagcagtcatggaggactacgcaggctccgatggcaacattgagctgacaatcacagggatgacctgcgcgtcctgtgtccacaacatagagtccaaactcacgaggacaaatggcatcacttatgcctccgttgcccttgccaccagcaaagcccttgttaagtttgacccggaaattatcggtccacgggatattatcaaaattattgaggaaattggctttcatgcttccctggcccagagaaaccccaacgctcatcacttggaccacaagatggaaataaagcagtggaagaagtctttcctgtgcagcctggtgtttggcatccctgtcatggccttaatgatctatatgctgatacccagcaacgagccccaccagtccatggtcctggaccacaacatcattccaggactgtccattctaaatctcatcttctttatcttgtgtacctttgtccagctcctcggtgggtggtacttctacgttcaggcctacaaatctctgagacacaggtcagccaacatggacgtgctcatcgtcctggccacaagcattgcttatgtttattctctggtcatcctggtggttgctgtggctgagaaggcggagaggagccctgtgacattcttcgacacgccccccatgctctttgtgttcattgccctgggccggtggctggaacacttggcaaagagcaaaacctcagaagccctggctaaactcatgtctctccaagccacagaagccaccgttgtgacccttggtgaggacaatttaatcatcagggaggagcaagtccccatggagctggtgcagcggggcgatatcgtcaaggtggtccctgggggaaagtttccagtggatgggaaagtcctggaaggcaataccatggctgatgagtccctcatcacaggagaagccatgccagtcactaagaaacccggaagcactgtaattgcggggtctataaatgcacatggctctgtgctcattaaagctacccacgtgggcaatgacaccactttggctcagattgtgaaactggtggaagaggctcagatgtcaaaggcacccattcagcagctggctgaccggtttagtggatattttgtcccatttatcatcatcatgtcaactttgacgttggtggtatggattgtaatcggttttatcgattttggtgttgttcagagatactttcctaaccccaacaagcacatctcccagacagaggtgatcatccggtttgctttccagacgtccatcacggtgctgtgcattgcctgcccctgctccctggggctggccacgcccacggctgtcatggtgggcaccggggtggccgcgcagaacggcatcctcatcaagggaggcaagcccctggagatggcgcacaagataaagactgtgatgtttgacaagactggcaccattacccatggcgtccccagggtcatgcgggtgctcctgctgggggatgtggccacactgcccctcaggaaggttctggctgtggtggggactgcggaggccagcagtgaacaccccttgggcgtggcagtcaccaaatactgtaaagaggaacttggaacagagaccttgggatactgcacggacttccaggcagtgccaggctgtggaattgggtgcaaagtcagcaacgtggaaggcatcctggcccacagtgagcgccctttgagtgcaccggccagtcacctgaatgaggctggcagccttcccgcagaaaaagatgcagtcccccagaccttctctgtgctgattggaaaccgtgagtggctgaggcgcaacggtttaaccatttctagcgatgtcagtgacgctatgacagaccacgagatgaaaggacagacagccatcctggtggctattgacggtgtgctctgtgggatgatcgcaatcgcagacgctgtcaagcaggaggctgccctggctgtgcacacgctgcagagcatgggtgtggacgtggttctgatcacgggggacaaccggaagacagccagagctattgccacccaggttggcatcaacaaagtctttgcagaggtgctgccttcgcacaaggtggccaaggtccaggagctccagaataaagggaagaaagtcgccatggtgggggatggggtcaatgactccccggccttggcccaggcagacatgggtgtggccattggcaccggcacggatgtggccatcgaggcagccgacgtcgtccttatcagaaatgatttgctggatgtggtggctagcattcacctttccaagaggactgtccgaaggatacgcatcaacctggtcctggcactgatttataacctggttgggatacccattgcagcaggtgtcttcatgcccatcggcattgtgctgcagccctggatgggctcagcggccatggcagcctcctctgtgtctgtggtgctctcatccctgcagctcaagtgctataagaagcctgacctggagaggtatgaggcacaggcgcatggccacatgaagcccctgacggcatcccaggtcagtgtgcacataggcatggatgacaggtggcgggactcccccagggccacaccatgggaccaggtcagctatgtcagccaggtgtcgctgtcctccctgacgtccgacaagccatctcggcacagcgctgcagcagacgatgatggggacaagtggtctctgctcctgaatggcagggatgaggagcagtacatctgatgacttcaggcaggcgggccggggcagggacttgcctccactcaccacaagctgagcaggacagccagcagcaggatgggctgagctagcctccagctttggggacttccgctccctggatatgtccagtcatcctgccctgcagcacgcggccttgtctgggtgcagctgggcttggcctggagaggacggccctgcctgcctcttggcctcacgggaccgtcagcatgggctttgtcttggactctagtccttggctggactgtagaaggtgagaggcgagtcaccctcctcacagacctctgcttggagtatttaggatgactgctgtgaaatggagaacagtttcatcaggaccaaaaaacctcactgggcctttccagagaactgcagacctcactgtcagggtctttctgatgacgcctgtctgtgtgcatcatgtttctgagaccacagtttacctcaggtgtgcctgttgctttcttcctgcatagtctgttcctttcttcgtacatagtctgttccttttctctcctgtgtgcttgtcagtggggacccctcgcaaccctgcctgtcacctgggagggtgggaccaatgtccttgtggtctttgctgctgctctcaggcgcttctccaatgctctggagtgtgcatttcagcttgaacctgcttcctggctcacacatccccagccagggagcttgccacactcttcttcaagttgaggagagttcttttttgcttaaagcccccttctccatggagtgttggcttctcaatagagtgttgttgctgaccagctggagtgagggcctcagagcctgacctgagagtccgtactcggcttcctgtggggtgtaggttctcgcgattcaggacgtccttccatatccctgcccagcctgtggtgcttgaaacgtttgccccatgggaaacgtatgtgtgcaggagcctccctgcacggcccaaggggcttcgttttcagtcttctgactgtcacctcgtggggttcagtagagaattcatgtgactagcgcctggccttgtgtggcttggaggaaatggtactgcccaaataggaggaaaacacagcctccctgagcctgcattctgcacgctgcccaggggcttcagaaaaggagtggccacagcaccccgaagggagcatctgtttacctggcagtggctctcagagcagcagaacgggttcagttttagactctgaagttggttgtgattgacagaaccctttgggagcaaactagtagagttggattaaattctgggtgaaacccttttctcccacacaaaatagttttagtgatttttttcattgtccattacttgccaggggcagttttagcagcacttttgatagattacgtctaatcctcccaaccaaccagcagggtagctattactgtccacattttacaggcaaggaaacaggctccaagaggctgaggactttgcccaggatgacatagccaatggacaagcagtgtctgtcagctgtgaaggcttcactcttattgtccttctaccttgaatagaagttttcctgataagaataaacgaggaaaaggtccttgcctcctggaagaacaaatctaccaggtgatctattcattgtttcaactcagaatgcacttgattcaggaggtcatctgaccttcaccttggatggttagtttcactttttacatatagtttttgcagggttttattttataaaatccaagcgcgctgttgattgtgttttccttgttttcagcccccccactccagcccgcagcacatttccgctgtccgtcagtaattgtgtcctctctttatgcttgcttggggaatgttgttttctgactaggctgatcattatctaaagaatctaattctgttgatttttaaaacttttaggaccataaacgttgtgttcatatatggacatggaaatatttatataattttatagaaaataaccttttagatggtcaaagtgtaaggagtttttttgtcagataatcatttctacttcaaaaacatttcatgcaatattagaataaagttcctgtcattcctcta

SEQ ID NO: 243 - DNA, 6016 bp, Homo sapiens
  source 1..6016: mol_type = genomic DNA
ttcccggacccctgtttgctttagagccgagccgcgccgatgccctcacactctgcgcctcctctcccgggactttaacaccccgctctcctccaccgaccaggtgaccttttgctctgagccagatcagagaagaattcggtgtccgtgcgggacgatgcctgagcaggagagacagatcacagccagagaaggggccagtcggaaaatcttatctaagctttctttgcctacccgtgcctgggaaccagcaatgaagaagagttttgcttttgacaatgttggctatgaaggtggtctggatggcctgggcccttcttctcaggtggccaccagcacagtcaggatcttgggcatgacttgccagtcatgtgtgaagtccattgaggacaggatttccaatttgaaaggcatcatcagcatgaaggtttccctggaacaaggcagtgccactgtgaaatatgtgccatcggttgtgtgcctgcaacaggtttgccatcaaattggggacatgggcttcgaggccagcattgcagaaggaaaggcagcctcctggccctcaaggtccttgcctgcccaggaggctgtggtcaagctccgggtggagggcatgacctgccagtcctgtgtcagctccattgaaggcaaggtccggaaactgcaaggagtagtgagagtcaaagtctcactcagcaaccaagaggccgtcatcacttatcagccttatctcattcagcccgaagacctcagggaccatgtaaatgacatgggatttgaagctgccatcaagagcaaagtggctcccttaagcctgggaccaattgatattgagcggttacaaagcactaacccaaagagacctttatcttctgctaaccagaattttaataattctgagaccttggggcaccaaggaagccatgtggtcaccctccaactgagaatagatggaatgcattgtaagtcttgcgtcttgaatattgaagaaaatattggccagctcctaggggttcaaagtattcaagtgtccttggagaacaaaactgcccaagtaaagtatgacccttcttgtaccagcccagtggctctgcagagggctatcgaggcacttccacctgggaattttaaagtttctcttcctgatggagccgaagggagtgggacagatcacaggtcttccagttctcattcccctggctccccaccgagaaaccaggtccagggcacatgcagtaccactctgattgccattgccggcatgacctgtgcatcctgtgtccattccattgaaggcatgatctcccaactggaaggggtgcagcaaatatcggtgtctttggccgaagggactgcaacagttctttataatccctctgtaattagcccagaagaactcagagctgctatagaagacatgggatttgaggcttcagtcgtttctgaaagctgttctactaaccctcttggaaaccacagtgctgggaattccatggtgcaaactacagatggtacacctacatctgtgcaggaagtggctccccacactgggaggctccctgcaaaccatgccccggacatcttggcaaagtccccacaatcaaccagagcagtggcaccgcagaagtgcttcttacagatcaaaggcatgacctgtgcatcctgtgtgtctaacatagaaaggaatctgcagaaagaagctggtgttctctccgtgttggttgccttgatggcaggaaaggcagagatcaagtatgacccagaggtcatccagcccctcgagatagctcagttcatccaggacctgggttttgaggcagcagtcatggaggactacgcaggctccgatggcaacattgagctgacaatcacagggatgacctgcgcgtcctgtgtccacaacatagagtccaaactcacgaggacaaatggcatcacttatgcctccgttgcccttgccaccagcaaagcccttgttaagtttgacccggaaattatcggtccacgggatattatcaaaattattgagagcaaaacctcagaagccctggctaaactcatgtctctccaagccacagaagccaccgttgtgacccttggtgaggacaatttaatcatcagggaggagcaagtccccatggagctggtgcagcggggcgatatcgtcaaggtggtccctgggggaaagtttccagtggatgggaaagtcctggaaggcaataccatggctgatgagtccctcatcacaggagaagccatgccagtcactaagaaacccggaagcactgtaattgcggggtctataaatgcacatggctctgtgctcattaaagctacccacgtgggcaatgacaccactttggctcagattgtgaaactggtggaagaggctcagatgtcaaagaaccccaacaagcacatctcccagacagaggtgatcatccggtttgctttccagacgtccatcacggtgctgtgcattgcctgcccctgctccctggggctggccacgcccacggctgtcatggtgggcaccggggtggccgcgcagaacggcatcctcatcaagggaggcaagcccctggagatggcgcacaagataaagactgtgatgtttgacaagactggcaccattacccatggcgtccccagggtcatgcgggtgctcctgctgggggatgtggccacactgcccctcaggaaggttctggctgtggtggggactgcggaggccagcagtgaacaccccttgggcgtggcagtcaccaaatactgtaaagaggaacttggaacagagaccttgggatactgcacggacttccaggcagtgccaggctgtggaattgggtgcaaagtcagcaacgtggaaggcatcctggcccacagtgagcgccctttgagtgcaccggccagtcacctgaatgaggctggcagccttcccgcagaaaaagatgcagtcccccagaccttctctgtgctgattggaaaccgtgagtggctgaggcgcaacggtttaaccatttctagcgatgtcagtgacgctatgacagaccacgagatgaaaggacagacagccatcctggtggctattgacggtgtgctctgtgggatgatcgcaatcgcagacgctgtcaagcaggaggctgccctggctgtgcacacgctgcagagcatgggtgtggacgtggttctgatcacgggggacaaccggaagacagccagagctattgccacccaggttggcatcaacaaagtctttgcagaggtgctgccttcgcacaaggtggccaaggtccaggagctccagaataaagggaagaaagtcgccatggtgggggatggggtcaatgactccccggccttggcccaggcagacatgggtgtggccattggcaccggcacggatgtggccatcgaggcagccgacgtcgtccttatcagaaatgatttgctggatgtggtggctagcattcacctttccaagaggactgtccgaaggatacgcatcaacctggtcctggcactgatttataacctggttgggatacccattgcagcaggtgtcttcatgcccatcggcattgtgctgcagccctggatgggctcagcggccatggcagcctcctctgtgtctgtggtgctctcatccctgcagctcaagtgctataagaagcctgacctggagaggtatgaggcacaggcgcatggccacatgaagcccctgacggcatcccaggtcagtgtgcacataggcatggatgacaggtggcgggactcccccagggccacaccatgggaccaggtcagctatgtcagccaggtgtcgctgtcctccctgacgtccgacaagccatctcggcacagcgctgcagcagacgatgatggggacaagtggtctctgctcctgaatggcagggatgaggagcagtacatctgatgacttcaggcaggcgggccggggcagggacttgcctccactcaccacaagctgagcaggacagccagcagcaggatgggctgagctagcctccagctttggggacttccgctccctggatatgtccagtcatcctgccctgcagcacgcggccttgtctgggtgcagctgggcttggcctggagaggacggccctgcctgcctcttggcctcacgggaccgtcagcatgggctttgtcttggactctagtccttggctggactgtagaaggtgagaggcgagtcaccctcctcacagacctctgcttggagtatttaggatgactgctgtgaaatggagaacagtttcatcaggaccaaaaaacctcactgggcctttccagagaactgcagacctcactgtcagggtctttctgatgacgcctgtctgtgtgcatcatgtttctgagaccacagtttacctcaggtgtgcctgttgctttcttcctgcatagtctgttcctttcttcgtacatagtctgttccttttctctcctgtgtgcttgtcagtggggacccctcgcaaccctgcctgtcacctgggagggtgggaccaatgtccttgtggtctttgctgctgctctcaggcgcttctccaatgctctggagtgtgcatttcagcttgaacctgcttcctggctcacacatccccagccagggagcttgccacactcttcttcaagttgaggagagttcttttttgcttaaagcccccttctccatggagtgttggcttctcaatagagtgttgttgctgaccagctggagtgagggcctcagagcctgacctgagagtccgtactcggcttcctgtggggtgtaggttctcgcgattcaggacgtccttccatatccctgcccagcctgtggtgcttgaaacgtttgccccatgggaaacgtatgtgtgcaggagcctccctgcacggcccaaggggcttcgttttcagtcttctgactgtcacctcgtggggttcagtagagaattcatgtgactagcgcctggccttgtgtggcttggaggaaatggtactgcccaaataggaggaaaacacagcctccctgagcctgcattctgcacgctgcccaggggcttcagaaaaggagtggccacagcaccccgaagggagcatctgtttacctggcagtggctctcagagcagcagaacgggttcagttttagactctgaagttggttgtgattgacagaaccctttgggagcaaactagtagagttggattaaattctgggtgaaacccttttctcccacacaaaatagttttagtgatttttttcattgtccattacttgccaggggcagttttagcagcacttttgatagattacgtctaatcctcccaaccaaccagcagggtagctattactgtccacattttacaggcaaggaaacaggctccaagaggctgaggactttgcccaggatgacatagccaatggacaagcagtgtctgtcagctgtgaaggcttcactcttattgtccttctaccttgaatagaagttttcctgataagaataaacgaggaaaaggtccttgcctcctggaagaacaaatctaccaggtgatctattcattgtttcaactcagaatgcacttgattcaggaggtcatctgaccttcaccttggatggttagtttcactttttacatatagtttttgcagggttttattttataaaatccaagcgcgctgttgattgtgttttccttgttttcagcccccccactccagcccgcagcacatttccgctgtccgtcagtaattgtgtcctctctttatgcttgcttggggaatgttgttttctgactaggctgatcattatctaaagaatctaattctgttgatttttaaaacttttaggaccataaacgttgtgttcatatatggacatggaaatatttatataattttatagaaaataaccttttagatggtcaaagtgtaaggagtttttttgtcagataatcatttctacttcaaaaacatttcatgcaatattagaataaagttcctgtcattcctct

SEQ ID NO: 244 - DNA, 6304 bp, Homo sapiens
  source 1..6304: mol_type = genomic DNA
ttcccggacccctgtttgctttagagccgagccgcgccgatgccctcacactctgcgcctcctctcccgggactttaacaccccgctctcctccaccgaccaggtgaccttttgctctgagccagatcagagaagaattcggtgtccgtgcgggacgatgcctgagcaggagagacagatcacagccagagaaggggccagtcggaaaatcttatctaagctttctttgcctacccgtgcctgggaaccagcaatgaagaagagttttgcttttgacaatgttggctatgaaggtggtctggatggcctgggcccttcttctcaggtggccaccagcacagtcaggatcttgggcatgacttgccagtcatgtgtgaagtccattgaggacaggatttccaatttgaaaggcatcatcagcatgaaggtttccctggaacaaggcagtgccactgtgaaatatgtgccatcggttgtgtgcctgcaacaggtttgccatcaaattggggacatgggcttcgaggccagcattgcagaaggaaaggcagcctcctggccctcaaggtccttgcctgcccaggaggctgtggtcaagctccgggtggagggcatgacctgccagtcctgtgtcagctccattgaaggcaaggtccggaaactgcaaggagtagtgagagtcaaagtctcactcagcaaccaagaggccgtcatcacttatcagccttatctcattcagcccgaagacctcagggaccatgtaaatgacatgggatttgaagctgccatcaagagcaaagtggctcccttaagcctgggaccaattgatattgagcggttacaaagcactaacccaaagagacctttatcttctgctaaccagaattttaataattctgagaccttggggcaccaaggaagccatgtggtcaccctccaactgagaatagatggaatgcattgcatgatctcccaactggaaggggtgcagcaaatatcggtgtctttggccgaagggactgcaacagttctttataatccctctgtaattagcccagaagaactcagagctgctatagaagacatgggatttgaggcttcagtcgtttctgaaagctgttctactaaccctcttggaaaccacagtgctgggaattccatggtgcaaactacagatggtacacctacatctgtgcaggaagtggctccccacactgggaggctccctgcaaaccatgccccggacatcttggcaaagtccccacaatcaaccagagcagtggcaccgcagaagtgcttcttacagatcaaaggcatgacctgtgcatcctgtgtgtctaacatagaaaggaatctgcagaaagaagctggtgttctctccgtgttggttgccttgatggcaggaaaggcagagatcaagtatgacccagaggtcatccagcccctcgagatagctcagttcatccaggacctgggttttgaggcagcagtcatggaggactacgcaggctccgatggcaacattgagctgacaatcacagggatgacctgcgcgtcctgtgtccacaacatagagtccaaactcacgaggacaaatggcatcacttatgcctccgttgcccttgccaccagcaaagcccttgttaagtttgacccggaaattatcggtccacgggatattatcaaaattattgaggaaattggctttcatgcttccctggcccagagaaaccccaacgctcatcacttggaccacaagatggaaataaagcagtggaagaagtctttcctgtgcagcctggtgtttggcatccctgtcatggccttaatgatctatatgctgatacccagcaacgagccccaccagtccatggtcctggaccacaacatcattccaggactgtccattctaaatctcatcttctttatcttgtgtacctttgtccagctcctcggtgggtggtacttctacgttcaggcctacaaatctctgagacacaggtcagccaacatggacgtgctcatcgtcctggccacaagcattgcttatgtttattctctggtcatcctggtggttgctgtggctgagaaggcggagaggagccctgtgacattcttcgacacgccccccatgctctttgtgttcattgccctgggccggtggctggaacacttggcaaagagcaaaacctcagaagccctggctaaactcatgtctctccaagccacagaagccaccgttgtgacccttggtgaggacaatttaatcatcagggaggagcaagtccccatggagctggtgcagcggggcgatatcgtcaaggtggtccctgggggaaagtttccagtggatgggaaagtcctggaaggcaataccatggctgatgagtccctcatcacaggagaagccatgccagtcactaagaaacccggaagcactgtaattgcggggtctataaatgcacatggctctgtgctcattaaagctacccacgtgggcaatgacaccactttggctcagattgtgaaactggtggaagaggctcagatgtcaaaggcacccattcagcagctggctgaccggtttagtggatattttgtcccatttatcatcatcatgtcaactttgacgttggtggtatggattgtaatcggttttatcgattttggtgttgttcagagatactttcctaaccccaacaagcacatctcccagacagaggtgatcatccggtttgctttccagacgtccatcacggtgctgtgcattgcctgcccctgctccctggggctggccacgcccacggctgtcatggtgggcaccggggtggccgcgcagaacggcatcctcatcaagggaggcaagcccctggagatggcgcacaagataaagactgtgatgtttgacaagactggcaccattacccatggcgtccccagggtcatgcgggtgctcctgctgggggatgtggccacactgcccctcaggaaggttctggctgtggtggggactgcggaggccagcagtgaacaccccttgggcgtggcagtcaccaaatactgtaaagaggaacttggaacagagaccttgggatactgcacggacttccaggcagtgccaggctgtggaattgggtgcaaagtcagcaacgtggaaggcatcctggcccacagtgagcgccctttgagtgcaccggccagtcacctgaatgaggctggcagccttcccgcagaaaaagatgcagtcccccagaccttctctgtgctgattggaaaccgtgagtggctgaggcgcaacggtttaaccatttctagcgatgtcagtgacgctatgacagaccacgagatgaaaggacagacagccatcctggtggctattgacggtgtgctctgtgggatgatcgcaatcgcagacgctgtcaagcaggaggctgccctggctgtgcacacgctgcagagcatgggtgtggacgtggttctgatcacgggggacaaccggaagacagccagagctattgccacccaggttggcatcaacaaagtctttgcagaggtgctgccttcgcacaaggtggccaaggtccaggagctccagaataaagggaagaaagtcgccatggtgggggatggggtcaatgactccccggccttggcccaggcagacatgggtgtggccattggcaccggcacggatgtggccatcgaggcagccgacgtcgtccttatcagaaatgatttgctggatgtggtggctagcattcacctttccaagaggactgtccgaaggatacgcatcaacctggtcctggcactgatttataacctggttgggatacccattgcagcaggtgtcttcatgcccatcggcattgtgctgcagccctggatgggctcagcggccatggcagcctcctctgtgtctgtggtgctctcatccctgcagctcaagtgctataagaagcctgacctggagaggtatgaggcacaggcgcatggccacatgaagcccctgacggcatcccaggtcagtgtgcacataggcatggatgacaggtggcgggactcccccagggccacaccatgggaccaggtcagctatgtcagccaggtgtcgctgtcctccctgacgtccgacaagccatctcggcacagcgctgcagcagacgatgatggggacaagtggtctctgctcctgaatggcagggatgaggagcagtacatctgatgacttcaggcaggcgggccggggcagggacttgcctccactcaccacaagctgagcaggacagccagcagcaggatgggctgagctagcctccagctttggggacttccgctccctggatatgtccagtcatcctgccctgcagcacgcggccttgtctgggtgcagctgggcttggcctggagaggacggccctgcctgcctcttggcctcacgggaccgtcagcatgggctttgtcttggactctagtccttggctggactgtagaaggtgagaggcgagtcaccctcctcacagacctctgcttggagtatttaggatgactgctgtgaaatggagaacagtttcatcaggaccaaaaaacctcactgggcctttccagagaactgcagacctcactgtcagggtctttctgatgacgcctgtctgtgtgcatcatgtttctgagaccacagtttacctcaggtgtgcctgttgctttcttcctgcatagtctgttcctttcttcgtacatagtctgttccttttctctcctgtgtgcttgtcagtggggacccctcgcaaccctgcctgtcacctgggagggtgggaccaatgtccttgtggtctttgctgctgctctcaggcgcttctccaatgctctggagtgtgcatttcagcttgaacctgcttcctggctcacacatccccagccagggagcttgccacactcttcttcaagttgaggagagttcttttttgcttaaagcccccttctccatggagtgttggcttctcaatagagtgttgttgctgaccagctggagtgagggcctcagagcctgacctgagagtccgtactcggcttcctgtggggtgtaggttctcgcgattcaggacgtccttccatatccctgcccagcctgtggtgcttgaaacgtttgccccatgggaaacgtatgtgtgcaggagcctccctgcacggcccaaggggcttcgttttcagtcttctgactgtcacctcgtggggttcagtagagaattcatgtgactagcgcctggccttgtgtggcttggaggaaatggtactgcccaaataggaggaaaacacagcctccctgagcctgcattctgcacgctgcccaggggcttcagaaaaggagtggccacagcaccccgaagggagcatctgtttacctggcagtggctctcagagcagcagaacgggttcagttttagactctgaagttggttgtgattgacagaaccctttgggagcaaactagtagagttggattaaattctgggtgaaacccttttctcccacacaaaatagttttagtgatttttttcattgtccattacttgccaggggcagttttagcagcacttttgatagattacgtctaatcctcccaaccaaccagcagggtagctattactgtccacattttacaggcaaggaaacaggctccaagaggctgaggactttgcccaggatgacatagccaatggacaagcagtgtctgtcagctgtgaaggcttcactcttattgtccttctaccttgaatagaagttttcctgataagaataaacgaggaaaaggtccttgcctcctggaagaacaaatctaccaggtgatctattcattgtttcaactcagaatgcacttgattcaggaggtcatctgaccttcaccttggatggttagtttcactttttacatatagtttttgcagggttttattttataaaatccaagcgcgctgttgattgtgttttccttgttttcagcccccccactccagcccgcagcacatttccgctgtccgtcagtaattgtgtcctctctttatgcttgcttggggaatgttgttttctgactaggctgatcattatctaaagaatctaattctgttgatttttaaaacttttaggaccataaacgttgtgttcatatatggacatggaaatatttatataattttatagaaaataaccttttagatggtcaaagtgtaaggagtttttttgtcagataatcatttctacttcaaaaacatttcatgcaatattagaataaagttcctgtcattcctct

SEQ ID NO: 245 - DNA, 3252 bp, Homo sapiens
  source 1..3252: mol_type = genomic DNA
cgctctcctccaccgaccaggtgaccttttgctctgagccagatcagagaagaattcggtgtccgtgcgggacgatgcctgagcaggagagacagatcacagccagagaaggggccagtcggaaaatcttatctaagctttctttgcctacccgtgcctgggaaccagcaatgaagaagagttttgcttttgacaatgttggctatgaaggtggtctggatggcctgggcccttcttctcaggtggccaccagcacagtcaggatcttgggcatgacttgccagtcatgtgtgaagtccattgaggacaggatttccaatttgaaaggcatcatcagcatgaaggtttccctggaacaaggcagtgccactgtgaaatatgtgccatcggttgtgtgcctgcaacaggtttgccatcaaattggggacatgggcttcgaggccagcattgcagaaggaaaggcagcctcctggccctcaaggtccttgcctgcccaggaggctgtggtcaagctccgggtggagggcatgacctgccagtcctgtgtcagctccattgaaggcaaggtccggaaactgcaaggagtagtgagagtcaaagtctcactcagcaaccaagaggccgtcatcacttatcagccttatctcattcagcccgaagacctcagggaccatgtaaatgacatgggatttgaagctgccatcaagagcaaagtggctcccttaagcctgggaccaattgatattgagcggttacaaagcactaacccaaagagacctttatcttctgctaaccagaattttaataattctgagaccttggggcaccaaggaagccatgtggtcaccctccaactgagaatagatggaatgcattgtaagtcttgcgtcttgaatattgaagaaaatattggccagctcctaggggttcaaagtattcaagtgtccttggagaacaaaactgcccaagtaaagtatgacccttcttgtaccagcccagtggctctgcagagggctatcgaggcacttccacctgggaattttaaagtttctcttcctgatggagccgaagggagtgggacagatcacaggtcttccagttctcattcccctggctccccaccgagaaaccaggtccagggcacatgcagtaccactctgattgccattgccggcatgacctgtgcatcctgtgtccattccattgaaggcatgatctcccaactggaaggggtgcagcaaatatcggtgtctttggccgaagggactgcaacagttctttataatccctctgtaattagcccagaagaactcagagctgctatagaagacatgggatttgaggcttcagtcgtttctggagaagccatgccagtcactaagaaacccggaagcactgtaattgcggggtctataaatgcacatggctctgtgctcattaaagctacccacgtgggcaatgacaccactttggctcagattgtgaaactggtggaagaggctcagatgtcaaaggcacccattcagcagctggctgaccggtttagtggatattttgtcccatttatcatcatcatgtcaactttgacgttggtggtatggattgtaatcggttttatcgattttggtgttgttcagagatactttcctaaccccaacaagcacatctcccagacagaggtgatcatccggtttgctttccagacgtccatcacggtgctgtgcattgcctgcccctgctccctggggctggccacgcccacggctgtcatggtgggcaccggggtggccgcgcagaacggcatcctcatcaagggaggcaagcccctggagatggcgcacaagataaagactgtgatgtttgacaagactggcaccattacccatggcgtccccagggtcatgcgggtgctcctgctgggggatgtggccacactgcccctcaggaaggttctggctgtggtggggactgcggaggccagcagtgaacaccccttgggcgtggcagtcaccaaatactgtaaagaggaacttggaacagagaccttgggatactgcacggacttccaggcagtgccaggctgtggaattgggtgcaaagtcagcaacgtggaaggcatcctggcccacagtgagcgccctttgagtgcaccggccagtcacctgaatgaggctggcagccttcccgcagaaaaagatgcagtcccccagaccttctctgtgctgattggaaaccgtgagtggctgaggcgcaacggtttaaccatttctagcgatgtcagtgacgctatgacagaccacgagatgaaaggacagacagccatcctggtggctattgacggtgtgctctgtgggatgatcgcaatcgcagacgctgtcaagcaggaggctgccctggctgtgcacacgctgcagagcatgggtgtggacgtggttctgatcacgggggacaaccggaagacagccagagctattgccacccaggttggcatcaacaaagtctttgcagaggtgctgccttcgcacaaggtggccaaggtccaggagctccagaataaagggaagaaagtcgccatggtgggggatggggtcaatgactccccggccttggcccaggcagacatgggtgtggccattggcaccggcacggatgtggccatcgaggcagccgacgtcgtccttatcagaaatgatttgctggatgtggtggctagcattcacctttccaagaggactgtccgaaggatacgcatcaacctggtcctggcactgatttataacctggttgggatacccattgcagcaggtgtcttcatgcccatcggcattgtgctgcagccctggatgggctcagcggccatggcagcctcctctgtgtctgtggtgctctcatccctgcagctcaagtgctataagaagcctgacctggagaggtatgaggcacaggcgcatggccacatgaagcccctgacggcatcccaggtcagtgtgcacataggcatggatgacaggtggcgggactcccccagggccacaccatgggaccaggtcagctatgtcagccaggtgtcgctgtcctccctgacgtccgacaagccatctcggcacagcgctgcagcagacgatgatggggacaagtggtctctgctcctgaatggcagggatgaggagcagtacatctgatgacttcaggcaggcgggccggggcagggacttgcctccactcaccacaagctgagcaggacagccagca

SEQ ID NO: 246 - DNA, 2325 bp, Homo sapiens
  source 1..2325: mol_type = genomic DNA
aggaaattggctttcatgcttccctggcccagagaaaccccaacgctcatcacttggaccacaagatggaaataaagcactcctcggtgggtggtacttctacgttcaggcctacaaatctctgagacacaggtcagccaacatggacgtgctcatcgtcctggccacaagcattgcttatgtttattctctggtcatcctggtggttgctgtggctgagaaggcggagaggagccctgtgacattcttcgacacgccccccatgctctttgtgttcattgccctgggccggtggctggaacacttggcaaagagcaaaacctcagaagccctggctaaactcatgtctctccaagccacagaagccaccgttgtgacccttggtgaggacaatttaatcatcagggaggagcaagtccccatggagctggtgcagcggggcgatatcgtcaaggtggtccctgggggaaagtttccagtggatgggaaagtcctggaaggcaataccatggctgatgagtccctcatcacaggagaagccatgccagtcactaagaaacccggaagcactgtaattgcggggtctataaatgcacatggctctgtgctcattaaagctacccacgtgggcaatgacaccactttggctcagattgtgaaactggtggaagaggctcagatgtcaaaggcacccattcagcagctggctgaccggtttagtggatattttgtcccatttatcatcatcatgtcaactttgacgttggtggtatggattgtaatcggttttatcgattttggtgttgttcagagatactttcctaaccccaacaagcacatctcccagacagaggtgatcatccggtttgctttccagacgtccatcacggtgctgtgcattgcctgcccctgctccctggggctggccacgcccacggctgtcatggtgggcaccggggtggccgcgcagaacggcatcctcatcaagggaggcaagcccctggagatggcgcacaaggaacttggaacagagaccttgggatactgcacggacttccaggcagtgccaggctgtggaattgggtgcaaagtcagcaacgtggaaggcatcctggcccacagtgagcgccctttgagtgcaccggccagtcacctgaatgaggctggcagccttcccgcagaaaaagatgcagtcccccagaccttctctgtgctgattggaaaccgtgagtggctgaggcgcaacggtttaaccatttctagcgatgtcagtgacgctatgacagaccacgagatgaaaggacagacagccatcctggtggctattgacggtgtgctctgtgggatgatcgcaatcgcagacgctgtcaagcaggaggctgccctggctgtgcacacgctgcagagcatgggtgtggacgtggttctgatcacgggggacaaccggaagacagccagagctattgccacccaggttggcatcaacaaagtctttgcagaggtgctgccttcgcacaaggtggccaaggtccaggagctccagaataaagggaagaaagtcgccatggtgggggatggggtcaatgactccccggccttggcccaggcagacatgggtgtggccattggcaccggcacggatgtggccatcgaggcagccgacgtcgtccttatcagaaatgatttgctggatgtggtggctagcattcacctttccaagaggactgtccgaaggatacgcatcaacctggtcctggcactgatttataacctggttgggatacccattgcagcaggtgtcttcatgcccatcggcattgtgctgcagccctggatgggctcagcggccatggcagcctcctctgtgtctgtggtgctctcatccctgcagctcaagtgctataagaagcctgacctggagaggtatgaggcacaggcgcatggccacatgaagcccctgacggcatcccaggtcagtgtgcacataggcatggatgacaggtggcgggactcccccagggccacaccatgggaccaggtcagctatgtcagccaggtgtcgctgtcctccctgacgtccgacaagccatctcggcacagcgctgcagcagacgatgatggggacaagtggtctctgctcctgaatggcagggatgaggagcagtacatctgatgacttcaggcaggcgggccggggcagggacttgcctccactcaccacaagctgagcaggacagccagcagcaggatgggctgagctagcctccagctttggggacttccgctccctggatatgtccagtcatcctgccctgcagcacgcgg

SEQ ID NO: 247 - DNA, 4340 bp, Homo sapiens
  source 1..4340: mol_type = genomic DNA
cgctctcctccaccgaccaggtgaccttttgctctgagccagatcagagaagaattcggtgtccgtgcgggacgatgcctgagcaggagagacagatcacagccagagaaggggccagtcggaaaatcttatctaagctttctttgcctacccgtgcctgggaaccagcaatgaagaagagttttgcttttgacaatgttggctatgaaggtggtctggatggcctgggcccttcttctcaggtggccaccagcacagtcaggatcttgggcatgacttgccagtcatgtgtgaagtccattgaggacaggatttccaatttgaaaggcatcatcagcatgaaggtttccctggaacaaggcagtgccactgtgaaatatgtgccatcggttgtgtgcctgcaacaggtttgccatcaaattggggacatgggcttcgaggccagcattgcagaaggaaaggcagcctcctggccctcaaggtccttgcctgcccaggaggctgtggtcaagctccgggtggagggcatgacctgccagtcctgtgtcagctccattgaaggcaaggtccggaaactgcaaggagtagtgagagtcaaagtctcactcagcaaccaagaggccgtcatcacttatcagccttatctcattcagcccgaagacctcagggaccatgtaaatgacatgggatttgaagctgccatcaagagcaaagtggctcccttaagcctgggaccaattgatattgagcggttacaaagcactaacccaaagagacctttatcttctgctaaccagaattttaataattctgagaccttggggcaccaaggaagccatgtggtcaccctccaactgagaatagatggaatgcattgtaagtcttgcgtcttgaatattgaagaaaatattggccagctcctaggggttcaaagtattcaagtgtccttggagaacaaaactgcccaagtaaagtatgacccttcttgtaccagcccagtggctctgcagagggctatcgaggcacttccacctgggaattttaaagtttctcttcctgatggagccgaagggagtgggacagatcacaggtcttccagttctcattcccctggctccccaccgagaaaccaggtccagggcacatgcagtaccactctgattgccattgccggcatgacctgtgcatcctgtgtccattccattgaaggcatgatctcccaactggaaggggtgcagcaaatatcggtgtctttggccgaagggactgcaacagttctttataatccctctgtaattagcccagaagaactcagagctgctatagaagacatgggatttgaggcttcagtcgtttctgaaagctgttctactaaccctcttggaaaccacagtgctgggaattccatggtgcaaactacagatggtacacctacatctgtgcaggaagtggctccccacactgggaggctccctgcaaaccatgccccggacatcttggcaaagtccccacaatcaaccagagcagtggcaccgcagaagtgcttcttacagatcaaaggcatgacctgtgcatcctgtgtgtctaacatagaaaggaatctgcagaaagaagctggtgttctctccgtgttggttgccttgatggcaggaaaggcagagatcaagtatgacccagaggtcatccagcccctcgagatagctcagttcatccaggacctgggttttgaggcagcagtcatggaggactacgcaggctccgatggcaacattgagctgacaatcacagggatgacctgcgcgtcctgtgtccacaacatagagtccaaactcacgaggacaaatggcatcacttatgcctccgttgcccttgccaccagcaaagcccttgttaagtttgacccggaaattatcggtccacgggatattatcaaaattattgaggaaattggctttcatgcttccctggcccagagaaaccccaacgctcatcacttggaccacaagatggaaataaagcagtggaagaagtctttcctgtgcagcctggtgtttggcatccctgtcatggccttaatgatctatatgctgatacccagcaacgagccccaccagtccatggtcctggaccacaacatcattccaggactgtccattctaaatctcatcttctttatcttgtgtacctttgtccagctcctcggtgggtggtacttctacgttcaggcctacaaatctctgagacacaggtcagccaacatggacgtgctcatcgtcctggccacaagcattgcttatgtttattctctggtcatcctggtggttgctgtggctgagaaggcggagaggagccctgtgacattcttcgacacgccccccatgctctttgtgttcattgccctgggccggtggctggaacacttggcaaagagcaaaacctcagaagccctggctaaactcatgtctctccaagccacagaagccaccgttgtgacccttggtgaggacaatttaatcatcagggaggagcaagtccccatggagctggtgcagcggggcgatatcgtcaaggtggtccctgggggaaagtttccagtggatgggaaagtcctggaaggcaataccatggctgatgagtccctcatcacaggagaagccatgccagtcactaagaaacccggaagcactgtaattgcggggtctataaatgcacatggctctgtgctcattaaagctacccacgtgggcaatgacaccactttggctcagattgtgaaactggtggaagaggctcagatgtcaaaggcacccattcagcagctggctgaccggtttagtggatattttgtcccatttatcatcatcatgtcaactttgacgttggtggtatggattgtaatcggttttatcgattttggtgttgttcagagatactttcctataaagactgtgatgtttgacaagactggcaccattacccatggcgtccccagggtcatgcgggtgctcctgctgggggatgtggccacactgcccctcaggaaggttctggctgtggtggggactgcggaggccagcagtgaacaccccttgggcgtggcagtcaccaaatactgtaaagaggaacttggaacagagaccttgggatactgcacggacttccaggcagtgccaggctgtggaattgggtgcaaagtcagcaacgtggaaggcatcctggcccacagtgagcgccctttgagtgcaccggccagtcacctgaatgaggctggcagccttcccgcagaaaaagatgcagtcccccagaccttctctgtgctgattggaaaccgtgagtggctgaggcgcaacggtttaaccatttctagcgatgtcagtgacgctatgacagaccacgagatgaaaggacagacagccatcctggtggctattgacggtgtgctctgtgggatgatcgcaatcgcagacgctgtcaagcaggaggctgccctggctgtgcacacgctgcagagcatgggtgtggacgtggttctgatcacgggggacaaccggaagacagccagagctattgccacccaggttggcatcaacaaagtctttgcagaggtgctgccttcgcacaaggtggccaaggtccaggagctccagaataaagggaagaaagtcgccatggtgggggatggggtcaatgactccccggccttggcccaggcagacatgggtgtggccattggcaccggcacggatgtggccatcgaggcagccgacgtcgtccttatcagaaatgatttgctggatgtggtggctagcattcacctttccaagaggactgtccgaaggatacgcatcaacctggtcctggcactgatttataacctggttgggatacccattgcagcaggtgtcttcatgcccatcggcattgtgctgcagccctggatgggctcagcggccatggcagcctcctctgtgtctgtggtgctctcatccctgcagctcaagtgctataagaagcctgacctggagaggtatgaggcacaggcgcatggccacatgaagcccctgacggcatcccaggtcagtgtgcacataggcatggatgacaggtggcgggactcccccagggccacaccatgggaccaggtcagctatgtcagccaggtgtcgctgtcctccctgacgtccgacaagccatctcggcacagcgctgcagcagacgatgatggggacaagtggtctctgctcctgaatggcagggatgaggagcagtacatctgatgacttcaggcaggcgggccggggcagggacttgcctccactcaccacaagctgagcaggaca

SEQ ID NO: 248 - DNA, 4308 bp, Homo sapiens
  source 1..4308: mol_type = genomic DNA
cgctctcctccaccgaccaggtgaccttttgctctgagccagatcagagaagaattcggtgtccgtgcgggacgatgcctgagcaggagagacagatcacagccagagaaggggccagtcggaaaatcttatctaagctttctttgcctacccgtgcctgggaaccagcaatgaagaagagttttgcttttgacaatgttggctatgaaggtggtctggatggcctgggcccttcttctcaggtggccaccagcacagtcaggatcttgggcatgacttgccagtcatgtgtgaagtccattgaggacaggatttccaatttgaaaggcatcatcagcatgaaggtttccctggaacaaggcagtgccactgtgaaatatgtgccatcggttgtgtgcctgcaacaggtttgccatcaaattggggacatgggcttcgaggccagcattgcagaaggaaaggcagcctcctggccctcaaggtccttgcctgcccaggaggctgtggtcaagctccgggtggagggcatgacctgccagtcctgtgtcagctccattgaaggcaaggtccggaaactgcaaggagtagtgagagtcaaagtctcactcagcaaccaagaggccgtcatcacttatcagccttatctcattcagcccgaagacctcagggaccatgtaaatgacatgggatttgaagctgccatcaagagcaaagtggctcccttaagcctgggaccaattgatattgagcggttacaaagcactaacccaaagagacctttatcttctgctaaccagaattttaataattctgagaccttggggcaccaaggaagccatgtggtcaccctccaactgagaatagatggaatgcattgtaagtcttgcgtcttgaatattgaagaaaatattggccagctcctaggggttcaaagtattcaagtgtccttggagaacaaaactgcccaagtaaagtatgacccttcttgtaccagcccagtggctctgcagagggctatcgaggcacttccacctgggaattttaaagtttctcttcctgatggagccgaagggagtgggacagatcacaggtcttccagttctcattcccctggctccccaccgagaaaccaggtccagggcacatgcagtaccactctgattgccattgccggcatgacctgtgcatcctgtgtccattccattgaaggcatgatctcccaactggaaggggtgcagcaaatatcggtgtctttggccgaagggactgcaacagttctttataatccctctgtaattagcccagaagaactcagagctgctatagaagacatgggatttgaggcttcagtcgtttctgaaagctgttctactaaccctcttggaaaccacagtgctgggaattccatggtgcaaactacagatggtacacctacatctgtgcaggaagtggctccccacactgggaggctccctgcaaaccatgccccggacatcttggcaaagtccccacaatcaaccagagcagtggcaccgcagaagtgcttcttacagatcaaaggcatgacctgtgcatcctgtgtgtctaacatagaaaggaatctgcagaaagaagctggtgttctctccgtgttggttgccttgatggcaggaaaggcagagatcaagtatgacccagaggtcatccagcccctcgagatagctcagttcatccaggacctgggttttgaggcagcagtcatggaggactacgcaggctccgatggcaacattgagctgacaatcacagggatgacctgcgcgtcctgtgtccacaacatagagtccaaactcacgaggacaaatggcatcacttatgcctccgttgcccttgccaccagcaaagcccttgttaagtttgacccggaaattatcggtccacgggatattatcaaaattattgaggaaattggctttcatgcttccctggcccagagaaaccccaacgctcatcacttggaccacaagatggaaataaagcagtggaagaagtctttcctgtgcagcctggtgtttggcatccctgtcatggccttaatgatctatatgctgatacccagcaacgagccccaccagtccatggtcctggaccacaacatcattccaggactgtccattctaaatctcatcttctttatcttgtgtacctttgtccagagcaaaacctcagaagccctggctaaactcatgtctctccaagccacagaagccaccgttgtgacccttggtgaggacaatttaatcatcagggaggagcaagtccccatggagctggtgcagcggggcgatatcgtcaaggtggtccctgggggaaagtttccagtggatgggaaagtcctggaaggcaataccatggctgatgagtccctcatcacaggagaagccatgccagtcactaagaaacccggaagcactgtaattgcggggtctataaatgcacatggctctgtgctcattaaagctacccacgtgggcaatgacaccactttggctcagattgtgaaactggtggaagaggctcagatgtcaaaggcacccattcagcagctggctgaccggtttagtggatattttgtcccatttatcatcatcatgtcaactttgacgttggtggtatggattgtaatcggttttatcgattttggtgttgttcagagatactttcctaaccccaacaagcacatctcccagacagaggtgatcatccggtttgctttccagacgtccatcacggtgctgtgcattgcctgcccctgctccctggggctggccacgcccacggctgtcatggtgggcaccggggtggccgcgcagaacggcatcctcatcaagggaggcaagcccctggagatggcgcacaagataaagactgtgatgtttgacaagactggcaccattacccatggcgtccccagggtcatgcgggtgctcctgctgggggatgtggccacactgcccctcaggaaggttctggctgtggtggggactgcggaggccagcagtgaacaccccttgggcgtggcagtcaccaaatactgtaaagaggaacttggaacagagaccttgggatactgcacggacttccaggcagtgccaggctgtggaattgggtgcaaagtcagcaacgtggaaggcatcctggcccacagtgagcgccctttgagtgcaccggccagtcacctgaatgaggctggcagccttcccgcagaaaaagatgcagtcccccagaccttctctgtgctgattggaaaccgtgagtggctgaggcgcaacggtttaaccatttctagcgatgtcagtgacgctatgacagaccacgagatgaaaggacagacagccatcctggtggctattgacggtgtgctctgtgggatgatcgcaatcgcagacgctgtcaagcaggaggctgccctggctgtgcacacgctgcagagcatgggtgtggacgtggttctgatcacgggggacaaccggaagacagccagagctattgccacccaggttggcatcaacaaagtctttgcagaggtgctgccttcgcacaaggtggccaaggtccaggagctccagaataaagggaagaaagtcgccatggtgggggatggggtcaatgactccccggccttggcccaggcagacatgggtgtggccattggcaccggcacggatgtggccatcgaggcagccgacgtcgtccttatcagaaatgatttgctggatgtggtggctagcattcacctttccaagaggactgtccgaaggatacgcatcaacctggtcctggcactgatttataacctggttgggatacccattgcagcaggtgtcttcatgcccatcggcattgtgctgcagccctggatgggctcagcggccatggcagcctcctctgtgtctgtggtgctctcatccctgcagctcaagtgctataagaagcctgacctggagaggtatgaggcacaggcgcatggccacatgaagcccctgacggcatcccaggtcagtgtgcacataggcatggatgacaggtggcgggactcccccagggccacaccatgggaccaggtcagctatgtcagccaggtgtcgctgtcctccctgacgtccgacaagccatctcggcacagcgctgcagcagacgatgatggggacaagtggtctctgctcctgaatggcagggatgaggagcagtacatctgatgacttcaggcaggcgggccggggcagggacttgcctccactcaccacaagctgagcaggacagccagca

SEQ ID NO: 249 - DNA, 1673 bp, Homo sapiens
  source 1..1673: mol_type = genomic DNA
atcttatctaagctttctttgcctacccgtgcctgggaaccagcaatgaagaagagttttgcttttgacaatgttggctatgaaggtggtctggatggcctgggcccttcttctcaggtggccaccagcacagtcaggatcttgggcatgacttgccagtcatgtgtgaagtccattgaggacaggatttccaatttgaaaggcatcatcagcatgaaggtttccctggaacaaggcagtgccactgtgaaatatgtgccatcggttgtgtgcctgcaacaggtttgccatcaaattggggacatgggcttcgaggccagcattgcagaaggaaaggcagcctcctggccctcaaggtccttgcctgcccaggaggctgtggtcaagctccgggtggagggcatgacctgccagtcctgtgtcagctccattgaaggcaaggtccggaaactgcaaggagtagtgagagtcaaagtctcactcagcaaccaagaggccgtcatcacttatcagccttatctcattcagcccgaagacctcagggaccatgtaaatgacatgggatttgaagctgccatcaagagcaaagtggctcccttaagcctgggaccaattgatattgagcggttacaaagcactaacccaaagagacctttatcttctgctaaccagaattttaataattctgagaccttggggcaccaaggaagccatgtggtcaccctccaactgagaatagatggaatgcattgtaagtcttgcgtcttgaatattgaagaaaatattggccagctcctaggggttcaaagtattcaagtgtccttggagaacaaaactgcccaagtaaagtatgacccttcttgtaccagcccagtggctctgcagagggctatcgaggcacttccacctgggaattttaaagtttctcttcctgatggagccgaagggagtgggacagatcacaggtcttccagttctcattcccctggctccccaccgagaaaccaggtccagggcacatgcagtaccactctgattgccattgccggcatgacctgtgcatcctgtgtccattccattgaaggcatgatctcccaactggaaggggtgcagcaaatatcggtgtctttggccgaagggactgcaacagttctttataatccctctgtaattagcccagaagaactcagagctgctatagaagacatgggatttgaggcttcagtcgtttctgaaagctgttctactaaccctcttggaaaccacagtgctgggaattccatggtgcaaactacagatggtacacctacatctgtgcaggaagtggctccccacactgggaggctccctgcaaaccatgccccggacatcttggcaaagtccccacaatcaaccagagcagtggcaccgcagaagtgcttcttacagatcaaaggcatgacctgtgcatcctgtgtgtctaacatagaaaggaatctgcagaaagaagctgctcctcggtgggtggtacttctacgttcaggcctacaaatctctgagacacaggtcagccaacatggacgtgctcatcgtcctggccacaagcattgcttatgtttattctctggtcatcctggtggttgctgtggctgagaaggcggagaggagccctgtgacattcttcgacacgcccc

SEQ ID NO: 250 - DNA, 4775 bp, Homo sapiens
  source 1..4775: mol_type = genomic DNA
aatgatgaaaaccgaggttggaaaaggttgtgaaaccttttaactctccacagtggagtccattatttcctctggcttcctcaaattcatattcacagggtcgttggctgtgggttgcaattaccatgtctgactcagtaattcttcgaagtataaagaaatttggagaggagaatgatggttttgagtcagataaatcatataataatgataagaaatcaaggttacaagatgagaagaaaggtgatggcgttagagttggcttctttcaattgtttcggttttcttcatcaactgacatttggctgatgtttgtgggaagtttgtgtgcatttctccatggaatagcccagccaggcgtgctactcatttttggcacaatgacagatgtttttattgactacgacgttgagttacaagaactccagattccaggaaaagcatgtgtgaataacaccattgtatggactaacagttccctcaaccagaacatgacaaatggaacacgttgtgggttgctgaacatcgagagcgaaatgatcaaatttgccagttactatgctggaattgctgtcgcagtacttatcacaggatatattcaaatatgcttttgggtcattgccgcagctcgtcagatacagaaaatgagaaaattttactttaggagaataatgagaatggaaatagggtggtttgactgcaattcagtgggggagctgaatacaagattctctgatgatattaataaaatcaatgatgccatagctgaccaaatggcccttttcattcagcgcatgacctcgaccatctgtggtttcctgttgggatttttcaggggttggaaactgaccttggttattatttctgtcagccctctcattgggattggagcagccaccattggtctgagtgtgtccaagtttacggactatgagctgaaggcctatgccaaagcaggggtggtggctgatgaagtcatttcatcaatgagaacagtggctgcttttggtggtgagaaaagagaggttgaaaggtatgagaaaaatcttgtgttcgcccagcgttggggaattagaaaaggaatagtgatgggattctttactggattcgtgtggtgtctcatctttttgtgttatgcactggccttctggtacggctccacacttgtcctggatgaaggagaatatacaccaggaacccttgtccagattttcctcagtgtcatagtaggagctttaaatcttggcaatgcctctccttgtttggaagcctttgcaactggacgtgcagcagccaccagcatttttgagacaatagacaggaaacccatcattgactgcatgtcagaagatggttacaagttggatcgaatcaagggtgaaattgaattccataatgtgaccttccattatccttccagaccagaggtgaagattctaaatgacctcaacatggtcattaaaccaggggaaatgacagctctggtaggacccagtggagctggaaaaagtacagcactgcaactcattcagcgattctatgacccctgtgaaggaatggtgaccgtggatggccatgacattcgctctcttaacattcagtggcttagagatcagattgggatagtggagcaagagccagttctgttctctaccaccattgcagaaaatattcgctatggcagagaagatgcaacaatggaagacatagtccaagctgccaaggaggccaatgcctacaacttcatcatggacctgccacagcaatttgacacccttgttggagaaggaggaggccagatgagtggtggccagaaacaaagggtagctatcgccagagccctcatccgaaatcccaagattctgcttttggacatggccacctcagctctggacaatgagagtgaagccatggtgcaagaagtgctgagtaagattcagcatgggcacacaatcatttcagttgctcatcgcttgtctacggtcagagctgcagataccatcattggttttgaacatggcactgcagtggaaagagggacccatgaagaattactggaaaggaaaggtgtttacttcactctagtgactttgcaaagccagggaaatcaagctcttaatgaagaggacataaaggatgcaactgaagatgacatgcttgcgaggacctttagcagagggagctaccaggatagtttaagggcttccatccggcaacgctccaagtctcagctttcttacctggtgcacgaacctccattagctgttgtagatcataagtctacctatgaagaagatagaaaggacaaggacattcctgtgcaggaagaagttgaacctgccccagttaggaggattctgaaattcagtgctccagaatggccctacatgctggtagggtctgtgggtgcagctgtgaacgggacagtcacacccttgtatgcctttttattcagccagattcttgggactttttcaattcctgataaagaggaacaaaggtcacagatcaatggtgtgtgcctactttttgtagcaatgggctgtgtatctcttttcacccaatttctacagggatatgcctttgctaaatctggggagctcctaacaaaaaggctacgtaaatttggtttcagggcaatgctggggcaagatattgcctggtttgatgacctcagaaatagccctggagcattgacaacaagacttgctacagatgcttcccaagttcaaggggctgccggctctcagatcgggatgatagtcaattccttcactaacgtcactgtggccatgatcattgccttctcctttagctggaagctgagcctggtcatcttgtgcttcttccccttcttggctttatcaggagccacacagaccaggatgttgacaggatttgcctctcgagataagcaggccctggagatggtgggacagattacaaatgaagccctcagtaacatccgcactgttgctggaattggaaaggagaggcggttcattgaagcacttgagactgagctggagaagcccttcaagacagccattcagaaagccaatatttacggattctgctttgcctttgcccagtgcatcatgtttattgcgaattctgcttcctacagatatggaggttacttaatctccaatgaggggctccatttcagctatgtgttcagggtgatctctgcagttgtactgagtgcaacagctcttggaagagccttctcttacaccccaagttatgcaaaagctaaaatatcagctgcacgcttttttcaactgctggaccgacaacccccaatcagtgtatacaatactgcaggtgaaaaatgggacaacttccaggggaagattgattttgttgattgtaaatttacatatccttctcgacctgactcgcaagttctgaatggtctctcagtgtcgattagtccagggcagacactggcgtttgttgggagcagtggatgtggcaaaagcactagcattcagctgttggaacgtttctatgatcctgatcaagggaaggtgatgatagatggtcatgacagcaaaaaagtaaatgtccagttcctccgctcaaacattggaattgtttcccaggaaccagtgttgtttgcctgtagcataatggacaatatcaagtatggagacaacaccaaagaaattcccatggaaagagtcatagcagctgcaaaacaggctcagctgcatgattttgtcatgtcactcccagagaaatatgaaactaacgttgggtcccaggggtctcaactctctagaggggagaaacaacgcattgctattgctcgggccattgtacgagatcctaaaatcttgctactagatgaagccacttctgccttagacacagaaagtgaaaagacggtgcaggttgctctagacaaagccagagagggtcggacctgcattgtcattgcccatcgcttgtccaccatccagaacgcggatatcattgctgtcatggcacagggggtggtgattgaaaaggggacccatgaagaactgatggcccaaaaaggagcctactacaaactagtcaccactggatcccccatcagttgacccaatgcaagaatctcagacacacatgacgcaccagttacaggggttgtttttaaagaaaaaaacaatcccagcaggagggattgctgggattgttttttctttaaagaagaatgttaatattttacttttacagtcattttcctacatcggaatccaagctaatttctaatggccttccataataattctgctttagatgtgtatacagaaaatgaaagaaactagggtccatatgagggaaaacccaatgtcaagtggcagctcagccaccactcagtgcttctctgtgcaggagccagtcctgattaatatgtgggaattagtgagacatcagggagtaagtgacactttgaactcctcaagggcagagaactgtctttcatttttgaaccctcggtgtacacagaggcgggtctataacaggcaatcaacaaacgtttcttgagctagaccaaggtcagatttgaaaagaacagaaggactgaagaccagctgtgtttcttaactaaatttgtctttcaagtgaaaccagcttccttcatctctaaggctaaggatagggaaagggtggatgctctcaggctgagggaggcagaaagggaaagtattagcatgagctttccagttagggctgttgatttatgctttaacttcagagtgagtgtaggggtggtgatgcta

SEQ ID NO: 251 - DNA, 4020 bp, Homo sapiens
  source 1..4020: mol_type = genomic DNA
gggcgggggcgggggcgggggcgaggccgcggcgagcaaagtccaggcccctctgctgcagcgcccgcgcgtccagaggccctgccagacacgcgcgaggttcgaggctgagatggatcttgaggcggcaaagaacggaacagcctggcgccccacgagcgcggagggcgactttgaactgggcatcagcagcaaacaaaaaaggaaaaaaacgaagacagtgaaaatgattggagtattaacattgtttcgatactccgattggcaggataaattgtttatgtcgctgggtaccatcatggccatagctcacggatcaggtctccccctcatgatgatagtatttggagagatgactgacaaatttgttgatactgcaggaaacttctcctttccagtgaacttttccttgtcgctgctaaatccaggcaaaattctggaagaagaaatgactagatatgcatattactactcaggattgggtgctggagttcttgttgctgcctatatacaagtttcattttggactttggcagctggtcgacagatcaggaaaattaggcagaagttttttcatgctattctacgacaggaaataggatggtttgacatcaacgacaccactgaactcaatacgcggctaacagatgacatctccaaaatcagtgaaggaattggtgacaaggttggaatgttctttcaagcagtagccacgttttttgcaggattcatagtgggattcatcagaggatggaagctcacccttgtgataatggccatcagccctattctaggactctctgcagccgtttgggcaaagatactctcggcatttagtgacaaagaactagctgcttatgcaaaagcaggcgccgtggcagaagaggctctgggggccatcaggactgtgatagctttcgggggccagaacaaagagctggaaaggtatcagaaacatttagaaaatgccaaagagattggaattaaaaaagctatttcagcaaacatttccatgggtattgccttcctgttaatatatgcatcatatgcactggccttctggtatggatccactctagtcatatcaaaagaatatactattggaaatgcaatgacagtttttttttcaatcctaattggagctttcagtgttggccaggctgccccatgtattgatgcttttgccaatgcaagaggagcagcatatgtgatctttgatattattgataataatcctaaaattgacagtttttcagagagaggacacaaaccagacagcatcaaagggaatttggagttcaatgatgttcacttttcttacccttctcgagctaacgtcaagatcttgaagggcctcaacctgaaggtgcagagtgggcagacggtggccctggttggaagtagtggctgtgggaagagcacaacggtccagctgatacagaggctctatgaccctgatgagggcacaattaacattgatgggcaggatattaggaactttaatgtaaactatctgagggaaatcattggtgtggtgagtcaggagccggtgctgttttccaccacaattgctgaaaatatttgttatggccgtggaaatgtaaccatggatgagataaagaaagctgtcaaagaggccaacgcctatgagtttatcatgaaattaccacagaaatttgacaccctggttggagagagaggggcccagctgagtggtgggcagaagcagaggatcgccattgcacgtgccctggttcgcaaccccaagatccttctgctggatgaggccacgtcagcattggacacagaaagtgaagctgaggtacaggcagctctggataaggccagagaaggccggaccaccattgtgatagcacaccgactgtctacggtccgaaatgcagatgtcatcgctgggtttgaggatggagtaattgtggagcaaggaagccacagcgaactgatgaagaaggaaggggtgtacttcaaacttgtcaacatgcagacatcaggaagccagatccagtcagaagaatttgaactaaatgatgaaaaggctgccactagaatggccccaaatggctggaaatctcgcctatttaggcattctactcagaaaaaccttaaaaattcacaaatgtgtcagaagagccttgatgtggaaaccgatggacttgaagcaaatgtgccaccagtgtcctttctgaaggtcctgaaactgaataaaacagaatggccctactttgtcgtgggaacagtatgtgccattgccaatggggggcttcagccggcattttcagtcatattctcagagatcatagcgatttttggaccaggcgatgatgcagtgaagcagcagaagtgcaacatattctctttgattttcttatttctgggaattatttctttttttactttcttccttcagggtttcacgtttgggaaagctggcgagatcctcaccagaagactgcggtcaatggcttttaaagcaatgctaagacaggacatgagctggtttgatgaccataaaaacagtactggtgcactttctacaagacttgccacagatgctgcccaagtccaaggagccacaggaaccaggttggctttaattgcacagaatatagctaaccttggaactggtattatcatatcatttatctacggttggcagttaaccctattgctattagcagttgttccaattattgctgtgtcaggaattgttgaaatgaaattgttggctggaaatgccaaaagagataaaaaagaactggaagctgctggaaagattgcaacagaggcaatagaaaatattaggacagttgtgtctttgacccaggaaagaaaatttgaatcaatgtatgttgaaaaattgtatggaccttacaggaattctgtgcagaaggcacacatctatggaattacttttagtatctcacaagcatttatgtatttttcctatgccggttgttttcgatttggtgcatatctcattgtgaatggacatatgcgcttcagagatgttattctggtgttttctgcaattgtatttggtgcagtggctctaggacatgccagttcatttgctccagactatgctaaagctaagctgtctgcagcccacttattcatgctgtttgaaagacaacctctgattgacagctacagtgaagaggggctgaagcctgataaatttgaaggaaatataacatttaatgaagtcgtgttcaactatcccacccgagcaaacgtgccagtgcttcaggggctgagcctggaggtgaagaaaggccagacactagccctggtgggcagcagtggctgtgggaagagcacggtggtccagctcctggagcggttctacgaccccttggcggggacagtgtttgtggactttggttttcagcttctcgatggtcaagaagcaaagaaactcaatgtccagtggctcagagctcaactcggaatcgtgtctcaggagcctatcctatttgactgcagcattgccgagaatattgcctatggagacaacagccgggttgtatcacaggatgaaattgtgagtgcagccaaagctgccaacatacatcctttcatcgagacgttaccccacaaatatgaaacaagagtgggagataaggggactcagctctcaggaggtcaaaaacagaggattgctattgcccgagccctcatcagacaacctcaaatcctcctgttggatgaagctacatcagctctggatactgaaagtgaaaaggttgtccaagaagccctggacaaagccagagaaggccgcacctgcattgtgattgctcaccgcctgtccaccatccagaatgcagacttaatagtggtgtttcagaatgggagagtcaaggagcatggcacgcatcagcagctgctggcacagaaaggcatctatttttcaatggtcagtgtccaggctgggacacagaacttatgaacttttgctacagtatattttaaaaataaattcaaattattctacca

SEQ ID NO: 252 - DNA, 3826 bp, Homo sapiens
  source 1..3826: mol_type = genomic DNA
caaagtccaggcccctctgctgcagcgcccgcgcgtccagaggccctgccagacacgcgcgaggttcgaggctgagatggatcttgaggcggcaaagaacggaacagcctggcgccccacgagcgcggagggcgactttgaactgggcatcagcagcaaacaaaaaaggaaaaaaacgaagacagtgaaaatgattggagtattaacattgtttcgatactccgattggcaggataaattgtttatgtcgctgggtaccatcatggccatagctcacggatcaggtctccccctcatgatgatagtatttggagagatgactgacaaatttgttgatactgcaggaaacttctcctttccagtgaacttttccttgtcgctgctaaatccaggcaaaattctggaagaagaaatgactagatatgcatattactactcaggattgggtgctggagttcttgttgctgcctatatacaagtttcattttggactttggcagctggtcgacagatcaggaaaattaggcagaagttttttcatgctattctacgacaggaaataggatggtttgacatcaacgacaccactgaactcaatacgcggctaacagatgacatctccaaaatcagtgaaggaattggtgacaaggttggaatgttctttcaagcagtagccacgttttttgcaggattcatagtgggattcatcagaggatggaagctcacccttgtgataatggccatcagccctattctaggactctctgcagccgtttgggcaaagatactctcggcatttagtgacaaagaactagctgcttatgcaaaagcaggcgccgtggcagaagaggctctgggggccatcaggactgtgatagctttcgggggccagaacaaagagctggaaaggtatcagaaacatttagaaaatgccaaagagattggaattaaaaaagctatttcagcaaacatttccatgggtattgccttcctgttaatatatgcatcatatgcactggccttctggtatggatccactctagtcatatcaaaagaatatactattggaaatgcaatgacagtttttttttcaatcctaattggagctttcagtgttggccaggctgccccatgtattgatgcttttgccaatgcaagaggagcagcatatgtgatctttgatattattgataataatcctaaaattgacagtttttcagagagaggacacaaaccagacagcatcaaagggaatttggagttcaatgatgttcacttttcttacccttctcgagctaacgtcaagatcttgaagggcctcaacctgaaggtgcagagtgggcagacggtggccctggttggaagtagtggctgtgggaagagcacaacggtccagctgatacagaggctctatgaccctgatgagggcacaattaacattgatgggcaggatattaggaactttaatgtaaactatctgagggaaatcattggtgtggtgagtcaggagccggtgctgttttccaccacaattgctgaaaatatttgttatggccgtggaaatgtaaccatggatgagataaagaaagctgtcaaagaggccaacgcctatgagtttatcatgaaattaccacagaaatttgacaccctggttggagagagaggggcccagctgagtggtgggcagaagcagaggatcgccattgcacgtgccctggttcgcaaccccaagatccttctgctggatgaggccacgtcagcattggacacagaaagtgaagctgaggtacaggcagctctggataaggccagagaaggccggaccaccattgtgatagcacaccgactgtctacggtccgaaatgcagatgtcatcgctgggtttgaggatggagtaattgtggagcaaggaagccacagcgaactgatgaagaaggaaggggtgtacttcaaacttgtcaacatgcagacatcaggaagccagatccagtcagaagaatttgaactaaatgatgaaaaggctgccactagaatggccccaaatggctggaaatctcgcctatttaggcattctactcagaaaaaccttaaaaattcacaaatgtgtcagaagagccttgatgtggaaaccgatggacttgaagcaaatgtgccaccagtgtcctttctgaaggtcctgaaactgaataaaacagaatggccctactttgtcgtgggaacagtatgtgccattgccaatggggggcttcagccggcattttcagtcatattctcagagatcatagcgatttttggaccaggcgatgatgcagtgaagcagcagaagtgcaacatattctctttgattttcttatttctgggaattatttctttttttactttcttccttcagggtttcacgtttgggaaagctggcgagatcctcaccagaagactgcggtcaatggcttttaaagcaatgctaagacaggacatgagctggtttgatgaccataaaaacagtactggtgcactttctacaagacttgccacagatgctgcccaagtccaaggagccacaggaaccaggttggctttaattgcacagaatatagctaaccttggaactggtattatcatatcatttatctacggttggcagttaaccctattgctattagcagttgttccaattattgctgtgtcaggaattgttgaaatgaaattgttggctggaaatgccaaaagagataaaaaagaactggaagctgctggaaagattgcaacagaggcaatagaaaatattaggacagttgtgtctttgacccaggaaagaaaatttgaatcaatgtatgttgaaaaattgtatggaccttacagggtgttttctgcaattgtatttggtgcagtggctctaggacatgccagttcatttgctccagactatgctaaagctaagctgtctgcagcccacttattcatgctgtttgaaagacaacctctgattgacagctacagtgaagaggggctgaagcctgataaatttgaaggaaatataacatttaatgaagtcgtgttcaactatcccacccgagcaaacgtgccagtgcttcaggggctgagcctggaggtgaagaaaggccagacactagccctggtgggcagcagtggctgtgggaagagcacggtggtccagctcctggagcggttctacgaccccttggcggggacagtgcttctcgatggtcaagaagcaaagaaactcaatgtccagtggctcagagctcaactcggaatcgtgtctcaggagcctatcctatttgactgcagcattgccgagaatattgcctatggagacaacagccgggttgtatcacaggatgaaattgtgagtgcagccaaagctgccaacatacatcctttcatcgagacgttaccccacaaatatgaaacaagagtgggagataaggggactcagctctcaggaggtcaaaaacagaggattgctattgcccgagccctcatcagacaacctcaaatcctcctgttggatgaagctacatcagctctggatactgaaagtgaaaaggttgtccaagaagccctggacaaagccagagaaggccgcacctgcattgtgattgctcaccgcctgtccaccatccagaatgcagacttaatagtggtgtttcagaatgggagagtcaaggagcatggcacgcatcagcagctgctggcacagaaaggcatctatttttcaatggtcagtgtccaggctgggacacagaacttatgaacttttgctacagtatattttaaaaataaattcaaattattctaccatttt

SEQ ID NO: 253 - DNA, 3923 bp, Homo sapiens
  source 1..3923: mol_type = genomic DNA
cctgccagacacgcgcgaggttcgaggctgagatggatcttgaggcggcaaagaacggaacagcctggcgccccacgagcgcggagggcgactttgaactgggcatcagcagcaaacaaaaaaggaaaaaaacgaagacagtgaaaatgattggagtattaacattgtttcgatactccgattggcaggataaattgtttatgtcgctgggtaccatcatggccatagctcacggatcaggtctccccctcatgatgatagtatttggagagatgactgacaaatttgttgatactgcaggaaacttctcctttccagtgaacttttccttgtcgctgctaaatccaggcaaaattctggaagaagaaatgactagatatgcatattactactcaggattgggtgctggagttcttgttgctgcctatatacaagtttcattttggactttggcagctggtcgacagatcaggaaaattaggcagaagttttttcatgctattctacgacaggaaataggatggtttgacatcaacgacaccactgaactcaatacgcggctaacagatgacatctccaaaatcagtgaaggaattggtgacaaggttggaatgttctttcaagcagtagccacgttttttgcaggattcatagtgggattcatcagaggatggaagctcacccttgtgataatggccatcagccctattctaggactctctgcagccgtttgggcaaagatactctcggcatttagtgacaaagaactagctgcttatgcaaaagcaggcgccgtggcagaagaggctctgggggccatcaggactgtgatagctttcgggggccagaacaaagagctggaaaggtatcagaaacatttagaaaatgccaaagagattggaattaaaaaagctatttcagcaaacatttccatgggtattgccttcctgttaatatatgcatcatatgcactggccttctggtatggatccactctagtcatatcaaaagaatatactattggaaatgcaatgacagtttttttttcaatcctaattggagctttcagtgttggccaggctgccccatgtattgatgcttttgccaatgcaagaggagcagcatatgtgatctttgatattattgataataatcctaaaattgacagtttttcagagagaggacacaaaccagacagcatcaaagggaatttggagttcaatgatgttcacttttcttacccttctcgagctaacgtcaagatcttgaagggcctcaacctgaaggtgcagagtgggcagacggtggccctggttggaagtagtggctgtgggaagagcacaacggtccagctgatacagaggctctatgaccctgatgagggcacaattaacattgatgggcaggatattaggaactttaatgtaaactatctgagggaaatcattggtgtggtgagtcaggagccggtgctgttttccaccacaattgctgaaaatatttgttatggccgtggaaatgtaaccatggatgagataaagaaagctgtcaaagaggccaacgcctatgagtttatcatgaaattaccacagaaatttgacaccctggttggagagagaggggcccagctgagtggtgggcagaagcagaggatcgccattgcacgtgccctggttcgcaaccccaagatccttctgctggatgaggccacgtcagcattggacacagaaagtgaagctgaggtacaggcagctctggataaggccagagaaggccggaccaccattgtgatagcacaccgactgtctacggtccgaaatgcagatgtcatcgctgggtttgaggatggagtaattgtggagcaaggaagccacagcgaactgatgaagaaggaaggggtgtacttcaaacttgtcaacatgcagacatcaggaagccagatccagtcagaagaatttgaactaaatgatgaaaaggctgccactagaatggccccaaatggctggaaatctcgcctatttaggcattctactcagaaaaaccttaaaaattcacaaatgtgtcagaagagccttgatgtggaaaccgatggacttgaagcaaatgtgccaccagtgtcctttctgaaggtcctgaaactgaataaaacagaatggccctactttgtcgtgggaacagtatgtgccattgccaatggggggcttcagccggcattttcagtcatattctcagagatcatagcgatttttggaccaggcgatgatgcagtgaagcagcagaagtgcaacatattctctttgattttcttatttctgggaattatttctttttttactttcttccttcagggtttcacgtttgggaaagctggcgagatcctcaccagaagactgcggtcaatggcttttaaagcaatgctaagacaggacatgagctggtttgatgaccataaaaacagtactggtgcactttctacaagacttgccacagatgctgcccaagtccaaggagccacaggaaccaggttggctttaattgcacagaatatagctaaccttggaactggtattatcatatcatttatctacggttggcagttaaccctattgctattagcagttgttccaattattgctgtgtcaggaattgttgaaatgaaattgttggctggaaatgccaaaagagataaaaaagaactggaagctgctggaaagattgcaacagaggcaatagaaaatattaggacagttgtgtctttgacccaggaaagaaaatttgaatcaatgtatgttgaaaaattgtatggaccttacaggaattctgtgcagaaggcacacatctatggaattacttttagtatctcacaagcatttatgtatttttcctatgccggttgttttcgatttggtgcatatctcattgtgaatggacatatgcgcttcagagatgttattctggtgttttctgcaattgtatttggtgcagtggctctaggacatgccagttcatttgctccagactatgctaaagctaagctgtctgcagcccacttattcatgctgtttgaaagacaacctctgattgacagctacagtgaagaggggctgaagcctgataaatttgaaggaaatataacatttaatgaagtcgtgttcaactatcccacccgagcaaacgtgccagtgcttcaggggctgagcctggaggtgaagaaaggccagacactagccctggtgggcagcagtggctgtgggaagagcacggtggtccagctcctggagcggttctacgaccccttggcggggacagtgcttctcgatggtcaagaagcaaagaaactcaatgtccagtggctcagagctcaactcggaatcgtgtctcaggagcctatcctatttgactgcagcattgccgagaatattgcctatggagacaacagccgggttgtatcacaggatgaaattgtgagtgcagccaaagctgccaacatacatcctttcatcgagacgttaccccacaaatatgaaacaagagtgggagataaggggactcagctctcaggaggtcaaaaacagaggattgctattgcccgagccctcatcagacaacctcaaatcctcctgttggatgaagctacatcagctctggatactgaaagtgaaaaggttgtccaagaagccctggacaaagccagagaaggccgcacctgcattgtgattgctcaccgcctgtccaccatccagaatgcagacttaatagtggtgtttcagaatgggagagtcaaggagcatggcacgcatcagcagctgctggcacagaaaggcatctatttttcaatggtcagtgtccaggctgggacacagaacttatgaacttttgctacagtatattttaaaaataaattcaaattattctaccatttt

SEQ ID NO: 254 - DNA, 2007 bp, Homo sapiens
  source 1..2007: mol_type = genomic DNA
tagaaaatcaggtggagatgatagtggcttgcatgatggtggtagagctggaggtgcagggcaaaggtcagattctgaatatattttgaaagtaaaggcaacaagatttcctgacagattgattatggtgtgtcaaagaaagagaggaatgcaggatgattccagtgtttttgttgacaactataagtctggagctgccaactggatgcagaagttcactggagggcccagcctggggaaaggatcaggagcaggttaggcatgttaagcttgagatgtctgttaaacatccagataggaatgtcaaagatgcacttgtgtttaagagtcaggaatgcaagagggaattttaggctagaaacaaaaagttagaaattattcgatacagatggtatttaaagctgtgtgactgactgacatgacagaagtggcgagaatagactgagaagtccaaggaatgagccttggaccactccagtgttaggtaagtagttgaaaaaaagagagagagagaaggcatcaaaggagactgaggaagagtgatcaggaaagcataggaaaatccgagaaacatatggtgtcctggaatctatatgaaaaagatatattcagaaagacagagtgataaatctgtcaaattattgaatttgtcaggtaaaataagaacagagaattgatctttggacttagcaaagcagagattatcagtgacttttataaaaatagtttcggtagtgtggaaagatcaaacttctgtttagagtgggtttcagagagaacaacaggaattgaagaaagtaataaactttgccaaccagtttagctccaaaggaaaagagggaaatatgatggtagctggcaggggaagtgtggtcaagagaggttttttgtttgtttttcaagatggaagaaataacagtatgtatgtaagctcacaggagggatccagcaggcatggggaaattgatgatataggacagaaagggaagaatggctccttgtgaaagtgaaaggggatgggatctacaggatgaacatgcaaacaaagactggctgcaaagagaggcatgaatagttcatttacagaaacagcaaaggcagagtgttggtacagatgctggtaagtggaaaaatatcatggtaggaggttatggagttccattctaaacacttcaacttcatcagtgaaataagcacggtaatttagcagaatgtgaagatgtaaaagaacagaatttgagaaaacagacgatatgaaataattattagaaaagcagagactgaagaaactgtcatctccttatgtgctaatgagtttaataatgtcctccagtcaccacaagccttctttcaaactacacaattccaactgcttccgtctcagagtatcttgaaataatgatctgaccgcctgttagaccagtgaagggaaggaatttgggttgatttaagaagagaatcctcatggtcatggtagactgatatggagagaaaacattttgaggaaaaatactcaactaaattcatttctactccagcatgcagtttcaagtcaagttccaccttagctccaggtggcaggcagagcaggatgcagaggcacagcacaagtaagggatccaatgactgagtcaagaattacataacctggccagacagctggtacatgggaaagtgctaagagggcaccaacagcgttcctcctccccaaggagcataatgtgatggttcctgccggccctggctgactctcgccgtccttggagataattgggttcagtgccacctggaccagaactggggatgcggaagcaagaggctgagatggatcttgaggcggcaaagaacggaacagcctggcgccccacgagcgcggagggcgactttgaactgggcatcagcagcaaacaaaaaaggaaaaaaacgaagacagtgaaaatgattggagtattaacattgtttcgatactccgattggcaggataaattgtttatgtcgctgggtacc

SEQ ID NO: 255 - DNA, 3699 bp, Homo sapiens
  source 1..3699: mol_type = genomic DNA
atggatcttgaggcggcaaagaacggaacagcctggcgccccacgagcgcggagggcgactttgaactgggcatcagcagcaaacaaaaaaggaaaaaaacgaagacagtgaaaatgattggagtattaacattgtttcgatactccgattggcaggataaattgtttatgtcgctgggtaccatcatggccatagctcacggatcaggtctccccctcatgatgatagtatttggagagatgactgacaaatttgttgatactgcaggaaacttctcctttccagtgaacttttccttgtcgctgctaaatccaggcaaaattctggaagaagaaatgactagatatgcatattactactcaggattgggtgctggagttcttgttgctgcctatatacaagtttcattttggactttggcagctggtcgacagatcaggaaaattaggcagaagttttttcatgctattctacgacaggaaataggatggtttgacatcaacgacaccactgaactcaatacgcggctaacagatgacatctccaaaatcagtgaaggaattggtgacaaggttggaatgttctttcaagcagtagccacgttttttgcaggattcatagtgggattcatcagaggatggaagctcacccttgtgataatggccatcagccctattctaggactctctgcagccgtttgggcaaagatactctcggcatttagtgacaaagaactagctgcttatgcaaaagcaggcgccgtggcagaagaggctctgggggccatcaggactgtgatagctttcgggggccagaacaaagagctggaaaggtatcagaaacatttagaaaatgccaaagagattggaattaaaaaagctatttcagcaaacatttccatgggtattgccttcctgttaatatatgcatcatatgcactggccttctggtatggatccactctagtcatatcaaaagaatatactattggaaatgcaatgacagtttttttttcaatcctaattggagctttcagtgttggccaggctgccccatgtattgatgcttttgccaatgcaagaggagcagcatatgtgatctttgatattattgataataatcctaaaattgacagtttttcagagagaggacacaaaccagacagcatcaaagggaatttggagttcaatgatgttcacttttcttacccttctcgagctaacgtcaagatcttgaagggcctcaacctgaaggtgcagagtgggcagacggtggccctggttggaagtagtggctgtgggaagagcacaacggtccagctgatacagaggctctatgaccctgatgagggcacaattaacattgatgggcaggatattaggaactttaatgtaaactatctgagggaaatcattggtgtggtgagtcaggagccggtgctgttttccaccacaattgctgaaaatatttgttatggccgtggaaatgtaaccatggatgagataaagaaagctgtcaaagaggccaacgcctatgagtttatcatgaaattaccacagaaatttgacaccctggttggagagagaggggcccagctgagtggtgggcagaagcagaggatcgccattgcacgtgccctggttcgcaaccccaagatccttctgctggatgaggccacgtcagcattggacacagaaagtgaagctgaggtacaggcagctctggataaggccagagaaggccggaccaccattgtgatagcacaccgactgtctacggtccgaaatgcagatgtcatcgctgggtttgaggatggagtaattgtggagcaaggaagccacagcgaactgatgaagaaggaaggggtgtacttcaaacttgtcaacatgcagacatcaggaagccagatccagtcagaagaatttgaactaaatgatgaaaaggctgccactagaatggccccaaatggctggaaatctcgcctatttaggcattctactcagaaaaaccttaaaaattcacaaatgtgtcagaagagccttgatgtggaaaccgatggacttgaagcaaatgtgccaccagtgtcctttctgaaggtcctgaaactgaataaaacagaatggccctactttgtcgtgggaacagtatgtgccattgccaatggggggcttcagccggcattttcagtcatattctcagagatcatagcgatttttggaccaggcgatgatgcagtgaagcagcagaagtgcaacatattctctttgattttcttatttctgggaattatttctttttttactttcttccttcagggtttcacgtttgggaaagctggcgagatcctcaccagaagactgcggtcaatggcttttaaagcaatgctaagacaggacatgagctggtttgatgaccataaaaacagtactggtgcactttctacaagacttgccacagatgctgcccaagtccaaggagccacaggaaccaggttggctttaattgcacagaatatagctaaccttggaactggtattatcatatcatttatctacggttggcagttaaccctattgctattagcagttgttccaattattgctgtgtcaggaattgttgaaatgaaattgttggctggaaatgccaaaagagataaaaaagaactggaagctgctggaaagattgcaacagaggcaatagaaaatattaggacagttgtgtctttgacccaggaaagaaaatttgaatcaatgtatgttgaaaaattgtatggaccttacagggtgttttctgcaattgtatttggtgcagtggctctaggacatgccagttcatttgctccagactatgctaaagctaagctgtctgcagcccacttattcatgctgtttgaaagacaacctctgattgacagctacagtgaagaggggctgaagcctgataaatttgaaggaaatataacatttaatgaagtcgtgttcaactatcccacccgagcaaacgtgccagtgcttcaggggctgagcctggaggtgaagaaaggccagacactagccctggtgggcagcagtggctgtgggaagagcacggtggtccagctcctggagcggttctacgaccccttggcggggacagtgcttctcgatggtcaagaagcaaagaaactcaatgtccagtggctcagagctcaactcggaatcgtgtctcaggagcctatcctatttgactgcagcattgccgagaatattgcctatggagacaacagccgggttgtatcacaggatgaaattgtgagtgcagccaaagctgccaacatacatcctttcatcgagacgttaccccacaaatatgaaacaagagtgggagataaggggactcagctctcaggaggtcaaaaacagaggattgctattgcccgagccctcatcagacaacctcaaatcctcctgttggatgaagctacatcagctctggatactgaaagtgaaaaggttgtccaagaagccctggacaaagccagagaaggccgcacctgcattgtgattgctcaccgcctgtccaccatccagaatgcagacttaatagtggtgtttcagaatgggagagtcaaggagcatggcacgcatcagcagctgctggcacagaaaggcatctatttttcaatggtcagtgtccaggctgggacacagaacttatga

SEQ ID NO: 256 - DNA, 3840 bp, Homo sapiens
  source 1..3840: mol_type = genomic DNA
atggatcttgaggcggcaaagaacggaacagcctggcgccccacgagcgcggagggcgactttgaactgggcatcagcagcaaacaaaaaaggaaaaaaacgaagacagtgaaaatgattggagtattaacattgtttcgatactccgattggcaggataaattgtttatgtcgctgggtaccatcatggccatagctcacggatcaggtctccccctcatgatgatagtatttggagagatgactgacaaatttgttgatactgcaggaaacttctcctttccagtgaacttttccttgtcgctgctaaatccaggcaaaattctggaagaagaaatgactagatatgcatattactactcaggattgggtgctggagttcttgttgctgcctatatacaagtttcattttggactttggcagctggtcgacagatcaggaaaattaggcagaagttttttcatgctattctacgacaggaaataggatggtttgacatcaacgacaccactgaactcaatacgcggctaacagatgacatctccaaaatcagtgaaggaattggtgacaaggttggaatgttctttcaagcagtagccacgttttttgcaggattcatagtgggattcatcagaggatggaagctcacccttgtgataatggccatcagccctattctaggactctctgcagccgtttgggcaaagatactctcggcatttagtgacaaagaactagctgcttatgcaaaagcaggcgccgtggcagaagaggctctgggggccatcaggactgtgatagctttcgggggccagaacaaagagctggaaaggtatcagaaacatttagaaaatgccaaagagattggaattaaaaaagctatttcagcaaacatttccatgggtattgccttcctgttaatatatgcatcatatgcactggccttctggtatggatccactctagtcatatcaaaagaatatactattggaaatgcaatgacagtttttttttcaatcctaattggagctttcagtgttggccaggctgccccatgtattgatgcttttgccaatgcaagaggagcagcatatgtgatctttgatattattgataataatcctaaaattgacagtttttcagagagaggacacaaaccagacagcatcaaagggaatttggagttcaatgatgttcacttttcttacccttctcgagctaacgtcaagatcttgaagggcctcaacctgaaggtgcagagtgggcagacggtggccctggttggaagtagtggctgtgggaagagcacaacggtccagctgatacagaggctctatgaccctgatgagggcacaattaacattgatgggcaggatattaggaactttaatgtaaactatctgagggaaatcattggtgtggtgagtcaggagccggtgctgttttccaccacaattgctgaaaatatttgttatggccgtggaaatgtaaccatggatgagataaagaaagctgtcaaagaggccaacgcctatgagtttatcatgaaattaccacagaaatttgacaccctggttggagagagaggggcccagctgagtggtgggcagaagcagaggatcgccattgcacgtgccctggttcgcaaccccaagatccttctgctggatgaggccacgtcagcattggacacagaaagtgaagctgaggtacaggcagctctggataaggccagagaaggccggaccaccattgtgatagcacaccgactgtctacggtccgaaatgcagatgtcatcgctgggtttgaggatggagtaattgtggagcaaggaagccacagcgaactgatgaagaaggaaggggtgtacttcaaacttgtcaacatgcagacatcaggaagccagatccagtcagaagaatttgaactaaatgatgaaaaggctgccactagaatggccccaaatggctggaaatctcgcctatttaggcattctactcagaaaaaccttaaaaattcacaaatgtgtcagaagagccttgatgtggaaaccgatggacttgaagcaaatgtgccaccagtgtcctttctgaaggtcctgaaactgaataaaacagaatggccctactttgtcgtgggaacagtatgtgccattgccaatggggggcttcagccggcattttcagtcatattctcagagatcatagcgatttttggaccaggcgatgatgcagtgaagcagcagaagtgcaacatattctctttgattttcttatttctgggaattatttctttttttactttcttccttcagggtttcacgtttgggaaagctggcgagatcctcaccagaagactgcggtcaatggcttttaaagcaatgctaagacaggacatgagctggtttgatgaccataaaaacagtactggtgcactttctacaagacttgccacagatgctgcccaagtccaaggagccacaggaaccaggttggctttaattgcacagaatatagctaaccttggaactggtattatcatatcatttatctacggttggcagttaaccctattgctattagcagttgttccaattattgctgtgtcaggaattgttgaaatgaaattgttggctggaaatgccaaaagagataaaaaagaactggaagctgctggaaagattgcaacagaggcaatagaaaatattaggacagttgtgtctttgacccaggaaagaaaatttgaatcaatgtatgttgaaaaattgtatggaccttacaggaattctgtgcagaaggcacacatctatggaattacttttagtatctcacaagcatttatgtatttttcctatgccggttgttttcgatttggtgcatatctcattgtgaatggacatatgcgcttcagagatgttattctggtgttttctgcaattgtatttggtgcagtggctctaggacatgccagttcatttgctccagactatgctaaagctaagctgtctgcagcccacttattcatgctgtttgaaagacaacctctgattgacagctacagtgaagaggggctgaagcctgataaatttgaaggaaatataacatttaatgaagtcgtgttcaactatcccacccgagcaaacgtgccagtgcttcaggggctgagcctggaggtgaagaaaggccagacactagccctggtgggcagcagtggctgtgggaagagcacggtggtccagctcctggagcggttctacgaccccttggcggggacagtgcttctcgatggtcaagaagcaaagaaactcaatgtccagtggctcagagctcaactcggaatcgtgtctcaggagcctatcctatttgactgcagcattgccgagaatattgcctatggagacaacagccgggttgtatcacaggatgaaattgtgagtgcagccaaagctgccaacatacatcctttcatcgagacgttaccccacaaatatgaaacaagagtgggagataaggggactcagctctcaggaggtcaaaaacagaggattgctattgcccgagccctcatcagacaacctcaaatcctcctgttggatgaagctacatcagctctggatactgaaagtgaaaaggttgtccaagaagccctggacaaagccagagaaggccgcacctgcattgtgattgctcaccgcctgtccaccatccagaatgcagacttaatagtggtgtttcagaatgggagagtcaaggagcatggcacgcatcagcagctgctggcacagaaaggcatctatttttcaatggtcagtgtccaggctgggacacagaacttatga

SEQ ID NO: 257 - DNA, 1874 bp, Homo sapiens
  source 1..1874: mol_type = genomic DNA
acattctactgacttgcatttccccagccgactcttttatagctccctggttcaacctcaaggccttgaggttttggcagctctggaggatgagagagaacatggccaggggcccttgcaacgcgccgagatgggcgtccctgatggtgctggtcgccataggcaccgccgtgacagcggccgtcaaccctggcgtcgtggtcaggatctcccagaagggcctggactacgccagccagcaggggacggccgctctgcagaaggagctgaagaggatcaagattcctgactactcagacagctttaagatcaagcatcttgggaaggggcattatagcttctacagcatggacatccgtgaattccagcttcccagttcccagataagcatggtgcccaatgtgggccttaagttctccatcagcaacgccaatatcaagatcagcgggaaatggaaggcacaaaagagattcttaaaaatgagcggcaattttgacctgagcatagaaggcatgtccatttcggctgatctgaagctgggcagtaaccccacgtcaggcaagcccaccatcacctgctccagctgcagcagccacatcaacagtgtccacgtgcacatctcaaagagcaaagtggggtggctgatccaactcttccacaaaaaaattgagtctgcgcttcgaaacaagatgaacagccaggtctgcgagaaagtgaccaattctgtatcctccgagctgcaaccttatttccagactctgccagtaatgaccaaaatagattctgtggctggaatcaactatggtctggtggcacctccagcaaccacggctgagaccctggatgtacagatgaagggggagttttacagtgagaaccaccacaatccacctccctttgctccaccagtgatggagtttcccgctgcccatgaccgcatggtatacctgggcctctcagactacttcttcaacacagccgggcttgtataccaagaggctggggtcttgaagatgacccttagagatgacatgattccaaaggagtccaaatttcgactgacaaccaagttctttggaaccttcctacctgaggtggccaagaagtttcccaacatgaagatacagatccatgtctcagcctccaccccgccacacctgtctgtgcagcccaccggccttaccttctaccctgccgtggatgtccaggcctttgccgtcctccccaactcctccctggcttccctcttcctgattggcatgcacacaactggttccatggaggtcagcgccgagtccaacaggcttgttggagagctcaagctggataggctgctcctggaactgaagcactcaaatattggccccttcccggttgaattgctgcaggatatcatgaactacattgtacccattcttgtgctgcccagggttaacgagaaactacagaaaggcttccctctcccgacgccggccagagtccagctctacaacgtagtgcttcagcctcaccagaacttcctgctgttcggtgcagacgttgtctataaatgaaggcaccaggggtgccgggggctgtcagccacacctgttcctgatgggctgtggggcaccggctgcctttccccagggaatcctctccagatcttaaccaagagccccttgcaaacttcttcgactcagattcagaaatgatctaaacacgaggaaacattattcattggaaaagtgcatggtgtgtattttagggattatgagcttctttcaagggctaaggctgcagagatatttcctccaggaatcgtgtttcaattgtaaccaagaaatttccatttgtgcttcatgaaaaaaaacttctggtttttttcatgtgga

SEQ ID NO: 258 - DNA, 3837 bp, Homo sapiens
  source 1..3837: mol_type = genomic DNA
cccccgcccccctccgggctggaccgcggatggtacgttccgcacgtgagctgggtgctggtctggccggcgacgcgcgtgccctgtggccaaacactgcctggagtgagagcaaactaccagcgcagtggggccggcgcgagtgtgcgtgtgtgtgcgtgtgtgtgtgcgagcgcggtggaggggggggaccaactgcttcacactttcaacactgcactgaagagggagagcgagagagagactggagacgcacagatccccccaaggtctcccaagcctaccgtcccacagattattgtacagagccccaaaaatcgaaacagaggaaacgaacagcagttgaacatggacgaaggaattcctcatttgcaagagagacagttactggaacatagagattttataggactggactattcctctttgtatatgtgtaaacccaaaaggagcatgaaacgagacgacaccaaggatacctacaaattaccgcacagattaatagaaaagaaaagaagagaccgaattaatgaatgcattgctcagctgaaagatttactgcctgaacatctgaaattgacaactctgggacatctggagaaagctgtagtcttggaattaactttgaaacacttaaaagctttaaccgccttaaccgagcaacagcatcagaagataattgctttacagaatggggagcgatctctgaaatcgcccattcagtccgacttggatgcgttccactcgggatttcaaacatgcgccaaagaagtcttgcaatacctctcccggtttgagagctggacacccagggagccgcggtgtgtccagctgatcaaccacttgcacgccgtggccacccagttcttgcccaccccgcagctgttgactcaacaggtccctctgagcaaaggcaccggcgctccctcggccgccgggtccgcggccgccccctgcctggagcgcgcggggcagaagctggagcccctcgcctactgcgtgcccgtcatccagcggactcagcccagcgccgagctcgccgccgagaacgacacggacaccgacagcggctacggcggcgaagccgaggcccggccggaccgcgagaaaggcaaaggcgcgggggcgagccgcgtcaccatcaagcaggagcctcccggggaggactcgccggcgcccaagaggatgaagctggattcccgcggcggcggcagcggcggcggcccggggggcggcgcggcggcggcggcagccgcgcttctggggcccgaccctgccgccgcggccgcgctgctgagacccgacgccgccctgctcagctcgctggtggcgttcggcggaggcggaggcgcgcccttcccgcagcccgcggccgccgcggcccccttctgcctgcccttctgcttcctctcgccttctgcagctgccgcctacgtgcagcccttcctggacaagagcggcctggagaagtatctgtacccggcggcggctgccgccccgttcccgctgctataccccggcatccccgccccggcggcagccgcggcagccgccgccgccgctgccgccgccgccgccgcgttcccctgcctgtcctcggtgttgtcgccccctcccgagaaggcgggcgccgccgccgcgaccctcctgccgcacgaggtggcgccccttggggcgccgcacccccagcacccgcacggccgcacccacctgcccttcgccgggccccgcgagccggggaacccggagagctctgctcaggaagatccctcgcagccaggaaaggaagctccctgaatccttgcgtcccgaaggacggaggttcaagcagagtgagaagttaaaatacccttaaggaggttcaagcagagtgagaagttaaaatacccttaaggtctttaagggaggaagtgtaatagatgcacgacaggcataaacaagaacaacaaaacaggtgttatgtgtacattcggagttcctgttttgctcatcccgcaccaccccaccctccacacactaacatccctttcttccccccaccagctgtaaaagatcctatgcgaaagacactggctcttttttttaatcccccaaataaattttgcccccttttaggccatgttccattatctcttaaaattggaacctaattcgagaggaagtaagaagggtctgttctgtggctgagctaggtgaaccccggggtaggggaaagatgttaacacctttgacgtctttggagttgacatggaacagcaggtagttgttatgtagagctagttctcaaagctgccctgcctgttttaggaggcgttccacaaacagattgaggctcttttagaattgaatttactcttcagtattttctaatgttcagctttctaaaaggcatatatttttcaaagaagtgaggatgcagtttctcacgttgcaacctattctgaagtggtttaaatggtatctcttagtaacttgcactcgttaaagaaacacggagctgggccatcgtcagaactaagtcagggaaggagatggatgagaaggccagaatcattcctagtacatttgctaacactttattgagaaattgaccatgaattaatggactcatcttaatttcttctaagtccatatatagatagatatctatctgtacagatttctatttatccatagataggtatctatacatacacatctcaagtgcatctattcccactctcattaatccatcatgttcctaaatttttgtaatcttactgtaaaaaaaagtgcactgaacttcaaaacaaaacaaaaaacaacaacaacaaaaaacaagtccaaactgatatatcctatattctgttaaaattcaaaagtgaacgaaagcatttaactggccagttttgattgcaaatgctgtaaagatatagaatgaagtcctgtgaggccttcctatctccaagtctatgtattttctggagaccaaaccagataccagataatcacaaagaaagcttttttaataaggcttaaaccaagaccttgtctagatatttttagtttgttgccaaggtagcactgtgagaaatctcacttggatgttatgtaaggggtgagacacaacagtctgactatgagtgaggaaaatatctgggtcttttcgtcagtttggtgcatttgctgctgctgttgctactgtttgcctcaaacgctgtgtttaaacaacgttaaactcttagcctacaaggtggctcttatgtacatagttgttaatacatccaattaatgatgtctgacatgctatttttgtagggagaaaatatgtgctaatgatattttgagttaaaatatcttttggggaggatttgctgaaaagttgcacttttgttacaatgcttatgcttggtacaagcttatgctgtcttaaattattttaaaaaaataaatactgtctgtgagaaaccagctggtttagaaaagtttagtatgtgacgataaactagaaattacctttatattctagtattttcagcactccataaattctattacctaaatattgccacactattttgtgatttaaaaattcttactaaggaataaaaactttaatatacgatatgatattgtctaataattaaaaaagacataatggatgctcaattagttttaagatatctataactatagggatacaaatcactacagttctcagatttacagcttttttttgtcattggcttgatgtcacacatttccaatctcttgcaagcctccaggctctggctttgtctacctgctcgttcccaatgtatcttaatgaaaagtgcaaaagaaaaacctaccaattaa

SEQ ID NO: 259 - DNA, 1673 bp, Homo sapiens
  source 1..1673: mol_type = genomic DNA
actgaagagggagagcgagagagagactggagacgcacagatccccccaaggtctcccaagcctaccgtcccacagattattgtacagagccccaaaaatcgaaacagaggaaacgaacagcagttgaacatggacgaaggaattcctcatttgcaagagagacagttactggaacatagagattttataggactggactattcctctttgtatatgtgtaaacccaaaaggagcatgaaacgagacgacaccaaggatacctacaaattaccgcacagattaatagaaaagaaaagaagagaccgaattaatgaatgcattgctcagctgaaagatttactgcctgaacatctgaaattgacaactctgggacatctggagaaagctgtagtcttggaattaactttgaaacacttaaaagctttaaccgccttaaccgagcaacagcatcagaagataattgctttacagaatggggagcgatctctgaaatcgcccattcagtccgacttggatgcgttccactcgggatttcaaacatgcgccaaagaagtcttgcaatacctctcccggtttgagagctggacacccagggagccgcggtgtgtccagctgatcaaccacttgcacgccgtggccacccagttcttgcccaccccgcagctgttgactcaacaggtccctctgagcaaaggcaccggcgctccctcggccgccgggtccgcggccgccccctgcctggagcgcgcggggcagaagctggagcccctcgcctactgcgtgcccgtcatccagcggactcagcccagcgccgagctcgccgccgagaacgacacggacaccgacagcggctacggcggcgaagccgaggcccggccggaccgcgagaaaggcaaaggcgcgggggcgagccgcgtcaccatcaagcaggagcctcccggggaggactcgccgccgccgccgccgcgttcccctgcctgtcctcggtgttgtcgccccctcccgagaaggcgggcgccgccgccgcgaccctcctgccgcacgaggtggcgccccttggggcgccgcacccccagcacccgcacggccgcacccacctgcccttcgccgggccccgcgagccggggaacccggagagctctgctcaggaagatccctcgcagccaggaaaggaagctccctgaatccttgcgtcccgaaggacggaggttcaagcagagtgagaagttaaaatacccttaaggaggttcaagcagagtgagaagttaaaatacccttaaggtctttaagggaggaagtgtaatagatgcacgacaggcataaacaagaacaacaaaacaggtgttatgtgtacattcggagttcctgttttgctcatcccgcaccaccccaccctccacacactaacatccctttcttccccccaccagctgtaaaagatcctatgcgaaagacactggctcttttttttaatcccccaaataaattttgcccccttttaggccatgttccattatctcttaaaattggaacctaattcgagaggaagtaagaagggtctgttctgtggctgagctaggtgaaccccggggtaggggaaagatgttaacacctttgacgtctttggagttgacatggaacagcaggtagttgttatgtagagctagttctc

SEQ ID NO: 260 - DNA, 3584 bp, Homo sapiens
  source 1..3584: mol_type = genomic DNA
gccgcgagcgccgcgccacggcgccgccgccgccgtcgccgccgccggagtcctcgccccgccgcgctgcgcccggctcgcgctgcgctagtcgctccgcttcccacaccccgccggggactggcagccgccgccgcacatctgccgccacagcctccgccggctacccgaacgttctcggggccagcgccgagtggatcaccggggaccgcgaggcacccgcgcgccgcagaccccgcgcgggctggagcacccggcagagcgcgccacagcgccgtggcctctgctgcccgggctgcgccagagccgcggacgggcgcgcagagcgccggggactccggagccgatccctagcgccgcgatgcggagcacctactgcaggagatcgggggcctgggacgcgctggccgaggtgtgatcggaccccaggctagccacaaagggcacttggccccagggctaggagagcgaggggagagcacagccacccgcctcggcggcccgggactcggctcgactcgccggagaatgcgcccgaggacgacggggcgccagagccgcggtgctttcaactggcgagcgcgaatgggggtgcactggagtaaggcagagtgatgcgggggggcaactcgcctggcaccgagatcgccgccgtgcccttccctggacccggcgtcgcccaggatggctgccccgagccatgggccgcggcggagctagcgcggagcgcccgaccctcgacccccgagtcccggagccggccccgcgcggggccacgcgtccctcgggcgctggttcctaaggaggacgacagcaccagcttctcctttctcccttcccttccctgccccgcactcctccccctgctcgctgttgttgtgtgtcagcacttggctggggacttcttgaacttgcagggagaataacttgcgcaccccactttgcgccggtgcctttgccccagcggagcctgcttcgccatctccgagccccaccgcccctccactcctcggccttgcccgacactgagacgctgttcccagcgtgaaaagagagactgcgcggccggcacccgggagaaggaggaggcaaagaaaaggaacggacattcggtccttgcgccaggtcctttgaccagagtttttccatgtggacgctctttcaatggacgtgtccccgcgtgcttcttagacggactgcggtctcctaaaggtcgaccatggtggccgggacccgctgtcttctagcgttgctgcttccccaggtcctcctgggcggcgcggctggcctcgttccggagctgggccgcaggaagttcgcggcggcgtcgtcgggccgcccctcatcccagccctctgacgaggtcctgagcgagttcgagttgcggctgctcagcatgttcggcctgaaacagagacccacccccagcagggacgccgtggtgcccccctacatgctagacctgtatcgcaggcactcaggtcagccgggctcacccgccccagaccaccggttggagagggcagccagccgagccaacactgtgcgcagcttccaccatgaagaatctttggaagaactaccagaaacgagtgggaaaacaacccggagattcttctttaatttaagttctatccccacggaggagtttatcacctcagcagagcttcaggttttccgagaacagatgcaagatgctttaggaaacaatagcagtttccatcaccgaattaatatttatgaaatcataaaacctgcaacagccaactcgaaattccccgtgaccagacttttggacaccaggttggtgaatcagaatgcaagcaggtgggaaagttttgatgtcacccccgctgtgatgcggtggactgcacagggacacgccaaccatggattcgtggtggaagtggcccacttggaggagaaacaaggtgtctccaagagacatgttaggataagcaggtctttgcaccaagatgaacacagctggtcacagataaggccattgctagtaacttttggccatgatggaaaagggcatcctctccacaaaagagaaaaacgtcaagccaaacacaaacagcggaaacgccttaagtccagctgtaagagacaccctttgtacgtggacttcagtgacgtggggtggaatgactggattgtggctcccccggggtatcacgccttttactgccacggagaatgcccttttcctctggctgatcatctgaactccactaatcatgccattgttcagacgttggtcaactctgttaactctaagattcctaaggcatgctgtgtcccgacagaactcagtgctatctcgatgctgtaccttgacgagaatgaaaaggttgtattaaagaactatcaggacatggttgtggagggttgtgggtgtcgctagtacagcaaaattaaatacataaatatatatatatatatatattttagaaaaaagaaaaaaacaaacaaacaaaaaaaccccaccccagttgacactttaatatttcccaatgaagactttatttatggaatggaatggaaaaaaaaacagctattttgaaaatatatttatatctacgaaaagaagttgggaaaacaaatattttaatcagagaattattccttaaagatttaaaatgtatttagttgtacattttatatgggttcaaccccagcacatgaagtataatggtcagatttattttgtatttatttactattataaccactttttaggaaaaaaatagctaatttgtatttatatgtaatcaaaagaagtatcgggtttgtacataattttccaaaaattgtagttgttttcagttgtgtgtatttaagatgaaaagtctacatggaaggttactctggcaaagtgcttagcacgtttgcttttttgcagtgctactgttgagttcacaagttcaagtccagaaaaaaaaagtggataatccactctgctgactttcaagattattatattattcaattctcaggaatgttgcagagtgattgtccaatccatgagaatttacatccttattaggtggaatatttggataagaaccagacattgctgatctattatagaaactctcctcctgccccttaatttacagaaagaataaagcaggatccatagaaataattaggaaaacgatgaacctgcaggaaagtgaatgatggtttgttgttcttctttcctaaattagtgatcccttcaaaggggctgatctggccaaagtattcaataaaacgtaagatttcttcattattgatattgtggtcatatatatttaaaattgatatctcgtggccctcatcaagggttggaaatttatttgtgttttacctttacctcatctgagagctctttattctccaaagaacccagttttctaactttttgcccaacacgcagcaaaattatgcacatcgtgttttctgcccaccctctgttctctgacctatcagcttgcttttctttccaaggttgtgtgtttgaacacatttctccaaatgttaaacctatttcagataataaatatcaaatctctggcatttcattctataaagtc

SEQ ID NO: 261 - DNA, 4013 bp, Homo sapiens
  source 1..4013: mol_type = genomic DNA
cgaggcggcctcttgtgcgatccagggcgcacaaggctgggagagcgccccggggcccctgctatccgcgccggaggttggaagagggtgggttgccgccgcccgagggcgagagcgccagaggagcgggaagaaggagcgctcgcccgcccgcctgcctcctcgctgcctccccggcgttggctctctggactcctaggcttgctggctgctcctcccacccgcgcccgcctcctcactcgccttttcgttcgccggggctgctttccaagccctgcggtgcgcccgggcgagtgcggggcgaggggcccggggccagcaccgagcagggggcgggggtccgggcagagcgcggccggccggggaggggccatgtctggcgcgggcgcagcggggcccgtctgcagcaagtgaccgagcggcgcggacggccgcctgccccctctgccacctggggcggtgcgggcccggagcccggagcccgggtagcgcgtagagccggcgcgatgcacgtgcgctcactgcgagctgcggcgccgcacagcttcgtggcgctctgggcacccctgttcctgctgcgctccgccctggccgacttcagcctggacaacgaggtgcactcgagcttcatccaccggcgcctccgcagccaggagcggcgggagatgcagcgcgagatcctctccattttgggcttgccccaccgcccgcgcccgcacctccagggcaagcacaactcggcacccatgttcatgctggacctgtacaacgccatggcggtggaggagggcggcgggcccggcggccagggcttctcctacccctacaaggccgtcttcagtacccagggcccccctctggccagcctgcaagatagccatttcctcaccgacgccgacatggtcatgagcttcgtcaacctcgtggaacatgacaaggaattcttccacccacgctaccaccatcgagagttccggtttgatctttccaagatcccagaaggggaagctgtcacggcagccgaattccggatctacaaggactacatccgggaacgcttcgacaatgagacgttccggatcagcgtttatcaggtgctccaggagcacttgggcagggaatcggatctcttcctgctcgacagccgtaccctctgggcctcggaggagggctggctggtgtttgacatcacagccaccagcaaccactgggtggtcaatccgcggcacaacctgggcctgcagctctcggtggagacgctggatgggcagagcatcaaccccaagttggcgggcctgattgggcggcacgggccccagaacaagcagcccttcatggtggctttcttcaaggccacggaggtccacttccgcagcatccggtccacggggagcaaacagcgcagccagaaccgctccaagacgcccaagaaccaggaagccctgcggatggccaacgtggcagagaacagcagcagcgaccagaggcaggcctgtaagaagcacgagctgtatgtcagcttccgagacctgggctggcaggactggatcatcgcgcctgaaggctacgccgcctactactgtgagggggagtgtgccttccctctgaactcctacatgaacgccaccaaccacgccatcgtgcagacgctggtccacttcatcaacccggaaacggtgcccaagccctgctgtgcgcccacgcagctcaatgccatctccgtcctctacttcgatgacagctccaacgtcatcctgaagaaatacagaaacatggtggtccgggcctgtggctgccactagctcctccgagaattcagaccctttggggccaagtttttctggatcctccattgctcgccttggccaggaaccagcagaccaactgccttttgtgagaccttcccctccctatccccaactttaaaggtgtgagagtattaggaaacatgagcagcatatggcttttgatcagtttttcagtggcagcatccaatgaacaagatcctacaagctgtgcaggcaaaacctagcaggaaaaaaaaacaacgcataaagaaaaatggccgggccaggtcattggctgggaagtctcagccatgcacggactcgtttccagaggtaattatgagcgcctaccagccaggccacccagccgtgggaggaagggggcgtggcaaggggtgggcacattggtgtctgtgcgaaaggaaaattgacccggaagttcctgtaataaatgtcacaataaaacgaatgaatgaaaatggttaggacgttacagatatattttcctaaacaatttatccccatttctcggtttatcctgatgcgtaaacagaagctgtgtcaagtggagggcggggaggtccctctccattccctacagttttcatcctgaggcttgcagaggcccagtgtttaccgaggtttgcccaaatccaagatctagtgggaggggaaagagcaaatgtctgctccgaggagggcggtgtgttgatctttggaggaaaaatatgttctgttgttcagctggatttgccgtggcagaaatgaaactaggtgtgtgaaatacccgcagacatttgggattggcttttcacctcgccccagtggtagtaaatccatgtgaaattgcagaggggacaaggacagcaagtaggatggaacttgcaactcaaccctgttgttaagaagcaccaatgggccgggcacagtagctcccacctgtaatcccagcactttgggaggctgaggtgggcggatcatttgaggtcaggagttcgagaccagcctggccaacatggtgaaaccccatctctactaaaaatacaaaaattagccgggcatggtggcacgcacctgtaatcccagctactctggaggctgaggcaggagaattgcttgaaccccagaggtggaggttgcagtgagccaagatcgtcccactgcactccagcttgggtgacaaaacaagactccatctcaaaagaaaaaaaaaacagcaccaatgaagcctagttctccacgggagtggggtgagcaggagcactgcacatcgccccagtggaccctctggtctttgtctgcagtggcattccaaggctgggccctggcaagggcacccgtggctgtctcttcatttgcagaccctgatcagaagtctctgcaaacaaatttgctccttgaattaagggggagatggcataataggaggtctgatgggtgcaggatgtgctggacttacattgcaaatagaagccttgttgagggtgacatcctaaccaagtgtcccgatttggaggtggcatttctgacgtggctcttggtgtaagcctgccttgccttggctggtgagtcccataaatagtatgcactcagcctccggccacaaacacaaggcctaggggagggctagactgtctgcaaacgttttctgcatctgtaaagaaaacaaggtgatcgaaaactgtggccatgtggaacccggtcttgtgggggactgtttctccatcttgactcagacagttcctggaaacaccggggctctgtttttattttctttgatgtttttcttctttagtagcttgggctgcagcctccactctctagtcactggggaggagtattttttgttatgtttggtttcatttgctggcagagctggggctttttgtgtgatccctcttggtgtgagttttctgacccaaccagcctctggttagcatcatttgtacatttaaacctgtaaatagttgttacaaagcaaagagattatttatttccatccaaagctcttttgaacacccccccccctttaatccctcgttcaggacgatgagcttgctttccttcaacctgtttgttttcttatttaagactatttattaatggttggaccaatgtactcacagctgttgcgtcgagcagtccttagtgaaaattctgtataaatagacaaaatgaaaagggtttgaccttgcaataaaaggagacgtttggttctggctcttt

SEQ ID NO: 262 - DNA, 1746 bp, Homo sapiens
  source 1..1746: mol_type = genomic DNA
cgggcgagtgcggggcgaggggcccggggccagcaccgagcagggggcgggggtccgggcagagcgcggccggccggggaggggccatgtctggcgcgggcgcagcggggcccgtctgcagcaagtgaccgagcggcgcggacggccgcctgccccctctgccacctggggcggtgcgggcccggagcccggagcccgggtagcgcgtagagccggcgcgatgcacgtgcgctcactgcgagctgcggcgccgcacagcttcgtggcgctctgggcacccctgttcctgctgcgctccgccctggccgacttcagcctggacaacgaggtgcactcgagcttcatccaccggcgcctccgcagccaggagcggcgggagatgcagcgcgagatcctctccattttgggcttgccccaccgcccgcgcccgcacctccagggcaagcacaactcggcacccatgttcatgctggacctgtacaacgccatggcggtggaggagggcggcgggcccggcggccagggcttctcctacccctacaaggccgtcttcagtacccagggcccccctctggccagcctgcaagatagccatttcctcaccgacgccgacatggtcatgagcttcgtcaacctcgtggaacatgacaaggaattcttccacccacgctaccaccatcgagagttccggtttgatctttccaagatcccagaaggggaagctgtcacggcagccgaattccggatctacaaggactacatccgggaacgcttcgacaatgagacgttccggatcagcgtttatcaggtgctccaggagcacttgggcagggaatcggatctcttcctgctcgacagccgtaccctctgggcctcggaggagggctggctggtgtttgacatcacagccaccagcaaccactgggtggtcaatccgcggcacaacctgggcctgcagctctcggtggagacgctggatgagaacagcagcagcgaccagaggcaggcctgtaagaagcacgagctgtatgtcagcttccgagacctgggctggcaggactggatcatcgcgcctgaaggctacgccgcctactactgtgagggggagtgtgccttccctctgaactcctacatgaacgccaccaaccacgccatcgtgcagacgctggtccacttcatcaacccggaaacggtgcccaagccctgctgtgcgcccacgcagctcaatgccatctccgtcctctacttcgatgacagctccaacgtcatcctgaagaaatacagaaacatggtggtccgggcctgtggctgccactagctcctccgagaattcagaccctttggggccaagtttttctggatcctccattgctcgccttggccaggaaccagcagaccaactgccttttgtgagaccttcccctccctatccccaactttaaaggtgtgagagtattaggaaacatgagcagcatatggcttttgatcagtttttcagtggcagcatccaatgaacaagatcctacaagctgtgcaggcaaaacctagcaggaaaaaaaaacaacgcataaagaaaaatggccgggccaggtcattggctgggaagtctcagccatgcacggactcgtttccagaggtaattatgagcgcctaccagccaggccacccagccgtgggaggaagggggcgtggcaaggggtgggcacattggtgtctgtgcgaaaggaaaattgacccggaagttcc

SEQ ID NO: 263 - DNA, 5821 bp, Homo sapiens
  source 1..5821: mol_type = genomic DNA
ggggttaagagaaggaggagctgtggctgaagacatttaatggcagaatgaatggaaattcaaagatcgctgtgcagtcagccttaaacactgactgcacccctcccagatttcttttacattaactaaaaagtcttatcacacaatctcataaaatttatgtaatttcatttaattttagccacaaatcatcaaaatgacgaggattttgacagctttcaaagtggtgaggacactgaagactggttttggctttaccaatgtgactgcacaccaaaaatggaaattttcaagacctggcatcaggctcctttctgtcaaggcacagacagcacacattgtcctggaagatggaactaagatgaaaggttactcctttggccatccatcctctgttgctggtgaagtggtttttaatactggcctgggagggtacccagaagctattactgaccctgcctacaaaggacagattctcacaatggccaaccctattattgggaatggtggagctcctgatactactgctctggatgaactgggacttagcaaatatttggagtctaatggaatcaaggtttcaggtttgctggtgctggattatagtaaagactacaaccactggctggctaccaagagtttagggcaatggctacaggaagaaaaggttcctgcaatttatggagtggacacaagaatgctgactaaaataattcgggataagggtaccatgcttgggaagattgaatttgaaggtcagcctgtggattttgtggatccaaataaacagaatttgattgctgaggtttcaaccaaggatgtcaaagtgtacggcaaaggaaaccccacaaaagtggtagctgtagactgtgggattaaaaacaatgtaatccgcctgctagtaaagcgaggagctgaagtgcacttagttccctggaaccatgatttcaccaagatggagtatgatgggattttgatcgcgggaggaccggggaacccagctcttgcagaaccactaattcagaatgtcagaaagattttggagagtgatcgcaaggagccattgtttggaatcagtacaggaaacttaataacaggattggctgctggtgccaaaacctacaagatgtccatggccaacagagggcagaatcagcctgttttgaatatcacaaacaaacaggctttcattactgctcagaatcatggctatgccttggacaacaccctccctgctggctggaaaccactttttgtgaatgtcaacgatcaaacaaatgaggggattatgcatgagagcaaacccttcttcgctgtgcagttccacccagaggtcaccccggggccaatagacactgagtacctgtttgattcctttttctcactgataaagaaaggaaaagctaccaccattacatcagtcttaccgaagccagcactagttgcatctcgggttgaggtttccaaagtccttattctaggatcaggaggtctgtccattggtcaggctggagaatttgattactcaggatctcaagctgtaaaagccatgaaggaagaaaatgtcaaaactgttctgatgaacccaaacattgcatcagtccagaccaatgaggtgggcttaaagcaagcggatactgtctactttcttcccatcacccctcagtttgtcacagaggtcatcaaggcagaacagccagatgggttaattctgggcatgggtggccagacagctctgaactgtggagtggaactattcaagagaggtgtgctcaaggaatatggtgtgaaagtcctgggaacttcagttgagtccattatggctacggaagacaggcagctgttttcagataaactaaatgagatcaatgaaaagattgctccaagttttgcagtggaatcgattgaggatgcactgaaggcagcagacaccattggctacccagtgatgatccgttccgcctatgcactgggtgggttaggctcaggcatctgtcccaacagagagactttgatggacctcagcacaaaggcctttgctatgaccaaccaaattctggtggagaagtcagtgacaggttggaaagaaatagaatatgaagtggttcgagatgctgatgacaattgtgtcactgtctgtaacatggaaaatgttgatgccatgggtgttcacacaggtgactcagttgttgtggctcctgcccagacactctccaatgccgagtttcagatgttgagacgtacttcaatcaatgttgttcgccacttgggcattgtgggtgaatgcaacattcagtttgcccttcatcctacctcaatggaatactgcatcattgaagtgaatgccagactgtcccgaagctctgctctggcctcaaaagccactggctacccattggcattcattgctgcaaagattgccctaggaatcccacttccagaaattaagaacgtcgtatccgggaagacatcagcctgttttgaacctagcctggattacatggtcaccaagattccccgctgggatcttgaccgttttcatggaacatctagccgaattggtagctctatgaaaagtgtaggagaggtcatggctattggtcgtacctttgaggagagtttccagaaagctttacggatgtgccacccatctatagaaggtttcactccccgtctcccaatgaacaaagaatggccatctaatttagatcttagaaaagagttgtctgaaccaagcagcacgcgtatctatgccattgccaaggccattgatgacaacatgtcccttgatgagattgagaagctcacatacattgacaagtggtttttgtataagatgcgtgatattttaaacatggaaaagacactgaaaggcctcaacagtgagtccatgacagaagaaaccctgaaaagggcaaaggagattgggttctcagataagcagatttcaaaatgccttgggctcactgaggcccagacaagggagctgaggttaaagaaaaacatccacccttgggttaaacagattgatacactggctgcagaatacccatcagtaacaaactatctctatgttacctacaatggtcaggagcatgatgtcaattttgatgaccatggaatgatggtgctaggctgtggtccatatcacattggcagcagtgtggaatttgattggtgtgctgtctctagtatccgcacactgcgtcaacttggcaagaagacggtggtggtgaattgcaatcctgagactgtgagcacagactttgatgagtgtgacaaactgtactttgaagagttgtccttggagagaatcctagacatctaccatcaggaggcatgtggtggctgcatcatatcagttggaggccagattccaaacaacctggcagttcctctatacaagaatggtgtcaagatcatgggcacaagccccctgcagatcgacagggctgaggatcgctccatcttctcagctgtcttggatgagctgaaggtggctcaggcaccttggaaagctgttaatactttgaatgaagcactggaatttgcaaagtctgtggactacccctgcttgttgaggccttcctatgttttgagtgggtctgctatgaatgtggtattctctgaggatgagatgaaaaaattcctagaagaggcgactagagtttctcaggagcacccagtggtgctgacaaaatttgttgaaggggcccgagaagtagaaatggacgctgttggcaaagatggaagggttatctctcatgccatctctgaacatgttgaagatgcaggtgtccactcgggagatgccactctgatgctgcccacacaaaccatcagccaaggggccattgaaaaggtgaaggatgctacccggaagattgcaaaggcttttgccatctctggtccattcaacgtccaatttcttgtcaaaggaaatgatgtcttggtgattgagtgtaacttgagagcttctcgatccttcccctttgtttccaagactcttggggttgacttcattgatgtggccaccaaggtgatgattggagagaatgttgatgagaaacatcttccaacattggaccatcccataattcctgctgactatgttgcaattaaggctcccatgttttcctggccccggttgagggatgctgaccccattctgagatgtgagatggcttccactggagaggtggcttgctttggtgaaggtattcatacagccttcctaaaggcaatgctttccacaggatttaagataccccagaaaggcatcctgataggcatccagcaatcattccggccaagattccttggtgtggctgaacaattacacaatgaaggtttcaagctgtttgccacggaagccacatcagactggctcaacgccaacaatgtccctgccaccccagtggcatggccgtctcaagaaggacagaatcccagcctctcttccatcagaaaattgattagagatggcagcattgacctagtgattaaccttcccaacaacaacactaaatttgtccatgataattatgtgattcggaggacagctgttgatagtggaatccctctcctcactaattttcaggtgaccaaactttttgctgaagctgtgcagaaatctcgcaaggtggactccaagagtcttttccactacaggcagtacagtgctggaaaagcagcatagagatgcagacaccccagccccattattaaatcaacctgagccacatgttatctaaaggaactgattcacaactttctcagagatgaatattgataactaaacttcatttcagtttactttgttatgccttaatattctgtgtcttttgcaattaaattgtcagtcacttcttcaaaaccttacagtccttcctaagttactcttcatgagatttcatccatttactaatactgtatttttggtggactaggcttgcctatgtgcttatgtgtagctttttactttttatggtgctgattaatggtgatcaaggtaggaaaagttgctgttctattttctgaactctttctatactttaagatactctatttttaaaacactatctgcaaactcaggacactttaacagggcagaatactctaaaaacttgataaaattaaatatagatttaatttatgaaccttccatcatgatgtttgtgtattgcttctttttggatcctcattctcacccatttggctaatccaggaatattgttatcccttcccattatattgaagttgagaaatgtgacagaggcatttagagtatggacttttcttttctttttctttttctttttttctttttgagatggagtcacactctccaggctggagtgcagtggcacaatctcggctcactgcaatttccgtctcccaagttcaagcgattctcctgctttagactatggatttctttaaggaatactggtttgcagttttgttttctggactatatcagcagatggtagacagtgtttatgtagatgtgttgttgtttttatcattggattttaacttggcccgagtgaaataatcagatttttgtcattcacactctcccccagttttggaataacttggaagtaaggttcattcccttaagacgatggattctgttgaactatggggtcccacactgcactattaattccacccactgtaagggcaaggacaccattccttctacatataagaaaaaagtctctccccaagggcagcctttgttacttttaaatattttctgttattacaagtgctctaattgtgaacttttaaataaaatactattaagaggtaa

SEQ ID NO: 264 - DNA, 699 bp, Homo sapiens
  source 1..699: mol_type = genomic DNA
gctcttttaaaatagttgctttcttaggaaatgtagttgctttcttaacctcatcaaattcatgaagatttagccgaggcccatgctacccattatcttctaaatggccttcagaaatgatggagaaactgacacgttatgagtatttcctgccctacatggattttgaacttgaattcccagcctcgcttgcatctagacacaggcacgtgacccaagccccaccagtcagacaaacccaattgaaactttagttcaaaagcatccagtatgagggagcagtgaagtttgcattttcctgatgaaaatgttggaagagccacaaatcatcaaaatgacgaggattttgacagctttcaaagtggtgaggacactgaagactggttttggctttaccaatgtgactgcacaccaaaaatggaaattttcaagacctggcatcaggctcctttctgtcaaggcacagacagcacacattgtcctggaagatggaactaagatgaaaggttactcctttggccatccatcctctgttgctggtgaagtggtttttaatactggcctgggagggtacccagaagctattactgaccctgcctacaaaggacagattctcacaatggccaaccctattattgggaatggtggagctcctgatactactgctctggatgaactgggacttagcaaatatttgga

SEQ ID NO: 265 - DNA, 5698 bp, Homo sapiens
  source 1..5698: mol_type = genomic DNA
gaaatgtagttgctttcttaacctcatcaaattcatgaagatttagccgaggcccatgccacaaatcatcaaaatgacgaggattttgacagctttcaaagtggtgaggacactgaagactggttttggctttaccaatgtgactgcacaccaaaaatggaaattttcaagacctggcatcaggctcctttctgtcaaggcacagacagcacacattgtcctggaagatggaactaagatgaaaggttactcctttggccatccatcctctgttgctggtgaagtggtttttaatactggcctgggagggtacccagaagctattactgaccctgcctacaaaggacagattctcacaatggccaaccctattattgggaatggtggagctcctgatactactgctctggatgaactgggacttagcaaatatttggagtctaatggaatcaaggtttcaggtttgctggtgctggattatagtaaagactacaaccactggctggctaccaagagtttagggcaatggctacaggaagaaaaggttcctgcaatttatggagtggacacaagaatgctgactaaaataattcgggataagggtaccatgcttgggaagattgaatttgaaggtcagcctgtggattttgtggatccaaataaacagaatttgattgctgaggtttcaaccaaggatgtcaaagtgtacggcaaaggaaaccccacaaaagtggtagctgtagactgtgggattaaaaacaatgtaatccgcctgctagtaaagcgaggagctgaagtgcacttagttccctggaaccatgatttcaccaagatggagtatgatgggattttgatcgcgggaggaccggggaacccagctcttgcagaaccactaattcagaatgtcagaaagattttggagagtgatcgcaaggagccattgtttggaatcagtacaggaaacttaataacaggattggctgctggtgccaaaacctacaagatgtccatggccaacagagggcagaatcagcctgttttgaatatcacaaacaaacaggctttcattactgctcagaatcatggctatgccttggacaacaccctccctgctggctggaaaccactttttgtgaatgtcaacgatcaaacaaatgaggggattatgcatgagagcaaacccttcttcgctgtgcagttccacccagaggtcaccccggggccaatagacactgagtacctgtttgattcctttttctcactgataaagaaaggaaaagctaccaccattacatcagtcttaccgaagccagcactagttgcatctcgggttgaggtttccaaagtccttattctaggatcaggaggtctgtccattggtcaggctggagaatttgattactcaggatctcaagctgtaaaagccatgaaggaagaaaatgtcaaaactgttctgatgaacccaaacattgcatcagtccagaccaatgaggtgggcttaaagcaagcggatactgtctactttcttcccatcacccctcagtttgtcacagaggtcatcaaggcagaacagccagatgggttaattctgggcatgggtggccagacagctctgaactgtggagtggaactattcaagagaggtgtgctcaaggaatatggtgtgaaagtcctgggaacttcagttgagtccattatggctacggaagacaggcagctgttttcagataaactaaatgagatcaatgaaaagattgctccaagttttgcagtggaatcgattgaggatgcactgaaggcagcagacaccattggctacccagtgatgatccgttccgcctatgcactgggtgggttaggctcaggcatctgtcccaacagagagactttgatggacctcagcacaaaggcctttgctatgaccaaccaaattctggtggagaagtcagtgacaggttggaaagaaatagaatatgaagtggttcgagatgctgatgacaattgtgtcactgtctgtaacatggaaaatgttgatgccatgggtgttcacacaggtgactcagttgttgtggctcctgcccagacactctccaatgccgagtttcagatgttgagacgtacttcaatcaatgttgttcgccacttgggcattgtgggtgaatgcaacattcagtttgcccttcatcctacctcaatggaatactgcatcattgaagtgaatgccagactgtcccgaagctctgctctggcctcaaaagccactggctacccattggcattcattgctgcaaagattgccctaggaatcccacttccagaaattaagaacgtcgtatccgggaagacatcagcctgttttgaacctagcctggattacatggtcaccaagattccccgctgggatcttgaccgttttcatggaacatctagccgaattggtagctctatgaaaagtgtaggagaggtcatggctattggtcgtacctttgaggagagtttccagaaagctttacggatgtgccacccatctatagaaggtttcactccccgtctcccaatgaacaaagaatggccatctaatttagatcttagaaaagagttgtctgaaccaagcagcacgcgtatctatgccattgccaaggccattgatgacaacatgtcccttgatgagattgagaagctcacatacattgacaagtggtttttgtataagatgcgtgatattttaaacatggaaaagacactgaaaggcctcaacagtgagtccatgacagaagaaaccctgaaaagggcaaaggagattgggttctcagataagcagatttcaaaatgccttgggctcactgaggcccagacaagggagctgaggttaaagaaaaacatccacccttgggttaaacagattgatacactggctgcagaatacccatcagtaacaaactatctctatgttacctacaatggtcaggagcatgatgtcaattttgatgaccatggaatgatggtgctaggctgtggtccatatcacattggcagcagtgtggaatttgattggtgtgctgtctctagtatccgcacactgcgtcaacttggcaagaagacggtggtggtgaattgcaatcctgagactgtgagcacagactttgatgagtgtgacaaactgtactttgaagagttgtccttggagagaatcctagacatctaccatcaggaggcatgtggtggctgcatcatatcagttggaggccagattccaaacaacctggcagttcctctatacaagaatggtgtcaagatcatgggcacaagccccctgcagatcgacagggctgaggatcgctccatcttctcagctgtcttggatgagctgaaggtggctcaggcaccttggaaagctgttaatactttgaatgaagcactggaatttgcaaagtctgtggactacccctgcttgttgaggccttcctatgttttgagtgggtctgctatgaatgtggtattctctgaggatgagatgaaaaaattcctagaagaggcgactagagtttctcaggagcacccagtggtgctgacaaaatttgttgaaggggcccgagaagtagaaatggacgctgttggcaaagatggaagggttatctctcatgccatctctgaacatgttgaagatgcaggtgtccactcgggagatgccactctgatgctgcccacacaaaccatcagccaaggggccattgaaaaggtgaaggatgctacccggaagattgcaaaggcttttgccatctctggtccattcaacgtccaatttcttgtcaaaggaaatgatgtcttggtgattgagtgtaacttgagagcttctcgatccttcccctttgtttccaagactcttggggttgacttcattgatgtggccaccaaggtgatgattggagagaatgttgatgagaaacatcttccaacattggaccatcccataattcctgctgactatgttgcaattaaggctcccatgttttcctggccccggttgagggatgctgaccccattctgagatgtgagatggcttccactggagaggtggcttgctttggtgaaggtattcatacagccttcctaaaggcaatgctttccacaggatttaagataccccagaaaggcatcctgataggcatccagcaatcattccggccaagattccttggtgtggctgaacaattacacaatgaaggtttcaagctgtttgccacggaagccacatcagactggctcaacgccaacaatgtccctgccaccccagtggcatggccgtctcaagaaggacagaatcccagcctctcttccatcagaaaattgattagagatggcagcattgacctagtgattaaccttcccaacaacaacactaaatttgtccatgataattatgtgattcggaggacagctgttgatagtggaatccctctcctcactaattttcaggtgaccaaactttttgctgaagctgtgcagaaatctcgcaaggtggactccaagagtcttttccactacaggcagtacagtgctggaaaagcagcatagagatgcagacaccccagccccattattaaatcaacctgagccacatgttatctaaaggaactgattcacaactttctcagagatgaatattgataactaaacttcatttcagtttactttgttatgccttaatattctgtgtcttttgcaattaaattgtcagtcacttcttcaaaaccttacagtccttcctaagttactcttcatgagatttcatccatttactaatactgtatttttggtggactaggcttgcctatgtgcttatgtgtagctttttactttttatggtgctgattaatggtgatcaaggtaggaaaagttgctgttctattttctgaactctttctatactttaagatactctatttttaaaacactatctgcaaactcaggacactttaacagggcagaatactctaaaaacttgataaaattaaatatagatttaatttatgaaccttccatcatgatgtttgtgtattgcttctttttggatcctcattctcacccatttggctaatccaggaatattgttatcccttcccattatattgaagttgagaaatgtgacagaggcatttagagtatggacttttcttttctttttctttttctttttttctttttgagatggagtcacactctccaggctggagtgcagtggcacaatctcggctcactgcaatttccgtctcccaagttcaagcgattctcctgctttagactatggatttctttaaggaatactggtttgcagttttgttttctggactatatcagcagatggtagacagtgtttatgtagatgtgttgttgtttttatcattggattttaacttggcccgagtgaaataatcagatttttgtcattcacactctcccccagttttggaataacttggaagtaaggttcattcccttaagacgatggattctgttgaactatggggtcccacactgcactattaattccacccactgtaagggcaaggacaccattccttctacatataagaaaaaagtctctccccaagggcagcctttgttacttttaaatattttctgttattacaagtgctctaattgtgaacttttaaataaaatactattaagaggtaa

SEQ ID NO: 266 - DNA, 4770 bp, Homo sapiens
  source 1..4770: mol_type = genomic DNA
gagaataaacagcagcaggagaaggaggggaagggtgttggaggggagagagggcatgcatgcacatacatagatgattcagacggcttcagaaaagaaccacaaggaatgcttagaggagttttgtatttaatctaaatatttttacttttttgtgtgtgagctcttagttcattgttcaaacccatctttccaaataaattcttctggtgatatccagaaaaatctgaagtctattgtgacttccccacacccaggggcctccagtagcaaatcttcattgtcagaactctcagaaaagacttcgagtacctgtttgattcctttttctcactgataaagaaaggaaaagctaccaccattacatcagtcttaccgaagccagcactagttgcatctcgggttgaggtttccaaagtccttattctaggatcaggaggtctgtccattggtcaggctggagaatttgattactcaggatctcaagctgtaaaagccatgaaggaagaaaatgtcaaaactgttctgatgaacccaaacattgcatcagtccagaccaatgaggtgggcttaaagcaagcggatactgtctactttcttcccatcacccctcagtttgtcacagaggtcatcaaggcagaacagccagatgggttaattctgggcatgggtggccagacagctctgaactgtggagtggaactattcaagagaggtgtgctcaaggaatatggtgtgaaagtcctgggaacttcagttgagtccattatggctacggaagacaggcagctgttttcagataaactaaatgagatcaatgaaaagattgctccaagttttgcagtggaatcgattgaggatgcactgaaggcagcagacaccattggctacccagtgatgatccgttccgcctatgcactgggtgggttaggctcaggcatctgtcccaacagagagactttgatggacctcagcacaaaggcctttgctatgaccaaccaaattctggtggagaagtcagtgacaggttggaaagaaatagaatatgaagtggttcgagatgctgatgacaattgtgtcactgtctgtaacatggaaaatgttgatgccatgggtgttcacacaggtgactcagttgttgtggctcctgcccagacactctccaatgccgagtttcagatgttgagacgtacttcaatcaatgttgttcgccacttgggcattgtgggtgaatgcaacattcagtttgcccttcatcctacctcaatggaatactgcatcattgaagtgaatgccagactgtcccgaagctctgctctggcctcaaaagccactggctacccattggcattcattgctgcaaagattgccctaggaatcccacttccagaaattaagaacgtcgtatccgggaagacatcagcctgttttgaacctagcctggattacatggtcaccaagattccccgctgggatcttgaccgttttcatggaacatctagccgaattggtagctctatgaaaagtgtaggagaggtcatggctattggtcgtacctttgaggagagtttccagaaagctttacggatgtgccacccatctatagaaggtttcactccccgtctcccaatgaacaaagaatggccatctaatttagatcttagaaaagagttgtctgaaccaagcagcacgcgtatctatgccattgccaaggccattgatgacaacatgtcccttgatgagattgagaagctcacatacattgacaagtggtttttgtataagatgcgtgatattttaaacatggaaaagacactgaaaggcctcaacagtgagtccatgacagaagaaaccctgaaaagggcaaaggagattgggttctcagataagcagatttcaaaatgccttgggctcactgaggcccagacaagggagctgaggttaaagaaaaacatccacccttgggttaaacagattgatacactggctgcagaatacccatcagtaacaaactatctctatgttacctacaatggtcaggagcatgatgtcaattttgatgaccatggaatgatggtgctaggctgtggtccatatcacattggcagcagtgtggaatttgattggtgtgctgtctctagtatccgcacactgcgtcaacttggcaagaagacggtggtggtgaattgcaatcctgagactgtgagcacagactttgatgagtgtgacaaactgtactttgaagagttgtccttggagagaatcctagacatctaccatcaggaggcatgtggtggctgcatcatatcagttggaggccagattccaaacaacctggcagttcctctatacaagaatggtgtcaagatcatgggcacaagccccctgcagatcgacagggctgaggatcgctccatcttctcagctgtcttggatgagctgaaggtggctcaggcaccttggaaagctgttaatactttgaatgaagcactggaatttgcaaagtctgtggactacccctgcttgttgaggccttcctatgttttgagtgggtctgctatgaatgtggtattctctgaggatgagatgaaaaaattcctagaagaggcgactagagtttctcaggagcacccagtggtgctgacaaaatttgttgaaggggcccgagaagtagaaatggacgctgttggcaaagatggaagggttatctctcatgccatctctgaacatgttgaagatgcaggtgtccactcgggagatgccactctgatgctgcccacacaaaccatcagccaaggggccattgaaaaggtgaaggatgctacccggaagattgcaaaggcttttgccatctctggtccattcaacgtccaatttcttgtcaaaggaaatgatgtcttggtgattgagtgtaacttgagagcttctcgatccttcccctttgtttccaagactcttggggttgacttcattgatgtggccaccaaggtgatgattggagagaatgttgatgagaaacatcttccaacattggaccatcccataattcctgctgactatgttgcaattaaggctcccatgttttcctggccccggttgagggatgctgaccccattctgagatgtgagatggcttccactggagaggtggcttgctttggtgaaggtattcatacagccttcctaaaggcaatgctttccacaggatttaagataccccagaaaggcatcctgataggcatccagcaatcattccggccaagattccttggtgtggctgaacaattacacaatgaaggtttcaagctgtttgccacggaagccacatcagactggctcaacgccaacaatgtccctgccaccccagtggcatggccgtctcaagaaggacagaatcccagcctctcttccatcagaaaattgattagagatggcagcattgacctagtgattaaccttcccaacaacaacactaaatttgtccatgataattatgtgattcggaggacagctgttgatagtggaatccctctcctcactaattttcaggtgaccaaactttttgctgaagctgtgcagaaatctcgcaaggtggactccaagagtcttttccactacaggcagtacagtgctggaaaagcagcatagagatgcagacaccccagccccattattaaatcaacctgagccacatgttatctaaaggaactgattcacaactttctcagagatgaatattgataactaaacttcatttcagtttactttgttatgccttaatattctgtgtcttttgcaattaaattgtcagtcacttcttcaaaaccttacagtccttcctaagttactcttcatgagatttcatccatttactaatactgtatttttggtggactaggcttgcctatgtgcttatgtgtagctttttactttttatggtgctgattaatggtgatcaaggtaggaaaagttgctgttctattttctgaactctttctatactttaagatactctatttttaaaacactatctgcaaactcaggacactttaacagggcagaatactctaaaaacttgataaaattaaatatagatttaatttatgaaccttccatcatgatgtttgtgtattgcttctttttggatcctcattctcacccatttggctaatccaggaatattgttatcccttcccattatattgaagttgagaaatgtgacagaggcatttagagtatggacttttcttttctttttctttttctttttttctttttgagatggagtcacactctccaggctggagtgcagtggcacaatctcggctcactgcaatttccgtctcccaagttcaagcgattctcctgctttagactatggatttctttaaggaatactggtttgcagttttgttttctggactatatcagcagatggtagacagtgtttatgtagatgtgttgttgtttttatcattggattttaacttggcccgagtgaaataatcagatttttgtcattcacactctcccccagttttggaataacttggaagtaaggttcattcccttaagacgatggattctgttgaactatggggtcccacactgcactattaattccacccactgtaagggcaaggacaccattccttctacatataagaaaaaagtctctccccaagggcagcctttgttacttttaaatattttctgttattacaagtgctctaattgtgaacttttaaataaaatactattaagaggtaa

SEQ ID NO: 267 - DNA, 585 bp, Homo sapiens
  source 1..585: mol_type = genomic DNA
gctcttttaaaatagttgctttcttaggaaatgtagttgctttcttaacctcatcaaattcatgaagatttagccgaggcccatgctacccattatcttctaaatggccttcagaaatgatggagaaactgacacgttatgagtatttcctgccctacatggattttgaacttgaattcccagcctcgcttgcatctagacacagccacaaatcatcaaaatgacgaggattttgacagctttcaaagtggtgaggacactgaagactggttttggctttaccaatgtgactgcacaccaaaaatggaaattttcaagacctggcatcaggctcctttctgtcaaggcacagacagcacacattgtcctggaagatggaactaagatgaaaggttactcctttggccatccatcctctgttgctggtgaagtggtttttaatactggcctgggagggtacccagaagctattactgaccctgcctacaaaggacagattctcacaatggccaaccctattattgggaatggtggagctcctgatactactgctctggatgaactgggacttagcaaatatttgga

SEQ ID NO: 268 - DNA, 1542 bp, Homo sapiens
  source 1..1542: mol_type = genomic DNA
atgacgaggattttgacagctttcaaagtggtgaggacactgaagactggttttggctttaccaatgtgactgcacaccaaaaatggaaattttcaagacctggcatcaggctcctttctgtcaaggcacagacagcacacattgtcctggaagatggaactaagatgaaaggttactcctttggccatccatcctctgttgctggtgaagtggtttttaatactggcctgggagggtacccagaagctattactgaccctgcctacaaaggacagattctcacaatggccaaccctattattgggaatggtggagctcctgatactactgctctggatgaactgggacttagcaaatatttggagtctaatggaatcaaggtttcaggtttgctggtgctggattatagtaaagactacaaccactggctggctaccaagagtttagggcaatggctacaggaagaaaaggttcctgcaatttatggagtggacacaagaatgctgactaaaataattcgggataagggtaccatgcttgggaagattgaatttgaaggtcagcctgtggattttgtggatccaaataaacagaatttgattgctgaggtttcaaccaaggatgtcaaagtgtacggcaaaggaaaccccacaaaagtggtagctgtagactgtgggattaaaaacaatgtaatccgcctgctagtaaagcgaggagctgaagtgcacttagttccctggaaccatgatttcaccaagatggagtatgatgggattttgatcgcgggaggaccggggaacccagctcttgcagaaccactaattcagaatgtcagaaagattttggagagtgatcgcaaggagccattgtttggaatcagtacaggaaacttaataacaggattggctgctggtgccaaaacctacaagatgtccatggccaacagagggcagaatcagcctgttttgaatatcacaaacaaacaggctttcattactgctcagaatcatggctatgccttggacaacaccctccctgctggctggaaaccactttttgtgaatgtcaacgatcaaacaaatgaggggattatgcatgagagcaaacccttcttcgctgtgcagttccacccagaggtcaccccggggccaatagacactgagtacctgtttgattcctttttctcactgataaagaaaggaaaagctaccaccattacatcagtcttaccgaagccagcactagttgcatctcgggttgaggtttccaaagtccttattctaggatcaggaggtctgtccattggtcaggctggagaatttgattactcaggatctcaagctgtaaaagccatgaaggaagaaaatgtcaaaactgttctgatgaacccaaacattgcatcagtccagaccaatgaggtgggcttaaagcaagcggatactgtctactttcttcccatcacccctcagtttgtcacagaggtcatcaaggcagaacagccagatgggttaattctgggcatgggtgccagacagctctga

SEQ ID NO: 269 - DNA, 5647 bp, Homo sapiens
  source 1..5647: mol_type = genomic DNA
agacctaggccacaaatcatcaaaatgacgaggattttgacagctttcaaagtggtgaggacactgaagactggttttggctttaccaatgtgactgcacaccaaaaatggaaattttcaagacctggcatcaggctcctttctgtcaaggcacagacagcacacattgtcctggaagatggaactaagatgaaaggttactcctttggccatccatcctctgttgctggtgaagtggtttttaatactggcctgggagggtacccagaagctattactgaccctgcctacaaaggacagattctcacaatggccaaccctattattgggaatggtggagctcctgatactactgctctggatgaactgggacttagcaaatatttggagtctaatggaatcaaggtttcaggtttgctggtgctggattatagtaaagactacaaccactggctggctaccaagagtttagggcaatggctacaggaagaaaaggttcctgcaatttatggagtggacacaagaatgctgactaaaataattcgggataagggtaccatgcttgggaagattgaatttgaaggtcagcctgtggattttgtggatccaaataaacagaatttgattgctgaggtttcaaccaaggatgtcaaagtgtacggcaaaggaaaccccacaaaagtggtagctgtagactgtgggattaaaaacaatgtaatccgcctgctagtaaagcgaggagctgaagtgcacttagttccctggaaccatgatttcaccaagatggagtatgatgggattttgatcgcgggaggaccggggaacccagctcttgcagaaccactaattcagaatgtcagaaagattttggagagtgatcgcaaggagccattgtttggaatcagtacaggaaacttaataacaggattggctgctggtgccaaaacctacaagatgtccatggccaacagagggcagaatcagcctgttttgaatatcacaaacaaacaggctttcattactgctcagaatcatggctatgccttggacaacaccctccctgctggctggaaaccactttttgtgaatgtcaacgatcaaacaaatgaggggattatgcatgagagcaaacccttcttcgctgtgcagttccacccagaggtcaccccggggccaatagacactgagtacctgtttgattcctttttctcactgataaagaaaggaaaagctaccaccattacatcagtcttaccgaagccagcactagttgcatctcgggttgaggtttccaaagtccttattctaggatcaggaggtctgtccattggtcaggctggagaatttgattactcaggatctcaagctgtaaaagccatgaaggaagaaaatgtcaaaactgttctgatgaacccaaacattgcatcagtccagaccaatgaggtgggcttaaagcaagcggatactgtctactttcttcccatcacccctcagtttgtcacagaggtcatcaaggcagaacagccagatgggttaattctgggcatgggtggccagacagctctgaactgtggagtggaactattcaagagaggtgtgctcaaggaatatggtgtgaaagtcctgggaacttcagttgagtccattatggctacggaagacaggcagctgttttcagataaactaaatgagatcaatgaaaagattgctccaagttttgcagtggaatcgattgaggatgcactgaaggcagcagacaccattggctacccagtgatgatccgttccgcctatgcactgggtgggttaggctcaggcatctgtcccaacagagagactttgatggacctcagcacaaaggcctttgctatgaccaaccaaattctggtggagaagtcagtgacaggttggaaagaaatagaatatgaagtggttcgagatgctgatgacaattgtgtcactgtctgtaacatggaaaatgttgatgccatgggtgttcacacaggtgactcagttgttgtggctcctgcccagacactctccaatgccgagtttcagatgttgagacgtacttcaatcaatgttgttcgccacttgggcattgtgggtgaatgcaacattcagtttgcccttcatcctacctcaatggaatactgcatcattgaagtgaatgccagactgtcccgaagctctgctctggcctcaaaagccactggctacccattggcattcattgctgcaaagattgccctaggaatcccacttccagaaattaagaacgtcgtatccgggaagacatcagcctgttttgaacctagcctggattacatggtcaccaagattccccgctgggatcttgaccgttttcatggaacatctagccgaattggtagctctatgaaaagtgtaggagaggtcatggctattggtcgtacctttgaggagagtttccagaaagctttacggatgtgccacccatctatagaaggtttcactccccgtctcccaatgaacaaagaatggccatctaatttagatcttagaaaagagttgtctgaaccaagcagcacgcgtatctatgccattgccaaggccattgatgacaacatgtcccttgatgagattgagaagctcacatacattgacaagtggtttttgtataagatgcgtgatattttaaacatggaaaagacactgaaaggcctcaacagtgagtccatgacagaagaaaccctgaaaagggcaaaggagattgggttctcagataagcagatttcaaaatgccttgggctcactgaggcccagacaagggagctgaggttaaagaaaaacatccacccttgggttaaacagattgatacactggctgcagaatacccatcagtaacaaactatctctatgttacctacaatggtcaggagcatgatgtcaattttgatgaccatggaatgatggtgctaggctgtggtccatatcacattggcagcagtgtggaatttgattggtgtgctgtctctagtatccgcacactgcgtcaacttggcaagaagacggtggtggtgaattgcaatcctgagactgtgagcacagactttgatgagtgtgacaaactgtactttgaagagttgtccttggagagaatcctagacatctaccatcaggaggcatgtggtggctgcatcatatcagttggaggccagattccaaacaacctggcagttcctctatacaagaatggtgtcaagatcatgggcacaagccccctgcagatcgacagggctgaggatcgctccatcttctcagctgtcttggatgagctgaaggtggctcaggcaccttggaaagctgttaatactttgaatgaagcactggaatttgcaaagtctgtggactacccctgcttgttgaggccttcctatgttttgagtgggtctgctatgaatgtggtattctctgaggatgagatgaaaaaattcctagaagaggcgactagagtttctcaggagcacccagtggtgctgacaaaatttgttgaaggggcccgagaagtagaaatggacgctgttggcaaagatggaagggttatctctcatgccatctctgaacatgttgaagatgcaggtgtccactcgggagatgccactctgatgctgcccacacaaaccatcagccaaggggccattgaaaaggtgaaggatgctacccggaagattgcaaaggcttttgccatctctggtccattcaacgtccaatttcttgtcaaaggaaatgatgtcttggtgattgagtgtaacttgagagcttctcgatccttcccctttgtttccaagactcttggggttgacttcattgatgtggccaccaaggtgatgattggagagaatgttgatgagaaacatcttccaacattggaccatcccataattcctgctgactatgttgcaattaaggctcccatgttttcctggccccggttgagggatgctgaccccattctgagatgtgagatggcttccactggagaggtggcttgctttggtgaaggtattcatacagccttcctaaaggcaatgctttccacaggatttaagataccccagaaaggcatcctgataggcatccagcaatcattccggccaagattccttggtgtggctgaacaattacacaatgaaggtttcaagctgtttgccacggaagccacatcagactggctcaacgccaacaatgtccctgccaccccagtggcatggccgtctcaagaaggacagaatcccagcctctcttccatcagaaaattgattagagatggcagcattgacctagtgattaaccttcccaacaacaacactaaatttgtccatgataattatgtgattcggaggacagctgttgatagtggaatccctctcctcactaattttcaggtgaccaaactttttgctgaagctgtgcagaaatctcgcaaggtggactccaagagtcttttccactacaggcagtacagtgctggaaaagcagcatagagatgcagacaccccagccccattattaaatcaacctgagccacatgttatctaaaggaactgattcacaactttctcagagatgaatattgataactaaacttcatttcagtttactttgttatgccttaatattctgtgtcttttgcaattaaattgtcagtcacttcttcaaaaccttacagtccttcctaagttactcttcatgagatttcatccatttactaatactgtatttttggtggactaggcttgcctatgtgcttatgtgtagctttttactttttatggtgctgattaatggtgatcaaggtaggaaaagttgctgttctattttctgaactctttctatactttaagatactctatttttaaaacactatctgcaaactcaggacactttaacagggcagaatactctaaaaacttgataaaattaaatatagatttaatttatgaaccttccatcatgatgtttgtgtattgcttctttttggatcctcattctcacccatttggctaatccaggaatattgttatcccttcccattatattgaagttgagaaatgtgacagaggcatttagagtatggacttttcttttctttttctttttctttttttctttttgagatggagtcacactctccaggctggagtgcagtggcacaatctcggctcactgcaatttccgtctcccaagttcaagcgattctcctgctttagactatggatttctttaaggaatactggtttgcagttttgttttctggactatatcagcagatggtagacagtgtttatgtagatgtgttgttgtttttatcattggattttaacttggcccgagtgaaataatcagatttttgtcattcacactctcccccagttttggaataacttggaagtaaggttcattcccttaagacgatggattctgttgaactatggggtcccacactgcactattaattccacccactgtaagggcaaggacaccattccttctacatataagaaaaaagtctctccccaagggcagcctttgttacttttaaatattttctgttattacaagtgctctaattgtgaacttttaaataaaatactattaagaggt

SEQ ID NO: 270 - DNA, 1410 bp, Homo sapiens
  source 1..1410: mol_type = genomic DNA
gatcgctgtgcagtcagccttaaacactgactgcacccctcccagatttcttttacattaactaaaaagtcttatcacacaatctcataaaatttatgtaatttcatttaattttagccacaaatcatcaaaatgacgaggattttgacagctttcaaagtggtgaggacactgaagactggttttggctttaccaatgtgactgcacaccaaaaatggaaattttcaagacctggcatcaggctcctttctgtcaaggcacagacagcacacattgtcctggaagatagagatgcagacaccccagccccattattaaatcaacctgagccacatgttatctaaaggaactgattcacaactttctcagagatgaatattgataactaaacttcatttcagtttactttgttatgccttaatattctgtgtcttttgcaattaaattgtcagtcacttcttcaaaaccttacagtccttcctaagttactcttcatgagatttcatccatttactaatactgtatttttggtggactaggcttgcctatgtgcttatgtgtagctttttactttttatggtgctgattaatggtgatcaaggtaggaaaagttgctgttctattttctgaactctttctatactttaagatactctatttttaaaacactatctgcaaactcaggacactttaacagggcagaatactctaaaaacttgataaaattaaatatagatttaatttatgaaccttccatcatgatgtttgtgtattgcttctttttggatcctcattctcacccatttggctaatccaggaatattgttatcccttcccattatattgaagttgagaaatgtgacagaggcatttagagtatggacttttcttttctttttctttttctttttttctttttgagatggagtcacactctccaggctggagtgcagtggcacaatctcggctcactgcaatttccgtctcccaagttcaagcgattctcctgctttagactatggatttctttaaggaatactggtttgcagttttgttttctggactatatcagcagatggtagacagtgtttatgtagatgtgttgttgtttttatcattggattttaacttggcccgagtgaaataatcagatttttgtcattcacactctcccccagttttggaataacttggaagtaaggttcattcccttaagacgatggattctgttgaactatggggtcccacactgcactattaattccacccactgtaagggcaaggacaccattccttctacatataagaaaaaagtctctccccaagggcagcctttgttacttttaaatattttctgttattacaagtgctctaattgtgaacttttaaataaaatactattaagaggt

SEQ ID NO: 271 - DNA, 1664 bp, Homo sapiens
  source 1..1664: mol_type = genomic DNA
ggggcgtgaagggagccgggatcagccaggggccagcatgagccggagggagggaagtctggaagacccccagactgattcctcagtctcacttcttccccacttggaggccaagatccgtcagacacacagccttgcgcacctcctcaccaaatacgctgagcagctgctccaggaatatgtgcagctccagggagaccccttcgggctgcccagcttctcgccgccgcggctgccggtggccggcctgagcgccccggctccgagccacgcggggctgccagtgcacgagcggctgcggctggacgcggcggcgctggccgcgctgcccccgctgctggacgcagtgtgtcgccgccaggccgagctgaacccgcgcgcgccgcgcctgctgcgccgcctggaggacgcggcgcgccaggcccgggccctgggcgccgccgtggaggccttgctggccgcgctgggcgccgccaaccgcgggccccgggccgagccccccgccgccaccgcctcagccgcctccgccaccggggtcttccccgccaaggtgctggggctccgcgtttgcggcctctaccgcgagtggctgagccgcaccgagggcgacctgggccagctgctgcccgggggctcggcctgagcgccgcggggcagctcgccccgcctcctcccgctgggttccgtctctccttccgcttctttgtctttctctgccgctgtcggtgtctgtctgtctgctcttagctgtctccattgcctcggccttctttgctttttgtgggggagaggggaggggacgggcagggtctctgtcgcccaggctggggtgcagtggcgcgatcccagcactgcagcctcaacctcctgggctcaagccatccttccgcctcagcttccccagcagctgggactacaggcacgcgccaccacagccggctaattttttatttaattttttgtagagacgaggtttcgccatgttgcccaggctggtcttgaactccggggctcaagcgatcctcccgcttcagcctccctaagtgctgggattgcaggcgtgagccactttcccagcctctctttgctttgcctgccccgttctcttaactcttggaccctcctcgtctgcatggtaactccgtctgagtctaccattttcttgctctccctccttccttgggcctgcctcagttccctttggcctccccctttacccagctcttggggtgtctctgttttttccatccccacttcctgccttctcgtggccctgtgtgagcacatgtgtacatctcagccttatctcaaggaggtgacaccttctctccttgtccccatctggctgtctctctgtgcttccctggccaggggcgtgcctgctggtcctatggggggaaggctactctgcatctcagccaccttcctcaggctcactccacctacatccccagtctgccacaccccatccctttgggcctcagccctgtccctttgatgtcctcctttccttcagcccctctgccctgtccctgcacacctccactgcctcccagcagatctgtggagacaaaacaagcaacaccttaaaagagttttatttctgaaaataaattaattttttgtaaataaaatgtttaaaaataaaaaagaaactaaagtta

SEQ ID NO: 272 - DNA, 1660 bp, Homo sapiens
  source 1..1660: mol_type = genomic DNA
ggggcgtgaagggagccgggatcagccaggggccagcatgagccggagggagggaagtctggacccccagactgattcctcagtctcacttcttccccacttggaggccaagatccgtcagacacacagccttgcgcacctcctcaccaaatacgctgagcagctgctccaggaatatgtgcagctccagggagaccccttcgggctgcccagcttctcgccgccgcggctgccggtggccggcctgagcgccccggctccgagccacgcggggctgccagtgcacgagcggctgcggctggacgcggcggcgctggccgcgctgcccccgctgctggacgcagtgtgtcgccgccaggccgagctgaacccgcgcgcgccgcgcctgctgcgccgcctggaggacgcggcgcgccaggcccgggccctgggcgccgccgtggaggccttgctggccgcgctgggcgccgccaaccgcgggccccgggccgagccccccgccgccaccgcctcagccgcctccgccaccggggtcttccccgccaaggtgctggggctccgcgtttgcggcctctaccgcgagtggctgagccgcaccgagggcgacctgggccagctgctgcccgggggctcggcctgagcgccgcggggcagctcgccccgcctcctcccgctgggttccgtctctccttccgcttctttgtctttctctgccgctgtcggtgtctgtctgtctgctcttagctgtctccattgcctcggccttctttgctttttgtgggggagaggggaggggacgggcagggtctctgtcgcccaggctggggtgcagtggcgcgatcccagcactgcagcctcaacctcctgggctcaagccatccttccgcctcagcttccccagcagctgggactacaggcacgcgccaccacagccggctaattttttatttaattttttgtagagacgaggtttcgccatgttgcccaggctggtcttgaactccggggctcaagcgatcctcccgcttcagcctccctaagtgctgggattgcaggcgtgagccactttcccagcctctctttgctttgcctgccccgttctcttaactcttggaccctcctcgtctgcatggtaactccgtctgagtctaccattttcttgctctccctccttccttgggcctgcctcagttccctttggcctccccctttacccagctcttggggtgtctctgttttttccatccccacttcctgccttctcgtggccctgtgtgagcacatgtgtacatctcagccttatctcaaggaggtgacaccttctctccttgtccccatctggctgtctctctgtgcttccctggccaggggcgtgcctgctggtcctatggggggaaggctactctgcatctcagccaccttcctcaggctcactccacctacatccccagtctgccacaccccatccctttgggcctcagccctgtccctttgatgtcctcctttccttcagcccctctgccctgtccctgcacacctccactgcctcccagcagatctgtggagacaaaacaagcaacaccttaaaagagttttatttctgaaaataaattaattttttgtaaataaaatgtttaaaaataaaaaagaaactaaagtt

SEQ ID NO: 273 - DNA, 745 bp, Homo sapiens
  source 1..745: mol_type = genomic DNA
gtcctgtgaagcaatagccaggggctaaagcaaaccccagcccacaccctggcaggcagccagggatgggtggatcaggaaggctcctggttgggcttttgcatcaggctcaggctgggcataaaggaggctcctgtgggctagagggaggcagacatggggaccatgaagacccaaagggatggccactccctggggcggtggtcactggtgctcctgctgctgggcctggtgatgcctctggccatcattgcccaggtcctcagctacaaggaagctgtgcttcgtgctatagatggcatcaaccagcggtcctcggatgctaacctctaccgcctcctggacctggaccccaggcccacgatggatggggacccagacacgccaaagcctgtgagcttcacagtgaaggagacagtgtgccccaggacgacacagcagtcaccagaggattgtgacttcaagaaggacgggctggtgaagcggtgtatggggacagtgaccctcaaccaggccaggggctcctttgacatcagttgtgataaggataacaagagatttgccctgctgggtgatttcttccggaaatctaaagagaagattggcaaagagtttaaaagaattgtccagagaatcaaggattttttgcggaatcttgtacccaggacagagtcctagtgtgtgccctaccctggctcaggcttctgggctctgagaaataaactatgagagcaatttcctcagg

SEQ ID NO: 274 - DNA, 714 bp, Homo sapiens
  source 1..714: mol_type = genomic DNA
taaagcaaaccccagcccacaccctggcaggcagccagggatgggtggatcaggaaggctcctggttgggcttttgcatcaggctcaggctgggcataaaggaggctcctgtgggctagagggaggcagacatggggaccatgaagacccaaagggatggccactccctggggcggtggtcactggtgctcctgctgctgggcctggtgatgcctctggccatcattgcccaggtcctcagctacaaggaagctgtgcttcgtgctatagatggcatcaaccagcggtcctcggatgctaacctctaccgcctcctggacctggaccccaggcccacgatggatggggacccagacacgccaaagcctgtgagcttcacagtgaaggagacagtgtgccccaggacgacacagcagtcaccagaggattgtgacttcaagaaggacgggctggtgaagcggtgtatggggacagtgaccctcaaccaggccaggggctcctttgacatcagttgtgataaggataacaagagatttgccctgctgggtgatttcttccggaaatctaaagagaagattggcaaagagtttaaaagaattgtccagagaatcaaggattttttgcggaatcttgtacccaggacagagtcctagtgtgtgccctaccctggctcaggcttctgggctctgagaaataaactatgagagcaatttc

SEQ ID NO: 275 - DNA, 1290 bp, Homo sapiens
  source 1..1290: mol_type = genomic DNA
ctacaggttgcgggcctttgtgaccccaggctgcggccgcaaggtgcgcagtagtgggctgggccggggcaccagtcgggtttggttttgctccgcccggccgagctgcagggaccgcacggtgcccgggtctcccgccgcagagcagccgctggcccgggccgggggagccggcgctgaccaccgcgcgctgtccccgcaggcagccggcctgccgccatggccgaccacctgatgctcgccgagggctaccgcctggtgcagaggccgccgtccgccgcggccgcccatggccctcatgcgctccggactctgccgccgtacgcgggcccgggcctggacagtgggctgaggccgcggggggctccgctggggccgccgccgccccgccaacccggggccctggcgtacggggccttcgggccgccgtcctccttccagccctttccggccgtgcctccgccggccgcgggcatcgcgcacctgcagcctgtggcgacgccgtaccccggccgcgcggccgcgccccccaacgctccgggaggccccccgggcccgcagccggcgccaagcgccgcagccccgccgccgcccgcgcacgccctgggcggcatggacgccgaactcatcgacgaggaggcgctgacgtcgctggagctggagctcgggctgcaccgcgtgcgcgagctgcccgagctcttcctgggccagagcgagttcgactgcttctcggacttggggtccgcgccgcccgccggctccgtgagctgctgagggcggccggcgcccgcccggcgtgccggagaggagaaagggcccgactgcccgccggaccctgcacccagcgactgggccccgcgcgcgccctccgcgagggtggaggcggcggctgtgtgcgcagggcccggcaccggactgggaccctggcgtccctccaggccttgcctcctgcgggaggacagtttggcttcacttctctgaccccagcctcggccgtaaagtgaaagagaccggaccagcttcagctttcggactctggttcttggatcgtgtcctctccccctcgccgccctcttcccccaatctgagccattgcaggcctctgcctgctgccccctctctcctcgggatcgggtccccagagccaccatctcctgagcctcccaccccgctgcctgggccctgtggttgctgggcctcccacctcaaggaggggaaggttgtacagcccgaacccgtggagcaatgccctgtctggcctccaaaaccaaaataaaactgggtcacttt

SEQ ID NO: 276 - DNA, 4676 bp, Homo sapiens
  source 1..4676: mol_type = genomic DNA
agagttatgcacaccctaatgcctccaacaataactgttgactttttattttcagtcagagaagcctggcaaccaagaactgtttttttggtggtttacgagaacttaactgaattggaaaatatttgctttaatgaaacaatttactcttgtgcaacactaaattgtgtcaatcaagcaaataaggaagaaagtcttatttataaaattgcctgctcctgattttacttcatttcttctcaggctccaagaaggggaaaaaaatgaagattttgatacttggtatttttctgtttttatgtagtaccccagcctgggcgaaagaaaagcattattacattggaattattgaaacgacttgggattatgcctctgaccatggggaaaagaaacttatttctgttgacacggaacattccaatatctatcttcaaaatggcccagatagaattgggagactatataagaaggccctttatcttcagtacacagatgaaacctttaggacaactatagaaaaaccggtctggcttgggtttttaggccctattatcaaagctgaaactggagataaagtttatgtacacttaaaaaaccttgcctctaggccctacacctttcattcacatggaataacttactataaggaacatgagggggccatctaccctgataacaccacagattttcaaagagcagatgacaaagtatatccaggagagcagtatacatacatgttgcttgccactgaagaacaaagtcctggggaaggagatggcaattgtgtgactaggatttaccattcccacattgatgctccaaaagatattgcctcaggactcatcggacctttaataatctgtaaaaaagattctctagataaagaaaaagaaaaacatattgaccgagaatttgtggtgatgttttctgtggtggatgaaaatttcagctggtacctagaagacaacattaaaacctactgctcagaaccagagaaagttgacaaagacaacgaagacttccaggagagtaacagaatgtattctgtgaatggatacacttttggaagtctcccaggactctccatgtgtgctgaagacagagtaaaatggtacctttttggtatgggtaatgaagttgatgtgcacgcagctttctttcacgggcaagcactgactaacaagaactaccgtattgacacaatcaacctctttcctgctaccctgtttgatgcttatatggtggcccagaaccctggagaatggatgctcagctgtcagaatctaaaccatctgaaagccggtttgcaagcctttttccaggtccaggagtgtaacaagtcttcatcaaaggataatatccgtgggaagcatgttagacactactacattgccgctgaggaaatcatctggaactatgctccctctggtatagacatcttcactaaagaaaacttaacagcacctggaagtgactcagcggtgttttttgaacaaggtaccacaagaattggaggctcttataaaaagctggtttatcgtgagtacacagatgcctccttcacaaatcgaaaggagagaggccctgaagaagagcatcttggcatcctgggtcctgtcatttgggcagaggtgggagacaccatcagagtaaccttccataacaaaggagcatatcccctcagtattgagccgattggggtgagattcaataagaacaacgagggcacatactattccccaaattacaacccccagagcagaagtgtgcctccttcagcctcccatgtggcacccacagaaacattcacctatgaatggactgtccccaaagaagtaggacccactaatgcagatcctgtgtgtctagctaagatgtattattctgctgtggaacccactaaagatatattcactgggcttattgggccaatgaaaatatgcaagaaaggaagtttacatgcaaatgggagacagaaagatgtagacaaggaattctatttgtttcctacagtatttgatgagaatgagagtttactcctggaagataatattagaatgtttacaactgcacctgatcaggtggataaggaagatgaagactttcaggaatctaataaaatgcactccatgaatggattcatgtatgggaatcagccgggtctcactatgtgcaaaggagattcggtcgtgtggtacttattcagcgccggaaatgaggccgatgtacatggaatatacttttcaggaaacacatatctgtggagaggagaacggagagacacagcaaacctcttccctcaaacaagtcttacgctccacatgtggcctgacacagaggggacttttaatgttgaatgccttacaactgatcattacacaggcggcatgaagcaaaaatatactgtgaaccaatgcaggcggcagtctgaggattccaccttctacctgggagagaggacatactatatcgcagcagtggaggtggaatgggattattccccacaaagggagtgggaaaaggagctgcatcatttacaagagcagaatgtttcaaatgcatttttagataagggagagttttacataggctcaaagtacaagaaagttgtgtatcggcagtatactgatagcacattccgtgttccagtggagagaaaagctgaagaagaacatctgggaattctaggtccacaacttcatgcagatgttggagacaaagtcaaaattatctttaaaaacatggccacaaggccctactcaatacatgcccatggggtacaaacagagagttctacagttactccaacattaccaggtgaaactctcacttacgtatggaaaatcccagaaagatctggagctggaacagaggattctgcttgtattccatgggcttattattcaactgtggatcaagttaaggacctctacagtggattaattggccccctgattgtttgtcgaagaccttacttgaaagtattcaatcccagaaggaaactggaatttgcccttctgtttctagtttttgatgagaatgaatcttggtacttagatgacaacatcaaaacatactctgatcaccccgagaaagtaaacaaagatgatgaggaattcatagaaagcaataaaatgcatgctattaatggaagaatgtttggaaacctacaaggcctcacaatgcacgtgggagatgaagtcaactggtatctgatgggaatgggcaatgaaatagacttacacactgtacattttcacggccatagcttccaatacaagcacaggggagtttatagttctgatgtctttgacattttccctggaacataccaaaccctagaaatgtttccaagaacacctggaatttggttactccactgccatgtgaccgaccacattcatgctggaatggaaaccacttacaccgttctacaaaatgaagacaccaaatctggctgaatgaaataaattggtgataagtggaaaaaagagaaaaaccaatgattcataacaatgtatgtgaaagtgtaaaatagaatgttactttggaatgactataaacattaaaagaagactggaagcatacaactttgtacatttgtgggggaaaactattaattttttgcaaatggaaagatcaacagactatataatgatacatgactgacacttgtacactaggtaataaaactgattcatacagtctaatgatatcaccgctgttagggttttataaaactgcatttaaaaaaagatctatgaccagatattctcctgggtgctcctcaaaggaacactattaaggttcattgaaatgttttcaatcattgccttcccattgatccttctaacatgctgttgacatcacacctaatattcagagggaatgggcaaggtatgagggaaggaaataaaaaataaaataaataaaatagaatgacacaaatttgagttttgtgaacccctgaacagatggtcttaaggacgttatctggaactggagaaaagcagagttgagagacaattctatagattaaatcctggtaaggacaaacattgccattagaagaaaagcttcaaaatagacctgtggcagatgtcacatgagtagaatttctgcccagccttaactgcattcagaggataatatcaatgaactaaacttgaactaaaaattttttaaacaaaaagttataaatgaagacacatggttgtgaatacaatgatgtatttctttattttcacatacactctagctaaaagagcaagagtacacatcaacaaaaatggaaacaaggctttggctgaaaaaaacatgcatttgacaaatcatgttaatagctagacaagaagaaagttagctttgtaaacttctacttcatttgattcagagaaacagagcatgagttttcttaaaagtaacaagaaaaggaacaaaaaaaatgaggtttgaaatcttttaccatggcaaaacattaacatctttctcaaaaacatagagaaatctggaaaaatcaagaagataaaattctggaccagttagtgacattctttcaagcatacttgtaaaatgtttccttaaagtgttcttgggatgaaaatgattgtcatgtctccaacaacagtgaactgatgttgttccttggaataaaagtcaatccccaccttaaaaaa

SEQ ID NO: 277 - DNA, 1886 bp, Homo sapiens
  source 1..1886: mol_type = genomic DNA
agagtcacatctcttatttggaccagtatagacagaagtaaacccagctgacttgtttcctgggacagttgagttaagggatggctttcacagagcattcaccgctgacccctcaccgtcgggacctctgtagccgctctatctggctagcaaggaagattcgttcagacctgactgctcttacggaatcctatgtgaagcatcagggcctgaacaagaacatcaacctggactctgcggatgggatgccagtggcaagcactgatcagtggagtgagctgaccgaggcagagcgactccaagagaaccttcaagcttatcgtaccttccatgttttgttggccaggctcttagaagaccagcaggtgcattttaccccaaccgaaggtgacttccatcaagctatacatacccttcttctccaagtcgctgcctttgcataccagatagaggagttaatgatactcctggaatacaagatcccccgcaatgaggctgatgggatgcctattaatgttggagatggtggtctctttgagaagaagctgtggggcctaaaggtgctgcaggagctttcacagtggacagtaaggtccatccatgaccttcgtttcatttcttctcatcagactgggatcccagcacgtgggagccattatattgctaacaacaagaaaatgtagcagttagtcccttctctcttccttgctttctcttctaatggaatatgcgtagttccctggggcctcgctttcccatcttaaatttctaaaaacagttaagacaacaggcattttctttcttttttctctgaccacctgcagcctgttgaaggactacaggtattttcatcaagtagcgttggagacatacacaaatgggcatacaagtttagcctggggggtgtgatttgtgtgcgtgcttgcatgtgctgcaggtgtaagagagtgggagcagggacaacgtccttccacttcagggttctaacctttctaacccactaagtaacctctacaggcatttaactgccttacagacagaatatacatatgttaattctagtcctggatgactcggtctgagaagattcaatttaaaatcagactctttagttgatttaaactcttagagaataagaataataatggctaacttttattatcttctatattaaggcagtatgccaagggtctttatgtatattatgtacagcgtttacaaccttgtgagcaaggtggtgttactcccattaggtagatgagaaaacaggctcacagagatttggttaagctcacacagctaacaagtagcacactgagtttgaacacagatcattctccttgtaaaagcctatgtgcctttcactttagaggcttgatcatgaatcactgcacctctttgtcacagggtgttggaagatgcatccatgtaatctattcccatcgctggaaaacagctgctgttagatgtcctcagaagtcagttgcaaattttagcgttaaagtcaggatttattgttcatacttggcggtgaggagggcagctggagatcttaagattccattttggaaaatgattaggcccgccaaacttctgaactttggaagctggggatgtttagtaatacagcctggtttttaagtactcactaaaagttctcaaatattgggttgggcacggcttataccaggttacctcacttttaattagtgatgcaggcagtgtaacccaagcatttgtggacaatgagtggaatactaaagttaaaaagtcaaactttcacctcagattttctggacttagtcatgaggagagggtgaggcccactctgttcctactggagataccagagactctgaaactatagaataaagcctctgtgctgc

SEQ ID NO: 278 - DNA, 2023 bp, Homo sapiens
  source 1..2023: mol_type = genomic DNA
ttaacccagaggggtcaggacagacaattcctcagtgacccaggagctgacacactatggcgcacgtccgaggcttgcagctgcctggctgcctggccctggctgccctgtgtagccttgtgcacagccagcatgtgttcctggctcctcagcaagcacggtcgctgctccagcgggtccggcgagccaacaccttcttggaggaggtgcgcaagggcaacctggagcgagagtgcgtggaggagacgtgcagctacgaggaggccttcgaggctctggagtcctccacggctacggatgtgttctgggccaagtacacagcttgtgagacagcgaggacgcctcgagataagcttgctgcatgtctggaaggtaactgtgctgagggtctgggtacgaactaccgagggcatgtgaacatcacccggtcaggcattgagtgccagctatggaggagtcgctacccacataagcctgaaatcaactccactacccatcctggggccgacctacaggagaatttctgccgcaaccccgacagcagcaccacgggaccctggtgctacactacagaccccaccgtgaggaggcaggaatgcagcatccctgtctgtggccaggatcaagtcactgtagcgatgactccacgctccgaaggctccagtgtgaatctgtcacctccattggagcagtgtgtccctgatcgggggcagcagtaccaggggcgcctggcggtgaccacacatgggctcccctgcctggcctgggccagcgcacaggccaaggccctgagcaagcaccaggacttcaactcagctgtgcagctggtggagaacttctgccgcaacccagacggggatgaggagggcgtgtggtgctatgtggccgggaagcctggcgactttgggtactgcgacctcaactattgtgaggaggccgtggaggaggagacaggagatgggctggatgaggactcagacagggccatcgaagggcgtaccgccaccagtgagtaccagactttcttcaatccgaggacctttggctcgggagaggcagactgtgggctgcgacctctgttcgagaagaagtcgctggaggacaaaaccgaaagagagctcctggaatcctacatcgacgggcgcattgtggagggctcggatgcagagatcggcatgtcaccttggcaggtgatgcttttccggaagagtccccaggagctgctgtgtggggccagcctcatcagtgaccgctgggtcctcaccgccgcccactgcctcctgtacccgccctgggacaagaacttcaccgagaatgaccttctggtgcgcattggcaagcactcccgcaccaggtacgagcgaaacattgaaaagatatccatgttggaaaagatctacatccaccccaggtacaactggcgggagaacctggaccgggacattgccctgatgaagctgaagaagcctgttgccttcagtgactacattcaccctgtgtgtctgcccgacagggagacggcagccagcttgctccaggctggatacaaggggcgggtgacaggctggggcaacctgaaggagacgtggacagccaacgttggtaaggggcagcccagtgtcctgcaggtggtgaacctgcccattgtggagcggccggtctgcaaggactccacccggatccgcatcactgacaacatgttctgtgctggttacaagcctgatgaagggaaacgaggggatgcctgtgaaggtgacagtgggggaccctttgtcatgaagagcccctttaacaaccgctggtatcaaatgggcatcgtctcatggggtgaaggctgtgaccgggatgggaaatatggcttctacacacatgtgttccgcctgaagaagtggatacagaaggtcattgatcagtttggagagtagggggccactcatattctgggctcctggaaccaatcccgtgaaagaattatttttgtgtttctaaaactatggttcccaataaaagtgactctcagcga

SEQ ID NO: 279 - DNA, 195 bp, Homo sapiens
  source 1..195: mol_type = genomic DNA
ttgcagggagaatttctgccgcaaccccgacagcagcaccacgggaccctggtgctacactacagaccccaccgtgaggaggcaggaatgcagcatccctgtctgtggccaggatcaagtcactgtagcgatgactccacgctccgaaggctccagtgtgaatctgtcacctccattggagcagtgtgtccctga

SEQ ID NO: 280 - DNA, 1849 bp, Homo sapiens
  source 1..1849: mol_type = genomic DNA
acactatggcgcacgtccgaggcttgcagctgcctggctgcctggccctggctgccctgtgtagccttgtgcacagccagcatgtgttcctggctcctcagcaagcacggtcgctgctccagcgggtccggcgagccaacaccttcttggaggaggtgcgcaagggcaacctggagcgagagtgcgtggaggagacgtgcagctacgaggaggccttcgaggctctggagtcctccacggctacggatgtgttctgggccaagtacacagcttgtgagacagcgaggacgcctcgagataagcttgctgcatgtctggaaggtaactgtgctgagggtctgggtacgaactaccgagggcatgtgaacatcacccggtcaggcattgagtgccagctatggaggagtcgctacccacataagcctgaaatcaactccactacccatcctggggccgacctacaggagaatttctgccgcaaccccgacagcagcaccacgggaccctggtgctacactacagaccccaccgtgaggaggcaggaatgcagcatccctgtctgtggccaggatcaagtcactgtagcgatgactccacgctccgaaggctccagtgtgaatctgtcacctccattggagcagtgtgtccctgatcgggggcagcagtaccaggggcgcctggcggtgaccacacatgggctcccctgcctggcctgggccagcgcacaggccaaggccctgagcaagcaccaggacttcaactcagctgtgcagctggtggagaacttctgccgcaacccagacggggatgaggagggcgtgtggtgctatgtggccgggaagcctggcgactttgggtactgcgacctcaactattgtgaggaggccgtggaggaggagacaggagatgggctggatgaggactcagacagggccatcgaagggcgtaccgccaccagtgagtaccagactttcttcaatccgaggacctttggctcgggagaggcagactgtgggctgcgacctctgttcgagaagaagtcgctggaggacaaaaccgaaagagagctcctggaatcctacatcgacgggcgcattgtggagggctcggatgcagagatcggcatgtcaccttggcaggtgatgcttttccggaagagtccccaggagctgctgtgtggggccagcctcatcagtgaccgctgggtcctcaccgccgcccactgcctcctgtacccgccctgggacaagaacttcaccgagaatgaccttctggtgcgcattggcaagcactcccgcaccaggtacgagcgaaacattgaaaagatatccatgttggaaaagatctacatccaccccagcttgctccaggctggatacaaggggcgggtgacaggctggggcaacctgaaggagacgtggacagccaacgttggtaaggggcagcccagtgtcctgcaggtggtgaacctgcccattgtggagcggccggtctgcaaggactccacccggatccgcatcactgacaacatgttctgtgctggttacaagcctgatgaagggaaacgaggggatgcctgtgaaggtgacagtgggggaccctttgtcatgaagagcccctttaacaaccgctggtatcaaatgggcatcgtctcatggggtgaaggctgtgaccgggatgggaaatatggcttctacacacatgtgttccgcctgaagaagtggatacagaaggtcattgatcagtttggagagtagggggccactcatattctgggctcctggaaccaatcccgtgaaagaattatttttgtgtttctaaaactatggttcccaataaaagtgactct

SEQ ID NO: 281 - DNA, 2287 bp, Homo sapiens
  source 1..2287: mol_type = genomic DNA
gcgccgccggccctttatagcgcgcggggcaccggctccccaagactgcgagctccccgcaccccctcgcactccctctggccggcccagggcgccttcagcccaacctccccagccccacgggcgccacggaacccgctcgatctcgccgccaactggtagacatggagacccctgcctggccccgggtcccgcgccccgagaccgccgtcgctcggacgctcctgctcggctgggtcttcgcccaggtggccggcgcttcaggcactacaaatactgtggcagcatataatttaacttggaaatcaactaatttcaagacaattttggagtgggaacccaaacccgtcaatcaagtctacactgttcaaataagcactaagtcaggagattggaaaagcaaatgcttttacacaacagacacagagtgtgacctcaccgacgagattgtgaaggatgtgaagcagacgtacttggcacgggtcttctcctaccctgcagggaatgtggagagcaccggttctgctggggagcctctgtatgagaactccccagagttcacaccttacctggagacaaacctcggacagccaacaattcagagttttgaacaggtgggaacaaaagtgaatgtgaccgtagaagatgaacggactttagtcagaaggaacaacactttcctaagcctccgggatgtttttggcaaggacttaatttatacactttattattggaaatcttcaagttcaggaaagaaaacagccaaaacaaacactaatgagtttttgattgatgtggataaaggagaaaactactgtttcagtgttcaagcagtgattccctcccgaacagttaaccggaagagtacagacagcccggtagagtgtatgggccaggagaaaggggaattcagagaaatattctacatcattggagctgtggtatttgtggtcatcatccttgtcatcatcctggctatatctctacacaagtgtagaaaggcaggagtggggcagagctggaaggagaactccccactgaatgtttcataaaggaagcactgttggagctactgcaaatgctatattgcactgtgaccgagaacttttaagaggatagaatacatggaaacgcaaatgagtatttcggagcatgaagaccctggagttcaaaaaactcttgatatgacctgttattaccattagcattctggttttgacatcagcattagtcactttgaaatgtaacgaatggtactacaaccaattccaagttttaatttttaacaccatggcaccttttgcacataacatgctttagattatatattccgcactcaaggagtaaccaggtcgtccaagcaaaaacaaatgggaaaatgtcttaaaaaatcctgggtggacttttgaaaagcttttttttttttttttttttttttgagacggagtcttgctctgttgcccaggctggagtgcagtagcacgatctcggctcactgcaccctccgtctctcgggttcaagcaattgtctgcctcagcctcccgagtagctgggattacaggtgcgcactaccacgccaagctaatttttgtattttttagtagagatggggtttcaccatcttggccaggctggtcttgaattcctgacctcaggtgatccacccaccttggcctcccaaagtgctagtattatgggcgtgaaccaccatgcccagccgaaaagcttttgaggggctgacttcaatccatgtaggaaagtaaaatggaaggaaattgggtgcatttctaggacttttctaacatatgtctataatatagtgtttaggttcttttttttttcaggaatacatttggaaattcaaaacaattggcaaactttgtattaatgtgttaagtgcaggagacattggtattctgggcaccttcctaatatgctttacaatctgcactttaactgacttaagtggcattaaacatttgagagctaactatatttttataagactactatacaaactacagagtttatgatttaaggtacttaaagcttctatggttgacattgtatatataattttttaaaaaggttttctatatggggattttctatttatgtaggtaatattgttctatttgtatatattgagataatttatttaatatactttaaataaaggtgactgggaattgttactgttgtacttattctatcttccatttattatttatgtacaatttggtgtttgtattagctctactacagtaaatgactgtaaaattgtca

SEQ ID NO: 282 - DNA, 1879 bp, Homo sapiens
  source 1..1879: mol_type = genomic DNA
catggagacccctgcctggccccgggtcccgcgccccgagaccgccgtcgctcggacgctcctgctcggctgggtcttcgcccaggtggccggcgcttcaggcactacaaatactgtggcagcatataatttaacttggaaatcaactaatttcaagacaattttggagtgggaacccaaacccgtcaatcaagtctacactgttcaaataagcactaagtcaggagattggaaaagcaaatgcttttacacaacagacacagagtgtgacctcaccgacgagattgtgaaggatgtgaagcagacgtacttggcacgggtcttctcctaccctgcagggaatgtggagagcaccggttctgctggggagcctctgtatgagaactccccagagttcacaccttacctggagacaaacctcggacagccaacaattcagagttttgaacaggtgggaacaaaagtgaatgtgaccgtagaagatgaacggactttagtcagaaggaacaacactttcctaagcctccgggatgtttttggcaaggacttaatttatacactttattattggaaatcttcaagttcaggaaagaaatattctacatcattggagctgtggtatttgtggtcatcatccttgtcatcatcctggctatatctctacacaagtgtagaaaggcaggagtggggcagagctggaaggagaactccccactgaatgtttcataaaggaagcactgttggagctactgcaaatgctatattgcactgtgaccgagaacttttaagaggatagaatacatggaaacgcaaatgagtatttcggagcatgaagaccctggagttcaaaaaactcttgatatgacctgttattaccattagcattctggttttgacatcagcattagtcactttgaaatgtaacgaatggtactacaaccaattccaagttttaatttttaacaccatggcaccttttgcacataacatgctttagattatatattccgcactcaaggagtaaccaggtcgtccaagcaaaaacaaatgggaaaatgtcttaaaaaatcctgggtggacttttgaaaagcttttttttttttttttttttttttgagacggagtcttgctctgttgcccaggctggagtgcagtagcacgatctcggctcactgcaccctccgtctctcgggttcaagcaattgtctgcctcagcctcccgagtagctgggattacaggtgcgcactaccacgccaagctaatttttgtattttttagtagagatggggtttcaccatcttggccaggctggtcttgaattcctgacctcaggtgatccacccaccttggcctcccaaagtgctagtattatgggcgtgaaccaccatgcccagccgaaaagcttttgaggggctgacttcaatccatgtaggaaagtaaaatggaaggaaattgggtgcatttctaggacttttctaacatatgtctataatatagtgtttaggttcttttttttttcaggaatacatttggaaattcaaaacaattggcaaactttgtattaatgtgttaagtgcaggagacattggtattctgggcaccttcctaatatgctttacaatctgcactttaactgacttaagtggcattaaacatttgagagctaactatatttttataagactactatacaaactacagagtttatgatttaaggtacttaaagcttctatggttgacattgtatatataattttttaaaaaggttttctatatggggattttctatttatgtaggtaatattgttctatttgtatatattgagataatttatttaatatactttaaataaaggtgactgggaattgttactgttg

SEQ ID NO: 283 - DNA, 2780 bp, Homo sapiens
  source 1..2780: mol_type = genomic DNA
aaaggttatgcagcgcgtgaacatgatcatggcagaatcaccaggcctcatcaccatctgccttttaggatatctactcagtgctgaatgtacagtttttcttgatcatgaaaacgccaacaaaattctgaatcggccaaagaggtataattcaggtaaattggaagagtttgttcaagggaaccttgagagagaatgtatggaagaaaagtgtagttttgaagaagcacgagaagtttttgaaaacactgaaagaacaactgaattttggaagcagtatgttgatggagatcagtgtgagtccaatccatgtttaaatggcggcagttgcaaggatgacattaattcctatgaatgttggtgtccctttggatttgaaggaaagaactgtgaattagatgtaacatgtaacattaagaatggcagatgcgagcagttttgtaaaaatagtgctgataacaaggtggtttgctcctgtactgagggatatcgacttgcagaaaaccagaagtcctgtgaaccagcagtgccatttccatgtggaagagtttctgtttcacaaacttctaagctcacccgtgctgagactgtttttcctgatgtggactatgtaaattctactgaagctgaaaccattttggataacatcactcaaagcacccaatcatttaatgacttcactcgggttgttggtggagaagatgccaaaccaggtcaattcccttggcaggttgttttgaatggtaaagttgatgcattctgtggaggctctatcgttaatgaaaaatggattgtaactgctgcccactgtgttgaaactggtgttaaaattacagttgtcgcaggtgaacataatattgaggagacagaacatacagagcaaaagcgaaatgtgattcgaattattcctcaccacaactacaatgcagctattaataagtacaaccatgacattgcccttctggaactggacgaacccttagtgctaaacagctacgttacacctatttgcattgctgacaaggaatacacgaacatcttcctcaaatttggatctggctatgtaagtggctggggaagagtcttccacaaagggagatcagctttagttcttcagtaccttagagttccacttgttgaccgagccacatgtcttcgatctacaaagttcaccatctataacaacatgttctgtgctggcttccatgaaggaggtagagattcatgtcaaggagatagtgggggaccccatgttactgaagtggaagggaccagtttcttaactggaattattagctggggtgaagagtgtgcaatgaaaggcaaatatggaatatataccaaggtatcccggtatgtcaactggattaaggaaaaaacaaagctcacttaatgaaagatggatttccaaggttaattcattggaattgaaaattaacagggcctctcactaactaatcactttcccatcttttgttagatttgaatatatacattctatgatcattgctttttctctttacaggggagaatttcatattttacctgagcaaattgattagaaaatggaaccactagaggaatataatgtgttaggaaattacagtcatttctaagggcccagcccttgacaaaattgtgaagttaaattctccactctgtccatcagatactatggttctccactatggcaactaactcactcaattttccctccttagcagcattccatcttcccgatcttctttgcttctccaaccaaaacatcaatgtttattagttctgtatacagtacaggatctttggtctactctatcacaaggccagtaccacactcatgaagaaagaacacaggagtagctgagaggctaaaactcatcaaaaacactactccttttcctctaccctattcctcaatcttttaccttttccaaatcccaatccccaaatcagtttttctctttcttactccctctctcccttttaccctccatggtcgttaaaggagagatggggagcatcattctgttatacttctgtacacagttatacatgtctatcaaacccagacttgcttccgtagtggagacttgcttttcagaacatagggatgaagtaaggtgcctgaaaagtttgggggaaaagtttctttcagagagttaagttattttatatatataatatatatataaaatatataatatacaatataaatatatagtgtgtgtgtatgcgtgtgtgtagacacacacgcatacacacatataatggaagcaataagccattctaagagcttgtatggttatggaggtctgactaggcatgatttcacgaaggcaagattggcatatcattgtaactaaaaaagctgacattgacccagacatattgtactctttctaaaaataataataataatgctaacagaaagaagagaaccgttcgtttgcaatctacagctagtagagactttgaggaagaattcaacagtgtgtcttcagcagtgttcagagccaagcaagaagttgaagttgcctagaccagaggacataagtatcatgtctcctttaactagcataccccgaagtggagaagggtgcagcaggctcaaaggcataagtcattccaatcagccaactaagttgtccttttctggtttcgtgttcaccatggaacattttgattatagttaatccttctatcttgaatcttctagagagttgctgaccaactgacgtatgtttccctttgtgaattaataaactggtgttctggttcat

SEQ ID NO: 284 - DNA, 1272 bp, Homo sapiens
  source 1..1272: mol_type = genomic DNA
atgcagcgcgtgaacatgatcatggcagaatcaccaggcctcatcaccatctgccttttaggatatctactcagtgctgaatgtacagtttttcttgatcatgaaaacgccaacaaaattctgaatcggccaaagaggtataattcaggtaaattggaagagtttgttcaagggaaccttgagagagaatgtatggaagaaaagtgtagttttgaagaagcacgagaagtttttgaaaacactgaaagaacaactgaattttggaagcagtatgttgatgtaacatgtaacattaagaatggcagatgcgagcagttttgtaaaaatagtgctgataacaaggtggtttgctcctgtactgagggatatcgacttgcagaaaaccagaagtcctgtgaaccagcagtgccatttccatgtggaagagtttctgtttcacaaacttctaagctcacccgtgctgagactgtttttcctgatgtggactatgtaaattctactgaagctgaaaccattttggataacatcactcaaagcacccaatcatttaatgacttcactcgggttgttggtggagaagatgccaaaccaggtcaattcccttggcaggttgttttgaatggtaaagttgatgcattctgtggaggctctatcgttaatgaaaaatggattgtaactgctgcccactgtgttgaaactggtgttaaaattacagttgtcgcaggtgaacataatattgaggagacagaacatacagagcaaaagcgaaatgtgattcgaattattcctcaccacaactacaatgcagctattaataagtacaaccatgacattgcccttctggaactggacgaacccttagtgctaaacagctacgttacacctatttgcattgctgacaaggaatacacgaacatcttcctcaaatttggatctggctatgtaagtggctggggaagagtcttccacaaagggagatcagctttagttcttcagtaccttagagttccacttgttgaccgagccacatgtcttcgatctacaaagttcaccatctataacaacatgttctgtgctggcttccatgaaggaggtagagattcatgtcaaggagatagtgggggaccccatgttactgaagtggaagggaccagtttcttaactggaattattagctggggtgaagagtgtgcaatgaaaggcaaatatggaatatataccaaggtatcccggtatgtcaactggattaaggaaaaaacaaagctcacttaa

SEQ ID NO: 285 - DNA, 7039 bp, Homo sapiens
  source 1..7039: mol_type = genomic DNA
aggaaaagccccagaaaaagcggagggagtgagagccagaggctgctgctgccgtttgcaagaactgcaggggaggaggacgctgccacccacagcctctagagctcattgcagctgggacagcccggagtgtggttagcagctcggcaagcgctgcccaggtcctggggtggtggcagccagcgggagcaggaaaggaagcatgttcccaggctgcccacgcctctgggtcctggtggtcttgggcaccagctgggtaggctgggggagccaagggacagaagcggcacagctaaggcagttctacgtggctgctcagggcatcagttggagctaccgacctgagcccacaaactcaagtttgaatctttctgtaacttcctttaagaaaattgtctacagagagtatgaaccatattttaagaaagaaaaaccacaatctaccatttcaggacttcttgggcctactttatatgctgaagtcggagacatcataaaagttcactttaaaaataaggcagataagcccttgagcatccatcctcaaggaattaggtacagtaaattatcagaaggtgcttcttaccttgaccacacattccctgcggagaagatggacgacgctgtggctccaggccgagaatacacctatgaatggagtatcagtgaggacagtggacccacccatgatgaccctccatgcctcacacacatctattactcccatgaaaatctgatcgaggatttcaactcggggctgattgggcccctgcttatctgtaaaaaagggaccctaactgagggtgggacacagaagacgtttgacaagcaaatcgtgctactatttgctgtgtttgatgaaagcaagagctggagccagtcatcatccctaatgtacacagtcaatggatatgtgaatgggacaatgccagatataacagtttgtgcccatgaccacatcagctggcatctgctgggaatgagctcggggccagaattattctccattcatttcaacggccaggtcctggagcagaaccatcataaggtctcagccatcacccttgtcagtgctacatccactaccgcaaatatgactgtgggcccagagggaaagtggatcatatcttctctcaccccaaaacatttgcaagctgggatgcaggcttacattgacattaaaaactgcccaaagaaaaccaggaatcttaagaaaataactcgtgagcagaggcggcacatgaagaggtgggaatacttcattgctgcagaggaagtcatttgggactatgcacctgtaataccagcgaatatggacaaaaaatacaggtctcagcatttggataatttctcaaaccaaattggaaaacattataagaaagttatgtacacacagtacgaagatgagtccttcaccaaacatacagtgaatcccaatatgaaagaagatgggattttgggtcctattatcagagcccaggtcagagacacactcaaaatcgtgttcaaaaatatggccagccgcccctatagcatttaccctcatggagtgaccttctcgccttatgaagatgaagtcaactcttctttcacctcaggcaggaacaacaccatgatcagagcagttcaaccaggggaaacctatacttataagtggaacatcttagagtttgatgaacccacagaaaatgatgcccagtgcttaacaagaccatactacagtgacgtggacatcatgagagacatcgcctctgggctaataggactacttctaatctgtaagagcagatccctggacaggcaaggaatacagagggcagcagacatcgaacagcaggctgtgtttgctgtgtttgatgagaacaaaagctggtaccttgaggacaacatcaacaagttttgtgaaaatcctgatgaggtgaaacgtgatgaccccaagttttatgaatcaaacatcatgagcaattttacactttcagctatcaatggctatgtgcctgagagcataactactcttggattctgctttgatgacactgtccagtggcacttctgtagtgtggggacccagaatgaaattttgaccatccacttcactgggcactcattcatctatggaaagaggcatgaggacaccttgaccctcttccccatgcgtggagaatctgtgacggtcacaatggataatgttggaacttggatgttaacttccatgaattctagtccaagaagcaaaaagctgaggctgaaattcagggatgttaaatgtatcccagatgatgatgaagactcatatgagatttttgaacctccagaatctacagtcatggctacacggaaaatgcatgatcgtttagaacctgaagatgaagagagtgatgctgactatgattaccagaacagactggctgcagcattaggaatcaggtcattccgaaactcatcattgaatcaggaagaagaagagttcaatcttactgccctagctctggagaatggcactgaattcgtttcttcaaacacagatataattgttggttcaaattattcttccccaagtaatattagtaagttcactgtcaataaccttgcagaacctcagaaagccccttctcaccaacaagccaccacagctggttccccactgagacacctcattggcaagaactcagttctcaattcttccacagcagagcattccagcccatattctgaagaccctatagaggatcctctacagccagatgtcacagggatacgtctactttcacttggtgctggagaattcaaaagtcaagaacatgctaagcataagggacccaaggtagaaagagatcaagcagcaaagcacaggttctcctggatgaaattactagcacataaagttgggagacacctaagccaagacactggttctccttccggaatgaggccctgggaggaccttcctagccaagacactggttctccttccagaatgaggccctggaaggaccctcctagtgatctgttactcttaaaacaaagtaactcatctaagattttggttgggagatggcatttggcttctgagaaaggtagctatgaaataatccaagatactgatgaagacacagctgttaacaattggctgatcagcccccagaatgcctcacgtgcttggggagaaagcacccctcttgccaacaagcctggaaagcagagtggccacccaaagtttcctagagttagacataaatctctacaagtaagacaggatggaggaaagagtagactgaagaaaagccagtttctcattaagacacgaaaaaagaaaaaagagaagcacacacaccatgctcctttatctccgaggacctttcaccctctaagaagtgaagcctacaacacattttcagaaagaagacttaagcattcgttggtgcttcataaatccaatgaaacatctcttcccacagacctcaatcagacattgccctctatggattttggctggatagcctcacttcctgaccataatcagaattcctcaaatgacactggtcaggcaagctgtcctccaggtctttatcagacagtgcccccagaggaacactatcaaacattccccattcaagaccctgatcaaatgcactctacttcagaccccagtcacagatcctcttctccagagctcagtgaaatgcttgagtatgaccgaagtcacaagtccttccccacagatataagtcaaatgtccccttcctcagaacatgaagtctggcagacagtcatctctccagacctcagccaggtgaccctctctccagaactcagccagacaaacctctctccagacctcagccacacgactctctctccagaactcattcagagaaacctttccccagccctcggtcagatgcccatttctccagacctcagccatacaaccctttctccagacctcagccatacaaccctttctttagacctcagccagacaaacctctctccagaactcagtcagacaaacctttctccagccctcggtcagatgcccctttctccagacctcagccatacaaccctttctctagacttcagccagacaaacctctctccagaactcagccatatgactctctctccagaactcagtcagacaaacctttccccagccctcggtcagatgcccatttctccagacctcagccatacaaccctttctctagacttcagccagacaaacctctctccagaactcagtcaaacaaacctttccccagccctcggtcagatgcccctttctccagaccccagccatacaaccctttctctagacctcagccagacaaacctctctccagaactcagtcagacaaacctttccccagacctcagtgagatgcccctctttgcagatctcagtcaaattccccttaccccagacctcgaccagatgacactttctccagaccttggtgagacagatctttccccaaactttggtcagatgtccctttccccagacctcagccaggtgactctctctccagacatcagtgacaccacccttctcccggatctcagccagatatcacctcctccagaccttgatcagatattctacccttctgaatctagtcagtcattgcttcttcaagaatttaatgagtcttttccttatccagaccttggtcagatgccatctccttcatctcctactctcaatgatacttttctatcaaaggaatttaatccactggttatagtgggcctcagtaaagatggtacagattacattgagatcattccaaaggaagaggtccagagcagtgaagatgactatgctgaaattgattatgtgccctatgatgacccctacaaaactgatgttaggacaaacatcaactcctccagagatcctgacaacattgcagcatggtacctccgcagcaacaatggaaacagaagaaattattacattgctgctgaagaaatatcctgggattattcagaatttgtacaaagggaaacagatattgaagactctgatgatattccagaagataccacatataagaaagtagtttttcgaaagtacctcgacagcacttttaccaaacgtgatcctcgaggggagtatgaagagcatctcggaattcttggtcctattatcagagctgaagtggatgatgttatccaagttcgttttaaaaatttagcatccagaccgtattctctacatgcccatggactttcctatgaaaaatcatcagagggaaagacttatgaagatgactctcctgaatggtttaaggaagataatgctgttcagccaaatagcagttatacctacgtatggcatgccactgagcgatcagggccagaaagtcctggctctgcctgtcgggcttgggcctactactcagctgtgaacccagaaaaagatattcactcaggcttgataggtcccctcctaatctgccaaaaaggaatactacataaggacagcaacatgcctatggacatgagagaatttgtcttactatttatgacctttgatgaaaagaagagctggtactatgaaaagaagtcccgaagttcttggagactcacatcctcagaaatgaaaaaatcccatgagtttcacgccattaatgggatgatctacagcttgcctggcctgaaaatgtatgagcaagagtgggtgaggttacacctgctgaacataggcggctcccaagacattcacgtggttcactttcacggccagaccttgctggaaaatggcaataaacagcaccagttaggggtctggccccttctgcctggttcatttaaaactcttgaaatgaaggcatcaaaacctggctggtggctcctaaacacagaggttggagaaaaccagagagcagggatgcaaacgccatttcttatcatggacagagactgtaggatgccaatgggactaagcactggtatcatatctgattcacagatcaaggcttcagagtttctgggttactgggagcccagattagcaagattaaacaatggtggatcttataatgcttggagtgtagaaaaacttgcagcagaatttgcctctaaaccttggatccaggtggacatgcaaaaggaagtcataatcacagggatccagacccaaggtgccaaacactacctgaagtcctgctataccacagagttctatgtagcttacagttccaaccagatcaactggcagatcttcaaagggaacagcacaaggaatgtgatgtattttaatggcaattcagatgcctctacaataaaagagaatcagtttgacccacctattgtggctagatatattaggatctctccaactcgagcctataacagacctacccttcgattggaactgcaaggttgtgaggtaaatggatgttccacacccctgggtatggaaaatggaaagatagaaaacaagcaaatcacagcttcttcgtttaagaaatcttggtggggagattactgggaacccttccgtgcccgtctgaatgcccagggacgtgtgaatgcctggcaagccaaggcaaacaacaataagcagtggctagaaattgatctactcaagatcaagaagataacggcaattataacacagggctgcaagtctctgtcctctgaaatgtatgtaaagagctataccatccactacagtgagcagggagtggaatggaaaccatacaggctgaaatcctccatggtggacaagatttttgaaggaaatactaataccaaaggacatgtgaagaactttttcaaccccccaatcatttccaggtttatccgtgtcattcctaaaacatggaatcaaagtattgcacttcgcctggaactctttggctgtgatatttactagaattgaacattcaaaaacccctggaagagactctttaagacctcaaaccatttagaatgggcaatgtattttacgctgtgttaaatgttaacagttttccactatttctctttcttttctattagtgaataaaattttatacaagaa

SEQ ID NO: 286 - DNA, 7024 bp, Homo sapiens
  source 1..7024: mol_type = genomic DNA
aggaaaagccccagaaaaagcggagggagtgagagccagaggctgctgctgccgtttgcaagaactgcaggggaggaggacgctgccacccacagcctctagagctcattgcagctgggacagcccggagtgtggttagcagctcggcaagcgctgcccaggtcctggggtggtggcagccagcgggagcaggaaaggaagcatgttcccaggctgcccacgcctctgggtcctggtggtcttgggcaccagctgggtaggctgggggagccaagggacagaagcggcacagctaaggcagttctacgtggctgctcagggcatcagttggagctaccgacctgagcccacaaactcaagtttgaatctttctgtaacttcctttaagaaaattgtctacagagagtatgaaccatattttaagaaagaaaaaccacaatctaccatttcaggacttcttgggcctactttatatgctgaagtcggagacatcataaaagttcactttaaaaataaggcagataagcccttgagcatccatcctcaaggaattaggtacagtaaattatcagaaggtgcttcttaccttgaccacacattccctgcggagaagatggacgacgctgtggctccaggccgagaatacacctatgaatggagtatcagtgaggacagtggacccacccatgatgaccctccatgcctcacacacatctattactcccatgaaaatctgatcgaggatttcaactcggggctgattgggcccctgcttatctgtaaaaaagggaccctaactgagggtgggacacagaagacgtttgacaagcaaatcgtgctactatttgctgtgtttgatgaaagcaagagctggagccagtcatcatccctaatgtacacagtcaatggatatgtgaatgggacaatgccagatataacagtttgtgcccatgaccacatcagctggcatctgctgggaatgagctcggggccagaattattctccattcatttcaacggccaggtcctggagcagaaccatcataaggtctcagccatcacccttgtcagtgctacatccactaccgcaaatatgactgtgggcccagagggaaagtggatcatatcttctctcaccccaaaacatttgcaagctgggatgcaggcttacattgacattaaaaactgcccaaagaaaaccaggaatcttaagaaaataactcgtgagcagaggcggcacatgaagaggtgggaatacttcattgctgcagaggaagtcatttgggactatgcacctgtaataccagcgaatatggacaaaaaatacaggtctcagcatttggataatttctcaaaccaaattggaaaacattataagaaagttatgtacacacagtacgaagatgagtccttcaccaaacatacagtgaatcccaatatgaaagaagatgggattttgggtcctattatcagagcccaggtcagagacacactcaaaatcgtgttcaaaaatatggccagccgcccctatagcatttaccctcatggagtgaccttctcgccttatgaagatgaagtcaactcttctttcacctcaggcaggaacaacaccatgatcagagcagttcaaccaggggaaacctatacttataagtggaacatcttagagtttgatgaacccacagaaaatgatgcccagtgcttaacaagaccatactacagtgacgtggacatcatgagagacatcgcctctgggctaataggactacttctaatctgtaagagcagatccctggacaggcaaggaatacagagggcagcagacatcgaacagcaggctgtgtttgctgtgtttgatgagaacaaaagctggtaccttgaggacaacatcaacaagttttgtgaaaatcctgatgaggtgaaacgtgatgaccccaagttttatgaatcaaacatcatgagcactatcaatggctatgtgcctgagagcataactactcttggattctgctttgatgacactgtccagtggcacttctgtagtgtggggacccagaatgaaattttgaccatccacttcactgggcactcattcatctatggaaagaggcatgaggacaccttgaccctcttccccatgcgtggagaatctgtgacggtcacaatggataatgttggaacttggatgttaacttccatgaattctagtccaagaagcaaaaagctgaggctgaaattcagggatgttaaatgtatcccagatgatgatgaagactcatatgagatttttgaacctccagaatctacagtcatggctacacggaaaatgcatgatcgtttagaacctgaagatgaagagagtgatgctgactatgattaccagaacagactggctgcagcattaggaatcaggtcattccgaaactcatcattgaatcaggaagaagaagagttcaatcttactgccctagctctggagaatggcactgaattcgtttcttcaaacacagatataattgttggttcaaattattcttccccaagtaatattagtaagttcactgtcaataaccttgcagaacctcagaaagccccttctcaccaacaagccaccacagctggttccccactgagacacctcattggcaagaactcagttctcaattcttccacagcagagcattccagcccatattctgaagaccctatagaggatcctctacagccagatgtcacagggatacgtctactttcacttggtgctggagaattcaaaagtcaagaacatgctaagcataagggacccaaggtagaaagagatcaagcagcaaagcacaggttctcctggatgaaattactagcacataaagttgggagacacctaagccaagacactggttctccttccggaatgaggccctgggaggaccttcctagccaagacactggttctccttccagaatgaggccctggaaggaccctcctagtgatctgttactcttaaaacaaagtaactcatctaagattttggttgggagatggcatttggcttctgagaaaggtagctatgaaataatccaagatactgatgaagacacagctgttaacaattggctgatcagcccccagaatgcctcacgtgcttggggagaaagcacccctcttgccaacaagcctggaaagcagagtggccacccaaagtttcctagagttagacataaatctctacaagtaagacaggatggaggaaagagtagactgaagaaaagccagtttctcattaagacacgaaaaaagaaaaaagagaagcacacacaccatgctcctttatctccgaggacctttcaccctctaagaagtgaagcctacaacacattttcagaaagaagacttaagcattcgttggtgcttcataaatccaatgaaacatctcttcccacagacctcaatcagacattgccctctatggattttggctggatagcctcacttcctgaccataatcagaattcctcaaatgacactggtcaggcaagctgtcctccaggtctttatcagacagtgcccccagaggaacactatcaaacattccccattcaagaccctgatcaaatgcactctacttcagaccccagtcacagatcctcttctccagagctcagtgaaatgcttgagtatgaccgaagtcacaagtccttccccacagatataagtcaaatgtccccttcctcagaacatgaagtctggcagacagtcatctctccagacctcagccaggtgaccctctctccagaactcagccagacaaacctctctccagacctcagccacacgactctctctccagaactcattcagagaaacctttccccagccctcggtcagatgcccatttctccagacctcagccatacaaccctttctccagacctcagccatacaaccctttctttagacctcagccagacaaacctctctccagaactcagtcagacaaacctttctccagccctcggtcagatgcccctttctccagacctcagccatacaaccctttctctagacttcagccagacaaacctctctccagaactcagccatatgactctctctccagaactcagtcagacaaacctttccccagccctcggtcagatgcccatttctccagacctcagccatacaaccctttctctagacttcagccagacaaacctctctccagaactcagtcaaacaaacctttccccagccctcggtcagatgcccctttctccagaccccagccatacaaccctttctctagacctcagccagacaaacctctctccagaactcagtcagacaaacctttccccagacctcagtgagatgcccctctttgcagatctcagtcaaattccccttaccccagacctcgaccagatgacactttctccagaccttggtgagacagatctttccccaaactttggtcagatgtccctttccccagacctcagccaggtgactctctctccagacatcagtgacaccacccttctcccggatctcagccagatatcacctcctccagaccttgatcagatattctacccttctgaatctagtcagtcattgcttcttcaagaatttaatgagtcttttccttatccagaccttggtcagatgccatctccttcatctcctactctcaatgatacttttctatcaaaggaatttaatccactggttatagtgggcctcagtaaagatggtacagattacattgagatcattccaaaggaagaggtccagagcagtgaagatgactatgctgaaattgattatgtgccctatgatgacccctacaaaactgatgttaggacaaacatcaactcctccagagatcctgacaacattgcagcatggtacctccgcagcaacaatggaaacagaagaaattattacattgctgctgaagaaatatcctgggattattcagaatttgtacaaagggaaacagatattgaagactctgatgatattccagaagataccacatataagaaagtagtttttcgaaagtacctcgacagcacttttaccaaacgtgatcctcgaggggagtatgaagagcatctcggaattcttggtcctattatcagagctgaagtggatgatgttatccaagttcgttttaaaaatttagcatccagaccgtattctctacatgcccatggactttcctatgaaaaatcatcagagggaaagacttatgaagatgactctcctgaatggtttaaggaagataatgctgttcagccaaatagcagttatacctacgtatggcatgccactgagcgatcagggccagaaagtcctggctctgcctgtcgggcttgggcctactactcagctgtgaacccagaaaaagatattcactcaggcttgataggtcccctcctaatctgccaaaaaggaatactacataaggacagcaacatgcctatggacatgagagaatttgtcttactatttatgacctttgatgaaaagaagagctggtactatgaaaagaagtcccgaagttcttggagactcacatcctcagaaatgaaaaaatcccatgagtttcacgccattaatgggatgatctacagcttgcctggcctgaaaatgtatgagcaagagtgggtgaggttacacctgctgaacataggcggctcccaagacattcacgtggttcactttcacggccagaccttgctggaaaatggcaataaacagcaccagttaggggtctggccccttctgcctggttcatttaaaactcttgaaatgaaggcatcaaaacctggctggtggctcctaaacacagaggttggagaaaaccagagagcagggatgcaaacgccatttcttatcatggacagagactgtaggatgccaatgggactaagcactggtatcatatctgattcacagatcaaggcttcagagtttctgggttactgggagcccagattagcaagattaaacaatggtggatcttataatgcttggagtgtagaaaaacttgcagcagaatttgcctctaaaccttggatccaggtggacatgcaaaaggaagtcataatcacagggatccagacccaaggtgccaaacactacctgaagtcctgctataccacagagttctatgtagcttacagttccaaccagatcaactggcagatcttcaaagggaacagcacaaggaatgtgatgtattttaatggcaattcagatgcctctacaataaaagagaatcagtttgacccacctattgtggctagatatattaggatctctccaactcgagcctataacagacctacccttcgattggaactgcaaggttgtgaggtaaatggatgttccacacccctgggtatggaaaatggaaagatagaaaacaagcaaatcacagcttcttcgtttaagaaatcttggtggggagattactgggaacccttccgtgcccgtctgaatgcccagggacgtgtgaatgcctggcaagccaaggcaaacaacaataagcagtggctagaaattgatctactcaagatcaagaagataacggcaattataacacagggctgcaagtctctgtcctctgaaatgtatgtaaagagctataccatccactacagtgagcagggagtggaatggaaaccatacaggctgaaatcctccatggtggacaagatttttgaaggaaatactaataccaaaggacatgtgaagaactttttcaaccccccaatcatttccaggtttatccgtgtcattcctaaaacatggaatcaaagtattgcacttcgcctggaactctttggctgtgatatttactagaattgaacattcaaaaacccctggaagagactctttaagacctcaaaccatttagaatgggcaatgtattttacgctgtgttaaatgttaacagttttccactatttctctttcttttctattagtgaataaaattttatacaagaa

SEQ ID NO: 287 - DNA, 1714 bp, Homo sapiens
  source 1..1714: mol_type = genomic DNA
attgcagctgggacagcccggagtgtggttagcagctcggcaagcgctgcccaggtcctggggtggtggcagccagcgggagcaggaaaggaagcatgttcccaggctgcccacgcctctgggtcctggtggtcttgggcaccagctgggtaggctgggggagccaagggacagaagcggcacagctaaggcagttctacgtggctgctcagggcatcagttggagctaccgacctgagcccacaaactcaaggacttcttgggcctactttatatgctgaagtcggagacatcataaaagttcactttaaaaataaggcagataagcccttgagcatccatcctcaaggaattaggtacagtaaattatcagaaggtgcttcttaccttgaccacacattccctgcggagaagatggacgacgctgtggctccaggccgagaatacacctatgaatggagtatcagtgaggacagtggacccacccatgatgaccctccatgcctcacacacatctattactcccatgaaaatctgatcgaggatttcaactcggggctgattgggcccctgcttatctgtaaaaaagggaccctaactgagggtgggacacagaagacgtttgacaagcaaatcgtgctactatttgctgtgtttgatgaaagcaagagctggagccagtcatcatccctaatgtacacagtcaatggatatgtgaatgggacaatgccagatataacagtttgtgcccatgaccacatcagctggcatctgctgggaatgagctcggggccagaattattctccattcatttcaacggccaggtcctggagcagaaccatcataaggtctcagccatcacccttgtcagtgctacatccactaccgcaaatatgactgtgggcccagagggaaagtggatcatatcttctctcaccccaaaacatttgcaagctgggatgcaggcttacattgacattaaaaactgcccaaagaaaaccaggaatcttaagaaaataactcgtgagcagaggcggcacatgaagaggtgggaatacttcattgctgcagaggaagtcatttgggactatgcacctgtaataccagcgaatatggacaaaaaatacaggtctcagcatttggataatttctcaaaccaaattggaaaacattataagaaagttatgtacacacagtacgaagatgagtccttcaccaaacatacagtgaatcccaatatgaaagaagatgggattttgggtcctattatcagagcccaggtcagagacacactcaaaatcgtgttcaaaaatatggccagccgcccctatagcatttaccctcatggagtgaccttctcgccttatgaagatgaagtcaactcttctttcacctcaggaacaacaccatgatcagagcagttcaaccaggggaaacctatacttataagtggaacatcttagagtttgatgaacccacagaaaatgatgcccagtgcttaacaagaccatactacagtgacgtggacatcatgagagacatcgcctctgggctaataggactacttctaatctgtaagagcagatccctggacaggcaaggaatacagagggcagcagacatcgaacagcaggctgtgtttgctgtgtttgatgagaacaaaagctggtaccttgaggacaacatcaacaagttttgtgaaaatcctgatga

SEQ ID NO: 288 - DNA, 2409 bp, Homo sapiens
  source 1..2409: mol_type = genomic DNA
agtcccatggggaatgtcaacaggcaggggcagcactgcagagatttcatcatggtctcccaggccctcaggctcctctgccttctgcttgggcttcagggctgcctggctgcagtcttcgtaacccaggaggaagcccacggcgtcctgcaccggcgccggcgcgccaacgcgttcctggaggagctgcggccgggctccctggagagggagtgcaaggaggagcagtgctccttcgaggaggcccgggagatcttcaaggacgcggagaggacgaagctgttctggatttcttacagtgatggggaccagtgtgcctcaagtccatgccagaatgggggctcctgcaaggaccagctccagtcctatatctgcttctgcctccctgccttcgagggccggaactgtgagacgcacaaggatgaccagctgatctgtgtgaacgagaacggcggctgtgagcagtactgcagtgaccacacgggcaccaagcgctcctgtcggtgccacgaggggtactctctgctggcagacggggtgtcctgcacacccacagttgaatatccatgtggaaaaatacctattctagaaaaaagaaatgccagcaaaccccaaggccgaattgtggggggcaaggtgtgccccaaaggggagtgtccatggcaggtcctgttgttggtgaatggagctcagttgtgtggggggaccctgatcaacaccatctgggtggtctccgcggcccactgtttcgacaaaatcaagaactggaggaacctgatcgcggtgctgggcgagcacgacctcagcgagcacgacggggatgagcagagccggcgggtggcgcaggtcatcatccccagcacgtacgtcccgggcaccaccaaccacgacatcgcgctgctccgcctgcaccagcccgtggtcctcactgaccatgtggtgcccctctgcctgcccgaacggacgttctctgagaggacgctggccttcgtgcgcttctcattggtcagcggctggggccagctgctggaccgtggcgccacggccctggagctcatggtcctcaacgtgccccggctgatgacccaggactgcctgcagcagtcacggaaggtgggagactccccaaatatcacggagtacatgttctgtgccggctactcggatggcagcaaggactcctgcaagggggacagtggaggcccacatgccacccactaccggggcacgtggtacctgacgggcatcgtcagctggggccagggctgcgcaaccgtgggccactttggggtgtacaccagggtctcccagtacatcgagtggctgcaaaagctcatgcgctcagagccacgcccaggagtcctcctgcgagccccatttccctagcccagcagccctggcctgtggagagaaagccaaggctgcgtcgaactgtcctggcaccaaatcccatatattcttctgcagttaatggggtagaggagggcatgggagggagggagaggtggggagggagacagagacagaaacagagagagacagagacagagagagactgagggagagactctgaggacatggagagagactcaaagagactccaagattcaaagagactaatagagacacagagatggaatagaaaagatgagaggcagaggcagacaggcgctggacagaggggcaggggagtgccaaggttgtcctggaggcagacagcccagctgagcctccttacctcccttcagccaagcccacctgcacgtgatctgctggcctcaggctgctgctctgccttcattgctggagacagtagaggcatgaacacacatggatgcacacacacacacgccaatgcacacacacagagatatgcacacacacggatgcacacacagatggtcacacagagatacgcaaacacaccgatgcacacgcacatagagatatgcacacacagatgcacacacagatatacacatggatgcacgcacatgccaatgcacgcacacatcagtgcacacggatgcacagagatatgcacacaccgatgtgcgcacacacagatatgcacacacatggatgagcacacacacaccaatgcgcacacacaccgatgtacacacacagatgcacacacagatgcacacacaccgatgctgactccatgtgtgctgtcctctgaaggcggttgtttagctctcacttttctggttcttatccattatcatcttcacttcagacaattcagaagcatcaccatgcatggtggcgaatgcccccaaactctcccccaaatgtatttctcccttcgctgggtgccgggctgcacagactattccccacctgcttcccagcttcacaataaacggctgcgtctcctccgcacacctgtggtgcctgccaccc

SEQ ID NO: 289 - DNA, 3109 bp, Homo sapiens
  source 1..3109: mol_type = genomic DNA
tcaacaggcaggggcagcactgcagagatttcatcatggtctcccaggccctcaggctcctctgccttctgcttgggcttcagggctgcctggctgcaggcggggtcgctaaggcctcaggaggagaaacacgggacatgccgtggaagccggggcctcacagagtcttcgtaacccaggaggaagcccacggcgtcctgcaccggcgccggcgcgccaacgcgttcctggaggagctgcggccgggctccctggagagggagtgcaaggaggagcagtgctccttcgaggaggcccgggagatcttcaaggacgcggagaggacgaagctgttctggatttcttacagtgatggggaccagtgtgcctcaagtccatgccagaatgggggctcctgcaaggaccagctccagtcctatatctgcttctgcctccctgccttcgagggccggaactgtgagacgcacaaggatgaccagctgatctgtgtgaacgagaacggcggctgtgagcagtactgcagtgaccacacgggcaccaagcgctcctgtcggtgccacgaggggtactctctgctggcagacggggtgtcctgcacacccacagttgaatatccatgtggaaaaatacctattctagaaaaaagaaatgccagcaaaccccaaggccgaattgtggggggcaaggtgtgccccaaaggggagtgtccatggcaggtcctgttgttggtgaatggagctcagttgtgtggggggaccctgatcaacaccatctgggtggtctccgcggcccactgtttcgacaaaatcaagaactggaggaacctgatcgcggtgctgggcgagcacgacctcagcgagcacgacggggatgagcagagccggcgggtggcgcaggtcatcatccccagcacgtacgtcccgggcaccaccaaccacgacatcgcgctgctccgcctgcaccagcccgtggtcctcactgaccatgtggtgcccctctgcctgcccgaacggacgttctctgagaggacgctggccttcgtgcgcttctcattggtcagcggctggggccagctgctggaccgtggcgccacggccctggagctcatggtcctcaacgtgccccggctgatgacccaggactgcctgcagcagtcacggaaggtgggagactccccaaatatcacggagtacatgttctgtgccggctactcggatggcagcaaggactcctgcaagggggacagtggaggcccacatgccacccactaccggggcacgtggtacctgacgggcatcgtcagctggggccagggctgcgcaaccgtgggccactttggggtgtacaccagggtctcccagtacatcgagtggctgcaaaagctcatgcgctcagagccacgcccaggagtcctcctgcgagccccatttccctagcccagcagccctggcctgtggagagaaagccaaggctgcgtcgaactgtcctggcaccaaatcccatatattcttctgcagttaatggggtagaggagggcatgggagggagggagaggtggggagggagacagagacagaaacagagagagacagagacagagagagactgagggagagactctgaggacatggagagagactcaaagagactccaagattcaaagagactaatagagacacagagatggaatagaaaagatgagaggcagaggcagacaggcgctggacagaggggcaggggagtgccaaggttgtcctggaggcagacagcccagctgagcctccttacctcccttcagccaagcccacctgcacgtgatctgctggcctcaggctgctgctctgccttcattgctggagacagtagaggcatgaacacacatggatgcacacacacacacgccaatgcacacacacagagatatgcacacacacggatgcacacacagatggtcacacagagatacgcaaacacaccgatgcacacgcacatagagatatgcacacacagatgcacacacagatatacacatggatgcacgcacatgccaatgcacgcacacatcagtgcacacggatgcacagagatatgcacacaccgatgtgcgcacacacagatatgcacacacatggatgagcacacacacaccaatgcgcacacacaccgatgtacacacacagatgcacacacagatgcacacacaccgatgctgactccatgtgtgctgtcctctgaaggcggttgtttagctctcacttttctggttcttatccattatcatcttcacttcagacaattcagaagcatcaccatgcatggtggcgaatgcccccaaactctcccccaaatgtatttctcccttcgctgggtgccgggctgcacagactattccccacctgcttcccagcttcacaataaacggctgcgtctcctccgcacacctgtggtgcctgccacccactgggttgcccatgattcatttttggagcccccggtgctcatcctctgagatgctcttttctttcacaattttcaacatcactgaaatgaaccctcacatggaagctattttttaaaaacaaaagctgtttgatagatgtttgaggctgtagctcccaggatcctgtggaattggatgttctctccctgccacagcccttgtcaatgatatttcacagagaccctgggagcacctgctcaagagtcagggacacacgcatcactaaatgcaagttcccaggccctggctgcagtgggaggacctggcaagctgcactcttgctgagtccccagggtggtggaagaagaatgagaaacacatgaacagagaaatggggaggtgacaaacagtgcccccactcagactccggcaagcacggctcagagagtggactcgatgccatccctgcagggccgtcctgggcaccactggcactcacagcagcaaggtgggcaccattggcactcacagcagcaaggcaggcaccagcaacccacctcgggggcactcaggcatcatctacttcagagcagacagggtctatgaactacagccgtgggctgcttccaaggcaccctgctcttgtaaataaagttttatgggaacaca

SEQ ID NO: 290 - DNA, 1308 bp, Homo sapiens
  source 1..1308: mol_type = genomic DNA
agtcccatggggaatgtcaacaggcaggggcagcactgcagagatttcatcatggtctcccaggccctcaggctcctctgccttctgcttgggcttcagggctgcctggctgcagatggggaccagtgtgcctcaagtccatgccagaatgggggctcctgcaaggaccagctccagtcctatatctgcttctgcctccctgccttcgagggccggaactgtgagacgcacaaggatgaccagctgatctgtgtgaacgagaacggcggctgtgagcagtactgcagtgaccacacgggcaccaagcgctcctgtcggtgccacgaggggtactctctgctggcagacggggtgtcctgcacacccacagttgaatatccatgtggaaaaatacctattctagaaaaaagaaatgccagcaaaccccaaggccgaattgtggggggcaaggtgtgccccaaaggggagtgtccatggcaggtcctgttgttggtgaatggagctcagttgtgtggggggaccctgatcaacaccatctgggtggtctccgcggcccactgtttcgacaaaatcaagaactggaggaacctgatcgcggtgctgggcgagcacgacctcagcgagcacgacggggatgagcagagccggcgggtggcgcaggtcatcatccccagcacgtacgtcccgggcaccaccaaccacgacatcgcgctgctccgcctgcaccagcccgtggtcctcactgaccatgtggtgcccctctgcctgcccgaacggacgttctctgagaggacgctggccttcgtgcgcttctcattggtcagcggctggggccagctgctggaccgtggcgccacggccctggagctcatggtcctcaacgtgccccggctgatgacccaggactgcctgcagcagtcacggaaggtgggagactccccaaatatcacggagtacatgttctgtgccggctactcggatggcagcaaggactcctgcaagggggacagtggaggcccacatgccacccactaccggggcacgtggtacctgacgggcatcgtcagctggggccagggctgcgcaaccgtgggccactttggggtgtacaccagggtctcccagtacatcgagtggctgcaaaagctcatgcgctcagagccacgcccaggagtcctcctgcgagccccatttccctagcccagcagccctggcctgtggagagaaagccaaggctgcgtcgaactgtcctggcaccaaatcccatatattcttctgcagttaatggggtagaggagggcatgggag

SEQ ID NO: 291 - DNA, 2620 bp, Homo sapiens
  source 1..2620: mol_type = genomic DNA
ggggcgacgtgccctgcgtccccctcggcgggctgccgccgtgcccgcgccggctccccagcccgagcctgccccttgccctgatgaggtgcaaagagcgggatcggaggcggggcctggccgggctgtgagcggcgtatgcaaatcgagggtctcggggatgcggatccaagaccctgggaaggtcttctttggcaatgtggattcatctgggataaaacacaatatttttaaccctccaattattgctcgatacatccgtttgcacccaactcattatagcattcgcagcactcttcgcatggagttgatgggctgtgatttaaatagttgcagcatgccattgggaatggagagtaaagcaatatcagatgcacagattactgcttcatcctactttaccaatatgtttgccacctggtctccttcaaaagctcgacttcacctccaagggaggagtaatgcctggagacctcaggtgaataatccaaaagagtggctgcaagtggacttccagaagacaatgaaagtcacaggagtaactactcagggagtaaaatctctgcttaccagcatgtatgtgaaggagttcctcatctccagcagtcaagatggccatcagtggactctcttttttcagaatggcaaagtaaaggtttttcagggaaatcaagactccttcacacctgtggtgaactctctagacccaccgttactgactcgctaccttcgaattcacccccagagttgggtgcaccagattgccctgaggatggaggttctgggctgcgaggcacaggacctctactgagggtggccactgcagcacctgccactgccgtcacctctccctcctcagctccagggcagtgtccctccctggcttgccttctacctttgtgctaaatcctagcagacactgccttgaagcctcctgaattaactatcatcagtcctgcatttctttggtggggggccaggagggtgcatccaatttaacttaactcttacctattttctgcagctgctcccagattactccttccttccaatataactaggcaaaaagaagtgaggagaaacctgcatgaaagcattcttccctgaaaagttaggcctctcagagtcaccacttcctctgttgtagaaaaactatgtgatgaaactttgaaaaagatatttatgatgttaacatttcaggttaagcctcatacgtttaaaataaaactctcagttgtttattatcctgatcaagcatggaacaaagcatgtttcaggatcagatcaatacaatcttggagtcaaaaggcaaatcatttggacaatctgcaaaatggagagaatacaataactactacagtaaagtctgtttctgcttccttacacatagatataattatgttatttagtcattatgaggggcacattcttatctccaaaactagcattcttaaactgagaattatagatggggttcaagaatccctaagtcccctgaaattatataaggcattctgtataaatgcaaatgtgcatttttctgacgagtgtccatagatataaagccatttggtcttaattctgaccaataaaaaaataagtcaggaggatgcaattgttgaaagctttgaaataaaataacaatgtcttcttgaaatttgtgatggccaagaaagaaaatgatgatgacattaggcttctaaaggacatacatttaatatttctgtggaaatatgaggaaaatccatggttatctgagataggagatacaaactttgtaattctaataatgcactcagtttactctctccctctactaatttcctgctgaaaataacacaacaaaaatgtaacaggggaaattatataccgtgactgaaaactagagtcctacttacatagttgaaatatcaaggaggtcagaagaaaattggactggtgaaaacagaaaaaacactccagtctgccatatcaccacacaataggatcccccttcttgccctccacccccataagattgtgaagggtttactgctccttccatctgcctgaccccttcactatgactacacagaatctcctgatagtaaagggggctggagacaaggataagttatagagcagttggaggaagcatccaaagattgcaacccagggcaaatggaaaacaggagatcctaatatgaaagaaaaatggatcccaatctgagaaaaggcaaaagaatggctacttttttctatgctggagtattttctaataatcctgcttgacccttatctgacctctttggaaactataacatagctgtcacagtatagtcacaatccacaaatgatgcaggtgcaaatggtttatagccctgtgaagttcttaaagtttagaggctaacttacagaaatgaataagttgttttgttttatagcccggtagaggagttaaccccaaaggtgatatggttttatttcctgttatgtttaacttgataatcttattttggcattcttttcccattgactatatacatctctatttctcaaatgttcatggaactagctcttttattttcctgctggtttcttcagtaatgagttaaataaaacattgacacatacaaacaaa

SEQ ID NO: 292 - DNA, 9059 bp, Homo sapiens
  source 1..9059: mol_type = genomic DNA
gataaaaaggaagcaatcctatcggttactgcttagtgctgagcacatccagtgggtaaagttccttaaaatgctctgcaaagaaattgggacttttcattaaatcagaaattttacttttttcccctcctgggagctaaagatattttagagaagaattaaccttttgcttctccagttgaacatttgtagcaataagtcatgcaaatagagctctccacctgcttctttctgtgccttttgcgattctgctttagtgccaccagaagatactacctgggtgcagtggaactgtcatgggactatatgcaaagtgatctcggtgagctgcctgtggacgcaagatttcctcctagagtgccaaaatcttttccattcaacacctcagtcgtgtacaaaaagactctgtttgtagaattcacggatcaccttttcaacatcgctaagccaaggccaccctggatgggtctgctaggtcctaccatccaggctgaggtttatgatacagtggtcattacacttaagaacatggcttcccatcctgtcagtcttcatgctgttggtgtatcctactggaaagcttctgagggagctgaatatgatgatcagaccagtcaaagggagaaagaagatgataaagtcttccctggtggaagccatacatatgtctggcaggtcctgaaagagaatggtccaatggcctctgacccactgtgccttacctactcatatctttctcatgtggacctggtaaaagacttgaattcaggcctcattggagccctactagtatgtagagaagggagtctggccaaggaaaagacacagaccttgcacaaatttatactactttttgctgtatttgatgaagggaaaagttggcactcagaaacaaagaactccttgatgcaggatagggatgctgcatctgctcgggcctggcctaaaatgcacacagtcaatggttatgtaaacaggtctctgccaggtctgattggatgccacaggaaatcagtctattggcatgtgattggaatgggcaccactcctgaagtgcactcaatattcctcgaaggtcacacatttcttgtgaggaaccatcgccaggcgtccttggaaatctcgccaataactttccttactgctcaaacactcttgatggaccttggacagtttctactgttttgtcatatctcttcccaccaacatgatggcatggaagcttatgtcaaagtagacagctgtccagaggaaccccaactacgaatgaaaaataatgaagaagcggaagactatgatgatgatcttactgattctgaaatggatgtggtcaggtttgatgatgacaactctccttcctttatccaaattcgctcagttgccaagaagcatcctaaaacttgggtacattacattgctgctgaagaggaggactgggactatgctcccttagtcctcgcccccgatgacagaagttataaaagtcaatatttgaacaatggccctcagcggattggtaggaagtacaaaaaagtccgatttatggcatacacagatgaaacctttaagactcgtgaagctattcagcatgaatcaggaatcttgggacctttactttatggggaagttggagacacactgttgattatatttaagaatcaagcaagcagaccatataacatctaccctcacggaatcactgatgtccgtcctttgtattcaaggagattaccaaaaggtgtaaaacatttgaaggattttccaattctgccaggagaaatattcaaatataaatggacagtgactgtagaagatgggccaactaaatcagatcctcggtgcctgacccgctattactctagtttcgttaatatggagagagatctagcttcaggactcattggccctctcctcatctgctacaaagaatctgtagatcaaagaggaaaccagataatgtcagacaagaggaatgtcatcctgttttctgtatttgatgagaaccgaagctggtacctcacagagaatatacaacgctttctccccaatccagctggagtgcagcttgaggatccagagttccaagcctccaacatcatgcacagcatcaatggctatgtttttgatagtttgcagttgtcagtttgtttgcatgaggtggcatactggtacattctaagcattggagcacagactgacttcctttctgtcttcttctctggatataccttcaaacacaaaatggtctatgaagacacactcaccctattcccattctcaggagaaactgtcttcatgtcgatggaaaacccaggtctatggattctggggtgccacaactcagactttcggaacagaggcatgaccgccttactgaaggtttctagttgtgacaagaacactggtgattattacgaggacagttatgaagatatttcagcatacttgctgagtaaaaacaatgccattgaaccaagaagcttctcccagaattcaagacaccctagcactaggcaaaagcaatttaatgccaccacaattccagaaaatgacatagagaagactgacccttggtttgcacacagaacacctatgcctaaaatacaaaatgtctcctctagtgatttgttgatgctcttgcgacagagtcctactccacatgggctatccttatctgatctccaagaagccaaatatgagactttttctgatgatccatcacctggagcaatagacagtaataacagcctgtctgaaatgacacacttcaggccacagctccatcacagtggggacatggtatttacccctgagtcaggcctccaattaagattaaatgagaaactggggacaactgcagcaacagagttgaagaaacttgatttcaaagtttctagtacatcaaataatctgatttcaacaattccatcagacaatttggcagcaggtactgataatacaagttccttaggacccccaagtatgccagttcattatgatagtcaattagataccactctatttggcaaaaagtcatctccccttactgagtctggtggacctctgagcttgagtgaagaaaataatgattcaaagttgttagaatcaggtttaatgaatagccaagaaagttcatggggaaaaaatgtatcgtcaacagagagtggtaggttatttaaagggaaaagagctcatggacctgctttgttgactaaagataatgccttattcaaagttagcatctctttgttaaagacaaacaaaacttccaataattcagcaactaatagaaagactcacattgatggcccatcattattaattgagaatagtccatcagtctggcaaaatatattagaaagtgacactgagtttaaaaaagtgacacctttgattcatgacagaatgcttatggacaaaaatgctacagctttgaggctaaatcatatgtcaaataaaactacttcatcaaaaaacatggaaatggtccaacagaaaaaagagggccccattccaccagatgcacaaaatccagatatgtcgttctttaagatgctattcttgccagaatcagcaaggtggatacaaaggactcatggaaagaactctctgaactctgggcaaggccccagtccaaagcaattagtatccttaggaccagaaaaatctgtggaaggtcagaatttcttgtctgagaaaaacaaagtggtagtaggaaagggtgaatttacaaaggacgtaggactcaaagagatggtttttccaagcagcagaaacctatttcttactaacttggataatttacatgaaaataatacacacaatcaagaaaaaaaaattcaggaagaaatagaaaagaaggaaacattaatccaagagaatgtagttttgcctcagatacatacagtgactggcactaagaatttcatgaagaaccttttcttactgagcactaggcaaaatgtagaaggttcatatgacggggcatatgctccagtacttcaagattttaggtcattaaatgattcaacaaatagaacaaagaaacacacagctcatttctcaaaaaaaggggaggaagaaaacttggaaggcttgggaaatcaaaccaagcaaattgtagagaaatatgcatgcaccacaaggatatctcctaatacaagccagcagaattttgtcacgcaacgtagtaagagagctttgaaacaattcagactcccactagaagaaacagaacttgaaaaaaggataattgtggatgacacctcaacccagtggtccaaaaacatgaaacatttgaccccgagcaccctcacacagatagactacaatgagaaggagaaaggggccattactcagtctcccttatcagattgccttacgaggagtcatagcatccctcaagcaaatagatctccattacccattgcaaaggtatcatcatttccatctattagacctatatatctgaccagggtcctattccaagacaactcttctcatcttccagcagcatcttatagaaagaaagattctggggtccaagaaagcagtcatttcttacaaggagccaaaaaaaataacctttctttagccattctaaccttggagatgactggtgatcaaagagaggttggctccctggggacaagtgccacaaattcagtcacatacaagaaagttgagaacactgttctcccgaaaccagacttgcccaaaacatctggcaaagttgaattgcttccaaaagttcacatttatcagaaggacctattccctacggaaactagcaatgggtctcctggccatctggatctcgtggaagggagccttcttcagggaacagagggagcgattaagtggaatgaagcaaacagacctggaaaagttccctttctgagagtagcaacagaaagctctgcaaagactccctccaagctattggatcctcttgcttgggataaccactatggtactcagataccaaaagaagagtggaaatcccaagagaagtcaccagaaaaaacagcttttaagaaaaaggataccattttgtccctgaacgcttgtgaaagcaatcatgcaatagcagcaataaatgagggacaaaataagcccgaaatagaagtcacctgggcaaagcaaggtaggactgaaaggctgtgctctcaaaacccaccagtcttgaaacgccatcaacgggaaataactcgtactactcttcagtcagatcaagaggaaattgactatgatgataccatatcagttgaaatgaagaaggaagattttgacatttatgatgaggatgaaaatcagagcccccgcagctttcaaaagaaaacacgacactattttattgctgcagtggagaggctctgggattatgggatgagtagctccccacatgttctaagaaacagggctcagagtggcagtgtccctcagttcaagaaagttgttttccaggaatttactgatggctcctttactcagcccttataccgtggagaactaaatgaacatttgggactcctggggccatatataagagcagaagttgaagataatatcatggtaactttcagaaatcaggcctctcgtccctattccttctattctagccttatttcttatgaggaagatcagaggcaaggagcagaacctagaaaaaactttgtcaagcctaatgaaaccaaaacttacttttggaaagtgcaacatcatatggcacccactaaagatgagtttgactgcaaagcctgggcttatttctctgatgttgacctggaaaaagatgtgcactcaggcctgattggaccccttctggtctgccacactaacacactgaaccctgctcatgggagacaagtgacagtacaggaatttgctctgtttttcaccatctttgatgagaccaaaagctggtacttcactgaaaatatggaaagaaactgcagggctccctgcaatatccagatggaagatcccacttttaaagagaattatcgcttccatgcaatcaatggctacataatggatacactacctggcttagtaatggctcaggatcaaaggattcgatggtatctgctcagcatgggcagcaatgaaaacatccattctattcatttcagtggacatgtgttcactgtacgaaaaaaagaggagtataaaatggcactgtacaatctctatccaggtgtttttgagacagtggaaatgttaccatccaaagctggaatttggcgggtggaatgccttattggcgagcatctacatgctgggatgagcacactttttctggtgtacagcaataagtgtcagactcccctgggaatggcttctggacacattagagattttcagattacagcttcaggacaatatggacagtgggccccaaagctggccagacttcattattccggatcaatcaatgcctggagcaccaaggagcccttttcttggatcaaggtggatctgttggcaccaatgattattcacggcatcaagacccagggtgcccgtcagaagttctccagcctctacatctctcagtttatcatcatgtatagtcttgatgggaagaagtggcagacttatcgaggaaattccactggaaccttaatggtcttctttggcaatgtggattcatctgggataaaacacaatatttttaaccctccaattattgctcgatacatccgtttgcacccaactcattatagcattcgcagcactcttcgcatggagttgatgggctgtgatttaaatagttgcagcatgccattgggaatggagagtaaagcaatatcagatgcacagattactgcttcatcctactttaccaatatgtttgccacctggtctccttcaaaagctcgacttcacctccaagggaggagtaatgcctggagacctcaggtgaataatccaaaagagtggctgcaagtggacttccagaagacaatgaaagtcacaggagtaactactcagggagtaaaatctctgcttaccagcatgtatgtgaaggagttcctcatctccagcagtcaagatggccatcagtggactctcttttttcagaatggcaaagtaaaggtttttcagggaaatcaagactccttcacacctgtggtgaactctctagacccaccgttactgactcgctaccttcgaattcacccccagagttgggtgcaccagattgccctgaggatggaggttctgggctgcgaggcacaggacctctactgagggtggccactgcagcacctgccactgccgtcacctctccctcctcagctccagggcagtgtccctccctggcttgccttctacctttgtgctaaatcctagcagacactgccttgaagcctcctgaattaactatcatcagtcctgcatttctttggtggggggccaggagggtgcatccaatttaacttaactcttacctattttctgcagctgctcccagattactccttccttccaatataactaggcaaaaagaagtgaggagaaacctgcatgaaagcattcttccctgaaaagttaggcctctcagagtcaccacttcctctgttgtagaaaaactatgtgatgaaactttgaaaaagatatttatgatgttaacatttcaggttaagcctcatacgtttaaaataaaactctcagttgtttattatcctgatcaagcatggaacaaagcatgtttcaggatcagatcaatacaatcttggagtcaaaaggcaaatcatttggacaatctgcaaaatggagagaatacaataactactacagtaaagtctgtttctgcttccttacacatagatataattatgttatttagtcattatgaggggcacattcttatctccaaaactagcattcttaaactgagaattatagatggggttcaagaatccctaagtcccctgaaattatataaggcattctgtataaatgcaaatgtgcatttttctgacgagtgtccatagatataaagccatttggtcttaattctgaccaataaaaaaataagtcaggaggatgcaattgttgaaagctttgaaataaaataacaatgtcttcttgaaatttgtgatggccaagaaagaaaatgatgatgacattaggcttctaaaggacatacatttaatatttctgtggaaatatgaggaaaatccatggttatctgagataggagatacaaactttgtaattctaataatgcactcagtttactctctccctctactaatttcctgctgaaaataacacaacaaaaatgtaacaggggaaattatataccgtgactgaaaactagagtcctacttacatagttgaaatatcaaggaggtcagaagaaaattggactggtgaaaacagaaaaaacactccagtctgccatatcaccacacaataggatcccccttcttgccctccacccccataagattgtgaagggtttactgctccttccatctgcctgaccccttcactatgactacacagaatctcctgatagtaaagggggctggagacaaggataagttatagagcagttggaggaagcatccaaagattgcaacccagggcaaatggaaaacaggagatcctaatatgaaagaaaaatggatcccaatctgagaaaaggcaaaagaatggctacttttttctatgctggagtattttctaataatcctgcttgacccttatctgacctctttggaaactataacatagctgtcacagtatagtcacaatccacaaatgatgcaggtgcaaatggtttatagccctgtgaagttcttaaagtttagaggctaacttacagaaatgaataagttgttttgttttatagcccggtagaggagttaaccccaaaggtgatatggttttatttcctgttatgtttaacttgataatcttattttggcattcttttcccattgactatatacatctctatttctcaaatgttcatggaactagctcttttattttcctgctggtttcttcagtaatgagttaaataaaacattgacacatac

SEQ ID NO: 293 - DNA, 1509 bp, Homo sapiens
  source 1..1509: mol_type = genomic DNA
gcctgtcccagtgaggacagggacacagtactcggccacaccatggggcgcccactgcacctcgtcctgctcagtgcctccctggctggcctcctgctgctcggggaaagtctgttcatccgcagggagcaggccaacaacatcctggcgagggtcacgagggccaattcctttcttgaagagatgaagaaaggacacctcgaaagagagtgcatggaagagacctgctcatacgaagaggcccgcgaggtctttgaggacagcgacaagacgaatgaattctggaataaatacaaagatggcgaccagtgtgagaccagtccttgccagaaccagggcaaatgtaaagacggcctcggggaatacacctgcacctgtttagaaggattcgaaggcaaaaactgtgaattattcacacggaagctctgcagcctggacaacggggactgtgaccagttctgccacgaggaacagaactctgtggtgtgctcctgcgcccgcgggtacaccctggctgacaacggcaaggcctgcattcccacagggccctacccctgtgggaaacagaccctggaacgcaggaagaggtcagtggcccaggccaccagcagcagcggggaggcccctgacagcatcacatggaagccatatgatgcagccgacctggaccccaccgagaaccccttcgacctgcttgacttcaaccagacgcagcctgagaggggcgacaacaacctcaccaggatcgtgggaggccaggaatgcaaggacggggagtgtccctggcaggccctgctcatcaatgaggaaaacgagggtttctgtggtggaaccattctgagcgagttctacatcctaacggcagcccactgtctctaccaagccaagagattcaaggggaccggaacacggagcaggaggagggcggtgaggcggtgcacgaggtggaggtggtcatcaagcacaaccggttcacaaaggagacctatgacttcgacatcgccgtgctccggctcaagacccccatcaccttccgcatgaacgtggcgcctgcctgcctccccgagcgtgactgggccgagtccacgctgatgacgcagaagacggggattgtgagcggcttcgggcgcacccacgagaagggccggcagtccaccaggctcaagatgctggaggtgccctacgtggaccgcaacagctgcaagctgtccagcagcttcatcatcacccagaacatgttctgtgccggctacgacaccaagcaggaggatgcctgccagggggacagcgggggcccgcacgtcacccgcttcaaggacacctacttcgtgacaggcatcgtcagctggggagagggctgtgcccgtaaggggaagtacgggatctacaccaaggtcaccgccttcctcaagtggatcgacaggtccatgaaaaccaggggcttgcccaaggccaagagccatgccccggaggtcataacgtcctctccattaaagtgagatcccactc

SEQ ID NO: 294 - DNA, 1517 bp, Homo sapiens
  source 1..1517: mol_type = genomic DNA
gtcccagtgaggacagggacacagtactcggccacaccatggggcgcccactgcacctcgtcctgctcagtgcctccctggctggcctcctgctgctcggggaaagtctgttcatccgcagggagcaggccaacaacatcctggcgagggtcacgagggccaattcctttcttgaagagatgaagaaaggacacctcgaaagagagtgcatggaagagacctgctcatacgaagaggcccgcgaggtctttgaggacagcgacaagacgaatgaattctggaataaatacaaagatggcgaccagtgtgagaccagtccttgccagaaccagggcaaatgtaaagacggcctcggggaatacacctgcacctgtttagaaggattcgaaggcaaaaactgtgaattattcacacggaagctctgcagcctggacaacggggactgtgaccagttctgccacgaggaacagaactctgtggtgtgctcctgcgcccgcgggtacaccctggctgacaacggcaaggcctgcattcccacagggccctacccctgtgggaaacagaccctggaacgcaggaagaggtcagtggcccaggccaccagcagcagcggggaggcccctgacagcatcacatggaagccatatgatgcagccgacctggaccccaccgagaaccccttcgacctgcttgacttcaaccagacgcagcctgagaggggcgacaacaacctcaccaggatcgtgggaggccaggaatgcaaggacggggagtgtccctggcaggccctgctcatcaatgaggaaaacgagggtttctgtggtggaaccattctgagcgagttctacatcctaacggcagcccactgtctctaccaagccaagagattcaaggtgagggtaggggaccggaacacggagcaggaggagggcggtgaggcggtgcacgaggtggaggtggtcatcaagcacaaccggttcacaaaggagacctatgacttcgacatcgccgtgctccggctcaagacccccatcaccttccgcatgaacgtggcgcctgcctgcctccccgagcgtgactgggccgagtccacgctgatgacgcagaagacggggattgtgagcggcttcgggcgcacccacgagaagggccggcagtccaccaggctcaagatgctggaggtgccctacgtggaccgcaacagctgcaagctgtccagcagcttcatcatcacccagaacatgttctgtgccggctacgacaccaagcaggaggatgcctgccagggggacagcgggggcccgcacgtcacccgcttcaaggacacctacttcgtgacaggcatcgtcagctggggagagggctgtgcccgtaaggggaagtacgggatctacaccaaggtcaccgccttcctcaagtggatcgacaggtccatgaaaaccaggggcttgcccaaggccaagagccatgccccggaggtcataacgtcctctccattaaagtgagatcccactcaa

SEQ ID NO: 295 - DNA, 1450 bp, Homo sapiens
  source 1..1450: mol_type = genomic DNA
gcctgtcccagtgaggacagggacacagtactcggccacaccatggggcgcccactgcacctcgtcctgctcagtgcctccctggctggcctcctgctgctcggggaaagtctgttcatccgcagggagcaggccaacaacatcctggcgagggtcacgagggccaattcctttcttgaagagatgaagaaaggacacctcgaaagagagtgcatggaagagacctgctcatacgaagaggcccgcgaggtctttgaggacagcgacaagacgaatgaattctggaataaatacaaagatggcgaccagtgtgagaccagtccttgccagaaccagggcaaatgtaaagacggcctcggggaatacacctgcacctgtttagaaggattcgaaggcaaaaactgtgaattattcacacggaagctctgcagcctggacaacggggactgtgaccagttctgccacgaggaacagaactctgtggtgtgctcctgcgcccgcgggtacaccctggctgacaacggcaaggcctgcattcccacagggccctacccctgtgggaaacagaccctggaacgcaggaagaggtcagtggcccaggccaccagcagcagcggggaggcccctgacagcatcacatggaagccatatgatgcagccgacctggaccccaccgagaaccccttcgacctgcttgacttcaaccagacgcagcctgagaggggcgacaacaacctcaccaggatcgtgggaggccaggaatgcaaggacggggagtgtccctggcaggccctgctcatcaatgaggaaaacgagggtttctgtggtggaaccattctgagcgagttctacatcctaacggcagcccactgtctctaccaagccaagagattcaaggtgagggggaccggaacacggagcaggaggagggcggtgaggcggtgcacgaggtggaggtggtcatcaagcacaaccggttcacaaaggagacctatgacttcgacatcgccgtgctccggctcaagacccccatcaccttccgcatgaacgtggcgcctgcctgcctccccgagcgtgactgggccgagtccacgctgatgacgcagaagacggggattgtgagcggcttcgggcgcacccacgagaagggccggcagtccaccaggctcaagatgctggaggtgccctacgtggaccgcaacagctgcaagctgtccagcagcttcatcatcacccagaacatgttctgtgccggctacgacaccaagcaggaggatgcctgccagggggacagcgggggcccgcacgtcacccgcttcaaggacacctacttcgtgacaggcatcgtcagctggggagagggctgtgcccgtaaggggaagtacgggatctacaccaaggtcaccgccttcctcaagtggatcgacaggtccatgaaaaccaggggctt

SEQ ID NO: 296 - DNA, 3122 bp, Homo sapiens
  source 1..3122: mol_type = genomic DNA
aggcacacaggcaaaatcaagttctacatctgtccctgtgtatgtcacttgtttgaatacgaaataaaattaaaaaaataaattcagtgtattgagaaagcaagcaattctctcaaggtatatttctgacatactaagattttaacgactttcacaaatatgctgtactgagagagaatgttacataacattgagaactagtacaagtaaatattaaagtgaagtgaccatttcctacacaagctcattcagaggaggatgaagaccattttggaggaagaaaagcacccttattaagaattgcagcaagtaagccaacaaggtcttttcaggatgattttcttatatcaagtggtacatttcattttatttacttcagtttctggtgaatgtgtgactcagttgttgaaggacacctgctttgaaggaggggacattactacggtcttcacaccaagcgccaagtactgccaggtagtctgcacttaccacccaagatgtttactcttcactttcacggcggaatcaccatctgaggatcccacccgatggtttacttgtgtcctgaaagacagtgttacagaaacactgccaagagtgaataggacagcagcgatttctgggtattctttcaagcaatgctcacaccaaataagcgttaataacatttgtctactgaagcacacccaaacagggacaccaaccagaataacgaagctcgataaagtggtgtctggattttcactgaaatcctgtgcactttctaatctggcttgtattagggacattttccctaatacggtgtttgcagacagcaacatcgacagtgtcatggctcccgatgcttttgtctgtggccgaatctgcactcatcatcccggttgcttgttttttaccttcttttcccaggaatggcccaaagaatctcaaagaaatctttgtctccttaaaacatctgagagtggattgcccagtacacgcattaaaaagagcaaagctctttctggtttcagtctacaaagctgcaggcacagcatcccagtgttctgccattcttcattttaccatgacactgatttcttgggagaagaactggatattgttgctgcaaaaagtcacgaggcctgccagaaactgtgcaccaatgccgtccgctgccagttttttacctataccccagcccaagcatcctgcaacgaagggaagggcaagtgttacttaaagctttcttcaaacggatctccaactaaaatacttcacgggagaggaggcatctctggatacacattaaggttgtgtaaaatggataatgagtgtaccaccaaaatcaagcccaggatcgttggaggaactgcgtctgttcgtggtgagtggccgtggcaggtgaccctgcacacaacctcacccactcagagacacctgtgtggaggctccatcattggaaaccagtggatattaacagccgctcactgtttctatggggtagagtcacctaagattttgcgtgtctacagtggcattttaaatcaatctgaaataaaagaggacacatctttctttggggttcaagaaataataatccatgatcagtataaaatggcagaaagcgggtatgatattgccttgttgaaactggaaaccacagtgaattacacagattctcaacgacccatatgcctgccttccaaaggagatagaaatgtaatatacactgattgctgggtgactggatgggggtacagaaaactaagagacaaaatacaaaatactctccagaaagccaagatacccttagtgaccaacgaagagtgccagaagagatacagaggacataaaataacccataagatgatctgtgccggctacagggaaggagggaaggacgcttgcaagggagattcgggaggccctctgtcctgcaaacacaatgaggtctggcatctggtaggcatcacgagctggggcgaaggctgtgctcaaagggagcggccaggtgtttacaccaacgtggtcgagtacgtggactggattctggagaaaactcaagcagtgtgaatgggttcccaggggccattggagtccctgaaggacccaggatttgctgggagagggtgttgagttcactgtgccagcatgcttcctccacagtaacacgctgaaggggcttggtgtttgtaagaaaatgctagaagaaaacaaactgtcacaagttgttatgtccaaaactcccgttctatgatcgttgtagtttgtttgagcattcagtctctttgtttttgatcacgcttctatggagtccaagaattaccataaggcaatatttctgaagattactatataggcagatatagcagaaaataaccaagtagtggcagtggggatcaggcagaagaactggtaaaagaagccaccataaatagatttgttcgatgaaagatgaaaactggaagaaaggagaacaaagacagtcttcaccattttgcaggaatctacactctgcctatgtgaacacatttcttttgtaaagaaagaaattgattgcatttaatggcagattttcagaatagtcaggaattcttgtcatttccattttaaaatatatattaaaaaaaatcagttcgagtagacacgagctaagagtgaatgtgaagataacagaatttctgtgtggaagaggattacaagcagcaatttacctggaagtgataccttaggggcaatcttgaagatacactttcctgaaaaatgatttgtgatggattgtatatttatttaaaatatcttgggaggggaggctgatggagatagggagcatgctcaaacctccctaagacaagctgctgctgtgactatgggctcccaaagagctagatcgtatatttatttgacaaaaatcaccatagactgcatccatactacagagaaaaaacaattagggcgcaaatggatagttacagtaaagtcttcagcaagcagctgcctgtattctaagcactgggattttctgtttcgtgcaaatatttatctcattattgttgtgatctagttcaataacctagaatttgaattgtcaccacatagctttcaatctgtgccaacaactatacaattcatcaagtgtg

SEQ ID NO: 297 - DNA, 2396 bp, Homo sapiens
  source 1..2396: mol_type = genomic DNA
aaatgcagctttggctagcaggcacacaggcaaaatcaagttctacatctgtccctgtgtatgtcacttgtttgaatacgaaataaaattaaaaaaataaattcagtgtattgagaaagcaagcaattctctcaaggtatatttctgacatactaagattttaacgactttcacaaatatgctgtactgagagagaatgttacataacattgagaactagtacaagtaaatattaaagtgaagtgaccatttcctacacaagctcattcagaggaggatgaagaccattttggaggaagaaaagcacccttattaagaattgcagcaagtaagccaacaaggtcttttcaggatgattttcttatatcaagtggtacatttcattttatttacttcagtttctggtgaatgtgtgactcagttgttgaaggacacctgctttgaaggaggggacattactacggtcttcacaccaagcgccaagtactgccaggtagtctgcacttaccacccaagatgtttactcttcactttcacggcggaatcaccatctgaggatcccacccgatggtttacttgtgtcctgaaagacagtgttacagaaacactgccaagagtgaataggacagcagcgatttctgggtattctttcaagcaatgctcacaccaaataagcgcttgcaacaaagacatttatgtggacctagacatgaagggcataaactataacagctcagttgccaagagtgctcaagaatgccaagaaagatgcacggatgacgtccactgccactttttcacgtacgccacaaggcagtttcccagcctggagcatcgtaacatttgtctactgaagcacacccaaacagggacaccaaccagaataacgaagctcgataaagtggtgtctggattttcactgaaatcctgtgcactttctaatctggcttgtattagggacattttccctaatacggtgtttgcagacagcaacatcgacagtgtcatggctcccgatgcttttgtctgtggccgaatctgcactcatcatcccggttgcttgttttttaccttcttttcccaggaatggcccaaagaatctcaaagaaatctttgtctccttaaaacatctgagagtggattgcccagtacacgcattaaaaagagcaaagctctttctggtttcagtctacaaagctgcaggcacagcatcccagtgttctgccattcttcattttaccatgacactgatttcttgggagaagaactggatattgttgctgcaaaaagtcacgaggcctgccagaaactgtgcaccaatgccgtccgctgccagttttttacctataccccagcccaagcatcctgcaacgaagggaagggcaagtgttacttaaagctttcttcaaacggatctccaactaaaatacttcacgggagaggaggcatctctggatacacattaaggttgtgtaaaatggataatgagtgtaccaccaaaatcaagcccaggatcgttggaggaactgcgtctgttcgtggtgagtggccgtggcaggtgaccctgcacacaacctcacccactcagagacacctgtgtggaggctccatcattggaaaccagtggatattaacagccgctcactgtttctatggggtagagtcacctaagattttgcgtgtctacagtggcattttaaatcaatctgaaataaaagaggacacatctttctttggggttcaagaaataataatccatgatcagtataaaatggcagaaagcgggtatgatattgccttgttgaaactggaaaccacagtgaattacacagattctcaacgacccatatgcctgccttccaaaggagatagaaatgtaatatacactgattgctgggtgactggatgggggtacagaaaactaagagacaaaatacaaaatactctccagaaagccaagatacccttagtgaccaacgaagagtgccagaagagatacagaggacataaaataacccataagatgatctgtgccggctacagggaaggagggaaggacgcttgcaagggagattcgggaggccctctgtcctgcaaacacaatgaggtctggcatctggtaggcatcacgagctggggcgaaggctgtgctcaaagggagcggccaggtgtttacaccaacgtggtcgagtacgtggactggattctggagaaaactcaagcagtgtgaatgggttcccaggggccattggagtccctgaaggacccaggatttgctgggagagggtgttgagttcactgtgccagcatgcttcctccacagtaacacgctgaaggggcttggtgtttgtaagaaaatgctagaagaaaacaaactgtcacaagttgttatgtcc

SEQ ID NO: 298 - DNA, 717 bp, Homo sapiens
  source 1..717: mol_type = genomic DNA
tgtctggattttcactgaaatcctgtgcactttctaatctggcttgtattagggacattttccctaatacggtgtttgcagacagcaacatcgacagtgtcatggctcccgatgcttttgtctgtggccgaatctgcactcatcatcccggttgcttgttttttaccttcttttcccaggaatggcccaaagaatctcaaagaaatctttgtctccttaaaacatctgagagtggattgcccagtacacgcattaaaaagagcaaagctctttctggtttcagtctacaaagctgcaggcacagcatcccagtgttctgccattcttcattttaccatgacactgatttcttgggagaagaactggatattgttgctgcaaaaagtcacgaggcctgccagaaactgtgcaccaatgccgtccgctgccagttttttacctataccccagcccaagcatcctgcaacgaagggaagggcaagtgttacttaaagctttcttcaaacggatctccaactaaaatacttcacgggagaggaggcatctctggatacacattaaggttgtgtaaaatggataatgagcttagaggcgctccgatgaaaatctctggatggctcaagacttcttaaaaagcaagtcaattacgtcgtatctcatacattctgttttcctcacaataaatttccctaagacaagaaggagcattcggcacca

SEQ ID NO: 299 - DNA, 3999 bp, Homo sapiens
  source 1..3999: mol_type = genomic DNA
aagggcgcacctgccgggataacaggccagatgaagtaaatagaaaatcctctgagctcccctactggctccagctgtggagaagggggaggagaaaaccctgtgggacaggggaggagggtgagggctcctcttaggaagttatttaagagccaactgtcttgtctttcccgagtccgtttgaggaagtccccgaggcgcacagagcaagcccacgcgagggcacctctggaggggagcgcctgcaggaccttgtaaagtcaaaaatgtcagaaacttccaggaccgcctttggaggcagaagagcagttccacccaataactctaatgcagcggaagatgacctgcccacagtggagcttcagggcgtggtgccccggggcgtcaacctgcaagagtttcttaatgtcacgagcgttcacctgttcaaggagagatgggacactaacaaggtggaccaccacactgacaagtatgaaaacaacaagctgattgtccgcagagggcagtctttctatgtgcagattgacttcagtcgtccatatgaccccagaagggatctcttcagggtggaatacgtcattggtcgctacccacaggagaacaagggaacctacatcccagtgcctatagtctcagagttacaaagtggaaagtggggggccaagattgtcatgagagaggacaggtctgtgcggctgtccatccagtcttcccccaaatgtattgtggggaaattccgcatgtatgttgctgtctggactccctatggcgtacttcgaaccagtcgaaacccagaaacagacacgtacattctcttcaatccttggtgtgaagatgatgctgtgtatctggacaatgagaaagaaagagaagagtatgtcctgaatgacatcggggtaattttttatggagaggtcaatgacatcaagaccagaagctggagctatggtcagtttgaagatggcatcctggacacttgcctgtatgtgatggacagagcacaaatggacctctctggaagagggaatcccatcaaagtcagccgtgtggggtctgcaatggtgaatgccaaagatgacgaaggtgtcctcgttggatcctgggacaatatctatgcctatggcgtccccccatcggcctggactggaagcgttgacattctattggaataccggagctctgagaatccagtccggtatggccaatgctgggtttttgctggtgtctttaacacatttttacgatgccttggaataccagcaagaattgttaccaattatttctctgcccatgataatgatgccaatttgcaaatggacatcttcctggaagaagatgggaacgtgaattccaaactcaccaaggattcagtgtggaactaccactgctggaatgaagcatggatgacaaggcctgaccttcctgttggatttggaggctggcaagctgtggacagcaccccccaggaaaatagcgatggcatgtatcggtgtggccccgcctcggttcaagccatcaagcacggccatgtctgcttccaatttgatgcaccttttgtttttgcagaggtcaacagcgacctcatttacattacagctaagaaagatggcactcatgtggtggaaaatgtggatgccacccacattgggaaattaattgtgaccaaacaaattggaggagatggcatgatggatattactgatacttacaaattccaagaaggtcaagaagaagagagattggccctagaaactgccctgatgtacggagctaaaaagcccctcaacacagaaggtgtcatgaaatcaaggtccaacgttgacatggactttgaagtggaaaatgctgtgctgggaaaagacttcaagctctccatcaccttccggaacaacagccacaaccgttacaccatcacagcttatctctcagccaacatcaccttctacaccggggtcccgaaggcagaattcaagaaggagacgttcgacgtgacgctggagcccttgtccttcaagaaagaggcggtgctgatccaagccggcgagtacatgggtcagctgctggaacaagcgtccctgcacttctttgtcacagctcgcatcaatgagaccagggatgttctggccaagcaaaagtccaccgtgctaaccatccctgagatcatcatcaaggtccgtggcactcaggtagttggttctgacatgactgtgacagttgagtttaccaatcctttaaaagaaaccctgcgaaatgtctgggtacacctggatggtcctggagtaacaagaccaatgaagaagatgttccgtgaaatccggcccaactccaccgtgcagtgggaagaagtgtgccggccctgggtctctgggcatcggaagctgatagccagcatgagcagtgactccctgagacatgtgtatggcgagctggacgtgcagattcaaagacgaccttccatgtgaatgcacaggaagctgagatgaaccctggcatttggcctcttgtagtcttggctaaggaaattctaacgcaaaaatagctcttgctttgacttaggtgtgaagacccagacaggactgcagagggctccagagtggagatcccacatatttcaaaaacatgcttttccaaacccaggctattcggcaaggaagttagtttttaatctctccaccttccaaagagtgctaagcattagctttaattaagctctcatagctcataagagtaacagtcatcatttatcatcacaaatggctacatctccaaatatcagtgggctctcttaccagggagatttgctcaatacctggcctcatttaaaacaagacttcagattccccactcagccttttgggaataatagcacatgatttgggctctagaattccagtcccctttctcggggtcaggttctaccctccatgtgagaatatttttcccaggactagagcacaacataatttttatttttggcaaagccagaaaaagatctttcattttgcacctgcagccaagcaaatgcctgccaaattttagatttaccttgttagaagaggtggccccatattaacaaattgcatttgtgggaaacttaaccacctacaaggagataagaaagcaggtgcaacactcaagtctattgaataatgtagttttgtgatgcattttatagaatgtgtcacactgtggcctgatcagcaggagccaatatcccttactttaaccctttctgggatgcaatactaggaagtaaagtgaagaatttatctctttagttagtgattatatttcacccatctctcaggaatcatctcctttgcagaatgatgcaggttcaggtcccctttcagagatataataagcccaacaagttgaagaagctggcggatctagtgaccagatatatagaaggactgcagccactgattctctcttgtccttcacatcacccatgttgagacctcagcttggcactcaggtgctgaagggtaatatggactcagccttgcaaatagccagtgctagttctgacccaaccacagaggatgctgacatcatttgtattatgttccaaggctactacagagaaggctgcctgctatgtatttgcaaggctgatttatggtcagaatttccctctgatatgtctagggtgtgatttaggtcagtagactgtgattcttagcaaaaaatgaacagtgataagtatactgggggcaaaatcagaatggaatgctctggtctatataaccacatttctaagcctttgagactgttcctgagccttcagcactaacctatgagggtgagctggtcccctctatatatacatcatacttaactttactaagtaatctcacagcatttgccaagtctcccaatatccaattttaaaatgaaatgcattttgctagacagttaaactggcttaacttagtatattattattaattacaatgtaatagaagcttaaaataaagttaaactgattat

SEQ ID NO: 300 - DNA, 582 bp, Homo sapiens
  source 1..582: mol_type = genomic DNA
aaaggaaaccctcccagaccctctgaccaaaggggacgggtggggacttcctggcactgcagggccccttgcctgtccgtttgaggaagtccccgaggcgcacagagcaagcccacgcgagggcacctctggaggggagcgcctgcaggaccttgtaaagtcaaaaatgtcagaaacttccaggaccgcctttggaggcagaagagcagttccacccaataactctaatgcagcggaagatgacctgcccacagtggagcttcagggcgtggtgccccggggcgtcaacctgcaagagtttcttaatgtcacgagcgttcacctgttcaaggagagatgggacactaacaaggtggaccaccacactgacaagtatgaaaacaacaagctgattgtccgcagagggcagtctttctatgtgcagattgacttcagtcgtccatatgaccccagaagggatctcttcagggtggaatacgtcattggtcgctacccacaggagaacaagggaacctacatcccagtgcctatagtctcagagttacaaagtggaaagtggggggccaagattgtcatgagaga

SEQ ID NO: 301 - DNA, 2068 bp, Homo sapiens
  source 1..2068: mol_type = genomic DNA
gagtccgtttgaggaagtccccgaggcgcacagagcaagcccacgcgagggcacctctggaggggagcgcctgcaggaccttgtaaagtcaaaaatgtcagaaacttccaggaccgcctttggaggcagaagagcagttccacccaataactctaatgcagcggaagatgacctgcccacagtggagcttcagggcgtggtgccccggggcgtcaacctgcaaggtcgctacccacaggagaacaagggaacctacatcccagtgcctatagtctcagagttacaaagtggaaagtggggggccaagattgtcatgagagaggacaggtctgtgcggctgtccatccagtcttcccccaaatgtattgtggggaaattccgcatgtatgttgctgtctggactccctatggcgtacttcgaaccagtcgaaacccagaaacagacacgtacattctcttcaatccttggtgtgaagatgatgctgtgtatctggacaatgagaaagaaagagaagagtatgtcctgaatgacatcggggtaattttttatggagaggtcaatgacatcaagaccagaagctggagctatggtcagtttgaagatggcatcctggacacttgcctgtatgtgatggacagagcacaaatggacctctctggaagagggaatcccatcaaagtcagccgtgtggggtctgcaatggtgaatgccaaagatgacgaaggtgtcctcgttggatcctgggacaatatctatgcctatggcgtccccccatcggcctggactggaagcgttgacattctattggaataccggagctctgagaatccagtccggtatggccaatgctgggtttttgctggtgtctttaacacatttttacgatgccttggaataccagcaagaattgttaccaattatttctctgcccatgataatgatgccaatttgcaaatggacatcttcctggaagaagatgggaacgtgaattccaaactcaccaaggattcagtgtggaactaccactgctggaatgaagcatggatgacaaggcctgaccttcctgttggatttggaggctggcaagctgtggacagcaccccccaggaaaatagcgatggcatgtatcggtgtggccccgcctcggttcaagccatcaagcacggccatgtctgcttccaatttgatgcaccttttgtttttgcagaggtcaacagcgacctcatttacattacagctaagaaagatggcactcatgtggtggaaaatgtggatgccacccacattgggaaattaattgtgaccaaacaaattggaggagatggcatgatggatattactgatacttacaaattccaagaaggtcaagaagaagagagattggccctagaaactgccctgatgtacggagctaaaaagcccctcaacacagaaggtgtcatgaaatcaaggtccaacgttgacatggactttgaagtggaaaatgctgtgctgggaaaagacttcaagctctccatcaccttccggaacaacagccacaaccgttacaccatcacagcttatctctcagccaacatcaccttctacaccggggtcccgaaggcagaattcaagaaggagacgttcgacgtgacgctggagcccttgtccttcaagaaagaggcggtgctgatccaagccggcgagtacatgggtcagctgctggaacaagcgtccctgcacttctttgtcacagctcgcatcaatgagaccagggatgttctggccaagcaaaagtccaccgtgctaaccatccctgagatcatcatcaaggtccgtggcactcaggtagttggttctgacatgactgtgacagaagtgtgccggccctgggtctctgggcatcggaagctgatagccagcatgagcagtgactccctgagacatgtgtatggcgagctggacgtgcagattcaaagacgaccttccatgtgaatgcacaggaagctgagatgaaccctggcatttggcctcttgtagtcttggctaaggaaattctaacgcaaaaatagctcttgctttgactta

SEQ ID NO: 302 - DNA, 4461 bp, Homo sapiens
  source 1..4461: mol_type = genomic DNA
gcaagaccaggactcgggctggaggggcgctgggctcggacctgccaaggccacgggggagcaagggacagaggcgggggtcctagctgacggcttttactgcctaggatgacgctgcggcttctggtggccgcgctctgcgccgggatcctggcagaggcgccccgagtgcgagcccagcacagggagagaggtctgcatcctgatcacagacgggaagtcccaggacctggtggacacagctgcccaaaggctgaaggggcagggggtcaagctatttgctgtggggatcaagaatgctgaccctgaggagctgaagcgagttgcctcacagcccaccagtgacttcttcttcttcgtcaatgacttcagcatcttgaggacactactgcccctcgtttcccggagagtgtgcacgactgctggtggcgtgcctgtgacccgacctcctgccctagaagggccggaactgaccatccagaataccacagcccacagcctcctggtggcctggcggagtgtgccaggtgccactggctaccgtgtgacatggcgggtcctcagtggtgggcccacacagcagcaggagctgggccctgggcagggttcagtgttgctgcgtgacttggagcctggcacggactatgaggtgaccgtgagcaccctatttggccgcagtgtggggcccgccacttccctgatggctcgcactggaccagagctgcctgtgagccctgtaacagacctgcaagccaccgagctgcccgggcagcgggtgcgagtgtcctggagcccagtccctggtgccacccagtaccgcatcattgtgcgcagcacccagggggttgagcggaccctggtgcttcctgggagtcagacagcattcgacttggatgacgttcaggctgggcttagctacactgtgcgggtgtctgctcgagtgggtccccgtgagggcagtgccagtgtcctcactgtccgccgggacccactgggcccagtgaggacggtccatgtgactcaggccagcagctcatctgtcaccattacctggaccagggttcctggcgccacaggatacagggtttcctggcactcagcccacggcccagagaaatcccagttggtttctggggaggccacggtggctgagctggatggactggagccagatactgagtatacggtgcatgtgagggcccatgtggctggcgtggatgggccccctgcctctgtggttgtgaggactgcgcctgaggctccgccagccctggggacgcttcacgtggtgcagcgcggggagcactcgctgaggctgcgctgggagccggtgcccagagcgcagggcttccttctgcactggcaacctgagggtggccaggaacagtcccgggtcctggggcccgagctcagcagctatcacctggacgggctggagccagcgacacagtaccgcgtgaggctgagtgtcctagggccagctggagaagggccctctgcagaggtgactgcgcgcactgtgtgcccccgtggcctggcggatgtggtgttcctaccacatgccactcaagacaatgctcaccgtgcggaggctacgaggagggtcctggagcgtctggtgttggcacttgggcctcttgggccacaggcagttcaggttggcctgctgtcttacagtcatcggccctccccactgttcccactgaatggctcccatgaccttggcattatcttgcaaaggatccgtgacatgccctacatggacccaagtgggaacaacctggccccggccagagccctgcccagtgtattgtccaaagggccagaagggggaacctggagagatgggcttccctggagcagatgggcgtccaggcagccctggccgcgccgggaatcctgggacccctggagcccctggcctaaagggctctccagggttgcctggccctcgtggggacccgggcccccctggacctcgtggaccactgggggacccaggaccccgtggccccccagggcttcctggaacagccatgaagggtgacaaaggcgatcgtggggagcggggtgactctgaggatggagctccaggcctcccaggacaacctgggtctccgggtgagcagggcccacggggacctcctggagctattggccccaaagggctgccaggggttgctggacgtcctggagccaagggtcctgaagggccaccaggacccactggccgccaaggagagaagggagatgtggggcccgctgggcccagaggagctaccggagtccaaggggaacggggcccacccggcttggttcttcctggagaccctggccccaagggagaccctggagaccggggtgaagttggagagaaaggtgacgagggtcctccgggtgacccgggtttgcctggaaaagcaggcgagcgtggccttcggggtcccccaggacccccgggacggctggtagacacaggacctggagccagagagaagggggacccaggtgtccgaggcccagcaggagaaaagggtgaccggggtccccctgggctggatggccggagcggactggatgggaaaccaggagccgctgggccctctgggccgaatggaaagccaggcgaggatggcaaacctggcctgaatggaaaaaacggagaacctggggaccctggagaagacgggaggaagggttttcctggtgtcccaggaggcacgggccccaagggtgaccgtggggagactggatccaaaggggagcagggcctccctggagagcgtggcctgcgaggagagcctggaagtgtgccggcatctgccctgcgggagatcgtggagacctgggatgagagctctggtagcttcctgcctgtgcccgaacggcgtcgaggccccaagggggactcaggcgaacagggccccccaggcaaggagggccccatcggctttcctggagaacgcgggctgaagggcgaccgtggagaccctggccctcaggggccacctggtctggcccttggggagaggggcccccccgggccttccggccttgccggggagcctggaaagcctggtattcccgggctcccaggcagggctgggggtgtgggagaggcaggaaggccaggagagaggggagaacggggagagaaaggagaacgtggagaacaggtgtctgtggatgagccaggtcctggactctctggagaacagggaccccctggactcaagggtgctaagggggagccgggcagcaatggtgaccaaggtcccaaaggagacaggggtctgcagggtccaagaggcccccctggcccagtgggtggtcatggagaccctggaccacctggtgccccgggcctgactggacctactggagctgtgggacttcctggaccccccggcccttcaggccttgtgggtccacaggggtctccaggtttgcctggacaagtggctgtggtcgggctccctggagcaaagggagagaagggagcccctggaggccttgctggagacctggtgggtgagccgggtcagaaaggggctccaggacccaaaggtttcaagggtgacccaggagtcggggtcccgggctcccctgggcctcctggccctccaggtgtgaagggaccacctggggcctctggactcaaaggagacaagggagaccctggagtagggctgcctgggccccgaggcgagcgtggggagccaggcatccggggtgatgttgggagtgcaggactaaagggtgacaagggagactcagctgtgatcctggggcctccaggcccacggggtgccaagggggacatgggtcaacctggtgcagcagggatccctggtgacccgggatccccaggaaaggatggagtgcctggtatccgaggagaaaaaggagatgttggcttcatgggtccccggggcctcaagggggagcctggtgtgccgggccagtcgggggcccctggcaaggagggcctgatcggtcccaagggtgaccgaggctttgacgggcagccaggccccaagggtgaccagggcgagaaaggggagcgggggcggccagggcctgccggtcctcgaggcgagaagggagaagctgcactgacggaggatgacatccggggctttgtgcgccaagagatgagtcagcactgtgagcgggtaccccctgaggatgatgagtactctgaatactccgagtattctgtggaggagtaccaggaccctgaagctccttgggatagtgatgacccctgttccctgccactggatgagggctcctgcactgcctacaccctgcgctggtaccatcgggctgtgacaggcagcacagaggcctgtcacccttttgtctatggtggctgtggagggaatgccaaccgttttgggacccgtgaggcctgcgagcgccgctgcccaccccgggtggtccagagccaggggacag

SEQ ID NO: 303 - DNA, 9073 bp, Homo sapiens
  source 1..9073: mol_type = genomic DNA
gatgacgctgcggcttctggtggccgcgctctgcgccgggatcctggcagaggcgccccgagtgcgagcccagcacagggagagagtgacctgcacgcgcctttacgccgctgacattgtgttcttactggatggctcctcatccattggccgcagcaatttccgcgaggtccgcagctttctcgaagggctggtgctgcctttctctggagcagccagtgcacagggtgtgcgctttgccacagtgcagtacagcgatgacccacggacagagttcggcctggatgcacttggctctgggggtgatgtgatccgcgccatccgtgagcttagctacaaggggggcaacactcgcacaggggctgcaattctccatgtggctgaccatgtcttcctgccccagctggcccgacctggtgtccccaaggtctgcatcctgatcacagacgggaagtcccaggacctggtggacacagctgcccaaaggctgaaggggcagggggtcaagctatttgctgtggggatcaagaatgctgaccctgaggagctgaagcgagttgcctcacagcccaccagtgacttcttcttcttcgtcaatgacttcagcatcttgaggacactactgcccctcgtttcccggagagtgtgcacgactgctggtggcgtgcctgtgacccgacctccggatgactcgacctctgctccacgagacctggtgctgtctgagccaagcagccaatccttgagagtacagtggacagcggccagtggccctgtgactggctacaaggtccagtacactcctctgacggggctgggacagccactgccgagtgagcggcaggaggtgaacgtcccagctggtgagaccagtgtgcggctgcggggtctccggccactgaccgagtaccaagtgactgtgattgccctctacgccaacagcatcggggaggctgtgagcgggacagctcggaccactgccctagaagggccggaactgaccatccagaataccacagcccacagcctcctggtggcctggcggagtgtgccaggtgccactggctaccgtgtgacatggcgggtcctcagtggtgggcccacacagcagcaggagctgggccctgggcagggttcagtgttgctgcgtgacttggagcctggcacggactatgaggtgaccgtgagcaccctatttggccgcagtgtggggcccgccacttccctgatggctcgcactgacgcttctgttgagcagaccctgcgcccggtcatcctgggccccacatccatcctcctttcctggaacttggtgcctgaggcccgtggctaccggttggaatggcggcgtgagactggcttggagccaccgcagaaggtggtactgccctctgatgtgacccgctaccagttggatgggctgcagccgggcactgagtaccgcctcacactctacactctgctggagggccacgaggtggccacccctgcaaccgtggttcccactggaccagagctgcctgtgagccctgtaacagacctgcaagccaccgagctgcccgggcagcgggtgcgagtgtcctggagcccagtccctggtgccacccagtaccgcatcattgtgcgcagcacccagggggttgagcggaccctggtgcttcctgggagtcagacagcattcgacttggatgacgttcaggctgggcttagctacactgtgcgggtgtctgctcgagtgggtccccgtgagggcagtgccagtgtcctcactgtccgccgggagccggaaactccacttgctgttccagggctgcgggttgtggtgtcagatgcaacgcgagtgagggtggcctggggacccgtccctggagccagtggatttcggattagctggagcacaggcagtggtccggagtccagccagacactgcccccagactctactgccacagacatcacagggctgcagcctggaaccacctaccaggtggctgtgtcggtactgcgaggcagagaggagggccctgctgcagtcatcgtggctcgaacggacccactgggcccagtgaggacggtccatgtgactcaggccagcagctcatctgtcaccattacctggaccagggttcctggcgccacaggatacagggtttcctggcactcagcccacggcccagagaaatcccagttggtttctggggaggccacggtggctgagctggatggactggagccagatactgagtatacggtgcatgtgagggcccatgtggctggcgtggatgggccccctgcctctgtggttgtgaggactgcccctgagcctgtgggtcgtgtgtcgaggctgcagatcctcaatgcttccagcgacgttctacggatcacctgggtaggggtcactggagccacagcttacagactggcctggggccggagtgaaggcggccccatgaggcaccagatactcccaggaaacacagactctgcagagatccggggtctcgaaggtggagtcagctactcagtgcgagtgactgcacttgtcggggaccgcgagggcacacctgtctccattgttgtcactacgccgcctgaggctccgccagccctggggacgcttcacgtggtgcagcgcggggagcactcgctgaggctgcgctgggagccggtgcccagagcgcagggcttccttctgcactggcaacctgagggtggccaggaacagtcccgggtcctggggcccgagctcagcagctatcacctggacgggctggagccagcgacacagtaccgcgtgaggctgagtgtcctagggccagctggagaagggccctctgcagaggtgactgcgcgcactgagtcacctcgtgttccaagcattgaactacgtgtggtggacacctcgatcgactcggtgactttggcctggactccagtgtccagggcatccagctacatcctatcctggcggccactcagaggccctggccaggaagtgcctgggtccccgcagacacttccagggatctcaagctcccagcgggtgacagggctagagcctggcgtctcttacatcttctccctgacgcctgtcctggatggtgtgcggggtcctgaggcatctgtcacacagacgccagtgtgcccccgtggcctggcggatgtggtgttcctaccacatgccactcaagacaatgctcaccgtgcggaggctacgaggagggtcctggagcgtctggtgttggcacttgggcctcttgggccacaggcagttcaggttggcctgctgtcttacagtcatcggccctccccactgttcccactgaatggctcccatgaccttggcattatcttgcaaaggatccgtgacatgccctacatggacccaagtgggaacaacctgggcacagccgtggtcacagctcacagatacatgttggcaccagatgctcctgggcgccgccagcacgtaccaggggtgatggttctgctagtggatgaacccttgagaggtgacatattcagccccatccgtgaggcccaggcttctgggcttaatgtggtgatgttgggaatggctggagcggacccagagcagctgcgtcgcttggcgccgggtatggactctgtccagaccttcttcgccgtggatgatgggccaagcctggaccaggcagtcagtggtctggccacagccctgtgtcaggcatccttcactactcagccccggccagagccctgcccagtgtattgtccaaagggccagaagggggaacctggagagatgggcctgagaggacaagttgggcctcctggcgaccctggcctcccgggcaggaccggtgctcccggcccccaggggccccctggaagtgccactgccaagggcgagaggggcttccctggagcagatgggcgtccaggcagccctggccgcgccgggaatcctgggacccctggagcccctggcctaaagggctctccagggttgcctggccctcgtggggacccgggagagcgaggacctcgaggcccaaagggggagccgggggctcccggacaagtcatcggaggtgaaggacctgggcttcctgggcggaaaggggaccctggaccatcgggcccccctggacctcgtggaccactgggggacccaggaccccgtggccccccagggcttcctggaacagccatgaagggtgacaaaggcgatcgtggggagcggggtccccctggaccaggtgaaggtggcattgctcctggggagcctgggctgccgggtcttcccggaagccctggaccccaaggccccgttggcccccctggaaagaaaggagaaaaaggtgactctgaggatggagctccaggcctcccaggacaacctgggtctccgggtgagcagggcccacggggacctcctggagctattggccccaaaggtgaccggggctttccagggcccctgggtgaggctggagagaagggcgaacgtggacccccaggcccagcgggatcccgggggctgccaggggttgctggacgtcctggagccaagggtcctgaagggccaccaggacccactggccgccaaggagagaagggggagcctggtcgccctggggaccctgcagtggtgggacctgctgttgctggacccaaaggagaaaagggagatgtggggcccgctgggcccagaggagctaccggagtccaaggggaacggggcccacccggcttggttcttcctggagaccctggccccaagggagaccctggagaccggggtcccattggccttactggcagagcaggacccccaggtgactcagggcctcctggagagaagggagaccctgggcggcctggccccccaggacctgttggcccccgaggacgagatggtgaagttggagagaaaggtgacgagggtcctccgggtgacccgggtttgcctggaaaagcaggcgagcgtggccttcggggggcacctggagttcgggggcctgtgggtgaaaagggagaccagggagatcctggagaggatggacgaaatggcagccctggatcatctggacccaagggtgaccgtggggagccgggtcccccaggacccccgggacggctggtagacacaggacctggagccagagagaagggagagcctggggaccgcggacaagagggtcctcgagggcccaagggtgatcctggcctccctggagcccctggggaaaggggcattgaagggtttcggggacccccaggcccacagggggacccaggtgtccgaggcccagcaggagaaaagggtgaccggggtccccctgggctggatggccggagcggactggatgggaaaccaggagccgctgggccctctgggccgaatggtgctgcaggcaaagctggggacccagggagagacgggcttccaggcctccgtggagaacagggcctccctggcccctctggtccccctggattaccgggaaagccaggcgaggatggcaaacctggcctgaatggaaaaaacggagaacctggggaccctggagaagacgggaggaagggagagaaaggagattcaggcgcctctgggagagaaggttttcctggtgtcccaggaggcacgggccccaagggtgaccgtggggagactggatccaaaggggagcagggcctccctggagagcgtggcctgcgaggagagcctggaagtgtgccgaatgtggatcggttgctggaaactgctggcatcaaggcatctgccctgcgggagatcgtggagacctgggatgagagctctggtagcttcctgcctgtgcccgaacggcgtcgaggccccaagggggactcaggcgaacagggccccccaggcaaggagggccccatcggctttcctggagaacgcgggctgaagggcgaccgtggagaccctggccctcaggggccacctggtctggcccttggggagaggggcccccccgggccttccggccttgccggggagcctggaaagcctggtattcccgggctcccaggcagggctgggggtgtgggagaggcaggaaggccaggagagaggggagaacggggagagaaaggagaacgtggagaacagggcagagatggccctcctggactccctggaacccctgggccccccggaccccctggccccaaggtgtctgtggatgagccaggtcctggactctctggagaacagggaccccctggactcaagggtgctaagggggagccgggcagcaatggtgaccaaggtcccaaaggagacaggggtgtgccaggcatcaaaggagaccggggagagcctggaccgaggggtcaggacggcaacccgggtctaccaggagagcgtggtatggctgggcctgaagggaagccgggtctgcagggtccaagaggcccccctggcccagtgggtggtcatggagaccctggaccacctggtgccccgggtcttgctggccctgcaggaccccaaggaccttctggcctgaagggggagcctggagagacaggacctccaggacggggcctgactggacctactggagctgtgggacttcctggaccccccggcccttcaggccttgtgggtccacaggggtctccaggtttgcctggacaagtgggggagacagggaagccgggagccccaggtcgagatggtgccagtggaaaagatggagacagagggagccctggtgtgccagggtcaccaggtctgcctggccctgtcggacctaaaggagaacctggccccacgggggcccctggacaggctgtggtcgggctccctggagcaaagggagagaagggagcccctggaggccttgctggagacctggtgggtgagccgggagccaaaggtgaccgaggactgccagggccgcgaggcgagaagggtgaagctggccgtgcaggggagcccggagaccctggggaagatggtcagaaaggggctccaggacccaaaggtttcaagggtgacccaggagtcggggtcccgggctcccctgggcctcctggccctccaggtgtgaagggagatctgggcctccctggcctgcccggtgctcctggtgttgttgggttcccgggtcagacaggccctcgaggagagatgggtcagccaggccctagtggagagcggggtctggcaggccccccagggagagaaggaatcccaggacccctggggccacctggaccaccggggtcagtgggaccacctggggcctctggactcaaaggagacaagggagaccctggagtagggctgcctgggccccgaggcgagcgtggggagccaggcatccggggtgaagatggccgccccggccaggagggaccccgaggactcacggggccccctggcagcaggggagagcgtggggagaagggtgatgttgggagtgcaggactaaagggtgacaagggagactcagctgtgatcctggggcctccaggcccacggggtgccaagggggacatgggtgaacgagggcctcggggcttggatggtgacaaaggacctcggggagacaatggggaccctggtgacaagggcagcaagggagagcctggtgacaagggctcagccgggttgccaggactgcgtggactcctgggaccccagggtcaacctggtgcagcagggatccctggtgacccgggatccccaggaaaggatggagtgcctggtatccgaggagaaaaaggagatgttggcttcatgggtccccggggcctcaagggtgaacggggagtgaagggagcctgtggccttgatggagagaagggagacaagggagaagctggtcccccaggccgccccgggctggcaggacacaaaggagagatgggggagcctggtgtgccgggccagtcgggggcccctggcaaggagggcctgatcggtcccaagggtgaccgaggctttgacgggcagccaggccccaagggtgaccagggcgagaaaggggagcggggaaccccaggaattgggggcttcccaggccccagtggaaatgatggctctgctggtcccccagggccacctggcagtgttggtcccagaggccccgaaggacttcagggccagaagggtgagcgaggtccccccggagagagagtggtgggggctcctggggtccctggagctcctggcgagagaggggagcaggggcggccagggcctgccggtcctcgaggcgagaagggagaagctgcactgacggaggatgacatccggggctttgtgcgccaagagatgagtcagcactgtgcctgccagggccagttcatcgcatctggatcacgacccctccctagttatgctgcagacactgccggctcccagctccatgctgtgcctgtgctccgcgtctctcatgcagaggaggaagagcgggtaccccctgaggatgatgagtactctgaatactccgagtattctgtggaggagtaccaggaccctgaagctccttgggatagtgatgacccctgttccctgccactggatgagggctcctgcactgcctacaccctgcgctggtaccatcgggctgtgacaggcagcacagaggcctgtcacccttttgtctatggtggctgtggagggaatgccaaccgttttgggacccgtgaggcctgcgagcgccgctgcccaccccgggtggtccagagccaggggacaggtactgcccaggactgaggcccagataatgagctgagattcagcatcccctggaggagtcggggtctcagcagaaccccactgtccctccccttggtgctagaggcttgtgtgcacgtgagcgtgcgtgtgcacgtccgttatttcagtgacttggtcccgtgggtctagccttcccccctgtggacaaacccccattgtggctcctgccaccctggcagatgactcactgtgggggggtggctgtgggcagtgagcggatgtgactggcgtctgacccgccccttgacccaagcctgtgatgacatggtgctgattctggggggcattaaagctgctgttttaaaaggc

SEQ ID NO: 304 - DNA, 783 bp, Homo sapiens
  source 1..783: mol_type = genomic DNA
gtacacagagagaaaggctaaagttctctggaggatgtggctgcagagcctgctgctcttgggcactgtggcctgcagcatctctgcacccgcccgctcgcccagccccagcacgcagccctgggagcatgtgaatgccatccaggaggcccggcgtctcctgaacctgagtagagacactgctgctgagatgaatgaaacagtagaagtcatctcagaaatgtttgacctccaggagccgacctgcctacagacccgcctggagctgtacaagcagggcctgcggggcagcctcaccaagctcaagggccccttgaccatgatggccagccactacaagcagcactgccctccaaccccggaaacttcctgtgcaacccagattatcacctttgaaagtttcaaagagaacctgaaggactttctgcttgtcatcccctttgactgctgggagccagtccaggagtgagaccggccagatgaggctggccaagccggggagctgctctctcatgaaacaagagctagaaactcaggatggtcatcttggagggaccaaggggtgggccacagccatggtgggagtggcctggacctgccctgggccacactgaccctgatacaggcatggcagaagaatgggaatattttatactgacagaaatcagtaatatttatatatttatatttttaaaatatttatttatttatttatttaagttcatattccatatttattcaagatgttttaccgtaataattattattaaaaatatgcttcta

SEQ ID NO: 305 - DNA, 1509 bp, Homo sapiens
  source 1..1509: mol_type = genomic DNA
cggagcctgcagcccagccccacccagacccatggctggacctgccacccagagccccatgaagctgatggccctgcagctgctgctgtggcacagtgcactctggacagtgcaggaagccacccccctgggccctgccagctccctgccccagagcttcctgctcaagtgcttagagcaagtgaggaagatccagggcgatggcgcagcgctccaggagaagctggtgagtgagtgtgccacctacaagctgtgccaccccgaggagctggtgctgctcggacactctctgggcatcccctgggctcccctgagcagctgccccagccaggccctgcagctggcaggctgcttgagccaactccatagcggccttttcctctaccaggggctcctgcaggccctggaagggatctcccccgagttgggtcccaccttggacacactgcagctggacgtcgccgactttgccaccaccatctggcagcagatggaagaactgggaatggcccctgccctgcagcccacccagggtgccatgccggccttcgcctctgctttccagcgccgggcaggaggggtcctggttgcctcccatctgcagagcttcctggaggtgtcgtaccgcgttctacgccaccttgcccagccctgagccaagccctccccatcccatgtatttatctctatttaatatttatgtctatttaagcctcatatttaaagacagggaagagcagaacggagccccaggcctctgtgtccttccctgcatttctgagtttcattctcctgcctgtagcagtgagaaaaagctcctgtcctcccatcccctggactgggaggtagataggtaaataccaagtatttattactatgactgctccccagccctggctctgcaatgggcactgggatgagccgctgtgagcccctggtcctgagggtccccacctgggacccttgagagtatcaggtctcccacgtgggagacaagaaatccctgtttaatatttaaacagcagtgttccccatctgggtccttgcacccctcactctggcctcagccgactgcacagcggcccctgcatccccttggctgtgaggcccctggacaagcagaggtggccagagctgggaggcatggccctggggtcccacgaatttgctggggaatctcgtttttcttcttaagacttttgggacatggtttgactcccgaacatcaccgacgcgtctcctgtttttctgggtggcctcgggacacctgccctgcccccacgagggtcaggactgtgactctttttagggccaggcaggtgcctggacatttgccttgctggacggggactggggatgtgggagggagcagacaggaggaatcatgtcaggcctgtgtgtgaaaggaagctccactgtcaccctccacctcttcaccccccactcaccagtgtcccctccactgtcacattgtaactgaacttcaggataataaagtgtttgcctcca

SEQ ID NO: 306 - DNA, 1673 bp, Homo sapiens
  source 1..1673: mol_type = genomic DNA
agcctgcagcccagccccacccagacccatggctggacctgccacccagagccccatgaagctgatgggtgagtgtcttggcccaggatgggagagccgcctgccctggcatgggagggaggctggtgtgacagaggggctggggatccccgttctgggaatggggattaaaggcacccagtgtccccgagagggcctcaggtggtagggaacagcatgtctcctgagcccgctctgtccccagccctgcagctgctgctgtggcacagtgcactctggacagtgcaggaagccacccccctgggccctgccagctccctgccccagagcttcctgctcaagtgcttagagcaagtgaggaagatccagggcgatggcgcagcgctccaggagaagctgtgtgccacctacaagctgtgccaccccgaggagctggtgctgctcggacactctctgggcatcccctgggctcccctgagcagctgccccagccaggccctgcagctggcaggctgcttgagccaactccatagcggccttttcctctaccaggggctcctgcaggccctggaagggatctcccccgagttgggtcccaccttggacacactgcagctggacgtcgccgactttgccaccaccatctggcagcagatggaagaactgggaatggcccctgccctgcagcccacccagggtgccatgccggccttcgcctctgctttccagcgccgggcaggaggggtcctggttgcctcccatctgcagagcttcctggaggtgtcgtaccgcgttctacgccaccttgcccagccctgagccaagccctccccatcccatgtatttatctctatttaatatttatgtctatttaagcctcatatttaaagacagggaagagcagaacggagccccaggcctctgtgtccttccctgcatttctgagtttcattctcctgcctgtagcagtgagaaaaagctcctgtcctcccatcccctggactgggaggtagataggtaaataccaagtatttattactatgactgctccccagccctggctctgcaatgggcactgggatgagccgctgtgagcccctggtcctgagggtccccacctgggacccttgagagtatcaggtctcccacgtgggagacaagaaatccctgtttaatatttaaacagcagtgttccccatctgggtccttgcacccctcactctggcctcagccgactgcacagcggcccctgcatccccttggctgtgaggcccctggacaagcagaggtggccagagctgggaggcatggccctggggtcccacgaatttgctggggaatctcgtttttcttcttaagacttttgggacatggtttgactcccgaacatcaccgacgcgtctcctgtttttctgggtggcctcgggacacctgccctgcccccacgagggtcaggactgtgactctttttagggccaggcaggtgcctggacatttgccttgctggacggggactggggatgtgggagggagcagacaggaggaatcatgtcaggcctgtgtgtgaaaggaagctccactgtcaccctccacctcttcaccccccactcaccagtgtcccctccactgtcacattgtaactgaacttcaggataataaagtgtttgcctcca

SEQ ID NO: 307 - DNA, 622 bp, Homo sapiens
  source 1..622: mol_type = genomic DNA
ccagacccatggctggacctgccacccagagccccatgaagctgatggccctgcagctgctgctgtggcacagtgcactctggacagtgcaggaagccacccccctgggccctgccagctccctgccccagagcttcctgctcaagtgcttagagcaagtgaggaagatccagggcgatggcgcagcgctccaggagaagctggtgagtgaggcaggctgcttgagccaactccatagcggccttttcctctaccaggggctcctgcaggccctggaagggatctcccccgagttgggtcccaccttggacacactgcagctggacgtcgccgactttgccaccaccatctggcagcagatggaagaactgggaatggcccctgccctgcagcccacccagggtgccatgccggccttcgcctctgctttccagcgccgggcaggaggggtcctggttgcctcccatctgcagagcttcctggaggtgtcgtaccgcgttctacgccaccttgcccagccctgagccaagccctccccatcccatgtatttatctctatttaatatttatgtctatttaagcctcatatttaaagacagggaagagcagaacggagccccag

SEQ ID NO: 308 - DNA, 1583 bp, Homo sapiens
  source 1..1583: mol_type = genomic DNA
agtcgtggccccaggtaatttcctcccaggcctccatggggttatgtataaaggcccccctagagctgggccccaaaacagcccggagcctgcagcccagccccacccagacccatggctggacctgccacccagagccccatgaagctgatggccctgcagctgctgctgtggcacagtgcactctggacagtgcaggaagccacccccctgggccctgccagctccctgccccagagcttcctgctcaagtgcttagagcaagtgaggaagatccagggcgatggcgcagcgctccaggagaagctgtgtgccacctacaagctgtgccaccccgaggagctggtgctgctcggacactctctgggcatcccctgggctcccctgagcagctgccccagccaggccctgcagctggcaggctgcttgagccaactccatagcggccttttcctctaccaggggctcctgcaggccctggaagggatctcccccgagttgggtcccaccttggacacactgcagctggacgtcgccgactttgccaccaccatctggcagcagatggaagaactgggaatggcccctgccctgcagcccacccagggtgccatgccggccttcgcctctgctttccagcgccgggcaggaggggtcctggttgcctcccatctgcagagcttcctggaggtgtcgtaccgcgttctacgccaccttgcccagccctgagccaagccctccccatcccatgtatttatctctatttaatatttatgtctatttaagcctcatatttaaagacagggaagagcagaacggagccccaggcctctgtgtccttccctgcatttctgagtttcattctcctgcctgtagcagtgagaaaaagctcctgtcctcccatcccctggactgggaggtagataggtaaataccaagtatttattactatgactgctccccagccctggctctgcaatgggcactgggatgagccgctgtgagcccctggtcctgagggtccccacctgggacccttgagagtatcaggtctcccacgtgggagacaagaaatccctgtttaatatttaaacagcagtgttccccatctgggtccttgcacccctcactctggcctcagccgactgcacagcggcccctgcatccccttggctgtgaggcccctggacaagcagaggtggccagagctgggaggcatggccctggggtcccacgaatttgctggggaatctcgtttttcttcttaagacttttgggacatggtttgactcccgaacatcaccgacgcgtctcctgtttttctgggtggcctcgggacacctgccctgcccccacgagggtcaggactgtgactctttttagggccaggcaggtgcctggacatttgccttgctggacggggactggggatgtgggagggagcagacaggaggaatcatgtcaggcctgtgtgtgaaaggaagctccactgtcaccctccacctcttcaccccccactcaccagtgtcccctccactgtcacattgtaactgaacttcaggataataaagtgtttgcctcca

SEQ ID NO: 309 - DNA, 4127 bp, Homo sapiens
  source 1..4127: mol_type = genomic DNA
acagcattaacatttagtgggagtgcagtgagaattgggtttaacttctggcatttctgggcttgtggcttgtggttgattttttatttactttgcaaaagtttctgataggcggagcatctagtttcaacttccttttgcagcaagttctttcctgcactaatcacaattcttggaagaggagaactggacgttgtgaacagagttagctggtaaatgtcctcttaaaagatccaaaaaatgagacttctagcaaagattatttgccttatgttatgggctatttgtgtagcagaagattgcaatgaacttcctccaagaagaaatacagaaattctgacaggttcctggtctgaccaaacatatccagaaggcacccaggctatctataaatgccgccctggatatagatctcttggaaatgtaataatggtatgcaggaagggagaatgggttgctcttaatccattaaggaaatgtcagaaaaggccctgtggacatcctggagatactccttttggtacttttacccttacaggaggaaatgtgtttgaatatggtgtaaaagctgtgtatacatgtaatgaggggtatcaattgctaggtgagattaattaccgtgaatgtgacacagatggatggaccaatgatattcctatatgtgaagttgtgaagtgtttaccagtgacagcaccagagaatggaaaaattgtcagtagtgcaatggaaccagatcgggaataccattttggacaagcagtacggtttgtatgtaactcaggctacaagattgaaggagatgaagaaatgcattgttcagacgatggtttttggagtaaagagaaaccaaagtgtgtggaaatttcatgcaaatccccagatgttataaatggatctcctatatctcagaagattatttataaggagaatgaacgatttcaatataaatgtaacatgggttatgaatacagtgaaagaggagatgctgtatgcactgaatctggatggcgtccgttgccttcatgtgaagaaaaatcatgtgataatccttatattccaaatggtgactactcacctttaaggattaaacacagaactggagatgaaatcacgtaccagtgtagaaatggtttttatcctgcaacccggggaaatacagcaaaatgcacaagtactggctggatacctgctccgagatgtaccttgaaaccttgtgattatccagacattaaacatggaggtctatatcatgagaatatgcgtagaccatactttccagtagctgtaggaaaatattactcctattactgtgatgaacattttgagactccgtcaggaagttactgggatcacattcattgcacacaagatggatggtcgccagcagtaccatgcctcagaaaatgttattttccttatttggaaaatggatataatcaaaatcatggaagaaagtttgtacagggtaaatctatagacgttgcctgccatcctggctacgctcttccaaaagcgcagaccacagttacatgtatggagaatggctggtctcctactcccagatgcatccgtgtcaaaacatgttccaaatcaagtatagatattgagaatgggtttatttctgaatctcagtatacatatgccttaaaagaaaaagcgaaatatcaatgcaaactaggatatgtaacagcagatggtgaaacatcaggatcaattacatgtgggaaagatggatggtcagctcaacccacgtgcattaaatcttgtgatatcccagtatttatgaatgccagaactaaaaatgacttcacatggtttaagctgaatgacacattggactatgaatgccatgatggttatgaaagcaatactggaagcaccactggttccatagtgtgtggttacaatggttggtctgatttacccatatgttatgaaagagaatgcgaacttcctaaaatagatgtacacttagttcctgatcgcaagaaagaccagtataaagttggagaggtgttgaaattctcctgcaaaccaggatttacaatagttggacctaattccgttcagtgctaccactttggattgtctcctgacctcccaatatgtaaagagcaagtacaatcatgtggtccacctcctgaactcctcaatgggaatgttaaggaaaaaacgaaagaagaatatggacacagtgaagtggtggaatattattgcaatcctagatttctaatgaagggacctaataaaattcaatgtgttgatggagagtggacaactttaccagtgtgtattgtggaggagagtacctgtggagatatacctgaacttgaacatggctgggcccagctttcttcccctccttattactatggagattcagtggaattcaattgctcagaatcatttacaatgattggacacagatcaattacgtgtattcatggagtatggacccaacttccccagtgtgtggcaatagataaacttaagaagtgcaaatcatcaaatttaattatacttgaggaacatttaaaaaacaagaaggaattcgatcataattctaacataaggtacagatgtagaggaaaagaaggatggatacacacagtctgcataaatggaagatgggatccagaagtgaactgctcaatggcacaaatacaattatgcccacctccacctcagattcccaattctcacaatatgacaaccacactgaattatcgggatggagaaaaagtatctgttctttgccaagaaaattatctaattcaggaaggagaagaaattacatgcaaagatggaagatggcagtcaataccactctgtgttgaaaaaattccatgttcacaaccacctcagatagaacacggaaccattaattcatccaggtcttcacaagaaagttatgcacatgggactaaattgagttatacttgtgagggtggtttcaggatatctgaagaaaatgaaacaacatgctacatgggaaaatggagttctccacctcagtgtgaaggccttccttgtaaatctccacctgagatttctcatggtgttgtagctcacatgtcagacagttatcagtatggagaagaagttacgtacaaatgttttgaaggttttggaattgatgggcctgcaattgcaaaatgcttaggagaaaaatggtctcaccctccatcatgcataaaaacagattgtctcagtttacctagctttgaaaatgccatacccatgggagagaagaaggatgtgtataaggcgggtgagcaagtgacttacacttgtgcaacatattacaaaatggatggagccagtaatgtaacatgcattaatagcagatggacaggaaggccaacatgcagagacacctcctgtgtgaatccgcccacagtacaaaatgcttatatagtgtcgagacagatgagtaaatatccatctggtgagagagtacgttatcaatgtaggagcccttatgaaatgtttggggatgaagaagtgatgtgtttaaatggaaactggacggaaccacctcaatgcaaagattctacaggaaaatgtgggccccctccacctattgacaatggggacattacttcattcccgttgtcagtatatgctccagcttcatcagttgagtaccaatgccagaacttgtatcaacttgagggtaacaagcgaataacatgtagaaatggacaatggtcagaaccaccaaaatgcttacatccgtgtgtaatatcccgagaaattatggaaaattataacatagcattaaggtggacagccaaacagaagctttattcgagaacaggtgaatcagttgaatttgtgtgtaaacggggatatcgtctttcatcacgttctcacacattgcgaacaacatgttgggatgggaaactggagtatccaacttgtgcaaaaagatagaatcaatcataaagtgcacacctttattcagaactttagtattaaatcagttctcaatttcattttttatgtattgttttactcctttttattcatacgtaaaattttggattaatttgtgaaaatgtaattataagctgagaccggtggctctcttcttaaaagcaccatattaaatcctggaaaactaa

SEQ ID NO: 310 - DNA, 1587 bp, Homo sapiens
  source 1..1587: mol_type = genomic DNA
acagcattaacatttagtgggagtgcagtgagaattgggtttaacttctggcatttctgggcttgtggcttgtggttgattttttatttactttgcaaaagtttctgataggcggagcatctagtttcaacttccttttgcagcaagttctttcctgcactaatcacaattcttggaagaggagaactggacgttgtgaacagagttagctggtaaatgtcctcttaaaagatccaaaaaatgagacttctagcaaagattatttgccttatgttatgggctatttgtgtagcagaagattgcaatgaacttcctccaagaagaaatacagaaattctgacaggttcctggtctgaccaaacatatccagaaggcacccaggctatctataaatgccgccctggatatagatctcttggaaatgtaataatggtatgcaggaagggagaatgggttgctcttaatccattaaggaaatgtcagaaaaggccctgtggacatcctggagatactccttttggtacttttacccttacaggaggaaatgtgtttgaatatggtgtaaaagctgtgtatacatgtaatgaggggtatcaattgctaggtgagattaattaccgtgaatgtgacacagatggatggaccaatgatattcctatatgtgaagttgtgaagtgtttaccagtgacagcaccagagaatggaaaaattgtcagtagtgcaatggaaccagatcgggaataccattttggacaagcagtacggtttgtatgtaactcaggctacaagattgaaggagatgaagaaatgcattgttcagacgatggtttttggagtaaagagaaaccaaagtgtgtggaaatttcatgcaaatccccagatgttataaatggatctcctatatctcagaagattatttataaggagaatgaacgatttcaatataaatgtaacatgggttatgaatacagtgaaagaggagatgctgtatgcactgaatctggatggcgtccgttgccttcatgtgaagaaaaatcatgtgataatccttatattccaaatggtgactactcacctttaaggattaaacacagaactggagatgaaatcacgtaccagtgtagaaatggtttttatcctgcaacccggggaaatacagcaaaatgcacaagtactggctggatacctgctccgagatgtaccttgaaaccttgtgattatccagacattaaacatggaggtctatatcatgagaatatgcgtagaccatactttccagtagctgtaggaaaatattactcctattactgtgatgaacattttgagactccgtcaggaagttactgggatcacattcattgcacacaagatggatggtcgccagcagtaccatgcctcagaaaatgttattttccttatttggaaaatggatataatcaaaatcatggaagaaagtttgtacagggtaaatctatagacgttgcctgccatcctggctacgctcttccaaaagcgcagaccacagttacatgtatggagaatggctggtctcctactcccagatgcatccgtgtcatttttcaactg

SEQ ID NO: 311 - DNA, 1822 bp, Homo sapiens
  source 1..1822: mol_type = genomic DNA
acagcattaacatttagtgggagtgcagtgagaattgggtttaacttctggcatttctgggcttgtggcttgtggttgattttttatttactttgcaaaagtttctgataggcggagcatctagtttcaacttccttttgcagcaagttctttcctgcactaatcacaattcttggaagaggagaactggacgttgtgaacagagttagctggtaaatgtcctcttaaaagatccaaaaaatgagacttctagcaaagattatttgccttatgttatgggctatttgtgtagcagaagattgcaatgaacttcctccaagaagaaatacagaaattctgacaggttcctggtctgaccaaacatatccagaaggcacccaggctatctataaatgccgccctggatatagatctcttggaaatgtaataatggtatgcaggaagggagaatgggttgctcttaatccattaaggaaatgtcagaaaaggccctgtggacatcctggagatactccttttggtacttttacccttacaggaggaaatgtgtttgaatatggtgtaaaagctgtgtatacatgtaatgaggggtatcaattgctaggtgagattaattaccgtgaatgtgacacagatggatggaccaatgatattcctatatgtgaagttgtgaagtgtttaccagtgacagcaccagagaatggaaaaattgtcagtagtgcaatggaaccagatcgggaataccattttggacaagcagtacggtttgtatgtaactcaggctacaagattgaaggagatgaagaaatgcattgttcagacgatggtttttggagtaaagagaaaccaaagtgtgtggaaatttcatgcaaatccccagatgttataaatggatctcctatatctcagaagattatttataaggagaatgaacgatttcaatataaatgtaacatgggttatgaatacagtgaaagaggagatgctgtatgcactgaatctggatggcgtccgttgccttcatgtgaagaaaaatcatgtgataatccttatattccaaatggtgactactcacctttaaggattaaacacagaactggagatgaaatcacgtaccagtgtagaaatggtttttatcctgcaacccggggaaatacagcaaaatgcacaagtactggctggatacctgctccgagatgtaccttgaaaccttgtgattatccagacattaaacatggaggtctatatcatgagaatatgcgtagaccatactttccagtagctgtaggaaaatattactcctattactgtgatgaacattttgagactccgtcaggaagttactgggatcacattcattgcacacaagatggatggtcgccagcagtaccatgcctcagaaaatgttattttccttatttggaaaatggatataatcaaaatcatggaagaaagtttgtacagggtaaatctatagacgttgcctgccatcctggctacgctcttccaaaagcgcagaccacagttacatgtatggagaatggctggtctcctactcccagatgcatccgtgtcagctttaccctctgaacttctgatcgaaggtcatccctctccagcttgagtggatcaaagatgacaagggccaatggaaccaagtttgagtcttgccaggtcaatacttgggtcctgagtatggtgactagtatctgttttgttatgtgtgtattattccagccagaatgggaaatgctaattcagctcctccaggcagcccaatggggctggtggctttgagattattaaactctttctctgctgc

SEQ ID NO: 312 - DNA, 911 bp, Homo sapiens
  source 1..911: mol_type = genomic DNA
tcagctgttgcggggcggggccttcgcagagcatggcggcgggcgagcttgagggtggcaaacccctgagcgggctgctgaatgcgctggcccaggacactttccacgggtaccccggcatcacagaggagctgctacggagccagctatatccagaggtgccacccgaggagttccgcccctttctggcaaagatgagggggattcttaagtctattgcgtctgcagacatggatttcaaccagctggaggcattcttgactgctcaaaccaaaaagcaaggtgggatcacatctgaccaagctgctgtcatttccaaattctggaagagccacaagacaaaaatccgtgagagcctcatgaaccagagccgctggaatagcgggcttcggggcctgagctggagagttgatggcaagtctcagtcaaggcactcagctcaaatacacacacctgttgccattatagagctggaattaggcaaatatggacaggaatctgaatttctgtgtttggaatttgatgaggtcaaagtcaaccaaattctgaagacgctgtcagaggtagaagaaagtatcagcacactgatcagccagcctaactgaagatgatgtatgaaggagttggagttgttgaaaccaaggtgtccatgatccctccccactgaccttttctaagaaaattcttgtgcccgcattggtattaaatcctcgcattcagtcttcctgcctctacttgctcagatttctttttttctagctttcatttagtcttacatttgttccagtgcagaggttctcacccttcagtgtgcataaatgttataaggggtacttgtaaaagcattcacttttttgttgttattattaaattcggagtgttgctctgttgcccaggctggagtgcagtgg

SEQ ID NO: 313 - DNA, 785 bp, Homo sapiens
  source 1..785: mol_type = genomic DNA
acaggaatctgaatttctgtgtttggaatttgatgaggtcaaagtcaaccaaattctgaagacgctgtcagaggtagaagaaagtatcagcacactgatcagccagcctaactgaagatgatgtatgaaggagttggagttgttgaaaccaaggaatactggccagagggccgtgctaaagtttgctgctgccactggagccactccaattgctggccgcttcactcctggaaccttcgctaaccagatccaggcagccttccgggagccacggcttcttgtggttactgaccccagggctgaccaccagcctctcatggaggcatcttatgttaacctacctaccattgcgctgtgtaacacagattctcctctgcactatgtggacattgccatcccatgcaacaacaagggagctcactcagtgggtttgatgtggtggatgctggctcgggaagttctgcgcatgcgtggcaccatttcctgtgaacacccatgggaggtcatgcctgatctgtacttctacagagatcctgaagagattgaaagagaagagcaggctgctgctgaaaaggcagtgaccaaggaggaatttcagggtgaatggactgctccagctcctgagttcactgttactcagcctgaggttgcagactggtctgaaggtgtacaggtgccctctgtgcctattccctactgaagacgggagcgctcagcctgccacggaagactggtctgcagctcccactgctcaggccactgaatgggtaggagcaaccactgac

SEQ ID NO: 314 - DNA, 743 bp, Homo sapiens
  source 1..743: mol_type = genomic DNA
gtgtttggaatttgatgaggtcaaagtcaaccaaattctgaagacgctgtcagaggtagaagaaagtatcagcacactgatcagccagcctaactgaagatgatgtatgaaggagttggagttgttgaaaccaagaggggtccatacggcgttgttctggattcccatcgtaacttaaagggaaactttcacaatgtccggagcccttgatgtcctgcaaatgaaggaggaggatgtccttaagttccttgcagcaggaactcacttaggtggcaccaatcttgacttccagatggaacagtacatctataaaaggaaaagtgatggcatctatatcataaatctgaagaggacctgggagaagcttctgctggcagctcgtgctattgttgccattgaaaaccctgctgatgtcagtgttatatcctccaggaatactggccagagggccgtgctaaagtttgctgctgccactggagccactccaattgctggccgcttcactcctggaaccttcgctaaccagatccaggcagccttccgggagccacggcttcttgtggttactgaccccagggctgaccaccagcctctcatggaggcatcttatgttaacctacctaccattgcgctgtgtaacacagattctcctctgcactatgtggacattgccatcccatgcaacaacaagggagctcactcagtgggtttgatgtggtggatgctggctcgggaagttctgc

SEQ ID NO: 315 - DNA, 770 bp, Homo sapiens
  source 1..770: mol_type = genomic DNA
acaggaatctgaatttctgtgtttggaatttgatgaggtcaaagtcaaccaaattctgaagacgctgtcagaggtagaagaaagtatcagcacactgatcagccagcctaactgaagatgatgtatgaaggagttggagttgttgaaaccaagtcctttccacgctacctgcagaggggtccatacggcgttgttctggattcccatcgtaacttaaagggaaactttcacaatgtccggagcccttgatgtcctgcaaatgaaggaggaggatgtccttaagttccttgcagcaggaactcacttaggtggcaccaatcttgacttccagatggaacagtacatctataaaaggaaaagtgatggcatctatatcataaatctgaagaggacctgggagaagcttctgctggcagctcgtgctattgttgccattgaaaaccctgctgatgtcagtgttatatcctccaggaatactggccagagggccgtgctaaagtttgctgctgccactggagccactccaattgctggccgcttcactcctggaaccttcgctaaccagatccaggcagccttccgggagccacggcttcttgtggttactgaccccagggctgaccaccagcctctcatggaggcatcttatgttaacctacctaccattgcgctgtgtaacacagattctcctctgcactatgtggacattgccatcccatgcaacaacaagggagctcactcagtgggtttgatgtggtggatgctggctc

SEQ ID NO: 316 - DNA, 805 bp, Homo sapiens
  source 1..805: mol_type = genomic DNA
agagcatggcggcgggcgagcttgagggtggcaaacccctgagcgggctgctgaatgcgctggcccaggacactttccacgggtaccccggcatcacagaggagctgctacggagccagctatatccagaggtgccacccgaggagttccgcccctttctggcaaagatgagggggattcttaagtctattgcgtctgcagacatggatttcaaccagctggaggcattcttgactgctcaaaccaaaaagcaaggtgggatcacatctgaccaagctgctgtcatttccaaattctggaagagccacaagacaaaaatccgtgagagcctcatgaaccagagccgctggaatagcgggcttcggggcctgagctggagagttgatggcaagtctcagtcaaggcactcagctcaaatacacacacctgttgccattatagagctggaattaggcaaatatggacaggttcattgcaaccagtgattcacattctccaagcccactttgtatatgtggcgaccggctatccattgaagccatgaaaccttcaaaactgctttgccacatggagaccaagcaccctgcattaaaagacaagcctttggagtttttcaaaagaagaaaatgtgaatacaaagaacagaagcaattattgaaggccaccacttcaaatgtgtctgcattgagagcatcattcttagtagctaaccacattgctaaagctaagaagccctttactattggtaagagttgatcctaaggacatttgttttgaaccttcaggagaggacacagttcagaag

SEQ ID NO: 317 - DNA, 1540 bp, Homo sapiens
  source 1..1540: mol_type = genomic DNA
aagtcataagaagcccttccattttagggctcgttgacgtcaccaagaggcgataaatatctgttgatataattggatgtgagattcagtgttgagatagcaaaattctgcccctcgttccttggcagggccctatgatttatgcaggagcagaggcagcacgcaatcgagctgtcaagagagcgtcagcttattaggcaaatgctgcgtggtttttgaagagggtcgacactataaaatcccactccaggctctggagtggagaaactcagagaccaagtccattgagagactgaggggaaagagaggagagaaagaaaaagagagtgggaacagtaaagagaaaggaagacaacctccagagaaagcccccggagacgtctctctgcagagaggcggcagcacccggctcacctgcgaagcgcctgggaagcgagtgcccctaacatgcggctgccgctgcttgtgtccgcgggagtcctgctggtggctctcctgccctgcccgccatgcagggcgctcctgagccgcgggccggtcccgggagctcggcaggcgccgcagcaccctcagcccttggatttcttccagccgccgccgcagtccgagcagccccagcagccgcaggctcggccggtcctgctccgcatgggagaggagtacttcctccgcctggggaacctcaacaagagcccggccgctcccctttcgcccgcctcctcgctcctcgccggaggcagcggcagccgcccttcgccggaacaggcgaccgccaactttttccgcgtgttgctgcagcagctgctgctgcctcggcgctcgctcgacagccccgcggctctcgcggagcgcggcgctaggaatgccctcggcggccaccaggaggcaccggagagagaaaggcggtccgaggagcctcccatctccctggatctcaccttccacctcctccgggaagtcttggaaatggccagggccgagcagttagcacagcaagctcacagcaacaggaaactcatggagattattgggaaataaaacggtgcgtttggccaaaaagaatctgcatttagcacaaaaaaaatttaaaaaaatacagtattctgtaccatagcgctgctcttatgccatttgtttatttttatatagcttgaaacatagagggagagagggagagagcctataccccttacttagcatgcacaaagtgtattcacgtgcagcagcaacacaatgttattcgttttgtctacgtttagtttccgtttccaggtgtttatagtggtgttttaaagagaatgtagacctgtgagaaaacgttttgtttgaaaaagcagacagaagtcactcaattgtttttgttgtggtctgagccaaagagaatgccattctcttgggtgggtaagactaaatctgtaagctctttgaaacaactttctcttgtaaacgtttcagtaataaaacatctttccagtccttggtcagtttggttgtgtaagagaatgttgaatacttatatttttaataaaagttgcaaagg

SEQ ID NO: 318 - DNA, 6128 bp, Homo sapiens
  source 1..6128: mol_type = genomic DNA
aattggaagcaaatgacatcacagcaggtcagagaaaaagggttgagcggcaggcacccagagtagtaggtctttggcattaggagcttgagcccagacggccctagcagggaccccagcgcccgagagaccatgcagaggtcgcctctggaaaaggccagcgttgtctccaaactttttttcagctggaccagaccaattttgaggaaaggatacagacagcgcctggaattgtcagacatataccaaatcccttctgttgattctgctgacaatctatctgaaaaattggaaagagaatgggatagagagctggcttcaaagaaaaatcctaaactcattaatgcccttcggcgatgttttttctggagatttatgttctatggaatctttttatatttaggggaagtcaccaaagcagtacagcctctcttactgggaagaatcatagcttcctatgacccggataacaaggaggaacgctctatcgcgatttatctaggcataggcttatgccttctctttattgtgaggacactgctcctacacccagccatttttggccttcatcacattggaatgcagatgagaatagctatgtttagtttgatttataagaagactttaaagctgtcaagccgtgttctagataaaataagtattggacaacttgttagtctcctttccaacaacctgaacaaatttgatgaaggacttgcattggcacatttcgtgtggatcgctcctttgcaagtggcactcctcatggggctaatctgggagttgttacaggcgtctgccttctgtggacttggtttcctgatagtccttgccctttttcaggctgggctagggagaatgatgatgaagtacagagatcagagagctgggaagatcagtgaaagacttgtgattacctcagaaatgattgaaaatatccaatctgttaaggcatactgctgggaagaagcaatggaaaaaatgattgaaaacttaagacaaacagaactgaaactgactcggaaggcagcctatgtgagatacttcaatagctcagccttcttcttctcagggttctttgtggtgtttttatctgtgcttccctatgcactaatcaaaggaatcatcctccggaaaatattcaccaccatctcattctgcattgttctgcgcatggcggtcactcggcaatttccctgggctgtacaaacatggtatgactctcttggagcaataaacaaaatacaggatttcttacaaaagcaagaatataagacattggaatataacttaacgactacagaagtagtgatggagaatgtaacagccttctgggaggagggatttggggaattatttgagaaagcaaaacaaaacaataacaatagaaaaacttctaatggtgatgacagcctcttcttcagtaatttctcacttcttggtactcctgtcctgaaagatattaatttcaagatagaaagaggacagttgttggcggttgctggatccactggagcaggcaagacttcacttctaatggtgattatgggagaactggagccttcagagggtaaaattaagcacagtggaagaatttcattctgttctcagttttcctggattatgcctggcaccattaaagaaaatatcatctttggtgtttcctatgatgaatatagatacagaagcgtcatcaaagcatgccaactagaagaggacatctccaagtttgcagagaaagacaatatagttcttggagaaggtggaatcacactgagtggaggtcaacgagcaagaatttctttagcaagagcagtatacaaagatgctgatttgtatttattagactctccttttggatacctagatgttttaacagaaaaagaaatatttgaaagctgtgtctgtaaactgatggctaacaaaactaggattttggtcacttctaaaatggaacatttaaagaaagctgacaaaatattaattttgcatgaaggtagcagctatttttatgggacattttcagaactccaaaatctacagccagactttagctcaaaactcatgggatgtgattctttcgaccaatttagtgcagaaagaagaaattcaatcctaactgagaccttacaccgtttctcattagaaggagatgctcctgtctcctggacagaaacaaaaaaacaatcttttaaacagactggagagtttggggaaaaaaggaagaattctattctcaatccaatcaactctatacgaaaattttccattgtgcaaaagactcccttacaaatgaatggcatcgaagaggattctgatgagcctttagagagaaggctgtccttagtaccagattctgagcagggagaggcgatactgcctcgcatcagcgtgatcagcactggccccacgcttcaggcacgaaggaggcagtctgtcctgaacctgatgacacactcagttaaccaaggtcagaacattcaccgaaagacaacagcatccacacgaaaagtgtcactggcccctcaggcaaacttgactgaactggatatatattcaagaaggttatctcaagaaactggcttggaaataagtgaagaaattaacgaagaagacttaaaggagtgcttttttgatgatatggagagcataccagcagtgactacatggaacacataccttcgatatattactgtccacaagagcttaatttttgtgctaatttggtgcttagtaatttttctggcagaggtggctgcttctttggttgtgctgtggctccttggaaacactcctcttcaagacaaagggaatagtactcatagtagaaataacagctatgcagtgattatcaccagcaccagttcgtattatgtgttttacatttacgtgggagtagccgacactttgcttgctatgggattcttcagaggtctaccactggtgcatactctaatcacagtgtcgaaaattttacaccacaaaatgttacattctgttcttcaagcacctatgtcaaccctcaacacgttgaaagcaggtgggattcttaatagattctccaaagatatagcaattttggatgaccttctgcctcttaccatatttgacttcatccagttgttattaattgtgattggagctatagcagttgtcgcagttttacaaccctacatctttgttgcaacagtgccagtgatagtggcttttattatgttgagagcatatttcctccaaacctcacagcaactcaaacaactggaatctgaaggcaggagtccaattttcactcatcttgttacaagcttaaaaggactatggacacttcgtgccttcggacggcagccttactttgaaactctgttccacaaagctctgaatttacatactgccaactggttcttgtacctgtcaacactgcgctggttccaaatgagaatagaaatgatttttgtcatcttcttcattgctgttaccttcatttccattttaacaacaggagaaggagaaggaagagttggtattatcctgactttagccatgaatatcatgagtacattgcagtgggctgtaaactccagcatagatgtggatagcttgatgcgatctgtgagccgagtctttaagttcattgacatgccaacagaaggtaaacctaccaagtcaaccaaaccatacaagaatggccaactctcgaaagttatgattattgagaattcacacgtgaagaaagatgacatctggccctcagggggccaaatgactgtcaaagatctcacagcaaaatacacagaaggtggaaatgccatattagagaacatttccttctcaataagtcctggccagagggtgggcctcttgggaagaactggatcagggaagagtactttgttatcagcttttttgagactactgaacactgaaggagaaatccagatcgatggtgtgtcttgggattcaataactttgcaacagtggaggaaagcctttggagtgataccacagaaagtatttattttttctggaacatttagaaaaaacttggatccctatgaacagtggagtgatcaagaaatatggaaagttgcagatgaggttgggctcagatctgtgatagaacagtttcctgggaagcttgactttgtccttgtggatgggggctgtgtcctaagccatggccacaagcagttgatgtgcttggctagatctgttctcagtaaggcgaagatcttgctgcttgatgaacccagtgctcatttggatccagtaacataccaaataattagaagaactctaaaacaagcatttgctgattgcacagtaattctctgtgaacacaggatagaagcaatgctggaatgccaacaatttttggtcatagaagagaacaaagtgcggcagtacgattccatccagaaactgctgaacgagaggagcctcttccggcaagccatcagcccctccgacagggtgaagctctttccccaccggaactcaagcaagtgcaagtctaagccccagattgctgctctgaaagaggagacagaagaagaggtgcaagatacaaggctttagagagcagcataaatgttgacatgggacatttgctcatggaattggagctcgtgggacagtcacctcatggaattggagctcgtggaacagttacctctgcctcagaaaacaaggatgaattaagtttttttttaaaaaagaaacatttggtaaggggaattgaggacactgatatgggtcttgataaatggcttcctggcaatagtcaaattgtgtgaaaggtacttcaaatccttgaagatttaccacttgtgttttgcaagccagattttcctgaaaacccttgccatgtgctagtaattggaaaggcagctctaaatgtcaatcagcctagttgatcagcttattgtctagtgaaactcgttaatttgtagtgttggagaagaactgaaatcatacttcttagggttatgattaagtaatgataactggaaacttcagcggtttatataagcttgtattcctttttctctcctctccccatgatgtttagaaacacaactatattgtttgctaagcattccaactatctcatttccaagcaagtattagaataccacaggaaccacaagactgcacatcaaaatatgccccattcaacatctagtgagcagtcaggaaagagaacttccagatcctggaaatcagggttagtattgtccaggtctaccaaaaatctcaatatttcagataatcacaatacatcccttacctgggaaagggctgttataatctttcacaggggacaggatggttcccttgatgaagaagttgatatgccttttcccaactccagaaagtgacaagctcacagacctttgaactagagtttagctggaaaagtatgttagtgcaaattgtcacaggacagcccttctttccacagaagctccaggtagagggtgtgtaagtagataggccatgggcactgtgggtagacacacatgaagtccaagcatttagatgtataggttgatggtggtatgttttcaggctagatgtatgtacttcatgctgtctacactaagagagaatgagagacacactgaagaagcaccaatcatgaattagttttatatgcttctgttttataattttgtgaagcaaaattttttctctaggaaatatttattttaataatgtttcaaacatatataacaatgctgtattttaaaagaatgattatgaattacatttgtataaaataatttttatatttgaaatattgactttttatggcactagtatttctatgaaatattatgttaaaactgggacaggggagaacctagggtgatattaaccaggggccatgaatcaccttttggtctggagggaagccttggggctgatgcagttgttgcccacagctgtatgattcccagccagcacagcctcttagatgcagttctgaagaagatggtaccaccagtctgactgtttccatcaagggtacactgccttctcaactccaaactgactcttaagaagactgcattatatttattactgtaagaaaatatcacttgtcaataaaatccatacatttgtgt

SEQ ID NO: 319 - DNA, 4316 bp, Homo sapiens
  source 1..4316: mol_type = genomic DNA
atgcagaggtcgcctctggaaaaggccagcgttgtctccaaactttttttcagctggaccagaccaattttgaggaaaggatacagacagcgcctggaattgtcagacatataccaaatcccttctgttgattctgctgacaatctatctgaaaaattggaaagagaatgggatagagagctggcttcaaagaaaaatcctaaactcattaatgcccttcggcgatgttttttctggagatttatgttctatggaatctttttatatttaggggaagtcaccaaagcagtacagcctctcttactgggaagaatcatagcttcctatgacccggataacaaggaggaacgctctatcgcgatttatctaggcataggcttatgccttctctttattgtgaggacactgctcctacacccagccatttttggccttcatcacattggaatgcagatgagaatagctatgtttagtttgatttataagaagggacttgcattggcacatttcgtgtggatcgctcctttgcaagtggcactcctcatggggctaatctgggagttgttacaggcgtctgccttctgtggacttggtttcctgatagtccttgccctttttcaggctgggctagggagaatgatgatgaagtacagagatcagagagctgggaagatcagtgaaagacttgtgattacctcagaaatgattgaaaatatccaatctgttaaggcatactgctgggaagaagcaatggaaaaaatgattgaaaacttaagacaaacagaactgaaactgactcggaaggcagcctatgtgagatacttcaatagctcagccttcttcttctcagggttctttgtggtgtttttatctgtgcttccctatgcactaatcaaaggaatcatcctccggaaaatattcaccaccatctcattctgcattgttctgcgcatggcggtcactcggcaatttccctgggctgtacaaacatggtatgactctcttggagcaataaacaaaatacaggatttcttacaaaagcaagaatataagacattggaatataacttaacgactacagaagtagtgatggagaatgtaacagccttctgggaggagggatttggggaattatttgagaaagcaaaacaaaacaataacaatagaaaaacttctaatggtgatgacagcctcttcttcagtaatttctcacttcttggtactcctgtcctgaaagatattaatttcaagatagaaagaggacagttgttggcggttgctggatccactggagcaggcaagacttcacttctaatggtgattatgggagaactggagccttcagagggtaaaattaagcacagtggaagaatttcattctgttctcagttttcctggattatgcctggcaccattaaagaaaatatcatctttggtgtttcctatgatgaatatagatacagaagcgtcatcaaagcatgccaactagaagaggacatctccaagtttgcagagaaagacaatatagttcttggagaaggtggaatcacactgagtggaggtcaacgagcaagaatttctttagcaagagcagtatacaaagatgctgatttgtatttattagactctccttttggatacctagatgttttaacagaaaaagaaatatttgaaagctgtgtctgtaaactgatggctaacaaaactaggattttggtcacttctaaaatggaacatttaaagaaagctgacaaaatattaattttgcatgaaggtagcagctatttttatgggacattttcagaactccaaaatctacagccagactttagctcaaaactcatgggatgtgattctttcgaccaatttagtgcagaaagaagaaattcaatcctaactgagaccttacaccgtttctcattagaaggagatgctcctgtctcctggacagaaacaaaaaaacaatcttttaaacagactggagagtttggggaaaaaaggaagaattctattctcaatccaatcaactctatacgaaaattttccattgtgcaaaagactcccttacaaatgaatggcatcgaagaggattctgatgagcctttagagagaaggctgtccttagtaccagattctgagcagggagaggcgatactgcctcgcatcagcgtgatcagcactggccccacgcttcaggcacgaaggaggcagtctgtcctgaacctgatgacacactcagttaaccaaggtcagaacattcaccgaaagacaacagcatccacacgaaaagtgtcactggcccctcaggcaaacttgactgaactggatatatattcaagaaggttatctcaagaaactggcttggaaataagtgaagaaattaacgaagaagacttaaaggagtgcttttttgatgatatggagagcataccagcagtgactacatggaacacataccttcgatatattactgtccacaagagcttaatttttgtgctaatttggtgcttagtaatttttctggcagaggtggctgcttctttggttgtgctgtggctccttggaaacactcctcttcaagacaaagggaatagtactcatagtagaaataacagctatgcagtgattatcaccagcaccagttcgtattatgtgttttacatttacgtgggagtagccgacactttgcttgctatgggattcttcagaggtctaccactggtgcatactctaatcacagtgtcgaaaattttacaccacaaaatgttacattctgttcttcaagcacctatgtcaaccctcaacacgttgaaagcaggtgggattcttaatagattctccaaagatatagcaattttggatgaccttctgcctcttaccatatttgacttcatccagttgttattaattgtgattggagctatagcagttgtcgcagttttacaaccctacatctttgttgcaacagtgccagtgatagtggcttttattatgttgagagcatatttcctccaaacctcacagcaactcaaacaactggaatctgaaggcaggagtccaattttcactcatcttgttacaagcttaaaaggactatggacacttcgtgccttcggacggcagccttactttgaaactctgttccacaaagctctgaatttacatactgccaactggttcttgtacctgtcaacactgcgctggttccaaatgagaatagaaatgatttttgtcatcttcttcattgctgttaccttcatttccattttaacaacaggagaaggagaaggaagagttggtattatcctgactttagccatgaatatcatgagtacattgcagtgggctgtaaactccagcatagatgtggatagcttgatgcgatctgtgagccgagtctttaagttcattgacatgccaacagaaggtaaacctaccaagtcaaccaaaccatacaagaatggccaactctcgaaagttatgattattgagaattcacacgtgaagaaagatgacatctggccctcagggggccaaatgactgtcaaagatctcacagcaaaatacacagaaggtggaaatgccatattagagaacatttccttctcaataagtcctggccagagggtgggcctcttgggaagaactggatcagggaagagtactttgttatcagcttttttgagactactgaacactgaaggagaaatccagatcgatggtgtgtcttgggattcaataactttgcaacagtggaggaaagcctttggagtgataccacagaaagtatttattttttctggaacatttagaaaaaacttggatccctatgaacagtggagtgatcaagaaatatggaaagttgcagatgaggttgggctcagatctgtgatagaacagtttcctgggaagcttgactttgtccttgtggatgggggctgtgtcctaagccatggccacaagcagttgatgtgcttggctagatctgttctcagtaaggcgaagatcttgctgcttgatgaacccagtgctcatttggatccagtaacataccaaataattagaagaactctaaaacaagcatttgctgattgcacagtaattctctgtgaacacaggatagaagcaatgctggaatgccaacaatttttggtcatagaagagaacaaagtgcggcagtacgattccatccagaaactgctgaacgagaggagcctcttccggcaagccatcagcccctccgacagggtgaagctctttccccaccggaactcaagcaagtgcaagtctaagccccagattgctgctctgaaaga

SEQ ID NO: 320 - DNA, 5949 bp, Homo sapiens
  source 1..5949: mol_type = genomic DNA
aattggaagcaaatgacatcacagcaggtcagagaaaaagggttgagcggcaggcacccagagtagtaggtctttggcattaggagcttgagcccagacggccctagcagggaccccagcgcccgagagaccatgcagaggtcgcctctggaaaaggccagcgttgtctccaaactttttttcagctggaccagaccaattttgaggaaaggatacagacagcgcctggaattgtcagacatataccaaatcccttctgttgattctgctgacaatctatctgaaaaattggaaagagaatgggatagagagctggcttcaaagaaaaatcctaaactcattaatgcccttcggcgatgttttttctggagatttatgttctatggaatctttttatatttaggggaagtcaccaaagcagtacagcctctcttactgggaagaatcatagcttcctatgacccggataacaaggaggaacgctctatcgcgatttatctaggcataggcttatgccttctctttattgtgaggacactgctcctacacccagccatttttggccttcatcacattggaatgcagatgagaatagctatgtttagtttgatttataagaagactttaaagctgtcaagccgtgttctagataaaataagtattggacaacttgttagtctcctttccaacaacctgaacaaatttgatgaaggacttgcattggcacatttcgtgtggatcgctcctttgcaagtggcactcctcatggggctaatctgggagttgttacaggcgtctgccttctgtggacttggtttcctgatagtccttgccctttttcaggctgggctagggagaatgatgatgaagtacagagatcagagagctgggaagatcagtgaaagacttgtgattacctcagaaatgattgaaaatatccaatctgttaaggcatactgctgggaagaagcaatggaaaaaatgattgaaaacttaagacaaacagaactgaaactgactcggaaggcagcctatgtgagatacttcaatagctcagccttcttcttctcagggttctttgtggtgtttttatctgtgcttccctatgcactaatcaaaggaatcatcctccggaaaatattcaccaccatctcattctgcattgttctgcgcatggcggtcactcggcaatttccctgggctgtacaaacatggtatgactctcttggagcaataaacaaaatacaggatttcttacaaaagcaagaatataagacattggaatataacttaacgactacagaagtagtgatggagaatgtaacagccttctgggaggagacttcacttctaatggtgattatgggagaactggagccttcagagggtaaaattaagcacagtggaagaatttcattctgttctcagttttcctggattatgcctggcaccattaaagaaaatatcatctttggtgtttcctatgatgaatatagatacagaagcgtcatcaaagcatgccaactagaagaggacatctccaagtttgcagagaaagacaatatagttcttggagaaggtggaatcacactgagtggaggtcaacgagcaagaatttctttagcaagagcagtatacaaagatgctgatttgtatttattagactctccttttggatacctagatgttttaacagaaaaagaaatatttgaaagctgtgtctgtaaactgatggctaacaaaactaggattttggtcacttctaaaatggaacatttaaagaaagctgacaaaatattaattttgcatgaaggtagcagctatttttatgggacattttcagaactccaaaatctacagccagactttagctcaaaactcatgggatgtgattctttcgaccaatttagtgcagaaagaagaaattcaatcctaactgagaccttacaccgtttctcattagaaggagatgctcctgtctcctggacagaaacaaaaaaacaatcttttaaacagactggagagtttggggaaaaaaggaagaattctattctcaatccaatcaactctatacgaaaattttccattgtgcaaaagactcccttacaaatgaatggcatcgaagaggattctgatgagcctttagagagaaggctgtccttagtaccagattctgagcagggagaggcgatactgcctcgcatcagcgtgatcagcactggccccacgcttcaggcacgaaggaggcagtctgtcctgaacctgatgacacactcagttaaccaaggtcagaacattcaccgaaagacaacagcatccacacgaaaagtgtcactggcccctcaggcaaacttgactgaactggatatatattcaagaaggttatctcaagaaactggcttggaaataagtgaagaaattaacgaagaagacttaaaggagtgcttttttgatgatatggagagcataccagcagtgactacatggaacacataccttcgatatattactgtccacaagagcttaatttttgtgctaatttggtgcttagtaatttttctggcagaggtggctgcttctttggttgtgctgtggctccttggaaacactcctcttcaagacaaagggaatagtactcatagtagaaataacagctatgcagtgattatcaccagcaccagttcgtattatgtgttttacatttacgtgggagtagccgacactttgcttgctatgggattcttcagaggtctaccactggtgcatactctaatcacagtgtcgaaaattttacaccacaaaatgttacattctgttcttcaagcacctatgtcaaccctcaacacgttgaaagcaggtgggattcttaatagattctccaaagatatagcaattttggatgaccttctgcctcttaccatatttgacttcatccagttgttattaattgtgattggagctatagcagttgtcgcagttttacaaccctacatctttgttgcaacagtgccagtgatagtggcttttattatgttgagagcatatttcctccaaacctcacagcaactcaaacaactggaatctgaaggcaggagtccaattttcactcatcttgttacaagcttaaaaggactatggacacttcgtgccttcggacggcagccttactttgaaactctgttccacaaagctctgaatttacatactgccaactggttcttgtacctgtcaacactgcgctggttccaaatgagaatagaaatgatttttgtcatcttcttcattgctgttaccttcatttccattttaacaacaggagaaggagaaggaagagttggtattatcctgactttagccatgaatatcatgagtacattgcagtgggctgtaaactccagcatagatgtggatagcttgatgcgatctgtgagccgagtctttaagttcattgacatgccaacagaaggtaaacctaccaagtcaaccaaaccatacaagaatggccaactctcgaaagttatgattattgagaattcacacgtgaagaaagatgacatctggccctcagggggccaaatgactgtcaaagatctcacagcaaaatacacagaaggtggaaatgccatattagagaacatttccttctcaataagtcctggccagagggtgggcctcttgggaagaactggatcagggaagagtactttgttatcagcttttttgagactactgaacactgaaggagaaatccagatcgatggtgtgtcttgggattcaataactttgcaacagtggaggaaagcctttggagtgataccacagaaagtatttattttttctggaacatttagaaaaaacttggatccctatgaacagtggagtgatcaagaaatatggaaagttgcagatgaggttgggctcagatctgtgatagaacagtttcctgggaagcttgactttgtccttgtggatgggggctgtgtcctaagccatggccacaagcagttgatgtgcttggctagatctgttctcagtaaggcgaagatcttgctgcttgatgaacccagtgctcatttggatccagtaacataccaaataattagaagaactctaaaacaagcatttgctgattgcacagtaattctctgtgaacacaggatagaagcaatgctggaatgccaacaatttttggtcatagaagagaacaaagtgcggcagtacgattccatccagaaactgctgaacgagaggagcctcttccggcaagccatcagcccctccgacagggtgaagctctttccccaccggaactcaagcaagtgcaagtctaagccccagattgctgctctgaaagaggagacagaagaagaggtgcaagatacaaggctttagagagcagcataaatgttgacatgggacatttgctcatggaattggagctcgtgggacagtcacctcatggaattggagctcgtggaacagttacctctgcctcagaaaacaaggatgaattaagtttttttttaaaaaagaaacatttggtaaggggaattgaggacactgatatgggtcttgataaatggcttcctggcaatagtcaaattgtgtgaaaggtacttcaaatccttgaagatttaccacttgtgttttgcaagccagattttcctgaaaacccttgccatgtgctagtaattggaaaggcagctctaaatgtcaatcagcctagttgatcagcttattgtctagtgaaactcgttaatttgtagtgttggagaagaactgaaatcatacttcttagggttatgattaagtaatgataactggaaacttcagcggtttatataagcttgtattcctttttctctcctctccccatgatgtttagaaacacaactatattgtttgctaagcattccaactatctcatttccaagcaagtattagaataccacaggaaccacaagactgcacatcaaaatatgccccattcaacatctagtgagcagtcaggaaagagaacttccagatcctggaaatcagggttagtattgtccaggtctaccaaaaatctcaatatttcagataatcacaatacatcccttacctgggaaagggctgttataatctttcacaggggacaggatggttcccttgatgaagaagttgatatgccttttcccaactccagaaagtgacaagctcacagacctttgaactagagtttagctggaaaagtatgttagtgcaaattgtcacaggacagcccttctttccacagaagctccaggtagagggtgtgtaagtagataggccatgggcactgtgggtagacacacatgaagtccaagcatttagatgtataggttgatggtggtatgttttcaggctagatgtatgtacttcatgctgtctacactaagagagaatgagagacacactgaagaagcaccaatcatgaattagttttatatgcttctgttttataattttgtgaagcaaaattttttctctaggaaatatttattttaataatgtttcaaacatatataacaatgctgtattttaaaagaatgattatgaattacatttgtataaaataatttttatatttgaaatattgactttttatggcactagtatttctatgaaatattatgttaaaactgggacaggggagaacctagggtgatattaaccaggggccatgaatcaccttttggtctggagggaagccttggggctgatgcagttgttgcccacagctgtatgattcccagccagcacagcctcttagatgcagttctgaagaagatggtaccaccagtctgactgtttccatcaagggtacactgccttctcaactccaaactgactcttaagaagactgcattatatttattactgtaagaaaatatcacttgtcaataaaatccatacatttgtgtgaaa

SEQ ID NO: 321 - DNA, 682 bp, Homo sapiens
  source 1..682: mol_type = genomic DNA
taaaaggactatggacacttcgtgccttcggacggcagccttactttgaaactctgttccacaaagctctgaatttacatactgccaactggttcttgtacctgtcaacactgcgctggttccaaatgagaatagaaatgatttttgtcatcttcttcattgctgttaccttcatttccattttaacaacaggagaaggagaaggaagagttggtattatcctgactttagccatgaatatcatgagtacattgcagtgggctgtaaactccagcatagatgtggatagcttgatgcgatctgtgagccgagtctttaagttcattgacatgccaacagaaggtaaacctaccaagtcaaccaaaccatacaagaatggccaactctcgaaagttatgattattgagaattcacacgtgaagaaagatgacatctggccctcagggggccaaatgactgtcaaagatctcacagcaaaatacacagaaggtggaaatgccatattagagaacatttccttctcaataagtcctggccagagggtgagatttgaacactgcttgctttgttagactgtgttcagtaagtgaatcccagtagcctgaagcaatgtgttagcagaatctatttgtaacattattattgtacagtagaatcaatattaaacacacatgttttatta

SEQ ID NO: 322 - DNA, 2470 bp, Homo sapiens
  source 1..2470: mol_type = genomic DNA
aatggagggcggtctgagcttcgctcacgaaaggagccgggaggcgctggcggctccaagagtctctgtgtccctggcagcggacctcatcttccctcacgccggagccccgatctctgcgccccggcccgacccagctgcgctctgtccgtctaagacgcgcggaaactacaactcccagagctcatctcgccgagatccggccccacgagtcaggtggcggaggtcagattgctttggagacgctgagagaacctttgcgagagcgccggttgacgtgcggagtgcggggctccgggggactgagcagcacgagaccccatcctcccctccgggttttcacactgggcgaagggaggactcctgagctctgcctcttccagtaacattgaggattactgtgttttgtgagagctcgctaggcgccctaagcaacagagttctgagaaatcgagaaacatgataaggaattggctgactatttttatcctttttcccctgaagctcgtagagaaatgtgagtcaagcgtcagcctcactgttcctcctgtcgtaaagctggagaacggcagctcgaccaacgtcagcctcaccctgcggccaccattaaatgcaaccctggtgatcacttttgaaatcacatttcgttccaaaaatattactatccttgagctccccgatgaagttgtggtgcctcctggagtgacaaactcctcttttcaagtgacatctcaaaatgttggacaacttactgtttatctacatggaaatcactccaatcagaccggcccgaggatacgctttcttgtgatccgcagcagcgccattagcatcataaaccaggtgattggctggatctactttgtggcctggtccatctccttctaccctcaggtgatcatgaattggaggcggaaaagtgtcattggtctgagcttcgacttcgtggctctgaacctgacgggcttcgtggcctacagtgtattcaacatcggcctcctctgggtgccctacatcaaggagcagtttctcctcaaataccccaacggagtgaaccccgtgaacagcaacgacgtcttcttcagcctgcacgcggttgtcctcacgctgatcatcatcgtgcagtgctgcctgtatgagcgcggtggccagcgcgtgtcctggcctgccatcggcttcctggtgctcgcgtggctcttcgcatttgtcaccatgatcgtggctgcagtgggagtgaccacgtggctgcagtttctcttctgcttctcctacatcaagctcgcagtcacgctggtcaagtattttccacaggcctacatgaacttttactacaaaagcactgagggctggagcattggcaacgtgctcctggacttcaccgggggcagcttcagcctcctgcagatgttcctccagtcctacaacaacgaccagtggacgctgatcttcggagacccaaccaagtttggactcggggtcttctccatcgtcttcgacgtcgtcttcttcatccagcacttctgtttgtacagaaagagaccggggcttcaggcagcgcgcacaggctctggcagccgtctcaggcaggactgggcaccaagcttgcagccgaaggccttgccccaaactaccagcgtttctgcaagcagcttgaagggctgaccttgcagccgggtgagccaagggcactttgctgccaccgctgcattcccagagatcaagcagcccggtgccgtggccagtgaactcagaggtgctggtggacgggctaggactttggggttaggccatggggctctttctctgaaggccactttcctgacgtactctctgtacataactcagcgtccgtgactgcagtaacagccagccctacccagagtatttctgagccatgaggggcccaccagattggttctgaattggattcatgcccagcgcattagcatagtaactcctttcagattttttggagggacgtttggaagtggcttactctcttctgccctctctcctacctccaccttctcagattagccccatctgagcacatccagctgctccttacccagcatctggagtacaggacatagctctctcctgctaccagtctgtgccttagaggtctgttaggcctgccaaacggcgaccagctcccctggagcgagggcaggccccttccctctctttccccagacacctacttgagactcaccaatttctggcctgttcaggagcctcagataagtatttgtacttgagaccacctcacacaatctgtatgggcccaaccctgatctcaaacctccttccctctgcccaaagctgtccttcctatggcaggaggggtgggggtcccaggacgtgcctcatacatgacttgagcttgtcagtccactgagtttccttctacgagatcaacgcgaggggcctgtatcttgaattaaaacctactcgcttcctttctgca

SEQ ID NO: 323 - DNA, 2866 bp, Homo sapiens
  source 1..2866: mol_type = genomic DNA
gatttccgcccaatggagggcggtctgagcttcgctcacgaaaggagccgggaggcgctggcggctccaagagtctctgtgtccctggcagcggacctcatcttccctcacgccggagccccgatctctgcgccccggcccgacccagctgcgctctgtccgtctaagacgcgcggaaactacaactcccagagctcatctcgccgagatccggccccacgagtcaggtggcggaggtcaggtgacagcggacccgcctctcccaaagtctagccgggcaggggaacgcggtgcattcctgaccggcacctggcgaggctcatgcgtcccgtgagggcggttcctcgagcctgggggcgctcagattgctttggagacgctgagagaacctttgcgagagcgccggttgacgtgcggagtgcggggctccgggggactgagcagcacgagaccccatcctcccctccgggttttcacactgggcgaagggaggactcctgagctctgcctcttccagtaacattgaggattactgtgttttgtgagagctcgctaggcgccctaagcaacagagttctgagaaatcgagaaacatgataaggaattggctgactatttttatcctttttcccctgaagctcgtagagaaatgtgagtcaagcgtcagcctcactgttcctcctgtcgtaaagctggagaacggcagctcgaccaacgtcagcctcaccctgcggccaccattaaatgcaaccctggtgatcacttttgaaatcacatttcgttccaaaaatattactatccttgagctccccgatgaagttgtggtgcctcctggagtgacaaactcctcttttcaagtgacatctcaaaatgttggacaacttactgtttatctacatggaaatcactccaatcagaccggcccgaggatacgctttcttgtgatccgcagcagcgccattagcatcataaaccaggtgattggctggatctactttgtggcctggtccatctccttctaccctcaggtgatcatgaattggaggcggaaaagtgtcattggtctgagcttcgacttcgtggctctgaacctgacgggcttcgtggcctacagtgtattcaacatcggcctcctctgggtgccctacatcaaggagcagtttctcctcaaataccccaacggagtgaaccccgtgaacagcaacgacgtcttcttcagcctgcacgcggttgtcctcacgctgatcatcatcgtgcagtgctgcctgtatgagcgcggtggccagcgcgtgtcctggcctgccatcggcttcctggtgctcgcgtggctcttcgcatttgtcaccatgatcgtggctgcagtgggagtgaccacgtggctgcagtttctcttctgcttctcctacatcaagctcgcagtcacgctggtcaagtattttccacaggcctacatgaacttttactacaaaagcactgagggctggagcattggcaacgtgctcctggacttcaccgggggcagcttcagcctcctgcagatgttcctccagtcctacaacaacgaccagtggacgctgatcttcggagacccaaccaagtttggactcggggtcttctccatcgtcttcgacgtcgtcttcttcatccagcacttctgtttgtacagaaagagaccggggtatgaccagctgaactagcacccagggacccagtgtacccagcctctggcctcgtgccctgctggggaaggcctcacccagcgaaggccggagaagcggttgggccctggcacacagggctggctcagtgtgcggacagaggagaccactctgctcctggggccagaggccattcaatagcctgccttcgtccgggcccctcctgggcctccccggccaggcacgtggcaccgtcgccttgacaccgccatctcttttctttaaggcttcaggcagcgcgcacaggctctggcagccgtctcaggcaggactgggcaccaagcttgcagccgaaggccttgccccaaactaccagcgtttctgcaagcagcttgaagggctgaccttgcagccgggtgagccaagggcactttgctgccaccgctgcattcccagagatcaagcagcccggtgccgtggccagtgaactcagaggtgctggtggacgggctaggactttggggttaggccatggggctctttctctgaaggccactttcctgacgtactctctgtacataactcagcgtccgtgactgcagtaacagccagccctacccagagtatttctgagccatgaggggcccaccagattggttctgaattggattcatgcccagcgcattagcatagtaactcctttcagattttttggagggacgtttggaagtggcttactctcttctgccctctctcctacctccaccttctcagattagccccatctgagcacatccagctgctccttacccagcatctggagtacaggacatagctctctcctgctaccagtctgtgccttagaggtctgttaggcctgccaaacggcgaccagctcccctggagcgagggcaggccccttccctctctttccccagacacctacttgagactcaccaatttctggcctgttcaggagcctcagataagtatttgtacttgagaccacctcacacaatctgtatgggcccaaccctgatctcaaacctccttccctctgcccaaagctgtccttcctatggcaggaggggtgggggtcccaggacgtgcctcatacatgacttgagcttgtcagtccactgagtttccttctacgagatcaacgcgaggggcctgtatcttgaattaaaacctactcgcttcctttc

SEQ ID NO: 324 - DNA, 1506 bp, Homo sapiens
  source 1..1506: mol_type = genomic DNA
aaagtctagccgggcaggggaacgcggtgcattcctgaccggcacctggcgaggctcatgcgtcccgtgagggcggttcctcgagcctgggggcgctcagattgctttggagacgctgagagaacctttgcgagagcgccggttgacgtgcggagtgcggggctccgggggactgagcagcacgagaccccatcctcccctccgggttttcacactgggcgaagggaggactcctgagctctgcctcttccagtaacattgaggattactgtgttttgtgagagctcgctaggcgccctaagcaacagaggttgtggtgcctcctggagtgacaaactcctcttttcaagtgacatctcaaaatgttggacaacttactgtttatctacatggaaatcactccaatcagaccggcccgaggatacgctttcttgtgatccgcagcagcgccattagcatcataaaccaggtgattggctggatctactttgtggcctggtccatctccttctaccctcaggtgatcatgaattggaggcggaaaagtgtcattggtctgagcttcgacttcgtggctctgaacctgacgggcttcgtggcctacagtgtattcaacatcggcctcctctgggtgccctacatcaaggagcagtttctcctcaaataccccaacggagtgaaccccgtgaacagcaacgacgtcttcttcagcctgcacgcggttgtcctcacgctgatcatcatcgtgcagtgctgcctgtatgagcgcggtggccagcgcgtgtcctggcctgccatcggcttcctggtgctcgcgtggctcttcgcatttgtcaccatgatcgtggctgcagtgggagtgaccacgtggctgcagtttctcttctgcttctcctacatcaagctcgcagtcacgctggtcaagtattttccacaggcctacatgaacttttactacaaaagcactgagggctggagcattggcaacgtgctcctggacttcaccgggggcagcttcagcctcctgcagatgttcctccagtcctacaacaacgaccagtggacgctgatcttcggagacccaaccaagtttggactcggggtcttctccatcgtcttcgacgtcgtcttcttcatccagcacttctgtttgtacagaaagagaccggggtatgaccagctgaactagcacccagggacccagtgtacccagcctctggcctcgtgccctgctggggaaggcctcacccagcgaaggccggagaagcggttgggccctggcacacagggctggctcagtgtgcggacagaggagaccactctgctcctggggccagaggccattcaatagcctgccttcgtccgggcccctcctgggcctccccggccaggcacgtggcaccgtcgccttgacaccgccatctcttttctttaaggcttcaggcagcgcgcacaggctctggcagccgtctcaggcaggactgggcaccaagcttgcagccgaag

SEQ ID NO: 325 - DNA, 1570 bp, Homo sapiens
  source 1..1570: mol_type = genomic DNA
cccaaagtctagccgggcaggggaacgcggtgcattcctgaccggcacctggcgaggctcatgcgtcccgtgagggcggttcctcgagcctgggggcgctcagattgctttggagacgctgagagaacctttgcgagagcgccggttgacgtgcggagtgcggggctccgggggactgagcagcacgagaccccatcctcccctccgggttttcacactgggcgaagggaggactcctgagctctgcctcttccagtaacattgaggattactgtgttttgtgagagctcgctaggcgccctaagcaacagagttctgagaaatcgagaaacatgataaggaattggctgactatttttatcctttttcccctgaagctcgtagagaaatgtgcccgaggatacgctttcttgtgatccgcagcagcgccattagcatcataaaccaggtgattggctggatctactttgtggcctggtccatctccttctaccctcaggtgatcatgaattggaggcggaaaagtgtcattggtctgagcttcgacttcgtggctctgaacctgacgggcttcgtggcctacagtgtattcaacatcggcctcctctgggtgccctacatcaaggagcagtttctcctcaaataccccaacggagtgaaccccgtgaacagcaacgacgtcttcttcagcctgcacgcggttgtcctcacgctgatcatcatcgtgcagtgctgcctgtatgagcgcggtggccagcgcgtgtcctggcctgccatcggcttcctggtgctcgcgtggctcttcgcatttgtcaccatgatcgtggctgcagtgggagtgaccacgtggctgcagtttctcttctgcttctcctacatcaagctcgcagtcacgctggtcaagtattttccacaggcctacatgaacttttactacaaaagcactgagggctggagcattggcaacgtgctcctggacttcaccgggggcagcttcagcctcctgcagatgttcctccagtcctacaacaacgaccagtggacgctgatcttcggagacccaaccaagtttggactcggggtcttctccatcgtcttcgacgtcgtcttcttcatccagcacttctgtttgtacagaaagagaccggggcttcaggcagcgcgcacaggctctggcagccgtctcaggcaggactgggcaccaagcttgcagccgaaggccttgccccaaactaccagcgtttctgcaagcagcttgaagggctgaccttgcagccgggtgagccaagggcactttgctgccaccgctgcattcccagagatcaagcagcccggtgccgtggccagtgaactcagaggtgctggtggacgggctaggactttggggttaggccatggggctctttctctgaaggccactttcctgacgtactctctgtacataactcagcgtccgtgactgcagtaacagccagccctacccagagtatttctgagccatgaggggcccaccagattggttctgaattggattcatgcccagcgcattagcatagtaactcctttcaga

SEQ ID NO: 326 - DNA, 617 bp, Homo sapiens
  source 1..617: mol_type = genomic DNA
ctctcccaaagtctagccgggcaggggaacgcggtgcattcctgaccggcacctggcgaggctcatgcgtcccgtgagggcggttcctcgagcctgggggcgctcaggtgagagcggacgcggcctcccctgtttcccaggcggaccccttgaggcacagcagattgctttggagacgctgagagaacctttgcgagagcgccggttgacgtgcggagtgcggggctccgggggactgagcagcacgagaccccatcctcccctccgggttttcacactgggcgaagggaggactcctgagctctgcctcttccagtaacattgaggattactgtgttttgtgagagctcgctaggcgccctaagcaacagagttctgagaaatcgagaaacatgataaggaattggctgactatttttatcctttttcccctgaagctcgtagagaaatgtgagtcaagcgtcagcctcactgttcctcctgtcgtaaagctggagaacggcagctcgaccaacgtcagcctcaccctgcggccaccattaaatgcaaccctggtgatcacttttgaaatcacatttcgttccaaaaatattactatccttgagctccccgatgaa

SEQ ID NO: 327 - DNA, 518 bp, Homo sapiens
  source 1..518: mol_type = genomic DNA
caaatccatagggagctctgccttaccattgggttcctaattaactgagtgagtgggtgtgttctgcatggtgagaggcattggaatgatgcatcagaaaacatgtcataatgtcatcactgtaatatgacaagaattgcagctgtggctggaacctttataaagtgaccaagcacaccttttcatccagtctcagcgtggggtgaagcctagcagctatgaggatccattatcttctgtttgctttgctcttcctgtttttggtgcctgttccaggtcatggaggaatcataaacacattacagaaatattattgcagagtcagaggcggccggtgtgctgtgctcagctgccttccaaaggaggaacagatcggcaagtgctcgacgcgtggccgaaaatgctgccgaagaaagaaataaaaaccctgaaacatgacgagagtgttgtaaagtgtggaaatgccttcttaaagtttataaaagtaaaatcaaattacatttttttttcaaaaaaaa

SEQ ID NO: 328 - DNA, 518 bp, Homo sapiens; identical to SEQ ID NO: 327
  source 1..518: mol_type = genomic DNA

SEQ ID NO: 329 - DNA, 380 bp, Homo sapiens
  source 1..380: mol_type = genomic DNA
gaccagggaccaggacctttataaggtggaaggcttgatgtcctccccagactcagctcctggtgaagctcccagccatcagccatgagggtcttgtatctcctcttctcgttcctcttcatattcctgatgcctcttccaggtgtttttggtggtataggcgatcctgttacctgccttaagagtggagccatatgtcatccagtcttttgccctagaaggtataaacaaattggcacctgtggtctccctggaacaaaatgctgcaaaaagccatgaggaggccaagaagctgctgtggctgatgcggattcagaaagggctccctcatcagagacgtgcgacatgtaaaccaaattaaactatggtgtccaaagata

SEQ ID NO: 330 - DNA, 332 bp, Homo sapiens
  source 1..332: mol_type = genomic DNA
agactcagctcctggtgaagctcccagccatcagccatgagggtcttgtatctcctcttctcgttcctcttcatatttctgatgcctcttccaggtgtttttggtggtataggcgatcctgttacctgccttaagagtggagccatatgtcatccagtcttttgccctagaaggtataaacaaattggcacctgtggtctccctggaacaaaatgctgcaaaaagccatgaggaggccaagaagctgctgtggctgatgcggattcagaaagggctccctcatcagagacgtgcgacatgtaaaccaaattaaactatggtgtccaaagata

SEQ ID NO: 331 - DNA, 2053 bp, Homo sapiens
  source 1..2053: mol_type = genomic DNA
ccatagtcttagctactcaggaggctgaggagggaggattatctgagccctggcggttgaggctataatgagccatgattgtgccactgcactccagccttggcaacacagtgtgagaccctgtctcaaaaacaataaaaacccaaaacaaaagaaccaagaaattactggacctgaggcctggcctttagctgctgccctgcccttgtgacctggtcactcgggatcccctgggcctaaacacacagcctattgtctacctcaagaaggctccccactgcttggctggcaattggggtgggctttgcaggccccacctgtcctggccccacggcgctggtgctgcaggcccccaccactgcttgttccgagctccccagcctcctgcagagttgcctgcacctgatggcgatgaatcaggaaggcaggcgtgtcctgggccacagagcagtcatggctgtcagccaccagggggctccatttgcaactttggatgtggctttggcctctttgtccaaagtgaccttggggcccccagacaagagacagggagactggagcccagccccaccctcccgcacatacctggcccatccctgccctatcctggaagatgggggccaccacacgtgcaagggacacgggataggaacctttggccttgttatcagacattttaaaactaagtgcaaacgtgattatcaggtgcagtttttacagcagcaagaaacctgtgcttacagaaagaaacacgtgctagcaacccacctatgcggaaagccacacagagccattgttttctgcactctcaggtgacggctcacatttgccccagggaaggtcacagctgcctgaacttttaaaactcccagacacgcactgcctgtgcaggatccggagcccagcagcactgccagggccttgaagtgcttcttcagagacctttcttcatagactacttttttttctttaagcagcaaaaggagaaaattgtcatcaaaggatattccagattcttgacagcattctcgtcatctctgaggacatcaccatcatctcaggatgaggggcatgaagctgctgggggcgctgctggcactggcggccctactgcagggggccgtgtccctgaagatcgcagccttcaacatccagacatttggggagaccaagatgtccaatgccaccctcgtcagctacattgtgcagatcctgagccgctatgacatcgccctggtccaggaggtcagagacagccacctgactgccgtggggaagctgctggacaacctcaatcaggatgcaccagacacctatcactacgtggtcagtgagccactgggacggaacagctataaggagcgctacctgttcgtgtacaggcctgaccaggtgtctgcggtggacagctactactacgatgatggctgcgagccctgcgggaacgacaccttcaaccgagagccagccattgtcaggttcttctcccggttcacagaggtcagggagtttgccattgttcccctgcatgcggccccgggggacgcagtagccgagatcgacgctctctatgacgtctacctggatgtccaagagaaatggggcttggaggacgtcatgttgatgggcgacttcaatgcgggctgcagctatgtgagaccctcccagtggtcatccatccgcctgtggacaagccccaccttccagtggctgatccccgacagcgctgacaccacagctacacccacgcactgtgcctatgacaggatcgtggttgcagggatgctgctccgaggcgccgttgttcccgactcggctcttccctttaacttccaggctgcctatggcctgagtgaccaactggcccaagccatcagtgaccactatccagtggaggtgatgctgaagtgagcagcccctccccacaccagttgaactgcaggaagagaggacccatcctgccacaggacccagaaaaaaagcccaacacacactcgggttaagaaatacctttaaatttaggtaaataaagctcaaggaggtggggctgtca

SEQ ID NO: 332 - DNA, 1174 bp, Homo sapiens
  source 1..1174: mol_type = genomic DNA
ctcctgcccaggacccgaggagccggccaccgttcagaaggccccagcttgaaggcctggagagccgcccagcagcacaacacagggaagcttggggagcaaaaggagaaaattgtcatcaaaggatattccagattcttgacagcattctcgtcatctctgaggacatcaccatcatctcaggatgaggggcatgaagctgctgggggcgctgctggcactggcggccctactgcagggggccgtgtccctgaagatcgcagccttcaacatccagacatttggggagaccaagatgtccaatgccaccctcgtcagctacattgtgcagatcctgagccgctatgacatcgccctggtccaggaggtcagagacagccacctgactgccgtggggaagctgctggacaacctcaatcaggatgcaccagacacctatcactacgtggtcagtgagccactgggacggaacagctataaggagcgctacctgttcgtgtacaggcctgaccaggtgtctgcggtggacagctactactacgatgatggctgcgagccctgcgggaacgacaccttcaaccgagagccagccattgtcaggttcttctcccggttcacagaggtcagggagtttgccattgttcccctgcatgcggccccgggggacgcagtagccgagatcgacgctctctatgacgtctacctggatgtccaagagaaatggggcttggaggacgtcatgttgatgggcgacttcaatgcgggctgcagctatgtgagaccctcccagtggtcatccatccgcctgtggacaagccccaccttccagtggctgatccccgacagcgctgacaccacagctacacccacgcactgtgcctatgacaggatcgtggttgcagggatgctgctccgaggcgccgttgttcccgactcggctcttccctttaacttccaggctgcctatggcctgagtgaccaactggcccaagccatcagtgaccactatccagtggaggtgatgctgaagtgagcagcccctccccacaccagttgaactgcaggaagagaggacccatcctgccacaggacccagaaaaaaagcccaacacacactcgggttaagaaatacctttaaatttaggtaaataaagctcaaggaggtggggctgtc

SEQ ID NO: 333 - DNA, 1209 bp, Homo sapiens
  source 1..1209: mol_type = genomic DNA
ctgaacttttaaaactcccagacacgcactgcctgtgcaggatccggagcccagcagcactgccagggccttgaagtgcttcttcagagacctttcttcatagactacttttttttctttaagcagcaaaaggagaaaattgtcatcaaaggatattccagattcttgacagcattctcgtcatctctgaggacatcaccatcatctcaggatgaggggcatgaagctgctgggggcgctgctggcactggcggccctactgcagggggccgtgtccctgaagatcgcagccttcaacatccagacatttggggagaccaagatgtccaatgccaccctcgtcagctacattgtgcagggatgcaccagacacctatcactacgtggtcagtgagccactgggacggaacagctataaggagcgctacctgttcgtgtacaggcctgaccaggtgtctgcggtggacagctactactacgatgatggctgcgagccctgcgggaacgacaccttcaaccgagagccagccattgtcaggttcttctcccggttcacaggacgtcatgttgatgggcgacttcaatgcgggctgcagctatgtgagaccctcccagtggtcatccatccgcctgtggacaagccccaccttccagtggctgatccccgacagcgctgacaccacagctacacccacgcactgtgcctatgacaggatcgtggttgcagggatgctgctccgaggcgccgttgttcccgactcggctcttccctttaacttccaggctgcctatggcctgagtgaccaactgttctcagttcacacctgctctggagcagggctgggagaaagacacggccttcctgcctcagcggcactcccgagcaacacgtgccgagcagggacccacagggtctccacctgacaccaagggcttctgctgctgctggaaggacacccaacgggccagagatcagcttcttcttgtcaaactcacgaaggtgcagcagggtgagctcatcaaactgctcaaagcagaagagaacctgcaggtggccaagagcagctccatcagaccccgggggcctccagccaccacagaagaaaggatgagggcggcaggagggctgggggagccaagcgggccacactggggaacaccggggcagttggggttcctaggcctgcatgacagttactacgacacctg

SEQ ID NO: 334 - DNA, 6796 bp, Homo sapiens
  source 1..6796: mol_type = genomic DNA
gggtggaagatgagcagaagcccctgttctcggaacgccggctgacaagcggggtgagcgcagccggggcggggacccagcctagcccactggagcagccgggggtggcccgttcccctttaagagcaactgctctaagccaggagccagagattcgagccggcctcgcccagccagccctctccagcgaggggacccacaagcggcgcctcggccctcccgacctttccgagccctctttgcgccctgggcgcacggggccctacacgcgccaagcatgctgagggtcttcatcctctatgccgagaacgtccacacacccgacaccgacatcagcgatgcctactgctccgcggtgtttgcaggggtgaagaagagaaccaaagtcatcaagaacagcgtgaaccctgtatggaatgagggatttgaatgggacctcaagggcatccccctggaccagggctctgagcttcatgtggtggtcaaagaccatgagacgatggggaggaacaggttcctgggggaagccaaggtcccactccgagaggtcctcgccacccctagtctgtccgccagcttcaatgcccccctgctggacaccaagaagcagcccacaggggcctcgctggtcctgcaggtgtcctacacaccgctgcctggagctgtgcccctgttcccgccccctactcctctggagccctccccgactctgcctgacctggatgtagtggcagacacaggaggagaggaagacacagaggaccagggactcactggagatgaggcggagccattcctggatcaaagcggaggcccgggggctcccaccaccccaaggaaactaccttcacgtcctccgccccactaccccgggatcaaaagaaagcgaagtgcgcctacatctagaaagctgctgtcagacaaaccgcaggatttccagatcagggtccaggtgatcgaggggcgccagctgccgggggtgaacatcaagcctgtggtcaaggttaccgctgcagggcagaccaagcggacgcggatccacaagggaaacagcccactcttcaatgagactcttttcttcaacttgtttgactctcctggggagctgtttgatgagcccatctttatcacggtggtagactctcgttctctcaggacagatgctctcctcggggagttccggatggacgtgggcaccatttacagagagccccggcacgcctatctcaggaagtggctgctgctctcagaccctgatgacttctctgctggggccagaggctacctgaaaacaagcctttgtgtgctggggcctggggacgaagcgcctctggagagaaaagacccctctgaagacaaggaggacattgaaagcaacctgctccggcccacaggcgtagccctgcgaggagcccacttctgcctgaaggtcttccgggccgaggacttgccgcagatggacgatgccgtgatggacaacgtgaaacagatctttggcttcgagagtaacaagaagaacttggtggacccctttgtggaggtcagctttgcggggaaaatgctgtgcagcaagatcttggagaagacggccaaccctcagtggaaccagaacatcacactgcctgccatgtttccctccatgtgcgaaaaaatgaggattcgtatcatagactgggaccgcctgactcacaatgacatcgtggctaccacctacctgagtatgtcgaaaatctctgcccctggaggagaaatagaagaggagcctgcaggtgctgtcaagccttcgaaagcctcagacttggatgactacctgggcttcctccccacttttgggccctgctacatcaacctctatggcagtcccagagagttcacaggcttcccagacccctacacagagctcaacacaggcaagggggaaggtgtggcttatcgtggccggcttctgctctccctggagaccaagctggtggagcacagtgaacagaaggtggaggaccttcctgcggatgacatcctccgggtggagaagtaccttaggaggcgcaagtactccctgtttgcggccttctactcagccaccatgctgcaggatgtggatgatgccatccagtttgaggtcagcatcgggaactacgggaacaagttcgacatgacctgcctgccgctggcctccaccactcagtacagccgtgcagtctttgacgggtgccactactactacctaccctggggtaacgtgaaacctgtggtggtgctgtcatcctactgggaggacatcagccatagaatcgagactcagaaccagctgcttgggattgctgaccggctggaagctggcctggagcaggtccacctggccctgaaggcgcagtgctccacggaggacgtggactcgctggtggctcagctgacggatgagctcatcgcaggctgcagccagcctctgggtgacatccatgagacaccctctgccacccacctggaccagtacctgtaccagctgcgcacccatcacctgagccaaatcactgaggctgccctggccctgaagctcggccacagtgagctccctgcagctctggagcaggcggaggactggctcctgcgtctgcgtgccctggcagaggagccccagaacagcctgccggacatcgtcatctggatgctgcagggagacaagcgtgtggcataccagcgggtgcccgcccaccaagtcctcttctcccggcggggtgccaactactgtggcaagaattgtgggaagctacagacaatctttctgaaatatccgatggagaaggtgcctggcgcccggatgccagtgcagatacgggtcaagctgtggtttgggctctcagtggatgagaaggagttcaaccagtttgctgaggggaagctgtctgtctttgctgaaacctatgagaacgagactaagttggcccttgttgggaactggggcacaacgggcctcacctaccccaagttttctgacgtcacgggcaagatcaagctacccaaggacagcttccgcccctcggccggctggacctgggctggagattggttcgtgtgtccggagaagactctgctccatgacatggacgccggtcacctgagcttcgtggaagaggtgtttgagaaccagacccggcttcccggaggccagtggatctacatgagtgacaactacaccgatgtgaacggggagaaggtgcttcccaaggatgacattgagtgcccactgggctggaagtgggaagatgaggaatggtccacagacctcaaccgggctgtcgatgagcaaggctgggagtatagcatcaccatccccccggagcggaagccgaagcactgggtccctgctgagaagatgtactacacacaccgacggcggcgctgggtgcgcctgcgcaggagggatctcagccaaatggaagcactgaaaaggcacaggcaggcggaggcggagggcgagggctgggagtacgcctctctttttggctggaagttccacctcgagtaccgcaagacagatgccttccgccgccgccgctggcgccgtcgcatggagccactggagaagacggggcctgcagctgtgtttgcccttgagggggccctgggcggcgtgatggatgacaagagtgaagattccatgtccgtctccaccttgagcttcggtgtgaacagacccacgatttcctgcatattcgactatgggaaccgctaccatctacgctgctacatgtaccaggcccgggacctggctgcgatggacaaggactctttttctgatccctatgccatcgtctccttcctgcaccagagccagaagacggtggtggtgaagaacacccttaaccccacctgggaccagacgctcatcttctacgagatcgagatctttggcgagccggccacagttgctgagcaaccgcccagcattgtggtggagctgtacgaccatgacacttatggtgcagacgagtttatgggtcgctgcatctgtcaaccgagtctggaacggatgccacggctggcctggttcccactgacgaggggcagccagccgtcgggggagctgctggcctcttttgagctcatccagagagagaagccggccatccaccatattcctggttttgaggtgcaggagacatcaaggatcctggatgagtctgaggacacagacctgccctacccaccaccccagagggaggccaacatctacatggttcctcagaacatcaagccagcgctccagcgtaccgccatcgagatcctggcatggggcctgcggaacatgaagagttaccagctggccaacatctcctcccccagcctcgtggtagagtgtgggggccagacggtgcagtcctgtgtcatcaggaacctccggaagaaccccaactttgacatctgcaccctcttcatggaagtgatgctgcccagggaggagctctactgcccccccatcaccgtcaaggtcatcgataaccgccagtttggccgccggcctgtggtgggccagtgtaccatccgctccctggagagcttcctgtgtgacccctactcggcggagagtccatccccacagggtggcccagacgatgtgagcctactcagtcctggggaagacgtgctcatcgacattgatgacaaggagcccctcatccccatccaggaggaagagttcatcgattggtggagcaaattctttgcctccataggggagagggaaaagtgcggctcctacctggagaaggattttgacaccctgaaggtctatgacacacagctggagaatgtggaggcctttgagggcctgtctgacttttgtaacaccttcaagctgtaccggggcaagacgcaggaggagacagaagatccatctgtgattggtgaatttaagggcctcttcaaaatttatcccctcccagaagacccagccatccccatgcccccaagacagttccaccagctggccgcccagggaccccaggagtgcttggtccgtatctacattgtccgagcatttggcctgcagcccaaggaccccaatggaaagtgtgatccttacatcaagatctccatagggaagaaatcagtgagtgaccaggataactacatcccctgcacgctggagcccgtatttggaaagatgttcgagctgacctgcactctgcctctggagaaggacctaaagatcactctctatgactatgacctcctctccaaggacgaaaagatcggtgagacggtcgtcgacctggagaacaggctgctgtccaagtttggggctcgctgtggactcccacagacctactgtgtctctggaccgaaccagtggcgggaccagctccgcccctcccagctcctccacctcttctgccagcagcatagagtcaaggcacctgtgtaccggacagaccgtgtaatgtttcaggataaagaatattccattgaagagatagaggctggcaggatcccaaacccacacctgggcccagtggaggagcgtctggctctgcatgtgcttcagcagcagggcctggtcccggagcacgtggagtcacggcccctctacagccccctgcagccagacatcgagcaggggaagctgcagatgtgggtcgacctatttccgaaggccctggggcggcctggacctcccttcaacatcaccccacggagagccagaaggtttttcctgcgttgtattatctggaataccagagatgtgatcctggatgacctgagcctcacgggggagaagatgagcgacatttatgtgaaaggttggatgattggctttgaagaacacaagcaaaagacagacgtgcattatcgttccctgggaggtgaaggcaacttcaactggaggttcattttccccttcgactacctgccagctgagcaagtctgtaccattgccaagaaggatgccttctggaggctggacaagactgagagcaaaatcccagcacgagtggtgttccagatctgggacaatgacaagttctcctttgatgattttctgggctccctgcagctcgatctcaaccgcatgcccaagccagccaagacagccaagaagtgctccttggaccagctggatgatgctttccacccagaatggtttgtgtccctttttgagcagaaaacagtgaagggctggtggccctgtgtagcagaagagggtgagaagaaaatactggcgggcaagctggaaatgaccttggagattgtagcagagagtgagcatgaggagcggcctgctggccagggccgggatgagcccaacatgaaccctaagcttgaggacccaaggcgccccgacacctccttcctgtggtttacctccccatacaagaccatgaagttcatcctgtggcggcgtttccggtgggccatcatcctcttcatcatcctcttcatcctgctgctgttcctggccatcttcatctacgccttcccgaactatgctgccatgaagctggtgaagcccttcagctgaggactctcctgccctgtagaaggggccgtggggtcccctccagcatgggactggcctgcctcctccgcccagctcggcgagctcctccagacctcctaggcctgattgtcctgccagggtgggcagacagacagatggaccggcccacactcccagagttgctaacatggagctctgagatcaccccacttccatcatttccttctcccccaacccaacgcttttttggatcagctcagacatatttcagtataaaacagttggaaccacacagca

SEQ ID NO: 335 - DNA, 6543 bp, Homo sapiens
  source 1..6543: mol_type = genomic DNA
tctccgcggaggagcagcgaaggcgacagctctcttggcgcggctgcctgggagccgggcgcttgctgggtgggtgctcgggcccggtgctcccgctcccgccctgactgcgcgcctgtgtgccgccggggctgcccagccatgctgtgctgcctgctggtgagggccagcaacctccccagtgcgaagaaggaccggcgcagcgaccctgtcgcaagcctgactttccgaggggtgaagaagagaaccaaagtcatcaagaacagcgtgaaccctgtatggaatgagggatttgaatgggacctcaagggcatccccctggaccagggctctgagcttcatgtggtggtcaaagaccatgagacgatggggaggaacaggttcctgggggaagccaaggtcccactccgagaggtcctcgccacccctagtctgtccgccagcttcaatgcccccctgctggacaccaagaagcagcccacaggggcctcgctggtcctgcaggtgtcctacacaccgctgcctggagctgtgcccctgttcccgccccctactcctctggagccctccccgactctgcctgacctggatgtagtggcagacacaggaggagaggaagacacagaggaccagggactcactggagatgaggcggagccattcctggatcaaagcggaggcccgggggctcccaccaccccaaggaaactaccttcacgtcctccgccccactaccccgggatcaaaagaaagcgaagtgcgcctacatctagaaagctgctgtcagacaaaccgcaggatttccagatcagggtccaggtgatcgaggggcgccagctgccgggggtgaacatcaagcctgtggtcaaggttaccgctgcagggcagaccaagcggacgcggatccacaagggaaacagcccactcttcaatgagactcttttcttcaacttgtttgactctcctggggagctgtttgatgagcccatctttatcacggtggtagactctcgttctctcaggacagatgctctcctcggggagttccggatggacgtgggcaccatttacagagagccccggcacgcctatctcaggaagtggctgctgctctcagaccctgatgacttctctgctggggccagaggctacctgaaaacaagcctttgtgtgctggggcctggggacgaagcgcctctggagagaaaagacccctctgaagacaaggaggacattgaaagcaacctgctccggcccacaggcgtagccctgcgaggagcccacttctgcctgaaggtcttccgggccgaggacttgccgcagatggacgatgccgtgatggacaacgtgaaacagatctttggcttcgagagtaacaagaagaacttggtggacccctttgtggaggtcagctttgcggggaaaatgctgtgcagcaagatcttggagaagacggccaaccctcagtggaaccagaacatcacactgcctgccatgtttccctccatgtgcgaaaaaatgaggattcgtatcatagactgggaccgcctgactcacaatgacatcgtggctaccacctacctgagtatgtcgaaaatctctgcccctggaggagaaatagaagaggagcctgcaggtgctgtcaagccttcgaaagcctcagacttggatgactacctgggcttcctccccacttttgggccctgctacatcaacctctatggcagtcccagagagttcacaggcttcccagacccctacacagagctcaacacaggcaagggggaaggtgtggcttatcgtggccggcttctgctctccctggagaccaagctggtggagcacagtgaacagaaggtggaggaccttcctgcggatgacatcctccgggtggagaagtaccttaggaggcgcaagtactccctgtttgcggccttctactcagccaccatgctgcaggatgtggatgatgccatccagtttgaggtcagcatcgggaactacgggaacaagttcgacatgacctgcctgccgctggcctccaccactcagtacagccgtgcagtctttgacgggtgccactactactacctaccctggggtaacgtgaaacctgtggtggtgctgtcatcctactgggaggacatcagccatagaatcgagactcagaaccagctgcttgggattgctgaccggctggaagctggcctggagcaggtccacctggccctgaaggcgcagtgctccacggaggacgtggactcgctggtggctcagctgacggatgagctcatcgcaggctgcagccagcctctgggtgacatccatgagacaccctctgccacccacctggaccagtacctgtaccagctgcgcacccatcacctgagccaaatcactgaggctgccctggccctgaagctcggccacagtgagctccctgcagctctggagcaggcggaggactggctcctgcgtctgcgtgccctggcagaggagccccagaacagcctgccggacatcgtcatctggatgctgcagggagacaagcgtgtggcataccagcgggtgcccgcccaccaagtcctcttctcccggcggggtgccaactactgtggcaagaattgtgggaagctacagacaatctttctgaaatatccgatggagaaggtgcctggcgcccggatgccagtgcagatacgggtcaagctgtggtttgggctctcagtggatgagaaggagttcaaccagtttgctgaggggaagctgtctgtctttgctgaaacctatgagaacgagactaagttggcccttgttgggaactggggcacaacgggcctcacctaccccaagttttctgacgtcacgggcaagatcaagctacccaaggacagcttccgcccctcggccggctggacctgggctggagattggttcgtgtgtccggagaagactctgctccatgacatggacgccggtcacctgagcttcgtggaagaggtgtttgagaaccagacccggcttcccggaggccagtggatctacatgagtgacaactacaccgatgtgaacggggagaaggtgcttcccaaggatgacattgagtgcccactgggctggaagtgggaagatgaggaatggtccacagacctcaaccgggctgtcgatgagcaaggctgggagtatagcatcaccatccccccggagcggaagccgaagcactgggtccctgctgagaagatgtactacacacaccgacggcggcgctgggtgcgcctgcgcaggagggatctcagccaaatggaagcactgaaaaggcacaggcaggcggaggcggagggcgagggctgggagtacgcctctctttttggctggaagttccacctcgagtaccgcaagacagatgccttccgccgccgccgctggcgccgtcgcatggagccactggagaagacggggcctgcagctgtgtttgcccttgagggggccctgggcggcgtgatggatgacaagagtgaagattccatgtccgtctccaccttgagcttcggtgtgaacagacccacgatttcctgcatattcgactatgggaaccgctaccatctacgctgctacatgtaccaggcccgggacctggctgcgatggacaaggactctttttctgatccctatgccatcgtctccttcctgcaccagagccagaagacggtggtggtgaagaacacccttaaccccacctgggaccagacgctcatcttctacgagatcgagatctttggcgagccggccacagttgctgagcaaccgcccagcattgtggtggagctgtacgaccatgacacttatggtgcagacgagtttatgggtcgctgcatctgtcaaccgagtctggaacggatgccacggctggcctggttcccactgacgaggggcagccagccgtcgggggagctgctggcctcttttgagctcatccagagagagaagccggccatccaccatattcctggttttgaggtgcaggagacatcaaggatcctggatgagtctgaggacacagacctgccctacccaccaccccagagggaggccaacatctacatggttcctcagaacatcaagccagcgctccagcgtaccgccatcgagatcctggcatggggcctgcggaacatgaagagttaccagctggccaacatctcctcccccagcctcgtggtagagtgtgggggccagacggtgcagtcctgtgtcatcaggaacctccggaagaaccccaactttgacatctgcaccctcttcatggaagtgatgctgcccagggaggagctctactgcccccccatcaccgtcaaggtcatcgataaccgccagtttggccgccggcctgtggtgggccagtgtaccatccgctccctggagagcttcctgtgtgacccctactcggcggagagtccatccccacagggtggcccagacgatgtgagcctactcagtcctggggaagacgtgctcatcgacattgatgacaaggagcccctcatccccatccaggaggaagagttcatcgattggtggagcaaattctttgcctccataggggagagggaaaagtgcggctcctacctggagaaggattttgacaccctgaaggtctatgacacacagctggagaatgtggaggcctttgagggcctgtctgacttttgtaacaccttcaagctgtaccggggcaagacgcaggaggagacagaagatccatctgtgattggtgaatttaagggcctcttcaaaatttatcccctcccagaagacccagccatccccatgcccccaagacagttccaccagctggccgcccagggaccccaggagtgcttggtccgtatctacattgtccgagcatttggcctgcagcccaaggaccccaatggaaagtgtgatccttacatcaagatctccatagggaagaaatcagtgagtgaccaggataactacatcccctgcacgctggagcccgtatttggaaagatgttcgagctgacctgcactctgcctctggagaaggacctaaagatcactctctatgactatgacctcctctccaaggacgaaaagatcggtgagacggtcgtcgacctggagaacaggctgctgtccaagtttggggctcgctgtggactcccacagacctactgtgtctctggaccgaaccagtggcgggaccagctccgcccctcccagctcctccacctcttctgccagcagcatagagtcaaggcacctgtgtaccggacagaccgtgtaatgtttcaggataaagaatattccattgaagagatagaggctggcaggatcccaaacccacacctgggcccagtggaggagcgtctggctctgcatgtgcttcagcagcagggcctggtcccggagcacgtggagtcacggcccctctacagccccctgcagccagacatcgagcaggggaagctgcagatgtgggtcgacctatttccgaaggccctggggcggcctggacctcccttcaacatcaccccacggagagccagaaggtttttcctgcgttgtattatctggaataccagagatgtgatcctggatgacctgagcctcacgggggagaagatgagcgacatttatgtgaaaggttggatgattggctttgaagaacacaagcaaaagacagacgtgcattatcgttccctgggaggtgaaggcaacttcaactggaggttcattttccccttcgactacctgccagctgagcaagtctgtaccattgccaagaaggatgccttctggaggctggacaagactgagagcaaaatcccagcacgagtggtgttccagatctgggacaatgacaagttctcctttgatgattttctgggctccctgcagctcgatctcaaccgcatgcccaagccagccaagacagccaagaagtgctccttggaccagctggatgatgctttccacccagaatggtttgtgtccctttttgagcagaaaacagtgaagggctggtggccctgtgtagcagaagagggtgagaagaaaatactggcgggcaagctggaaatgaccttggagattgtagcagagagtgagcatgaggagcggcctgctggccagggccgggatgagcccaacatgaaccctaagcttgaggacccaaggcgccccgacacctccttcctgtggtttacctccccatacaagaccatgaagttcatcctgtggcggcgtttccggtgggccatcatcctcttcatcatcctcttcatcctgctgctgttcctggccatcttcatctacgccttcccgaactatgctgccatgaagctggtgaagcccttcagctgaggactctcctgccctgtagaaggggccgtggggtcccctccagcatgggactggcctgcctcctccgcccagctcggcgagctcctccagacctcctaggcctgattgtcctgccagggtgggcagacagacagatggaccggcccacactcccag

SEQ ID NO: 336 - DNA, 6606 bp, Homo sapiens
  source 1..6606: mol_type = genomic DNA
tctccgcggaggagcagcgaaggcgacagctctcttggcgcggctgcctgggagccgggcgcttgctgggtgggtgctcgggcccggtgctcccgctcccgccctgactgcgcgcctgtgtgccgccggggctgcccagccatgctgtgctgcctgctggtgagggccagcaacctccccagtgcgaagaaggaccggcgcagcgaccctgtcgcaagcctgactttccgaggggtgaagaagagaaccaaagtcatcaagaacagcgtgaaccctgtatggaatgagggatttgaatgggacctcaagggcatccccctggaccagggctctgagcttcatgtggtggtcaaagaccatgagacgatggggaggaacaggttcctgggggaagccaaggtcccactccgagaggtcctcgccacccctagtctgtccgccagcttcaatgcccccctgctggacaccaagaagcagcccacaggggcctcgctggtcctgcaggtgtcctacacaccgctgcctggagctgtgcccctgttcccgccccctactcctctggagccctccccgactctgcctgacctggatgtagtggcagacacaggaggagaggaagacacagaggaccagggactcactggagatgaggcggagccattcctggatcaaagcggaggcccgggggctcccaccaccccaaggaaactaccttcacgtcctccgccccactaccccgggatcaaaagaaagcgaagtgcgcctacatctagaaagctgctgtcagacaaaccgcaggatttccagatcagggtccaggtgatcgaggggcgccagctgccgggggtgaacatcaagcctgtggtcaaggttaccgctgcagggcagaccaagcggacgcggatccacaagggaaacagcccactcttcaatgagactcttttcttcaacttgtttgactctcctggggagctgtttgatgagcccatctttatcacggtggtagactctcgttctctcaggacagatgctctcctcggggagttccggatggacgtgggcaccatttacagagagccccggcacgcctatctcaggaagtggctgctgctctcagaccctgatgacttctctgctggggccagaggctacctgaaaacaagcctttgtgtgctggggcctggggacgaagcgcctctggagagaaaagacccctctgaagacaaggaggacattgaaagcaacctgctccggcccacaggcgtagccctgcgaggagcccacttctgcctgaaggtcttccgggccgaggacttgccgcagatggacgatgccgtgatggacaacgtgaaacagatctttggcttcgagagtaacaagaagaacttggtggacccctttgtggaggtcagctttgcggggaaaatgctgtgcagcaagatcttggagaagacggccaaccctcagtggaaccagaacatcacactgcctgccatgtttccctccatgtgcgaaaaaatgaggattcgtatcatagactgggaccgcctgactcacaatgacatcgtggctaccacctacctgagtatgtcgaaaatctctgcccctggaggagaaatagaagaggagcctgcaggtgctgtcaagccttcgaaagcctcagacttggatgactacctgggcttcctccccacttttgggccctgctacatcaacctctatggcagtcccagagagttcacaggcttcccagacccctacacagagctcaacacaggcaagggggaaggtgtggcttatcgtggccggcttctgctctccctggagaccaagctggtggagcacagtgaacagaaggtggaggaccttcctgcggatgacatcctccgggtggagaagtaccttaggaggcgcaagtactccctgtttgcggccttctactcagccaccatgctgcaggatgtggatgatgccatccagtttgaggtcagcatcgggaactacgggaacaagttcgacatgacctgcctgccgctggcctccaccactcagtacagccgtgcagtctttgacgggtgccactactactacctaccctggggtaacgtgaaacctgtggtggtgctgtcatcctactgggaggacatcagccatagaatcgagactcagaaccagctgcttgggattgctgaccggctggaagctggcctggagcaggtccacctggccctgaaggcgcagtgctccacggaggacgtggactcgctggtggctcagctgacggatgagctcatcgcaggctgcagccagcctctgggtgacatccatgagacaccctctgccacccacctggaccagtacctgtaccagctgcgcacccatcacctgagccaaatcactgaggctgccctggccctgaagctcggccacagtgagctccctgcagctctggagcaggcggaggactggctcctgcgtctgcgtgccctggcagaggagccccagaacagcctgccggacatcgtcatctggatgctgcagggagacaagcgtgtggcataccagcgggtgcccgcccaccaagtcctcttctcccggcggggtgccaactactgtggcaagaattgtgggaagctacagacaatctttctgaaatatccgatggagaaggtgcctggcgcccggatgccagtgcagatacgggtcaagctgtggtttgggctctcagtggatgagaaggagttcaaccagtttgctgaggggaagctgtctgtctttgctgaaacctatgagaacgagactaagttggcccttgttgggaactggggcacaacgggcctcacctaccccaagttttctgacgtcacgggcaagatcaagctacccaaggacagcttccgcccctcggccggctggacctgggctggagattggttcgtgtgtccggagaagactctgctccatgacatggacgccggtcacctgagcttcgtggaagaggtgtttgagaaccagacccggcttcccggaggccagtggatctacatgagtgacaactacaccgatgtgaacggggagaaggtgcttcccaaggatgacattgagtgcccactgggctggaagtgggaagatgaggaatggtccacagacctcaaccgggctgtcgatgagcaaggctgggagtatagcatcaccatccccccggagcggaagccgaagcactgggtccctgctgagaagatgtactacacacaccgacggcggcgctgggtgcgcctgcgcaggagggatctcagccaaatggaagcactgaaaaggcacaggcaggcggaggcggagggcgagggctgggagtacgcctctctttttggctggaagttccacctcgagtaccgcaagacagatgccttccgccgccgccgctggcgccgtcgcatggagccactggagaagacggggcctgcagctgtgtttgcccttgagggggccctgggcggcgtgatggatgacaagagtgaagattccatgtccgtctccaccttgagcttcggtgtgaacagacccacgatttcctgcatattcgactatgggaaccgctaccatctacgctgctacatgtaccaggcccgggacctggctgcgatggacaaggactctttttctgatccctatgccatcgtctccttcctgcaccagagccagaagacggtggtggtgaagaacacccttaaccccacctgggaccagacgctcatcttctacgagatcgagatctttggcgagccggccacagttgctgagcaaccgcccagcattgtggtggagctgtacgaccatgacacttatggtgcagacgagtttatgggtcgctgcatctgtcaaccgagtctggaacggatgccacggctggcctggttcccactgacgaggggcagccagccgtcgggggagctgctggcctcttttgagctcatccagagagagaagccggccatccaccatattcctggttttgaggtgcaggagacatcaaggatcctggatgagtctgaggacacagacctgccctacccaccaccccagagggaggccaacatctacatggttcctcagaacatcaagccagcgctccagcgtaccgccatcgagatcctggcatggggcctgcggaacatgaagagttaccagctggccaacatctcctcccccagcctcgtggtagagtgtgggggccagacggtgcagtcctgtgtcatcaggaacctccggaagaaccccaactttgacatctgcaccctcttcatggaagtgatgctgcccagggaggagctctactgcccccccatcaccgtcaaggtcatcgataaccgccagtttggccgccggcctgtggtgggccagtgtaccatccgctccctggagagcttcctgtgtgacccctactcggcggagagtccatccccacagggtggcccagacgatgtgagcctactcagtcctggggaagacgtgctcatcgacattgatgacaaggagcccctcatccccatccagcttgcagacggtctgtcgagcttggcccccactaacacggcttctcctccatccagtcctcatgaggaagagttcatcgattggtggagcaaattctttgcctccataggggagagggaaaagtgcggctcctacctggagaaggattttgacaccctgaaggtctatgacacacagctggagaatgtggaggcctttgagggcctgtctgacttttgtaacaccttcaagctgtaccggggcaagacgcaggaggagacagaagatccatctgtgattggtgaatttaagggcctcttcaaaatttatcccctcccagaagacccagccatccccatgcccccaagacagttccaccagctggccgcccagggaccccaggagtgcttggtccgtatctacattgtccgagcatttggcctgcagcccaaggaccccaatggaaagtgtgatccttacatcaagatctccatagggaagaaatcagtgagtgaccaggataactacatcccctgcacgctggagcccgtatttggaaagatgttcgagctgacctgcactctgcctctggagaaggacctaaagatcactctctatgactatgacctcctctccaaggacgaaaagatcggtgagacggtcgtcgacctggagaacaggctgctgtccaagtttggggctcgctgtggactcccacagacctactgtgtctctggaccgaaccagtggcgggaccagctccgcccctcccagctcctccacctcttctgccagcagcatagagtcaaggcacctgtgtaccggacagaccgtgtaatgtttcaggataaagaatattccattgaagagatagaggctggcaggatcccaaacccacacctgggcccagtggaggagcgtctggctctgcatgtgcttcagcagcagggcctggtcccggagcacgtggagtcacggcccctctacagccccctgcagccagacatcgagcaggggaagctgcagatgtgggtcgacctatttccgaaggccctggggcggcctggacctcccttcaacatcaccccacggagagccagaaggtttttcctgcgttgtattatctggaataccagagatgtgatcctggatgacctgagcctcacgggggagaagatgagcgacatttatgtgaaaggttggatgattggctttgaagaacacaagcaaaagacagacgtgcattatcgttccctgggaggtgaaggcaacttcaactggaggttcattttccccttcgactacctgccagctgagcaagtctgtaccattgccaagaaggatgccttctggaggctggacaagactgagagcaaaatcccagcacgagtggtgttccagatctgggacaatgacaagttctcctttgatgattttctgggctccctgcagctcgatctcaaccgcatgcccaagccagccaagacagccaagaagtgctccttggaccagctggatgatgctttccacccagaatggtttgtgtccctttttgagcagaaaacagtgaagggctggtggccctgtgtagcagaagagggtgagaagaaaatactggcgggcaagctggaaatgaccttggagattgtagcagagagtgagcatgaggagcggcctgctggccagggccgggatgagcccaacatgaaccctaagcttgaggacccaaggcgccccgacacctccttcctgtggtttacctccccatacaagaccatgaagttcatcctgtggcggcgtttccggtgggccatcatcctcttcatcatcctcttcatcctgctgctgttcctggccatcttcatctacgccttcccgaactatgctgccatgaagctggtgaagcccttcagctgaggactctcctgccctgtagaaggggccgtggggtcccctccagcatgggactggcctgcctcctccgcccagctcggcgagctcctccagacctcctaggcctgattgtcctgccagggtgggcagacagacagatggaccggcccacactcccag

SEQ ID NO: 337 - DNA, 6790 bp, Homo sapiens
  source 1..6790: mol_type = genomic DNA
gggtggaagatgagcagaagcccctgttctcggaacgccggctgacaagcggggtgagcgcagccggggcggggacccagcctagcccactggagcagccgggggtggcccgttcccctttaagagcaactgctctaagccaggagccagagattcgagccggcctcgcccagccagccctctccagcgaggggacccacaagcggcgcctcggccctcccgacctttccgagccctctttgcgccctgggcgcacggggccctacacgcgccaagcatgctgagggtcttcatcctctatgccgagaacgtccacacacccgacaccgacatcagcgatgcctactgctccgcggtgtttgcaggggtgaagaagagaaccaaagtcatcaagaacagcgtgaaccctgtatggaatgagggatttgaatgggacctcaagggcatccccctggaccagggctctgagcttcatgtggtggtcaaagaccatgagacgatggggaggaacaggttcctgggggaagccaaggtcccactccgagaggtcctcgccacccctagtctgtccgccagcttcaatgcccccctgctggacaccaagaagcagcccacaggggcctcgctggtcctgcaggtgtcctacacaccgctgcctggagctgtgcccctgttcccgccccctactcctctggagccctccccgactctgcctgacctggatgtagtggcaggcgggggacagagccgggccgagacttggtccctgctcagtgacagcaccatggacacgagatactctggaaagaagtggccggcccccacggacacaggaggagaggaagacacagaggaccagggactcactggagatgaggcggagccattcctggatcaaagcggaggcccgggggctcccaccaccccaaggaaactaccttcacgtcctccgccccactaccccgggatcaaaagaaagcgaagtgcgcctacatctagaaagctgctgtcagacaaaccgcaggatttccagatcagggtccaggtgatcgaggggcgccagctgccgggggtgaacatcaagcctgtggtcaaggttaccgctgcagggcagaccaagcggacgcggatccacaagggaaacagcccactcttcaatgagactcttttcttcaacttgtttgactctcctggggagctgtttgatgagcccatctttatcacggtggtagactctcgttctctcaggacagatgctctcctcggggagttccggatggacgtgggcaccatttacagagagccccggcacgcctatctcaggaagtggctgctgctctcagaccctgatgacttctctgctggggccagaggctacctgaaaacaagcctttgtgtgctggggcctggggacgaagcgcctctggagagaaaagacccctctgaagacaaggaggacattgaaagcaacctgctccggcccacaggcgtagccctgcgaggagcccacttctgcctgaaggtcttccgggccgaggacttgccgcagatggacgatgccgtgatggacaacgtgaaacagatctttggcttcgagagtaacaagaagaacttggtggacccctttgtggaggtcagctttgcggggaaaatgctgtgcagcaagatcttggagaagacggccaaccctcagtggaaccagaacatcacactgcctgccatgtttccctccatgtgcgaaaaaatgaggattcgtatcatagactgggaccgcctgactcacaatgacatcgtggctaccacctacctgagtatgtcgaaaatctctgcccctggaggagaaatagaagtggatgactacctgggcttcctccccacttttgggccctgctacatcaacctctatggcagtcccagagagttcacaggcttcccagacccctacacagagctcaacacaggcaagggggaaggtgtggcttatcgtggccggcttctgctctccctggagaccaagctggtggagcacagtgaacagaaggtggaggaccttcctgcggatgacatcctccgggtggagaagtaccttaggaggcgcaagtactccctgtttgcggccttctactcagccaccatgctgcaggatgtggatgatgccatccagtttgaggtcagcatcgggaactacgggaacaagttcgacatgacctgcctgccgctggcctccaccactcagtacagccgtgcagtctttgacgggtgccactactactacctaccctggggtaacgtgaaacctgtggtggtgctgtcatcctactgggaggacatcagccatagaatcgagactcagaaccagctgcttgggattgctgaccggctggaagctggcctggagcaggtccacctggccctgaaggcgcagtgctccacggaggacgtggactcgctggtggctcagctgacggatgagctcatcgcaggctgcagccagcctctgggtgacatccatgagacaccctctgccacccacctggaccagtacctgtaccagctgcgcacccatcacctgagccaaatcactgaggctgccctggccctgaagctcggccacagtgagctccctgcagctctggagcaggcggaggactggctcctgcgtctgcgtgccctggcagaggagccccagaacagcctgccggacatcgtcatctggatgctgcagggagacaagcgtgtggcataccagcgggtgcccgcccaccaagtcctcttctcccggcggggtgccaactactgtggcaagaattgtgggaagctacagacaatctttctgaaatatccgatggagaaggtgcctggcgcccggatgccagtgcagatacgggtcaagctgtggtttgggctctcagtggatgagaaggagttcaaccagtttgctgaggggaagctgtctgtctttgctgaaacctatgagaacgagactaagttggcccttgttgggaactggggcacaacgggcctcacctaccccaagttttctgacgtcacgggcaagatcaagctacccaaggacagcttccgcccctcggccggctggacctgggctggagattggttcgtgtgtccggagaagactctgctccatgacatggacgccggtcacctgagcttcgtggaagaggtgtttgagaaccagacccggcttcccggaggccagtggatctacatgagtgacaactacaccgatgtgaacggggagaaggtgcttcccaaggatgacattgagtgcccactgggctggaagtgggaagatgaggaatggtccacagacctcaaccgggctgtcgatgagcaaggctgggagtatagcatcaccatccccccggagcggaagccgaagcactgggtccctgctgagaagatgtactacacacaccgacggcggcgctgggtgcgcctgcgcaggagggatctcagccaaatggaagcactgaaaaggcacaggcaggcggaggcggagggcgagggctgggagtacgcctctctttttggctggaagttccacctcgagtaccgcaagacagatgccttccgccgccgccgctggcgccgtcgcatggagccactggagaagacggggcctgcagctgtgtttgcccttgagggggccctgggcggcgtgatggatgacaagagtgaagattccatgtccgtctccaccttgagcttcggtgtgaacagacccacgatttcctgcatattcgactatgggaaccgctaccatctacgctgctacatgtaccaggcccgggacctggctgcgatggacaaggactctttttctgatccctatgccatcgtctccttcctgcaccagagccagaagacggtggtggtgaagaacacccttaaccccacctgggaccagacgctcatcttctacgagatcgagatctttggcgagccggccacagttgctgagcaaccgcccagcattgtggtggagctgtacgaccatgacacttatggtgcagacgagtttatgggtcgctgcatctgtcaaccgagtctggaacggatgccacggctggcctggttcccactgacgaggggcagccagccgtcgggggagctgctggcctcttttgagctcatccagagagagaagccggccatccaccatattcctggttttgaggtgcaggagacatcaaggatcctggatgagtctgaggacacagacctgccctacccaccaccccagagggaggccaacatctacatggttcctcagaacatcaagccagcgctccagcgtaccgccatcgagatcctggcatggggcctgcggaacatgaagagttaccagctggccaacatctcctcccccagcctcgtggtagagtgtgggggccagacggtgcagtcctgtgtcatcaggaacctccggaagaaccccaactttgacatctgcaccctcttcatggaagtgatgctgcccagggaggagctctactgcccccccatcaccgtcaaggtcatcgataaccgccagtttggccgccggcctgtggtgggccagtgtaccatccgctccctggagagcttcctgtgtgacccctactcggcggagagtccatccccacagggtggcccagacgatgtgagcctactcagtcctggggaagacgtgctcatcgacattgatgacaaggagcccctcatccccatccagcttgcagacggtctgtcgagcttggcccccactaacacggcttctcctccatccagtcctcatgaggaagagttcatcgattggtggagcaaattctttgcctccataggggagagggaaaagtgcggctcctacctggagaaggattttgacaccctgaaggtctatgacacacagctggagaatgtggaggcctttgagggcctgtctgacttttgtaacaccttcaagctgtaccggggcaagacgcaggaggagacagaagatccatctgtgattggtgaatttaagggcctcttcaaaatttatcccctcccagaagacccagccatccccatgcccccaagacagttccaccagctggccgcccagggaccccaggagtgcttggtccgtatctacattgtccgagcatttggcctgcagcccaaggaccccaatggaaagtgtgatccttacatcaagatctccatagggaagaaatcagtgagtgaccaggataactacatcccctgcacgctggagcccgtatttggaaagatgttcgagctgacctgcactctgcctctggagaaggacctaaagatcactctctatgactatgacctcctctccaaggacgaaaagatcggtgagacggtcgtcgacctggagaacaggctgctgtccaagtttggggctcgctgtggactcccacagacctactgtgtctctggaccgaaccagtggcgggaccagctccgcccctcccagctcctccacctcttctgccagcagcatagagtcaaggcacctgtgtaccggacagaccgtgtaatgtttcaggataaagaatattccattgaagagatagaggctggcaggatcccaaacccacacctgggcccagtggaggagcgtctggctctgcatgtgcttcagcagcagggcctggtcccggagcacgtggagtcacggcccctctacagccccctgcagccagacatcgagcaggggaagctgcagatgtgggtcgacctatttccgaaggccctggggcggcctggacctcccttcaacatcaccccacggagagccagaaggtttttcctgcgttgtattatctggaataccagagatgtgatcctggatgacctgagcctcacgggggagaagatgagcgacatttatgtgaaaggttggatgattggctttgaagaacacaagcaaaagacagacgtgcattatcgttccctgggaggtgaaggcaacttcaactggaggttcattttccccttcgactacctgccagctgagcaagtctgtaccattgccaagaaggatgccttctggaggctggacaagactgagagcaaaatcccagcacgagtggtgttccagatctgggacaatgacaagttctcctttgatgattttctgggctccctgcagctcgatctcaaccgcatgcccaagccagccaagacagccaagaagtgctccttggaccagctggatgatgctttccacccagaatggtttgtgtccctttttgagcagaaaacagtgaagggctggtggccctgtgtagcagaagagggtgagaagaaaatactggcgggcaagctggaaatgaccttggagattgtagcagagagtgagcatgaggagcggcctgctggccagggccgggatgagcccaacatgaaccctaagcttgaggacccaaggcgccccgacacctccttcctgtggtttacctccccatacaagaccatgaagttcatcctgtggcggcgtttccggtgggccatcatcctcttcatcatcctcttcatcctgctgctgttcctggccatcttcatctacgccttcccgaactatgctgccatgaagctggtgaagcccttcagctgaggactctcctgccctgtagaaggggccgtggggtcccctccagcatgggactggcctgcctcctccgcccagctcggcgagctcctccagacctcctaggcctgattgtcctgccagggtgggcagacagacagatggaccggcccacactcccag

SEQ ID NO: 338 - DNA, 6636 bp, Homo sapiens
  source 1..6636: mol_type = genomic DNA
tctccgcggaggagcagcgaaggcgacagctctcttggcgcggctgcctgggagccgggcgcttgctgggtgggtgctcgggcccggtgctcccgctcccgccctgactgcgcgcctgtgtgccgccggggctgcccagccatgctgtgctgcctgctggtgagggccagcaacctccccagtgcgaagaaggaccggcgcagcgaccctgtcgcaagcctgactttccgaggggtgaagaagagaaccaaagtcatcaagaacagcgtgaaccctgtatggaatgagggatttgaatgggacctcaagggcatccccctggaccagggctctgagcttcatgtggtggtcaaagaccatgagacgatggggaggaacaggttcctgggggaagccaaggtcccactccgagaggtcctcgccacccctagtctgtccgccagcttcaatgcccccctgctggacaccaagaagcagcccacaggggcctcgctggtcctgcaggtgtcctacacaccgctgcctggagctgtgcccctgttcccgccccctactcctctggagccctccccgactctgcctgacctggatgtagtggcaggcgggggacagagccgggccgagacttggtccctgctcagtgacagcaccatggacacgagatactctggaaagaagtggccggcccccacggacacaggaggagaggaagacacagaggaccagggactcactggagatgaggcggagccattcctggatcaaagcggaggcccgggggctcccaccaccccaaggaaactaccttcacgtcctccgccccactaccccgggatcaaaagaaagcgaagtgcgcctacatctagaaagctgctgtcagacaaaccgcaggatttccagatcagggtccaggtgatcgaggggcgccagctgccgggggtgaacatcaagcctgtggtcaaggttaccgctgcagggcagaccaagcggacgcggatccacaagggaaacagcccactcttcaatgagactcttttcttcaacttgtttgactctcctggggagctgtttgatgagcccatctttatcacggtggtagactctcgttctctcaggacagatgctctcctcggggagttccggatggacgtgggcaccatttacagagagccccggcacgcctatctcaggaagtggctgctgctctcagaccctgatgacttctctgctggggccagaggctacctgaaaacaagcctttgtgtgctggggcctggggacgaagcgcctctggagagaaaagacccctctgaagacaaggaggacattgaaagcaacctgctccggcccacaggcgtagccctgcgaggagcccacttctgcctgaaggtcttccgggccgaggacttgccgcagatggacgatgccgtgatggacaacgtgaaacagatctttggcttcgagagtaacaagaagaacttggtggacccctttgtggaggtcagctttgcggggaaaatgctgtgcagcaagatcttggagaagacggccaaccctcagtggaaccagaacatcacactgcctgccatgtttccctccatgtgcgaaaaaatgaggattcgtatcatagactgggaccgcctgactcacaatgacatcgtggctaccacctacctgagtatgtcgaaaatctctgcccctggaggagaaatagaagaggagcctgcaggtgctgtcaagccttcgaaagcctcagacttggatgactacctgggcttcctccccacttttgggccctgctacatcaacctctatggcagtcccagagagttcacaggcttcccagacccctacacagagctcaacacaggcaagggggaaggtgtggcttatcgtggccggcttctgctctccctggagaccaagctggtggagcacagtgaacagaaggtggaggaccttcctgcggatgacatcctccgggtggagaagtaccttaggaggcgcaagtactccctgtttgcggccttctactcagccaccatgctgcaggatgtggatgatgccatccagtttgaggtcagcatcgggaactacgggaacaagttcgacatgacctgcctgccgctggcctccaccactcagtacagccgtgcagtctttgacgggtgccactactactacctaccctggggtaacgtgaaacctgtggtggtgctgtcatcctactgggaggacatcagccatagaatcgagactcagaaccagctgcttgggattgctgaccggctggaagctggcctggagcaggtccacctggccctgaaggcgcagtgctccacggaggacgtggactcgctggtggctcagctgacggatgagctcatcgcaggctgcagccagcctctgggtgacatccatgagacaccctctgccacccacctggaccagtacctgtaccagctgcgcacccatcacctgagccaaatcactgaggctgccctggccctgaagctcggccacagtgagctccctgcagctctggagcaggcggaggactggctcctgcgtctgcgtgccctggcagaggagccccagaacagcctgccggacatcgtcatctggatgctgcagggagacaagcgtgtggcataccagcgggtgcccgcccaccaagtcctcttctcccggcggggtgccaactactgtggcaagaattgtgggaagctacagacaatctttctgaaatatccgatggagaaggtgcctggcgcccggatgccagtgcagatacgggtcaagctgtggtttgggctctcagtggatgagaaggagttcaaccagtttgctgaggggaagctgtctgtctttgctgaaacctatgagaacgagactaagttggcccttgttgggaactggggcacaacgggcctcacctaccccaagttttctgacgtcacgggcaagatcaagctacccaaggacagcttccgcccctcggccggctggacctgggctggagattggttcgtgtgtccggagaagactctgctccatgacatggacgccggtcacctgagcttcgtggaagaggtgtttgagaaccagacccggcttcccggaggccagtggatctacatgagtgacaactacaccgatgtgaacggggagaaggtgcttcccaaggatgacattgagtgcccactgggctggaagtgggaagatgaggaatggtccacagacctcaaccgggctgtcgatgagcaaggctgggagtatagcatcaccatccccccggagcggaagccgaagcactgggtccctgctgagaagatgtactacacacaccgacggcggcgctgggtgcgcctgcgcaggagggatctcagccaaatggaagcactgaaaaggcacaggcaggcggaggcggagggcgagggctgggagtacgcctctctttttggctggaagttccacctcgagtaccgcaagacagatgccttccgccgccgccgctggcgccgtcgcatggagccactggagaagacggggcctgcagctgtgtttgcccttgagggggccctgggcggcgtgatggatgacaagagtgaagattccatgtccgtctccaccttgagcttcggtgtgaacagacccacgatttcctgcatattcgactatgggaaccgctaccatctacgctgctacatgtaccaggcccgggacctggctgcgatggacaaggactctttttctgatccctatgccatcgtctccttcctgcaccagagccagaagacggtggtggtgaagaacacccttaaccccacctgggaccagacgctcatcttctacgagatcgagatctttggcgagccggccacagttgctgagcaaccgcccagcattgtggtggagctgtacgaccatgacacttatggtgcagacgagtttatgggtcgctgcatctgtcaaccgagtctggaacggatgccacggctggcctggttcccactgacgaggggcagccagccgtcgggggagctgctggcctcttttgagctcatccagagagagaagccggccatccaccatattcctggttttgaggtgcaggagacatcaaggatcctggatgagtctgaggacacagacctgccctacccaccaccccagagggaggccaacatctacatggttcctcagaacatcaagccagcgctccagcgtaccgccatcgagatcctggcatggggcctgcggaacatgaagagttaccagctggccaacatctcctcccccagcctcgtggtagagtgtgggggccagacggtgcagtcctgtgtcatcaggaacctccggaagaaccccaactttgacatctgcaccctcttcatggaagtgatgctgcccagggaggagctctactgcccccccatcaccgtcaaggtcatcgataaccgccagtttggccgccggcctgtggtgggccagtgtaccatccgctccctggagagcttcctgtgtgacccctactcggcggagagtccatccccacagggtggcccagacgatgtgagcctactcagtcctggggaagacgtgctcatcgacattgatgacaaggagcccctcatccccatccaggaggaagagttcatcgattggtggagcaaattctttgcctccataggggagagggaaaagtgcggctcctacctggagaaggattttgacaccctgaaggtctatgacacacagctggagaatgtggaggcctttgagggcctgtctgacttttgtaacaccttcaagctgtaccggggcaagacgcaggaggagacagaagatccatctgtgattggtgaatttaagggcctcttcaaaatttatcccctcccagaagacccagccatccccatgcccccaagacagttccaccagctggccgcccagggaccccaggagtgcttggtccgtatctacattgtccgagcatttggcctgcagcccaaggaccccaatggaaagtgtgatccttacatcaagatctccatagggaagaaatcagtgagtgaccaggataactacatcccctgcacgctggagcccgtatttggaaagatgttcgagctgacctgcactctgcctctggagaaggacctaaagatcactctctatgactatgacctcctctccaaggacgaaaagatcggtgagacggtcgtcgacctggagaacaggctgctgtccaagtttggggctcgctgtggactcccacagacctactgtgtctctggaccgaaccagtggcgggaccagctccgcccctcccagctcctccacctcttctgccagcagcatagagtcaaggcacctgtgtaccggacagaccgtgtaatgtttcaggataaagaatattccattgaagagatagaggctggcaggatcccaaacccacacctgggcccagtggaggagcgtctggctctgcatgtgcttcagcagcagggcctggtcccggagcacgtggagtcacggcccctctacagccccctgcagccagacatcgagcaggggaagctgcagatgtgggtcgacctatttccgaaggccctggggcggcctggacctcccttcaacatcaccccacggagagccagaaggtttttcctgcgttgtattatctggaataccagagatgtgatcctggatgacctgagcctcacgggggagaagatgagcgacatttatgtgaaaggttggatgattggctttgaagaacacaagcaaaagacagacgtgcattatcgttccctgggaggtgaaggcaacttcaactggaggttcattttccccttcgactacctgccagctgagcaagtctgtaccattgccaagaaggatgccttctggaggctggacaagactgagagcaaaatcccagcacgagtggtgttccagatctgggacaatgacaagttctcctttgatgattttctgggctccctgcagctcgatctcaaccgcatgcccaagccagccaagacagccaagaagtgctccttggaccagctggatgatgctttccacccagaatggtttgtgtccctttttgagcagaaaacagtgaagggctggtggccctgtgtagcagaagagggtgagaagaaaatactggcgggcaagctggaaatgaccttggagattgtagcagagagtgagcatgaggagcggcctgctggccagggccgggatgagcccaacatgaaccctaagcttgaggacccaaggcgccccgacacctccttcctgtggtttacctccccatacaagaccatgaagttcatcctgtggcggcgtttccggtgggccatcatcctcttcatcatcctcttcatcctgctgctgttcctggccatcttcatctacgccttcccgaactatgctgccatgaagctggtgaagcccttcagctgaggactctcctgccctgtagaaggggccgtggggtcccctccagcatgggactggcctgcctcctccgcccagctcggcgagctcctccagacctcctaggcctgattgtcctgccagggtgggcagacagacagatggaccggcccacactcccag

SEQ ID NO: 339 - DNA, 6564 bp, Homo sapiens
  source 1..6564: mol_type = genomic DNA
tctccgcggaggagcagcgaaggcgacagctctcttggcgcggctgcctgggagccgggcgcttgctgggtgggtgctcgggcccggtgctcccgctcccgccctgactgcgcgcctgtgtgccgccggggctgcccagccatgctgtgctgcctgctggtgagggccagcaacctccccagtgcgaagaaggaccggcgcagcgaccctgtcgcaagcctgactttccgaggggtgaagaagagaaccaaagtcatcaagaacagcgtgaaccctgtatggaatgagggatttgaatgggacctcaagggcatccccctggaccagggctctgagcttcatgtggtggtcaaagaccatgagacgatggggaggaacaggttcctgggggaagccaaggtcccactccgagaggtcctcgccacccctagtctgtccgccagcttcaatgcccccctgctggacaccaagaagcagcccacaggggcctcgctggtcctgcaggtgtcctacacaccgctgcctggagctgtgcccctgttcccgccccctactcctctggagccctccccgactctgcctgacctggatgtagtggcagacacaggaggagaggaagacacagaggaccagggactcactggagatgaggcggagccattcctggatcaaagcggaggcccgggggctcccaccaccccaaggaaactaccttcacgtcctccgccccactaccccgggatcaaaagaaagcgaagtgcgcctacatctagaaagctgctgtcagacaaaccgcaggatttccagatcagggtccaggtgatcgaggggcgccagctgccgggggtgaacatcaagcctgtggtcaaggttaccgctgcagggcagaccaagcggacgcggatccacaagggaaacagcccactcttcaatgagactcttttcttcaacttgtttgactctcctggggagctgtttgatgagcccatctttatcacggtggtagactctcgttctctcaggacagatgctctcctcggggagttccggatggacgtgggcaccatttacagagagccccggcacgcctatctcaggaagtggctgctgctctcagaccctgatgacttctctgctggggccagaggctacctgaaaacaagcctttgtgtgctggggcctggggacgaagcgcctctggagagaaaagacccctctgaagacaaggaggacattgaaagcaacctgctccggcccacaggcgtagccctgcgaggagcccacttctgcctgaaggtcttccgggccgaggacttgccgcagatggacgatgccgtgatggacaacgtgaaacagatctttggcttcgagagtaacaagaagaacttggtggacccctttgtggaggtcagctttgcggggaaaatgctgtgcagcaagatcttggagaagacggccaaccctcagtggaaccagaacatcacactgcctgccatgtttccctccatgtgcgaaaaaatgaggattcgtatcatagactgggaccgcctgactcacaatgacatcgtggctaccacctacctgagtatgtcgaaaatctctgcccctggaggagaaatagaagtggatgactacctgggcttcctccccacttttgggccctgctacatcaacctctatggcagtcccagagagttcacaggcttcccagacccctacacagagctcaacacaggcaagggggaaggtgtggcttatcgtggccggcttctgctctccctggagaccaagctggtggagcacagtgaacagaaggtggaggaccttcctgcggatgacatcctccgggtggagaagtaccttaggaggcgcaagtactccctgtttgcggccttctactcagccaccatgctgcaggatgtggatgatgccatccagtttgaggtcagcatcgggaactacgggaacaagttcgacatgacctgcctgccgctggcctccaccactcagtacagccgtgcagtctttgacgggtgccactactactacctaccctggggtaacgtgaaacctgtggtggtgctgtcatcctactgggaggacatcagccatagaatcgagactcagaaccagctgcttgggattgctgaccggctggaagctggcctggagcaggtccacctggccctgaaggcgcagtgctccacggaggacgtggactcgctggtggctcagctgacggatgagctcatcgcaggctgcagccagcctctgggtgacatccatgagacaccctctgccacccacctggaccagtacctgtaccagctgcgcacccatcacctgagccaaatcactgaggctgccctggccctgaagctcggccacagtgagctccctgcagctctggagcaggcggaggactggctcctgcgtctgcgtgccctggcagaggagccccagaacagcctgccggacatcgtcatctggatgctgcagggagacaagcgtgtggcataccagcgggtgcccgcccaccaagtcctcttctcccggcggggtgccaactactgtggcaagaattgtgggaagctacagacaatctttctgaaatatccgatggagaaggtgcctggcgcccggatgccagtgcagatacgggtcaagctgtggtttgggctctcagtggatgagaaggagttcaaccagtttgctgaggggaagctgtctgtctttgctgaaacctatgagaacgagactaagttggcccttgttgggaactggggcacaacgggcctcacctaccccaagttttctgacgtcacgggcaagatcaagctacccaaggacagcttccgcccctcggccggctggacctgggctggagattggttcgtgtgtccggagaagactctgctccatgacatggacgccggtcacctgagcttcgtggaagaggtgtttgagaaccagacccggcttcccggaggccagtggatctacatgagtgacaactacaccgatgtgaacggggagaaggtgcttcccaaggatgacattgagtgcccactgggctggaagtgggaagatgaggaatggtccacagacctcaaccgggctgtcgatgagcaaggctgggagtatagcatcaccatccccccggagcggaagccgaagcactgggtccctgctgagaagatgtactacacacaccgacggcggcgctgggtgcgcctgcgcaggagggatctcagccaaatggaagcactgaaaaggcacaggcaggcggaggcggagggcgagggctgggagtacgcctctctttttggctggaagttccacctcgagtaccgcaagacagatgccttccgccgccgccgctggcgccgtcgcatggagccactggagaagacggggcctgcagctgtgtttgcccttgagggggccctgggcggcgtgatggatgacaagagtgaagattccatgtccgtctccaccttgagcttcggtgtgaacagacccacgatttcctgcatattcgactatgggaaccgctaccatctacgctgctacatgtaccaggcccgggacctggctgcgatggacaaggactctttttctgatccctatgccatcgtctccttcctgcaccagagccagaagacggtggtggtgaagaacacccttaaccccacctgggaccagacgctcatcttctacgagatcgagatctttggcgagccggccacagttgctgagcaaccgcccagcattgtggtggagctgtacgaccatgacacttatggtgcagacgagtttatgggtcgctgcatctgtcaaccgagtctggaacggatgccacggctggcctggttcccactgacgaggggcagccagccgtcgggggagctgctggcctcttttgagctcatccagagagagaagccggccatccaccatattcctggttttgaggtgcaggagacatcaaggatcctggatgagtctgaggacacagacctgccctacccaccaccccagagggaggccaacatctacatggttcctcagaacatcaagccagcgctccagcgtaccgccatcgagatcctggcatggggcctgcggaacatgaagagttaccagctggccaacatctcctcccccagcctcgtggtagagtgtgggggccagacggtgcagtcctgtgtcatcaggaacctccggaagaaccccaactttgacatctgcaccctcttcatggaagtgatgctgcccagggaggagctctactgcccccccatcaccgtcaaggtcatcgataaccgccagtttggccgccggcctgtggtgggccagtgtaccatccgctccctggagagcttcctgtgtgacccctactcggcggagagtccatccccacagggtggcccagacgatgtgagcctactcagtcctggggaagacgtgctcatcgacattgatgacaaggagcccctcatccccatccagcttgcagacggtctgtcgagcttggcccccactaacacggcttctcctccatccagtcctcatgaggaagagttcatcgattggtggagcaaattctttgcctccataggggagagggaaaagtgcggctcctacctggagaaggattttgacaccctgaaggtctatgacacacagctggagaatgtggaggcctttgagggcctgtctgacttttgtaacaccttcaagctgtaccggggcaagacgcaggaggagacagaagatccatctgtgattggtgaatttaagggcctcttcaaaatttatcccctcccagaagacccagccatccccatgcccccaagacagttccaccagctggccgcccagggaccccaggagtgcttggtccgtatctacattgtccgagcatttggcctgcagcccaaggaccccaatggaaagtgtgatccttacatcaagatctccatagggaagaaatcagtgagtgaccaggataactacatcccctgcacgctggagcccgtatttggaaagatgttcgagctgacctgcactctgcctctggagaaggacctaaagatcactctctatgactatgacctcctctccaaggacgaaaagatcggtgagacggtcgtcgacctggagaacaggctgctgtccaagtttggggctcgctgtggactcccacagacctactgtgtctctggaccgaaccagtggcgggaccagctccgcccctcccagctcctccacctcttctgccagcagcatagagtcaaggcacctgtgtaccggacagaccgtgtaatgtttcaggataaagaatattccattgaagagatagaggctggcaggatcccaaacccacacctgggcccagtggaggagcgtctggctctgcatgtgcttcagcagcagggcctggtcccggagcacgtggagtcacggcccctctacagccccctgcagccagacatcgagcaggggaagctgcagatgtgggtcgacctatttccgaaggccctggggcggcctggacctcccttcaacatcaccccacggagagccagaaggtttttcctgcgttgtattatctggaataccagagatgtgatcctggatgacctgagcctcacgggggagaagatgagcgacatttatgtgaaaggttggatgattggctttgaagaacacaagcaaaagacagacgtgcattatcgttccctgggaggtgaaggcaacttcaactggaggttcattttccccttcgactacctgccagctgagcaagtctgtaccattgccaagaaggatgccttctggaggctggacaagactgagagcaaaatcccagcacgagtggtgttccagatctgggacaatgacaagttctcctttgatgattttctgggctccctgcagctcgatctcaaccgcatgcccaagccagccaagacagccaagaagtgctccttggaccagctggatgatgctttccacccagaatggtttgtgtccctttttgagcagaaaacagtgaagggctggtggccctgtgtagcagaagagggtgagaagaaaatactggcgggcaagctggaaatgaccttggagattgtagcagagagtgagcatgaggagcggcctgctggccagggccgggatgagcccaacatgaaccctaagcttgaggacccaaggcgccccgacacctccttcctgtggtttacctccccatacaagaccatgaagttcatcctgtggcggcgtttccggtgggccatcatcctcttcatcatcctcttcatcctgctgctgttcctggccatcttcatctacgccttcccgaactatgctgccatgaagctggtgaagcccttcagctgaggactctcctgccctgtagaaggggccgtggggtcccctccagcatgggactggcctgcctcctccgcccagctcggcgagctcctccagacctcctaggcctgattgtcctgccagggtgggcagacagacagatggaccggcccacactcccag

SEQ ID NO: 340 - DNA, 6727 bp, Homo sapiens
  source 1..6727: mol_type = genomic DNA
gggtggaagatgagcagaagcccctgttctcggaacgccggctgacaagcggggtgagcgcagccggggcggggacccagcctagcccactggagcagccgggggtggcccgttcccctttaagagcaactgctctaagccaggagccagagattcgagccggcctcgcccagccagccctctccagcgaggggacccacaagcggcgcctcggccctcccgacctttccgagccctctttgcgccctgggcgcacggggccctacacgcgccaagcatgctgagggtcttcatcctctatgccgagaacgtccacacacccgacaccgacatcagcgatgcctactgctccgcggtgtttgcaggggtgaagaagagaaccaaagtcatcaagaacagcgtgaaccctgtatggaatgagggatttgaatgggacctcaagggcatccccctggaccagggctctgagcttcatgtggtggtcaaagaccatgagacgatggggaggaacaggttcctgggggaagccaaggtcccactccgagaggtcctcgccacccctagtctgtccgccagcttcaatgcccccctgctggacaccaagaagcagcccacaggggcctcgctggtcctgcaggtgtcctacacaccgctgcctggagctgtgcccctgttcccgccccctactcctctggagccctccccgactctgcctgacctggatgtagtggcaggcgggggacagagccgggccgagacttggtccctgctcagtgacagcaccatggacacgagatactctggaaagaagtggccggcccccacggacacaggaggagaggaagacacagaggaccagggactcactggagatgaggcggagccattcctggatcaaagcggaggcccgggggctcccaccaccccaaggaaactaccttcacgtcctccgccccactaccccgggatcaaaagaaagcgaagtgcgcctacatctagaaagctgctgtcagacaaaccgcaggatttccagatcagggtccaggtgatcgaggggcgccagctgccgggggtgaacatcaagcctgtggtcaaggttaccgctgcagggcagaccaagcggacgcggatccacaagggaaacagcccactcttcaatgagactcttttcttcaacttgtttgactctcctggggagctgtttgatgagcccatctttatcacggtggtagactctcgttctctcaggacagatgctctcctcggggagttccggatggacgtgggcaccatttacagagagccccggcacgcctatctcaggaagtggctgctgctctcagaccctgatgacttctctgctggggccagaggctacctgaaaacaagcctttgtgtgctggggcctggggacgaagcgcctctggagagaaaagacccctctgaagacaaggaggacattgaaagcaacctgctccggcccacaggcgtagccctgcgaggagcccacttctgcctgaaggtcttccgggccgaggacttgccgcagatggacgatgccgtgatggacaacgtgaaacagatctttggcttcgagagtaacaagaagaacttggtggacccctttgtggaggtcagctttgcggggaaaatgctgtgcagcaagatcttggagaagacggccaaccctcagtggaaccagaacatcacactgcctgccatgtttccctccatgtgcgaaaaaatgaggattcgtatcatagactgggaccgcctgactcacaatgacatcgtggctaccacctacctgagtatgtcgaaaatctctgcccctggaggagaaatagaagtggatgactacctgggcttcctccccacttttgggccctgctacatcaacctctatggcagtcccagagagttcacaggcttcccagacccctacacagagctcaacacaggcaagggggaaggtgtggcttatcgtggccggcttctgctctccctggagaccaagctggtggagcacagtgaacagaaggtggaggaccttcctgcggatgacatcctccgggtggagaagtaccttaggaggcgcaagtactccctgtttgcggccttctactcagccaccatgctgcaggatgtggatgatgccatccagtttgaggtcagcatcgggaactacgggaacaagttcgacatgacctgcctgccgctggcctccaccactcagtacagccgtgcagtctttgacgggtgccactactactacctaccctggggtaacgtgaaacctgtggtggtgctgtcatcctactgggaggacatcagccatagaatcgagactcagaaccagctgcttgggattgctgaccggctggaagctggcctggagcaggtccacctggccctgaaggcgcagtgctccacggaggacgtggactcgctggtggctcagctgacggatgagctcatcgcaggctgcagccagcctctgggtgacatccatgagacaccctctgccacccacctggaccagtacctgtaccagctgcgcacccatcacctgagccaaatcactgaggctgccctggccctgaagctcggccacagtgagctccctgcagctctggagcaggcggaggactggctcctgcgtctgcgtgccctggcagaggagccccagaacagcctgccggacatcgtcatctggatgctgcagggagacaagcgtgtggcataccagcgggtgcccgcccaccaagtcctcttctcccggcggggtgccaactactgtggcaagaattgtgggaagctacagacaatctttctgaaatatccgatggagaaggtgcctggcgcccggatgccagtgcagatacgggtcaagctgtggtttgggctctcagtggatgagaaggagttcaaccagtttgctgaggggaagctgtctgtctttgctgaaacctatgagaacgagactaagttggcccttgttgggaactggggcacaacgggcctcacctaccccaagttttctgacgtcacgggcaagatcaagctacccaaggacagcttccgcccctcggccggctggacctgggctggagattggttcgtgtgtccggagaagactctgctccatgacatggacgccggtcacctgagcttcgtggaagaggtgtttgagaaccagacccggcttcccggaggccagtggatctacatgagtgacaactacaccgatgtgaacggggagaaggtgcttcccaaggatgacattgagtgcccactgggctggaagtgggaagatgaggaatggtccacagacctcaaccgggctgtcgatgagcaaggctgggagtatagcatcaccatccccccggagcggaagccgaagcactgggtccctgctgagaagatgtactacacacaccgacggcggcgctgggtgcgcctgcgcaggagggatctcagccaaatggaagcactgaaaaggcacaggcaggcggaggcggagggcgagggctgggagtacgcctctctttttggctggaagttccacctcgagtaccgcaagacagatgccttccgccgccgccgctggcgccgtcgcatggagccactggagaagacggggcctgcagctgtgtttgcccttgagggggccctgggcggcgtgatggatgacaagagtgaagattccatgtccgtctccaccttgagcttcggtgtgaacagacccacgatttcctgcatattcgactatgggaaccgctaccatctacgctgctacatgtaccaggcccgggacctggctgcgatggacaaggactctttttctgatccctatgccatcgtctccttcctgcaccagagccagaagacggtggtggtgaagaacacccttaaccccacctgggaccagacgctcatcttctacgagatcgagatctttggcgagccggccacagttgctgagcaaccgcccagcattgtggtggagctgtacgaccatgacacttatggtgcagacgagtttatgggtcgctgcatctgtcaaccgagtctggaacggatgccacggctggcctggttcccactgacgaggggcagccagccgtcgggggagctgctggcctcttttgagctcatccagagagagaagccggccatccaccatattcctggttttgaggtgcaggagacatcaaggatcctggatgagtctgaggacacagacctgccctacccaccaccccagagggaggccaacatctacatggttcctcagaacatcaagccagcgctccagcgtaccgccatcgagatcctggcatggggcctgcggaacatgaagagttaccagctggccaacatctcctcccccagcctcgtggtagagtgtgggggccagacggtgcagtcctgtgtcatcaggaacctccggaagaaccccaactttgacatctgcaccctcttcatggaagtgatgctgcccagggaggagctctactgcccccccatcaccgtcaaggtcatcgataaccgccagtttggccgccggcctgtggtgggccagtgtaccatccgctccctggagagcttcctgtgtgacccctactcggcggagagtccatccccacagggtggcccagacgatgtgagcctactcagtcctggggaagacgtgctcatcgacattgatgacaaggagcccctcatccccatccaggaggaagagttcatcgattggtggagcaaattctttgcctccataggggagagggaaaagtgcggctcctacctggagaaggattttgacaccctgaaggtctatgacacacagctggagaatgtggaggcctttgagggcctgtctgacttttgtaacaccttcaagctgtaccggggcaagacgcaggaggagacagaagatccatctgtgattggtgaatttaagggcctcttcaaaatttatcccctcccagaagacccagccatccccatgcccccaagacagttccaccagctggccgcccagggaccccaggagtgcttggtccgtatctacattgtccgagcatttggcctgcagcccaaggaccccaatggaaagtgtgatccttacatcaagatctccatagggaagaaatcagtgagtgaccaggataactacatcccctgcacgctggagcccgtatttggaaagatgttcgagctgacctgcactctgcctctggagaaggacctaaagatcactctctatgactatgacctcctctccaaggacgaaaagatcggtgagacggtcgtcgacctggagaacaggctgctgtccaagtttggggctcgctgtggactcccacagacctactgtgtctctggaccgaaccagtggcgggaccagctccgcccctcccagctcctccacctcttctgccagcagcatagagtcaaggcacctgtgtaccggacagaccgtgtaatgtttcaggataaagaatattccattgaagagatagaggctggcaggatcccaaacccacacctgggcccagtggaggagcgtctggctctgcatgtgcttcagcagcagggcctggtcccggagcacgtggagtcacggcccctctacagccccctgcagccagacatcgagcaggggaagctgcagatgtgggtcgacctatttccgaaggccctggggcggcctggacctcccttcaacatcaccccacggagagccagaaggtttttcctgcgttgtattatctggaataccagagatgtgatcctggatgacctgagcctcacgggggagaagatgagcgacatttatgtgaaaggttggatgattggctttgaagaacacaagcaaaagacagacgtgcattatcgttccctgggaggtgaaggcaacttcaactggaggttcattttccccttcgactacctgccagctgagcaagtctgtaccattgccaagaaggatgccttctggaggctggacaagactgagagcaaaatcccagcacgagtggtgttccagatctgggacaatgacaagttctcctttgatgattttctgggctccctgcagctcgatctcaaccgcatgcccaagccagccaagacagccaagaagtgctccttggaccagctggatgatgctttccacccagaatggtttgtgtccctttttgagcagaaaacagtgaagggctggtggccctgtgtagcagaagagggtgagaagaaaatactggcgggcaagctggaaatgaccttggagattgtagcagagagtgagcatgaggagcggcctgctggccagggccgggatgagcccaacatgaaccctaagcttgaggacccaaggcgccccgacacctccttcctgtggtttacctccccatacaagaccatgaagttcatcctgtggcggcgtttccggtgggccatcatcctcttcatcatcctcttcatcctgctgctgttcctggccatcttcatctacgccttcccgaactatgctgccatgaagctggtgaagcccttcagctgaggactctcctgccctgtagaaggggccgtggggtcccctccagcatgggactggcctgcctcctccgcccagctcggcgagctcctccagacctcctaggcctgattgtcctgccagggtgggcagacagacagatggaccggcccacactcccag

SEQ ID NO: 341 - DNA, 6657 bp, Homo sapiens
  source 1..6657: mol_type = genomic DNA
tctccgcggaggagcagcgaaggcgacagctctcttggcgcggctgcctgggagccgggcgcttgctgggtgggtgctcgggcccggtgctcccgctcccgccctgactgcgcgcctgtgtgccgccggggctgcccagccatgctgtgctgcctgctggtgagggccagcaacctccccagtgcgaagaaggaccggcgcagcgaccctgtcgcaagcctgactttccgaggggtgaagaagagaaccaaagtcatcaagaacagcgtgaaccctgtatggaatgagggatttgaatgggacctcaagggcatccccctggaccagggctctgagcttcatgtggtggtcaaagaccatgagacgatggggaggaacaggttcctgggggaagccaaggtcccactccgagaggtcctcgccacccctagtctgtccgccagcttcaatgcccccctgctggacaccaagaagcagcccacaggggcctcgctggtcctgcaggtgtcctacacaccgctgcctggagctgtgcccctgttcccgccccctactcctctggagccctccccgactctgcctgacctggatgtagtggcaggcgggggacagagccgggccgagacttggtccctgctcagtgacagcaccatggacacgagatactctggaaagaagtggccggcccccacggacacaggaggagaggaagacacagaggaccagggactcactggagatgaggcggagccattcctggatcaaagcggaggcccgggggctcccaccaccccaaggaaactaccttcacgtcctccgccccactaccccgggatcaaaagaaagcgaagtgcgcctacatctagaaagctgctgtcagacaaaccgcaggatttccagatcagggtccaggtgatcgaggggcgccagctgccgggggtgaacatcaagcctgtggtcaaggttaccgctgcagggcagaccaagcggacgcggatccacaagggaaacagcccactcttcaatgagactcttttcttcaacttgtttgactctcctggggagctgtttgatgagcccatctttatcacggtggtagactctcgttctctcaggacagatgctctcctcggggagttccggatggacgtgggcaccatttacagagagccccggcacgcctatctcaggaagtggctgctgctctcagaccctgatgacttctctgctggggccagaggctacctgaaaacaagcctttgtgtgctggggcctggggacgaagcgcctctggagagaaaagacccctctgaagacaaggaggacattgaaagcaacctgctccggcccacaggcgtagccctgcgaggagcccacttctgcctgaaggtcttccgggccgaggacttgccgcagatggacgatgccgtgatggacaacgtgaaacagatctttggcttcgagagtaacaagaagaacttggtggacccctttgtggaggtcagctttgcggggaaaatgctgtgcagcaagatcttggagaagacggccaaccctcagtggaaccagaacatcacactgcctgccatgtttccctccatgtgcgaaaaaatgaggattcgtatcatagactgggaccgcctgactcacaatgacatcgtggctaccacctacctgagtatgtcgaaaatctctgcccctggaggagaaatagaagtggatgactacctgggcttcctccccacttttgggccctgctacatcaacctctatggcagtcccagagagttcacaggcttcccagacccctacacagagctcaacacaggcaagggggaaggtgtggcttatcgtggccggcttctgctctccctggagaccaagctggtggagcacagtgaacagaaggtggaggaccttcctgcggatgacatcctccgggtggagaagtaccttaggaggcgcaagtactccctgtttgcggccttctactcagccaccatgctgcaggatgtggatgatgccatccagtttgaggtcagcatcgggaactacgggaacaagttcgacatgacctgcctgccgctggcctccaccactcagtacagccgtgcagtctttgacgggtgccactactactacctaccctggggtaacgtgaaacctgtggtggtgctgtcatcctactgggaggacatcagccatagaatcgagactcagaaccagctgcttgggattgctgaccggctggaagctggcctggagcaggtccacctggccctgaaggcgcagtgctccacggaggacgtggactcgctggtggctcagctgacggatgagctcatcgcaggctgcagccagcctctgggtgacatccatgagacaccctctgccacccacctggaccagtacctgtaccagctgcgcacccatcacctgagccaaatcactgaggctgccctggccctgaagctcggccacagtgagctccctgcagctctggagcaggcggaggactggctcctgcgtctgcgtgccctggcagaggagccccagaacagcctgccggacatcgtcatctggatgctgcagggagacaagcgtgtggcataccagcgggtgcccgcccaccaagtcctcttctcccggcggggtgccaactactgtggcaagaattgtgggaagctacagacaatctttctgaaatatccgatggagaaggtgcctggcgcccggatgccagtgcagatacgggtcaagctgtggtttgggctctcagtggatgagaaggagttcaaccagtttgctgaggggaagctgtctgtctttgctgaaacctatgagaacgagactaagttggcccttgttgggaactggggcacaacgggcctcacctaccccaagttttctgacgtcacgggcaagatcaagctacccaaggacagcttccgcccctcggccggctggacctgggctggagattggttcgtgtgtccggagaagactctgctccatgacatggacgccggtcacctgagcttcgtggaagaggtgtttgagaaccagacccggcttcccggaggccagtggatctacatgagtgacaactacaccgatgtgaacggggagaaggtgcttcccaaggatgacattgagtgcccactgggctggaagtgggaagatgaggaatggtccacagacctcaaccgggctgtcgatgagcaaggctgggagtatagcatcaccatccccccggagcggaagccgaagcactgggtccctgctgagaagatgtactacacacaccgacggcggcgctgggtgcgcctgcgcaggagggatctcagccaaatggaagcactgaaaaggcacaggcaggcggaggcggagggcgagggctgggagtacgcctctctttttggctggaagttccacctcgagtaccgcaagacagatgccttccgccgccgccgctggcgccgtcgcatggagccactggagaagacggggcctgcagctgtgtttgcccttgagggggccctgggcggcgtgatggatgacaagagtgaagattccatgtccgtctccaccttgagcttcggtgtgaacagacccacgatttcctgcatattcgactatgggaaccgctaccatctacgctgctacatgtaccaggcccgggacctggctgcgatggacaaggactctttttctgatccctatgccatcgtctccttcctgcaccagagccagaagacggtggtggtgaagaacacccttaaccccacctgggaccagacgctcatcttctacgagatcgagatctttggcgagccggccacagttgctgagcaaccgcccagcattgtggtggagctgtacgaccatgacacttatggtgcagacgagtttatgggtcgctgcatctgtcaaccgagtctggaacggatgccacggctggcctggttcccactgacgaggggcagccagccgtcgggggagctgctggcctcttttgagctcatccagagagagaagccggccatccaccatattcctggttttgaggtgcaggagacatcaaggatcctggatgagtctgaggacacagacctgccctacccaccaccccagagggaggccaacatctacatggttcctcagaacatcaagccagcgctccagcgtaccgccatcgagatcctggcatggggcctgcggaacatgaagagttaccagctggccaacatctcctcccccagcctcgtggtagagtgtgggggccagacggtgcagtcctgtgtcatcaggaacctccggaagaaccccaactttgacatctgcaccctcttcatggaagtgatgctgcccagggaggagctctactgcccccccatcaccgtcaaggtcatcgataaccgccagtttggccgccggcctgtggtgggccagtgtaccatccgctccctggagagcttcctgtgtgacccctactcggcggagagtccatccccacagggtggcccagacgatgtgagcctactcagtcctggggaagacgtgctcatcgacattgatgacaaggagcccctcatccccatccagcttgcagacggtctgtcgagcttggcccccactaacacggcttctcctccatccagtcctcatgaggaagagttcatcgattggtggagcaaattctttgcctccataggggagagggaaaagtgcggctcctacctggagaaggattttgacaccctgaaggtctatgacacacagctggagaatgtggaggcctttgagggcctgtctgacttttgtaacaccttcaagctgtaccggggcaagacgcaggaggagacagaagatccatctgtgattggtgaatttaagggcctcttcaaaatttatcccctcccagaagacccagccatccccatgcccccaagacagttccaccagctggccgcccagggaccccaggagtgcttggtccgtatctacattgtccgagcatttggcctgcagcccaaggaccccaatggaaagtgtgatccttacatcaagatctccatagggaagaaatcagtgagtgaccaggataactacatcccctgcacgctggagcccgtatttggaaagatgttcgagctgacctgcactctgcctctggagaaggacctaaagatcactctctatgactatgacctcctctccaaggacgaaaagatcggtgagacggtcgtcgacctggagaacaggctgctgtccaagtttggggctcgctgtggactcccacagacctactgtgtctctggaccgaaccagtggcgggaccagctccgcccctcccagctcctccacctcttctgccagcagcatagagtcaaggcacctgtgtaccggacagaccgtgtaatgtttcaggataaagaatattccattgaagagatagaggctggcaggatcccaaacccacacctgggcccagtggaggagcgtctggctctgcatgtgcttcagcagcagggcctggtcccggagcacgtggagtcacggcccctctacagccccctgcagccagacatcgagcaggggaagctgcagatgtgggtcgacctatttccgaaggccctggggcggcctggacctcccttcaacatcaccccacggagagccagaaggtttttcctgcgttgtattatctggaataccagagatgtgatcctggatgacctgagcctcacgggggagaagatgagcgacatttatgtgaaaggttggatgattggctttgaagaacacaagcaaaagacagacgtgcattatcgttccctgggaggtgaaggcaacttcaactggaggttcattttccccttcgactacctgccagctgagcaagtctgtaccattgccaagaaggatgccttctggaggctggacaagactgagagcaaaatcccagcacgagtggtgttccagatctgggacaatgacaagttctcctttgatgattttctgggctccctgcagctcgatctcaaccgcatgcccaagccagccaagacagccaagaagtgctccttggaccagctggatgatgctttccacccagaatggtttgtgtccctttttgagcagaaaacagtgaagggctggtggccctgtgtagcagaagagggtgagaagaaaatactggcgggcaagctggaaatgaccttggagattgtagcagagagtgagcatgaggagcggcctgctggccagggccgggatgagcccaacatgaaccctaagcttgaggacccaaggcgccccgacacctccttcctgtggtttacctccccatacaagaccatgaagttcatcctgtggcggcgtttccggtgggccatcatcctcttcatcatcctcttcatcctgctgctgttcctggccatcttcatctacgccttcccgaactatgctgccatgaagctggtgaagcccttcagctgaggactctcctgccctgtagaaggggccgtggggtcccctccagcatgggactggcctgcctcctccgcccagctcggcgagctcctccagacctcctaggcctgattgtcctgccagggtgggcagacagacagatggaccggcccacactcccag

SEQ ID NO: 342 - DNA, 6594 bp, Homo sapiens
  source 1..6594: mol_type = genomic DNA
tctccgcggaggagcagcgaaggcgacagctctcttggcgcggctgcctgggagccgggcgcttgctgggtgggtgctcgggcccggtgctcccgctcccgccctgactgcgcgcctgtgtgccgccggggctgcccagccatgctgtgctgcctgctggtgagggccagcaacctccccagtgcgaagaaggaccggcgcagcgaccctgtcgcaagcctgactttccgaggggtgaagaagagaaccaaagtcatcaagaacagcgtgaaccctgtatggaatgagggatttgaatgggacctcaagggcatccccctggaccagggctctgagcttcatgtggtggtcaaagaccatgagacgatggggaggaacaggttcctgggggaagccaaggtcccactccgagaggtcctcgccacccctagtctgtccgccagcttcaatgcccccctgctggacaccaagaagcagcccacaggggcctcgctggtcctgcaggtgtcctacacaccgctgcctggagctgtgcccctgttcccgccccctactcctctggagccctccccgactctgcctgacctggatgtagtggcaggcgggggacagagccgggccgagacttggtccctgctcagtgacagcaccatggacacgagatactctggaaagaagtggccggcccccacggacacaggaggagaggaagacacagaggaccagggactcactggagatgaggcggagccattcctggatcaaagcggaggcccgggggctcccaccaccccaaggaaactaccttcacgtcctccgccccactaccccgggatcaaaagaaagcgaagtgcgcctacatctagaaagctgctgtcagacaaaccgcaggatttccagatcagggtccaggtgatcgaggggcgccagctgccgggggtgaacatcaagcctgtggtcaaggttaccgctgcagggcagaccaagcggacgcggatccacaagggaaacagcccactcttcaatgagactcttttcttcaacttgtttgactctcctggggagctgtttgatgagcccatctttatcacggtggtagactctcgttctctcaggacagatgctctcctcggggagttccggatggacgtgggcaccatttacagagagccccggcacgcctatctcaggaagtggctgctgctctcagaccctgatgacttctctgctggggccagaggctacctgaaaacaagcctttgtgtgctggggcctggggacgaagcgcctctggagagaaaagacccctctgaagacaaggaggacattgaaagcaacctgctccggcccacaggcgtagccctgcgaggagcccacttctgcctgaaggtcttccgggccgaggacttgccgcagatggacgatgccgtgatggacaacgtgaaacagatctttggcttcgagagtaacaagaagaacttggtggacccctttgtggaggtcagctttgcggggaaaatgctgtgcagcaagatcttggagaagacggccaaccctcagtggaaccagaacatcacactgcctgccatgtttccctccatgtgcgaaaaaatgaggattcgtatcatagactgggaccgcctgactcacaatgacatcgtggctaccacctacctgagtatgtcgaaaatctctgcccctggaggagaaatagaagtggatgactacctgggcttcctccccacttttgggccctgctacatcaacctctatggcagtcccagagagttcacaggcttcccagacccctacacagagctcaacacaggcaagggggaaggtgtggcttatcgtggccggcttctgctctccctggagaccaagctggtggagcacagtgaacagaaggtggaggaccttcctgcggatgacatcctccgggtggagaagtaccttaggaggcgcaagtactccctgtttgcggccttctactcagccaccatgctgcaggatgtggatgatgccatccagtttgaggtcagcatcgggaactacgggaacaagttcgacatgacctgcctgccgctggcctccaccactcagtacagccgtgcagtctttgacgggtgccactactactacctaccctggggtaacgtgaaacctgtggtggtgctgtcatcctactgggaggacatcagccatagaatcgagactcagaaccagctgcttgggattgctgaccggctggaagctggcctggagcaggtccacctggccctgaaggcgcagtgctccacggaggacgtggactcgctggtggctcagctgacggatgagctcatcgcaggctgcagccagcctctgggtgacatccatgagacaccctctgccacccacctggaccagtacctgtaccagctgcgcacccatcacctgagccaaatcactgaggctgccctggccctgaagctcggccacagtgagctccctgcagctctggagcaggcggaggactggctcctgcgtctgcgtgccctggcagaggagccccagaacagcctgccggacatcgtcatctggatgctgcagggagacaagcgtgtggcataccagcgggtgcccgcccaccaagtcctcttctcccggcggggtgccaactactgtggcaagaattgtgggaagctacagacaatctttctgaaatatccgatggagaaggtgcctggcgcccggatgccagtgcagatacgggtcaagctgtggtttgggctctcagtggatgagaaggagttcaaccagtttgctgaggggaagctgtctgtctttgctgaaacctatgagaacgagactaagttggcccttgttgggaactggggcacaacgggcctcacctaccccaagttttctgacgtcacgggcaagatcaagctacccaaggacagcttccgcccctcggccggctggacctgggctggagattggttcgtgtgtccggagaagactctgctccatgacatggacgccggtcacctgagcttcgtggaagaggtgtttgagaaccagacccggcttcccggaggccagtggatctacatgagtgacaactacaccgatgtgaacggggagaaggtgcttcccaaggatgacattgagtgcccactgggctggaagtgggaagatgaggaatggtccacagacctcaaccgggctgtcgatgagcaaggctgggagtatagcatcaccatccccccggagcggaagccgaagcactgggtccctgctgagaagatgtactacacacaccgacggcggcgctgggtgcgcctgcgcaggagggatctcagccaaatggaagcactgaaaaggcacaggcaggcggaggcggagggcgagggctgggagtacgcctctctttttggctggaagttccacctcgagtaccgcaagacagatgccttccgccgccgccgctggcgccgtcgcatggagccactggagaagacggggcctgcagctgtgtttgcccttgagggggccctgggcggcgtgatggatgacaagagtgaagattccatgtccgtctccaccttgagcttcggtgtgaacagacccacgatttcctgcatattcgactatgggaaccgctaccatctacgctgctacatgtaccaggcccgggacctggctgcgatggacaaggactctttttctgatccctatgccatcgtctccttcctgcaccagagccagaagacggtggtggtgaagaacacccttaaccccacctgggaccagacgctcatcttctacgagatcgagatctttggcgagccggccacagttgctgagcaaccgcccagcattgtggtggagctgtacgaccatgacacttatggtgcagacgagtttatgggtcgctgcatctgtcaaccgagtctggaacggatgccacggctggcctggttcccactgacgaggggcagccagccgtcgggggagctgctggcctcttttgagctcatccagagagagaagccggccatccaccatattcctggttttgaggtgcaggagacatcaaggatcctggatgagtctgaggacacagacctgccctacccaccaccccagagggaggccaacatctacatggttcctcagaacatcaagccagcgctccagcgtaccgccatcgagatcctggcatggggcctgcggaacatgaagagttaccagctggccaacatctcctcccccagcctcgtggtagagtgtgggggccagacggtgcagtcctgtgtcatcaggaacctccggaagaaccccaactttgacatctgcaccctcttcatggaagtgatgctgcccagggaggagctctactgcccccccatcaccgtcaaggtcatcgataaccgccagtttggccgccggcctgtggtgggccagtgtaccatccgctccctggagagcttcctgtgtgacccctactcggcggagagtccatccccacagggtggcccagacgatgtgagcctactcagtcctggggaagacgtgctcatcgacattgatgacaaggagcccctcatccccatccaggaggaagagttcatcgattggtggagcaaattctttgcctccataggggagagggaaaagtgcggctcctacctggagaaggattttgacaccctgaaggtctatgacacacagctggagaatgtggaggcctttgagggcctgtctgacttttgtaacaccttcaagctgtaccggggcaagacgcaggaggagacagaagatccatctgtgattggtgaatttaagggcctcttcaaaatttatcccctcccagaagacccagccatccccatgcccccaagacagttccaccagctggccgcccagggaccccaggagtgcttggtccgtatctacattgtccgagcatttggcctgcagcccaaggaccccaatggaaagtgtgatccttacatcaagatctccatagggaagaaatcagtgagtgaccaggataactacatcccctgcacgctggagcccgtatttggaaagatgttcgagctgacctgcactctgcctctggagaaggacctaaagatcactctctatgactatgacctcctctccaaggacgaaaagatcggtgagacggtcgtcgacctggagaacaggctgctgtccaagtttggggctcgctgtggactcccacagacctactgtgtctctggaccgaaccagtggcgggaccagctccgcccctcccagctcctccacctcttctgccagcagcatagagtcaaggcacctgtgtaccggacagaccgtgtaatgtttcaggataaagaatattccattgaagagatagaggctggcaggatcccaaacccacacctgggcccagtggaggagcgtctggctctgcatgtgcttcagcagcagggcctggtcccggagcacgtggagtcacggcccctctacagccccctgcagccagacatcgagcaggggaagctgcagatgtgggtcgacctatttccgaaggccctggggcggcctggacctcccttcaacatcaccccacggagagccagaaggtttttcctgcgttgtattatctggaataccagagatgtgatcctggatgacctgagcctcacgggggagaagatgagcgacatttatgtgaaaggttggatgattggctttgaagaacacaagcaaaagacagacgtgcattatcgttccctgggaggtgaaggcaacttcaactggaggttcattttccccttcgactacctgccagctgagcaagtctgtaccattgccaagaaggatgccttctggaggctggacaagactgagagcaaaatcccagcacgagtggtgttccagatctgggacaatgacaagttctcctttgatgattttctgggctccctgcagctcgatctcaaccgcatgcccaagccagccaagacagccaagaagtgctccttggaccagctggatgatgctttccacccagaatggtttgtgtccctttttgagcagaaaacagtgaagggctggtggccctgtgtagcagaagagggtgagaagaaaatactggcgggcaagctggaaatgaccttggagattgtagcagagagtgagcatgaggagcggcctgctggccagggccgggatgagcccaacatgaaccctaagcttgaggacccaaggcgccccgacacctccttcctgtggtttacctccccatacaagaccatgaagttcatcctgtggcggcgtttccggtgggccatcatcctcttcatcatcctcttcatcctgctgctgttcctggccatcttcatctacgccttcccgaactatgctgccatgaagctggtgaagcccttcagctgaggactctcctgccctgtagaaggggccgtggggtcccctccagcatgggactggcctgcctcctccgcccagctcggcgagctcctccagacctcctaggcctgattgtcctgccagggtgggcagacagacagatggaccggcccacactcccag

SEQ ID NO: 343 - DNA, 6769 bp, Homo sapiens
  source 1..6769: mol_type = genomic DNA
gggtggaagatgagcagaagcccctgttctcggaacgccggctgacaagcggggtgagcgcagccggggcggggacccagcctagcccactggagcagccgggggtggcccgttcccctttaagagcaactgctctaagccaggagccagagattcgagccggcctcgcccagccagccctctccagcgaggggacccacaagcggcgcctcggccctcccgacctttccgagccctctttgcgccctgggcgcacggggccctacacgcgccaagcatgctgagggtcttcatcctctatgccgagaacgtccacacacccgacaccgacatcagcgatgcctactgctccgcggtgtttgcaggggtgaagaagagaaccaaagtcatcaagaacagcgtgaaccctgtatggaatgagggatttgaatgggacctcaagggcatccccctggaccagggctctgagcttcatgtggtggtcaaagaccatgagacgatggggaggaacaggttcctgggggaagccaaggtcccactccgagaggtcctcgccacccctagtctgtccgccagcttcaatgcccccctgctggacaccaagaagcagcccacaggggcctcgctggtcctgcaggtgtcctacacaccgctgcctggagctgtgcccctgttcccgccccctactcctctggagccctccccgactctgcctgacctggatgtagtggcaggcgggggacagagccgggccgagacttggtccctgctcagtgacagcaccatggacacgagatactctggaaagaagtggccggcccccacggacacaggaggagaggaagacacagaggaccagggactcactggagatgaggcggagccattcctggatcaaagcggaggcccgggggctcccaccaccccaaggaaactaccttcacgtcctccgccccactaccccgggatcaaaagaaagcgaagtgcgcctacatctagaaagctgctgtcagacaaaccgcaggatttccagatcagggtccaggtgatcgaggggcgccagctgccgggggtgaacatcaagcctgtggtcaaggttaccgctgcagggcagaccaagcggacgcggatccacaagggaaacagcccactcttcaatgagactcttttcttcaacttgtttgactctcctggggagctgtttgatgagcccatctttatcacggtggtagactctcgttctctcaggacagatgctctcctcggggagttccggatggacgtgggcaccatttacagagagccccggcacgcctatctcaggaagtggctgctgctctcagaccctgatgacttctctgctggggccagaggctacctgaaaacaagcctttgtgtgctggggcctggggacgaagcgcctctggagagaaaagacccctctgaagacaaggaggacattgaaagcaacctgctccggcccacaggcgtagccctgcgaggagcccacttctgcctgaaggtcttccgggccgaggacttgccgcagatggacgatgccgtgatggacaacgtgaaacagatctttggcttcgagagtaacaagaagaacttggtggacccctttgtggaggtcagctttgcggggaaaatgctgtgcagcaagatcttggagaagacggccaaccctcagtggaaccagaacatcacactgcctgccatgtttccctccatgtgcgaaaaaatgaggattcgtatcatagactgggaccgcctgactcacaatgacatcgtggctaccacctacctgagtatgtcgaaaatctctgcccctggaggagaaatagaagaggagcctgcaggtgctgtcaagccttcgaaagcctcagacttggatgactacctgggcttcctccccacttttgggccctgctacatcaacctctatggcagtcccagagagttcacaggcttcccagacccctacacagagctcaacacaggcaagggggaaggtgtggcttatcgtggccggcttctgctctccctggagaccaagctggtggagcacagtgaacagaaggtggaggaccttcctgcggatgacatcctccgggtggagaagtaccttaggaggcgcaagtactccctgtttgcggccttctactcagccaccatgctgcaggatgtggatgatgccatccagtttgaggtcagcatcgggaactacgggaacaagttcgacatgacctgcctgccgctggcctccaccactcagtacagccgtgcagtctttgacgggtgccactactactacctaccctggggtaacgtgaaacctgtggtggtgctgtcatcctactgggaggacatcagccatagaatcgagactcagaaccagctgcttgggattgctgaccggctggaagctggcctggagcaggtccacctggccctgaaggcgcagtgctccacggaggacgtggactcgctggtggctcagctgacggatgagctcatcgcaggctgcagccagcctctgggtgacatccatgagacaccctctgccacccacctggaccagtacctgtaccagctgcgcacccatcacctgagccaaatcactgaggctgccctggccctgaagctcggccacagtgagctccctgcagctctggagcaggcggaggactggctcctgcgtctgcgtgccctggcagaggagccccagaacagcctgccggacatcgtcatctggatgctgcagggagacaagcgtgtggcataccagcgggtgcccgcccaccaagtcctcttctcccggcggggtgccaactactgtggcaagaattgtgggaagctacagacaatctttctgaaatatccgatggagaaggtgcctggcgcccggatgccagtgcagatacgggtcaagctgtggtttgggctctcagtggatgagaaggagttcaaccagtttgctgaggggaagctgtctgtctttgctgaaacctatgagaacgagactaagttggcccttgttgggaactggggcacaacgggcctcacctaccccaagttttctgacgtcacgggcaagatcaagctacccaaggacagcttccgcccctcggccggctggacctgggctggagattggttcgtgtgtccggagaagactctgctccatgacatggacgccggtcacctgagcttcgtggaagaggtgtttgagaaccagacccggcttcccggaggccagtggatctacatgagtgacaactacaccgatgtgaacggggagaaggtgcttcccaaggatgacattgagtgcccactgggctggaagtgggaagatgaggaatggtccacagacctcaaccgggctgtcgatgagcaaggctgggagtatagcatcaccatccccccggagcggaagccgaagcactgggtccctgctgagaagatgtactacacacaccgacggcggcgctgggtgcgcctgcgcaggagggatctcagccaaatggaagcactgaaaaggcacaggcaggcggaggcggagggcgagggctgggagtacgcctctctttttggctggaagttccacctcgagtaccgcaagacagatgccttccgccgccgccgctggcgccgtcgcatggagccactggagaagacggggcctgcagctgtgtttgcccttgagggggccctgggcggcgtgatggatgacaagagtgaagattccatgtccgtctccaccttgagcttcggtgtgaacagacccacgatttcctgcatattcgactatgggaaccgctaccatctacgctgctacatgtaccaggcccgggacctggctgcgatggacaaggactctttttctgatccctatgccatcgtctccttcctgcaccagagccagaagacggtggtggtgaagaacacccttaaccccacctgggaccagacgctcatcttctacgagatcgagatctttggcgagccggccacagttgctgagcaaccgcccagcattgtggtggagctgtacgaccatgacacttatggtgcagacgagtttatgggtcgctgcatctgtcaaccgagtctggaacggatgccacggctggcctggttcccactgacgaggggcagccagccgtcgggggagctgctggcctcttttgagctcatccagagagagaagccggccatccaccatattcctggttttgaggtgcaggagacatcaaggatcctggatgagtctgaggacacagacctgccctacccaccaccccagagggaggccaacatctacatggttcctcagaacatcaagccagcgctccagcgtaccgccatcgagatcctggcatggggcctgcggaacatgaagagttaccagctggccaacatctcctcccccagcctcgtggtagagtgtgggggccagacggtgcagtcctgtgtcatcaggaacctccggaagaaccccaactttgacatctgcaccctcttcatggaagtgatgctgcccagggaggagctctactgcccccccatcaccgtcaaggtcatcgataaccgccagtttggccgccggcctgtggtgggccagtgtaccatccgctccctggagagcttcctgtgtgacccctactcggcggagagtccatccccacagggtggcccagacgatgtgagcctactcagtcctggggaagacgtgctcatcgacattgatgacaaggagcccctcatccccatccaggaggaagagttcatcgattggtggagcaaattctttgcctccataggggagagggaaaagtgcggctcctacctggagaaggattttgacaccctgaaggtctatgacacacagctggagaatgtggaggcctttgagggcctgtctgacttttgtaacaccttcaagctgtaccggggcaagacgcaggaggagacagaagatccatctgtgattggtgaatttaagggcctcttcaaaatttatcccctcccagaagacccagccatccccatgcccccaagacagttccaccagctggccgcccagggaccccaggagtgcttggtccgtatctacattgtccgagcatttggcctgcagcccaaggaccccaatggaaagtgtgatccttacatcaagatctccatagggaagaaatcagtgagtgaccaggataactacatcccctgcacgctggagcccgtatttggaaagatgttcgagctgacctgcactctgcctctggagaaggacctaaagatcactctctatgactatgacctcctctccaaggacgaaaagatcggtgagacggtcgtcgacctggagaacaggctgctgtccaagtttggggctcgctgtggactcccacagacctactgtgtctctggaccgaaccagtggcgggaccagctccgcccctcccagctcctccacctcttctgccagcagcatagagtcaaggcacctgtgtaccggacagaccgtgtaatgtttcaggataaagaatattccattgaagagatagaggctggcaggatcccaaacccacacctgggcccagtggaggagcgtctggctctgcatgtgcttcagcagcagggcctggtcccggagcacgtggagtcacggcccctctacagccccctgcagccagacatcgagcaggggaagctgcagatgtgggtcgacctatttccgaaggccctggggcggcctggacctcccttcaacatcaccccacggagagccagaaggtttttcctgcgttgtattatctggaataccagagatgtgatcctggatgacctgagcctcacgggggagaagatgagcgacatttatgtgaaaggttggatgattggctttgaagaacacaagcaaaagacagacgtgcattatcgttccctgggaggtgaaggcaacttcaactggaggttcattttccccttcgactacctgccagctgagcaagtctgtaccattgccaagaaggatgccttctggaggctggacaagactgagagcaaaatcccagcacgagtggtgttccagatctgggacaatgacaagttctcctttgatgattttctgggctccctgcagctcgatctcaaccgcatgcccaagccagccaagacagccaagaagtgctccttggaccagctggatgatgctttccacccagaatggtttgtgtccctttttgagcagaaaacagtgaagggctggtggccctgtgtagcagaagagggtgagaagaaaatactggcgggcaagctggaaatgaccttggagattgtagcagagagtgagcatgaggagcggcctgctggccagggccgggatgagcccaacatgaaccctaagcttgaggacccaaggcgccccgacacctccttcctgtggtttacctccccatacaagaccatgaagttcatcctgtggcggcgtttccggtgggccatcatcctcttcatcatcctcttcatcctgctgctgttcctggccatcttcatctacgccttcccgaactatgctgccatgaagctggtgaagcccttcagctgaggactctcctgccctgtagaaggggccgtggggtcccctccagcatgggactggcctgcctcctccgcccagctcggcgagctcctccagacctcctaggcctgattgtcctgccagggtgggcagacagacagatggaccggcccacactcccag

SEQ ID NO: 344 - DNA, 6739 bp, Homo sapiens
  source 1..6739: mol_type = genomic DNA
gggtggaagatgagcagaagcccctgttctcggaacgccggctgacaagcggggtgagcgcagccggggcggggacccagcctagcccactggagcagccgggggtggcccgttcccctttaagagcaactgctctaagccaggagccagagattcgagccggcctcgcccagccagccctctccagcgaggggacccacaagcggcgcctcggccctcccgacctttccgagccctctttgcgccctgggcgcacggggccctacacgcgccaagcatgctgagggtcttcatcctctatgccgagaacgtccacacacccgacaccgacatcagcgatgcctactgctccgcggtgtttgcaggggtgaagaagagaaccaaagtcatcaagaacagcgtgaaccctgtatggaatgagggatttgaatgggacctcaagggcatccccctggaccagggctctgagcttcatgtggtggtcaaagaccatgagacgatggggaggaacaggttcctgggggaagccaaggtcccactccgagaggtcctcgccacccctagtctgtccgccagcttcaatgcccccctgctggacaccaagaagcagcccacaggggcctcgctggtcctgcaggtgtcctacacaccgctgcctggagctgtgcccctgttcccgccccctactcctctggagccctccccgactctgcctgacctggatgtagtggcagacacaggaggagaggaagacacagaggaccagggactcactggagatgaggcggagccattcctggatcaaagcggaggcccgggggctcccaccaccccaaggaaactaccttcacgtcctccgccccactaccccgggatcaaaagaaagcgaagtgcgcctacatctagaaagctgctgtcagacaaaccgcaggatttccagatcagggtccaggtgatcgaggggcgccagctgccgggggtgaacatcaagcctgtggtcaaggttaccgctgcagggcagaccaagcggacgcggatccacaagggaaacagcccactcttcaatgagactcttttcttcaacttgtttgactctcctggggagctgtttgatgagcccatctttatcacggtggtagactctcgttctctcaggacagatgctctcctcggggagttccggatggacgtgggcaccatttacagagagccccggcacgcctatctcaggaagtggctgctgctctcagaccctgatgacttctctgctggggccagaggctacctgaaaacaagcctttgtgtgctggggcctggggacgaagcgcctctggagagaaaagacccctctgaagacaaggaggacattgaaagcaacctgctccggcccacaggcgtagccctgcgaggagcccacttctgcctgaaggtcttccgggccgaggacttgccgcagatggacgatgccgtgatggacaacgtgaaacagatctttggcttcgagagtaacaagaagaacttggtggacccctttgtggaggtcagctttgcggggaaaatgctgtgcagcaagatcttggagaagacggccaaccctcagtggaaccagaacatcacactgcctgccatgtttccctccatgtgcgaaaaaatgaggattcgtatcatagactgggaccgcctgactcacaatgacatcgtggctaccacctacctgagtatgtcgaaaatctctgcccctggaggagaaatagaagaggagcctgcaggtgctgtcaagccttcgaaagcctcagacttggatgactacctgggcttcctccccacttttgggccctgctacatcaacctctatggcagtcccagagagttcacaggcttcccagacccctacacagagctcaacacaggcaagggggaaggtgtggcttatcgtggccggcttctgctctccctggagaccaagctggtggagcacagtgaacagaaggtggaggaccttcctgcggatgacatcctccgggtggagaagtaccttaggaggcgcaagtactccctgtttgcggccttctactcagccaccatgctgcaggatgtggatgatgccatccagtttgaggtcagcatcgggaactacgggaacaagttcgacatgacctgcctgccgctggcctccaccactcagtacagccgtgcagtctttgacgggtgccactactactacctaccctggggtaacgtgaaacctgtggtggtgctgtcatcctactgggaggacatcagccatagaatcgagactcagaaccagctgcttgggattgctgaccggctggaagctggcctggagcaggtccacctggccctgaaggcgcagtgctccacggaggacgtggactcgctggtggctcagctgacggatgagctcatcgcaggctgcagccagcctctgggtgacatccatgagacaccctctgccacccacctggaccagtacctgtaccagctgcgcacccatcacctgagccaaatcactgaggctgccctggccctgaagctcggccacagtgagctccctgcagctctggagcaggcggaggactggctcctgcgtctgcgtgccctggcagaggagccccagaacagcctgccggacatcgtcatctggatgctgcagggagacaagcgtgtggcataccagcgggtgcccgcccaccaagtcctcttctcccggcggggtgccaactactgtggcaagaattgtgggaagctacagacaatctttctgaaatatccgatggagaaggtgcctggcgcccggatgccagtgcagatacgggtcaagctgtggtttgggctctcagtggatgagaaggagttcaaccagtttgctgaggggaagctgtctgtctttgctgaaacctatgagaacgagactaagttggcccttgttgggaactggggcacaacgggcctcacctaccccaagttttctgacgtcacgggcaagatcaagctacccaaggacagcttccgcccctcggccggctggacctgggctggagattggttcgtgtgtccggagaagactctgctccatgacatggacgccggtcacctgagcttcgtggaagaggtgtttgagaaccagacccggcttcccggaggccagtggatctacatgagtgacaactacaccgatgtgaacggggagaaggtgcttcccaaggatgacattgagtgcccactgggctggaagtgggaagatgaggaatggtccacagacctcaaccgggctgtcgatgagcaaggctgggagtatagcatcaccatccccccggagcggaagccgaagcactgggtccctgctgagaagatgtactacacacaccgacggcggcgctgggtgcgcctgcgcaggagggatctcagccaaatggaagcactgaaaaggcacaggcaggcggaggcggagggcgagggctgggagtacgcctctctttttggctggaagttccacctcgagtaccgcaagacagatgccttccgccgccgccgctggcgccgtcgcatggagccactggagaagacggggcctgcagctgtgtttgcccttgagggggccctgggcggcgtgatggatgacaagagtgaagattccatgtccgtctccaccttgagcttcggtgtgaacagacccacgatttcctgcatattcgactatgggaaccgctaccatctacgctgctacatgtaccaggcccgggacctggctgcgatggacaaggactctttttctgatccctatgccatcgtctccttcctgcaccagagccagaagacggtggtggtgaagaacacccttaaccccacctgggaccagacgctcatcttctacgagatcgagatctttggcgagccggccacagttgctgagcaaccgcccagcattgtggtggagctgtacgaccatgacacttatggtgcagacgagtttatgggtcgctgcatctgtcaaccgagtctggaacggatgccacggctggcctggttcccactgacgaggggcagccagccgtcgggggagctgctggcctcttttgagctcatccagagagagaagccggccatccaccatattcctggttttgaggtgcaggagacatcaaggatcctggatgagtctgaggacacagacctgccctacccaccaccccagagggaggccaacatctacatggttcctcagaacatcaagccagcgctccagcgtaccgccatcgagatcctggcatggggcctgcggaacatgaagagttaccagctggccaacatctcctcccccagcctcgtggtagagtgtgggggccagacggtgcagtcctgtgtcatcaggaacctccggaagaaccccaactttgacatctgcaccctcttcatggaagtgatgctgcccagggaggagctctactgcccccccatcaccgtcaaggtcatcgataaccgccagtttggccgccggcctgtggtgggccagtgtaccatccgctccctggagagcttcctgtgtgacccctactcggcggagagtccatccccacagggtggcccagacgatgtgagcctactcagtcctggggaagacgtgctcatcgacattgatgacaaggagcccctcatccccatccagcttgcagacggtctgtcgagcttggcccccactaacacggcttctcctccatccagtcctcatgaggaagagttcatcgattggtggagcaaattctttgcctccataggggagagggaaaagtgcggctcctacctggagaaggattttgacaccctgaaggtctatgacacacagctggagaatgtggaggcctttgagggcctgtctgacttttgtaacaccttcaagctgtaccggggcaagacgcaggaggagacagaagatccatctgtgattggtgaatttaagggcctcttcaaaatttatcccctcccagaagacccagccatccccatgcccccaagacagttccaccagctggccgcccagggaccccaggagtgcttggtccgtatctacattgtccgagcatttggcctgcagcccaaggaccccaatggaaagtgtgatccttacatcaagatctccatagggaagaaatcagtgagtgaccaggataactacatcccctgcacgctggagcccgtatttggaaagatgttcgagctgacctgcactctgcctctggagaaggacctaaagatcactctctatgactatgacctcctctccaaggacgaaaagatcggtgagacggtcgtcgacctggagaacaggctgctgtccaagtttggggctcgctgtggactcccacagacctactgtgtctctggaccgaaccagtggcgggaccagctccgcccctcccagctcctccacctcttctgccagcagcatagagtcaaggcacctgtgtaccggacagaccgtgtaatgtttcaggataaagaatattccattgaagagatagaggctggcaggatcccaaacccacacctgggcccagtggaggagcgtctggctctgcatgtgcttcagcagcagggcctggtcccggagcacgtggagtcacggcccctctacagccccctgcagccagacatcgagcaggggaagctgcagatgtgggtcgacctatttccgaaggccctggggcggcctggacctcccttcaacatcaccccacggagagccagaaggtttttcctgcgttgtattatctggaataccagagatgtgatcctggatgacctgagcctcacgggggagaagatgagcgacatttatgtgaaaggttggatgattggctttgaagaacacaagcaaaagacagacgtgcattatcgttccctgggaggtgaaggcaacttcaactggaggttcattttccccttcgactacctgccagctgagcaagtctgtaccattgccaagaaggatgccttctggaggctggacaagactgagagcaaaatcccagcacgagtggtgttccagatctgggacaatgacaagttctcctttgatgattttctgggctccctgcagctcgatctcaaccgcatgcccaagccagccaagacagccaagaagtgctccttggaccagctggatgatgctttccacccagaatggtttgtgtccctttttgagcagaaaacagtgaagggctggtggccctgtgtagcagaagagggtgagaagaaaatactggcgggcaagctggaaatgaccttggagattgtagcagagagtgagcatgaggagcggcctgctggccagggccgggatgagcccaacatgaaccctaagcttgaggacccaaggcgccccgacacctccttcctgtggtttacctccccatacaagaccatgaagttcatcctgtggcggcgtttccggtgggccatcatcctcttcatcatcctcttcatcctgctgctgttcctggccatcttcatctacgccttcccgaactatgctgccatgaagctggtgaagcccttcagctgaggactctcctgccctgtagaaggggccgtggggtcccctccagcatgggactggcctgcctcctccgcccagctcggcgagctcctccagacctcctaggcctgattgtcctgccagggtgggcagacagacagatggaccggcccacactcccag

SEQ ID NO: 345 - DNA, 689 bp, Homo sapiens
  source 1..689: mol_type = genomic DNA
attccctcggcgggccgagcctcccctctctcccgcccctcctcctccctttcccacccctcggagtagagctgcacatgcggctgctccctgctccgtcccgcccagccactgtcgcgcaggaacgggtccctgcagcccccagccgatggcaggacagtagccgcctgtcagaggtcgtgaacggctgaggcagacgcagcggctcccgggcctcaagagagtgggtgtctccggaggccatgggctacccggaggtggagcgcagggaactcctgcctgcagcagcgccgcgggagcgagggagccagggctgcgggtgtggcggggcccctgcccgggcgggcgaagggaacagctgcctgctcttcctgggtttctttggcctctcgctggccctccacctgctgacgttgtgctgctacctagagttgcgctcggagttgcggcgggaacgtggagccgagtcccgccttggcggctcgggcacccctggcacctctggcaccctaagcagcctcggtggcctcgaccctgacagccccatcaccagtcaccttgggcagccgtcacctaagcagcagccattggaaccgggagaagccgcactccactctgactcccaggacgggcaccaggactttgactacatcatttcattctcttatggcctacaaggtttctgctga

SEQ ID NO: 346 - DNA, 5278 bp, Homo sapiens
  source 1..5278: mol_type = genomic DNA
attccctcggcgggccgagcctcccctctctcccgcccctcctcctccctttcccacccctcggagtagagctgcacatgcggctgctccctgctccgtcccgcccagccactgtcgcgcaggaacgggtccctgcagcccccagccgatggcaggacagtagccgcctgtcagaggtcgtgaacggctgaggcagacgcagcggctcccgggcctcaagagagtgggtgtctccggaggccatgggctacccggaggtggagcgcagggaactcctgcctgcagcagcgccgcgggagcgagggagccagggctgcgggtgtggcggggcccctgcccgggcgggcgaagggaacagctgcctgctcttcctgggtttctttggcctctcgctggccctccacctgctgacgttgtgctgctacctagagttgcgctcggagttgcggcgggaacgtggagccgagtcccgccttggcggctcgggcacccctggcacctctggcaccctaagcagcctcggtggcctcgaccctgacagccccatcaccagtcaccttgggcagccgtcacctaagcagcagccattggaaccgggagaagccgcactccactctgactcccaggacgggcaccagatggccctattgaatttcttcttccctgatgaaaagccatactctgaagaagaaagtaggcgtgttcgccgcaataaaagaagcaaaagcaatgaaggagcagatggcccagttaaaaacaagaaaaagggaaagaaagcaggacctcctggacccaatggccctccaggacccccaggacctccaggaccccagggacccccaggaattccagggattcctggaattccaggaacaactgttatgggaccacctggtcctccaggtcctcctggtcctcaaggaccccctggcctccagggaccttctggtgctgctgataaagctggaactcgagaaaaccagccagctgtggtgcatctacagggccaagggtcagcaattcaagtcaagaatgatctttcaggtggagtgctcaatgactggtctcgcatcactatgaaccccaaggtgtttaagctacatccccgcagcggggagctggaggtactggtggacggcacctacttcatctatagtcaggtagaagtatactacatcaacttcactgactttgccagctatgaggtggtggtggatgagaagcccttcctgcagtgcacacgcagcatcgagacgggcaagaccaactacaacacttgctataccgcaggcgtctgcctcctcaaggcccggcagaagatcgccgtcaagatggtgcacgctgacatctccatcaacatgagcaagcacaccacgttctttggggccatcaggctgggtgaagcccctgcatcctagattccccccattttgcctctgtccgtgccccttccctgggtttgggagccaggactcccagaacctctaagtgctgctgtggagtgaggtgtattggtgttgcagccgcagagaaatgccccagtgttatttattccccagtgactccagggtgacaaggcctgcttgactttccagaatgaccttgagttaacaggacagttgatggagccccagggtttacatgaagcagaaccttctttggttccatgttgactgacttatggcatgactcttcaaccccgaggtccctgttgtcagatctattgtttgttgcactaaaatgaggatccagggcagcaggccagagaaagcaaaggtgcactccagactctgggggtggacatctgaccccaagggggctgctgctcctctcttgggtagggtagtggctggggtggagtgggaagggagcattgcagcctaagaagaaggccagagagggaaaaggcaggtgcttttggcagagaccataagagaaacctgccaaggagcatccttggcagtgggaatgttctttctgctctatactgtggcctgcaggagggttggagtgctcttcccactccagctgacagccacaccgtggcagcttgctgggctttgggaagtttgctgtgctttggaacaatcacagggaatggccacaaacctgcccgcctaagaccctgaatccgtacttgggtcacatgactctcattttatttacagctgtgctccacactcagaaaattccctggggtcaccttctagttgcccccattcccagcctgactagaactcctgtcttctttctccatggagcctacctctgtctgagacaggtgcctaacctgggacctgtggtcatgtgagtctgggatattctttagcttacctgggcacaaacagaattttccatttattaagcagtacaaatgtttttcatccattcctaatcaaattctgtctggggacgaagggttggacgggatgacctccagaagtcccttcaatttctagtacctgtgactcttagccctcaccacagccttctaaattcccaaatcctagactgctcctgggcattagcaaggcagagcctttttacctggcctagaaagggcaaggggtgaggataggacagagggattttgttcaagtttgctgcaacccaagtggacgttaggccaggccttatctgaaaggccagcagctgatgctgtactaacccagtctttcttcactctggcttcaaaaagccacagcagagcattgtcaccgcaggtgctcatgctgctcccctaaagccaggctcaggagaagccagtgtctaggcactgagcagggatctgccccctagttcaggtccaaattcaccttcccctaaaccccaagcttcccaacagatcatatggtaggaccctcgagagccttacttcaaagtgcctgggctcagcctggtttctgggtgctagatccagcccaaacctgggaaggccagccttgtacagtctgctcctcttgttcctgaaatgtgtttccttttcaggagatggggaataatttccttcaggcagctgaaattcaccaagaacagcgggtacttatttctcagctgtgccttccctttctaagcaaccacactgcttggcccttcaagggtcagggtgagacgtgatgggctaggcctccgttgtctggttgctaatgacagccttgcaacccaaggtgaggtgaactccaggcatgtgtctggccctaactcctataaagtgcctcggacagtccgcagttgtagcagaaaccaacaagaaccactccttcatgtttggaaaataatttctcttgtattatctcctttgaagaaggcaaggctgataatatgacaaacatcattgtttagatgaggctcagagaggtagcactctcagagtgttttgaccagtttaagccgcagacctggagcttcagccaggtctgactccaaagctgttccattacaccacagcattgtgtggaatttgaggtctagagagaaccaataaaagtggtaattgggaactgaaatccttgagagttccggggagaaacccagagatgcctgatttcattcctcgatggtaatacccgtcctctcggctgccaggggctctgtggcaaaaagagtcagacatttctttggaaaacagcgaacagccttagagctcttgtgttcagaagaatcttcctggcacaatgttggagcagcaggcctctgggacccacagaacttgtggcctttatgttctttcacccatcctaggaaccagccaaccatcatgtgtagagcccctactgtgggcaaagtcctcctttcattaccctacagacagcttacaggagccagcctgcttcccacaactactagtgtgactccttatctctttccaccataccttagagactttgatactaccagggtctctcagggatggagggaagacctgaaagagaggactggttctgaggccagaaaggtgtgaggagagaggaggaaaagtcttcctaattgtgcccctaaagagcatcctgataccattctattctccagacatggaggggatgataaaggaaataggatctccactggacccttgattcattctgaaccctccaaaggaactctagagggcgagggatgatgagggaagcaataggtagctggggagccctattgctgctaagtcattggcaaagtgacaaagcaatttactgatgagagaatgtggaaatagatgtgcagtttggaattatgttggtgtgaatttgccagaggaccaatgcttgcatggagaatgggacgaggacatttgtgggcaagcagatgacagaggtttgaaggagaatggcatggcaggagtctctgccagttacttgggcttcaacagccaagctggcacaaaagacagctggcggaggctgctcggctactggttacctggagaagtagtatttgcctatttcccccttcatccatcctgagccaaatttcttttgctgaacaggaaagagctaggaaccctggaggtaaacaaagactttgatccatgtatgagtgtatgtgtttatgtaacttcctgtggatgcaaatagattcagagaaatttagagctaaaaaggcccttagagggaatctagcccaacctacattccaccctgttacttatgtagaaactgaggcccagagagggaagatgacctgccccaagtggtgagcaagcaccaacctccagactcagcagagtgagggggtaaagcagttcctgtcccacatggccatcttctttcttccacccacaaactccaggctggaagtacttggcccccttcaggagcctggccaggcagggagagagtagctgcagccttcatcagaactcttcctcctcccaaggcattctcccagctctagcctctggactggaaagcacaagactggcccagtgccagcaagtccttaggctactgtaatgctgcctcaggacccatccctgcctggaggctcctctaggccctgtgagcacaaagaagaaagctgatttttgtcttttaatccatttcaggactctctccaggagggctcggggtgtgtcatttctatattcctccagctgggattggggggtgggctttgttgtgagaatggcctggagcaggcccaatgctgcttttgggggtcagcatccagtgtgagatactgtgtatataaactatatataatgtatataaactgggatgtaagtttgtgtaaattaatggtttattctttgcaaataaaacgctttccccgtctgttcttg

SEQ ID NO: 347 - DNA, 5272 bp, Homo sapiens
  source 1..5272: mol_type = genomic DNA
attccctcggcgggccgagcctcccctctctcccgcccctcctcctccctttcccacccctcggagtagagctgcacatgcggctgctccctgctccgtcccgcccagccactgtcgcgcaggaacgggtccctgcagcccccagccgatggcaggacagtagccgcctgtcagaggtcgtgaacggctgaggcagacgcagcggctcccgggcctcaagagagtgggtgtctccggaggccatgggctacccggaggtggagcgcagggaactcctgcctgcagcagcgccgcgggagcgagggagccagggctgcgggtgtggcggggcccctgcccgggcgggcgaagggaacagctgcctgctcttcctgggtttctttggcctctcgctggccctccacctgctgacgttgtgctgctacctagagttgcgctcggagttgcggcgggaacgtggagccgagtcccgccttggcggctcgggcacccctggcacctctggcaccctaagcagcctcggtggcctcgaccctgacagccccatcaccagtcaccttgggcagccgtcacctaagcagcagccattggaaccgggagaagccgcactccactctgactcccaggacgggcaccagatggccctattgaatttcttcttccctgatgaaaagccatactctgaagaagaaagtaggcgtgttcgccgcaataaaagaagcaaaagcaatgaaggagcagatggcccagttaaaaacaagaaaaagggaaagaaagcaggacctcctggacccaatggccctccaggacccccaggacctccaggaccccagggacccccaggaattccagggattcctggaattccaggaacaactgttatgggaccacctggtcctccaggtcctcctggtcctcaaggaccccctggcctccagggaccttctggtgctgctgataaagctggaactcgagaaaaccagccagctgtggtgcatctacagggccaagggtcagcaattcaagtcaagaatgatctttcaggtggagtgctcaatgactggtctcgcatcactatgaaccccaaggtgtttaagctacatccccgcagcggggagctggaggtactggtggacggcacctacttcatctatagtcaggtatactacatcaacttcactgactttgccagctatgaggtggtggtggatgagaagcccttcctgcagtgcacacgcagcatcgagacgggcaagaccaactacaacacttgctataccgcaggcgtctgcctcctcaaggcccggcagaagatcgccgtcaagatggtgcacgctgacatctccatcaacatgagcaagcacaccacgttctttggggccatcaggctgggtgaagcccctgcatcctagattccccccattttgcctctgtccgtgccccttccctgggtttgggagccaggactcccagaacctctaagtgctgctgtggagtgaggtgtattggtgttgcagccgcagagaaatgccccagtgttatttattccccagtgactccagggtgacaaggcctgcttgactttccagaatgaccttgagttaacaggacagttgatggagccccagggtttacatgaagcagaaccttctttggttccatgttgactgacttatggcatgactcttcaaccccgaggtccctgttgtcagatctattgtttgttgcactaaaatgaggatccagggcagcaggccagagaaagcaaaggtgcactccagactctgggggtggacatctgaccccaagggggctgctgctcctctcttgggtagggtagtggctggggtggagtgggaagggagcattgcagcctaagaagaaggccagagagggaaaaggcaggtgcttttggcagagaccataagagaaacctgccaaggagcatccttggcagtgggaatgttctttctgctctatactgtggcctgcaggagggttggagtgctcttcccactccagctgacagccacaccgtggcagcttgctgggctttgggaagtttgctgtgctttggaacaatcacagggaatggccacaaacctgcccgcctaagaccctgaatccgtacttgggtcacatgactctcattttatttacagctgtgctccacactcagaaaattccctggggtcaccttctagttgcccccattcccagcctgactagaactcctgtcttctttctccatggagcctacctctgtctgagacaggtgcctaacctgggacctgtggtcatgtgagtctgggatattctttagcttacctgggcacaaacagaattttccatttattaagcagtacaaatgtttttcatccattcctaatcaaattctgtctggggacgaagggttggacgggatgacctccagaagtcccttcaatttctagtacctgtgactcttagccctcaccacagccttctaaattcccaaatcctagactgctcctgggcattagcaaggcagagcctttttacctggcctagaaagggcaaggggtgaggataggacagagggattttgttcaagtttgctgcaacccaagtggacgttaggccaggccttatctgaaaggccagcagctgatgctgtactaacccagtctttcttcactctggcttcaaaaagccacagcagagcattgtcaccgcaggtgctcatgctgctcccctaaagccaggctcaggagaagccagtgtctaggcactgagcagggatctgccccctagttcaggtccaaattcaccttcccctaaaccccaagcttcccaacagatcatatggtaggaccctcgagagccttacttcaaagtgcctgggctcagcctggtttctgggtgctagatccagcccaaacctgggaaggccagccttgtacagtctgctcctcttgttcctgaaatgtgtttccttttcaggagatggggaataatttccttcaggcagctgaaattcaccaagaacagcgggtacttatttctcagctgtgccttccctttctaagcaaccacactgcttggcccttcaagggtcagggtgagacgtgatgggctaggcctccgttgtctggttgctaatgacagccttgcaacccaaggtgaggtgaactccaggcatgtgtctggccctaactcctataaagtgcctcggacagtccgcagttgtagcagaaaccaacaagaaccactccttcatgtttggaaaataatttctcttgtattatctcctttgaagaaggcaaggctgataatatgacaaacatcattgtttagatgaggctcagagaggtagcactctcagagtgttttgaccagtttaagccgcagacctggagcttcagccaggtctgactccaaagctgttccattacaccacagcattgtgtggaatttgaggtctagagagaaccaataaaagtggtaattgggaactgaaatccttgagagttccggggagaaacccagagatgcctgatttcattcctcgatggtaatacccgtcctctcggctgccaggggctctgtggcaaaaagagtcagacatttctttggaaaacagcgaacagccttagagctcttgtgttcagaagaatcttcctggcacaatgttggagcagcaggcctctgggacccacagaacttgtggcctttatgttctttcacccatcctaggaaccagccaaccatcatgtgtagagcccctactgtgggcaaagtcctcctttcattaccctacagacagcttacaggagccagcctgcttcccacaactactagtgtgactccttatctctttccaccataccttagagactttgatactaccagggtctctcagggatggagggaagacctgaaagagaggactggttctgaggccagaaaggtgtgaggagagaggaggaaaagtcttcctaattgtgcccctaaagagcatcctgataccattctattctccagacatggaggggatgataaaggaaataggatctccactggacccttgattcattctgaaccctccaaaggaactctagagggcgagggatgatgagggaagcaataggtagctggggagccctattgctgctaagtcattggcaaagtgacaaagcaatttactgatgagagaatgtggaaatagatgtgcagtttggaattatgttggtgtgaatttgccagaggaccaatgcttgcatggagaatgggacgaggacatttgtgggcaagcagatgacagaggtttgaaggagaatggcatggcaggagtctctgccagttacttgggcttcaacagccaagctggcacaaaagacagctggcggaggctgctcggctactggttacctggagaagtagtatttgcctatttcccccttcatccatcctgagccaaatttcttttgctgaacaggaaagagctaggaaccctggaggtaaacaaagactttgatccatgtatgagtgtatgtgtttatgtaacttcctgtggatgcaaatagattcagagaaatttagagctaaaaaggcccttagagggaatctagcccaacctacattccaccctgttacttatgtagaaactgaggcccagagagggaagatgacctgccccaagtggtgagcaagcaccaacctccagactcagcagagtgagggggtaaagcagttcctgtcccacatggccatcttctttcttccacccacaaactccaggctggaagtacttggcccccttcaggagcctggccaggcagggagagagtagctgcagccttcatcagaactcttcctcctcccaaggcattctcccagctctagcctctggactggaaagcacaagactggcccagtgccagcaagtccttaggctactgtaatgctgcctcaggacccatccctgcctggaggctcctctaggccctgtgagcacaaagaagaaagctgatttttgtcttttaatccatttcaggactctctccaggagggctcggggtgtgtcatttctatattcctccagctgggattggggggtgggctttgttgtgagaatggcctggagcaggcccaatgctgcttttgggggtcagcatccagtgtgagatactgtgtatataaactatatataatgtatataaactgggatgtaagtttgtgtaaattaatggtttattctttgcaaataaaacgctttccccgtctgttcttg

SEQ ID NO: 348 - DNA, 843 bp, Homo sapiens
  source 1..843: mol_type = genomic DNA
attccctcggcgggccgagcctcccctctctcccgcccctcctcctccctttcccacccctcggagtagagctgcacatgcggctgctccctgctccgtcccgcccagccactgtcgcgcaggaacgggtccctgcagcccccagccgatggcaggacagtagccgcctgtcagaggtcgtgaacggctgaggcagacgcagcggctcccgggcctcaagagagtgggtgtctccggaggccatgggctacccggaggtggagcgcagggaactcctgcctgcagcagcgccgcgggagcgagggagccagggctgcgggtgtggcggggcccctgcccgggcgggcgaagggaacagctgcctgctcttcctgggtttctttggcctctcgctggccctccacctgctgacgttgtgctgctacctagagttgcgctcggagttgcggcgggaacgtggagccgagtcccgccttggcggctcgggcacccctggcacctctggcaccctaagcagcctcggtggcctcgaccctgacagccccatcaccagtcaccttgggcagccgtcacctaagcagcagccattggaaccgggagaagccgcactccactctgactcccaggacgggcaccagggacaccaatgagttgtgtcttccctctgtccactctcagcaccttcactctgaagatctgttaaaagcacacgagtcgtctcagtccctcagtgggagctgtttcacctggcgtcatctagtcagccatcttcaataataactgttaaatggacatttatatccactgaaaccactaagtgaaataaagatgtgtttaggcaaa

SEQ ID NO: 349 - DNA, 1381 bp, Homo sapiens
  source 1..1381: mol_type = genomic DNA
ttcccacccctcggagtagagctgcacatgcggctgctccctgctccgtcccgcccagccactgtcgcgcaggaacgggtccctgcagcccccagccgatggcaggacagtagccgcctgtcagaggtcgtgaacggctgaggcagacgcagcggctcccgggcctcaagagagtgggtgtctccggaggccatgggctacccggaggtggagcgcagggaactcctgcctgcagcagcgccgcgggagcgagggagccagggctgcgggtgtggcggggcccctgcccgggcgggcgaagggaacagctgcctgctcttcctgggtttctttggcctctcgctggccctccacctgctgacgttgtgctgctacctagagttgcgctcggagttgcggcgggaacgtggagccgagtcccgccttggcggctcgggcacccctggcacctctggcaccctaagcagcctcggtggcctcgaccctgacagccccatcaccagtcaccttgggcagccgtcacctaagcagcagccattggaaccgggagaagccgcactccactctgactcccaggacgggcaccagatggccctattgaatttcttcttccctgatgaaaagccatactctgaagaagaaagtaggcgtgttcgccgcaataaaagaagcaaaagcaatgaaggagcagatggcccagttaaaaacaagaaaaagggaaagaaagcaggacctcctggacccaatggccctccaggacccccaggacctccaggaccccagggacccccaggaattccagggattcctggaattccaggaacaactgttatgggaccacctggtcctccaggtcctcctggtcctcaaggaccccctggcctccagggaccttctggtgctgctgataaagctggaactcgagaaaaccagccagctgtggtgcatctacagggccaagggtcagcaattcaagtcaagaatggtggagtgctcaatgactggtctcgcatcactatgaaccccaaggtgtttaagctacatccccgcagcggggagctggaggtactggtggacggcacctacttcatctatagtcaggtatactacatcaacttcactgactttgccagctatgaggtggtggtggatgagaagcccttcctgcagtgcacacgcagcatcgagacgggcaagaccaactacaacacttgctataccgcaggcgtctgcctcctcaaggcccggcagaagatcgccgtcaagatggtgcacgctgacatctccatcaacatgagcaagcacaccacgttctttggggccatcaggctgggtgaagcccctgcatcctagattccccccattttgcctctgtccgtgc

SEQ ID NO: 350 - DNA, 927 bp, Homo sapiens
  source 1..927: mol_type = genomic DNA
attccctcggcgggccgagcctcccctctctcccgcccctcctcctccctttcccacccctcggagtagagctgcacatgcggctgctccctgctccgtcccgcccagccactgtcgcgcaggaacgggtccctgcagcccccagccgatggcaggacagtagccgcctgtcagaggtcgtgaacggctgaggcagacgcagcggctcccgggcctcaagagagtgggtgtctccggaggccatgggctacccggaggtggagcgcagggaactcctgcctgcagcagcgccgcgggagcgagggagccagggctgcgggtgtggcggggcccctgcccgggcgggcgaagggaacagctgcctgctcttcctgggtttctttggcctctcgctggccctccacctgctgacgttgtgctgctacctagagttgcgctcggagttgcggcgggaacgtggagccgagtcccgccttggcggctcgggcacccctggcacctctggcaccctaagcagcctcggtggcctcgaccctgacagccccatcaccagtcaccttgggcagccgtcacctaagcagcagccattggaaccgggagaagccgcactccactctgactcccaggacgggcaccaggactttgactacatcatttcattctcttatggcctacaaggtttctgctgagaaatccactgatattctaatggatattcctttggacaccaatgagttgtgtcttccctctgtccactctcagcaccttcactctgaagatctgttaaaagcacacgagtcgtctcagtccctcagtgggagctgtttcacctggcgtcatctagtcagccatcttcaataataactgttaaatggacatttatatccactgaaaccactaagtgaaataaagatgtgtttaggcaaa

SEQ ID NO: 351 - DNA, 5679 bp, Homo sapiens
  source 1..5679: mol_type = genomic DNA
ctttttattttgagcctttttgatactgaacatgatatctgagtgaagaatttttgttttattattaagaaataaatgtatcttgcttcttgagatctccctggcttcagcaatttgtagttatttccactatagaccattaagaatatatttcaaaggcaagctaacaaagttcaagtaaaaattattttttatatattacagcttctaattggcattggtttcttctcaggttaaagctgtatttttcttaaaggcttataaaaattttgctgaaaaaaatgttggtgcttcggtgcaggcttggaacctcttttcctaaactagataacttggtaccaaaaggcaaaatgaagattctcctggtctttctagggcttcttggtaattctgttgctatgccaatgcacatgccccgaatgcctggatttagcagtaaaagtgaggagatgatgcggtataatcaattcaactttatgaacggcccacatatggcacacctggggcccttctttggaaacggtctccctcagcaatttccacagtaccagatgcccatgtggcctcagccaccacccaacacatggcatccacggaaatcctcagcacccaaacgtcataacaagactgatcagacccaagaaacccagaaacccaaccagactcagtcaaaaaagccaccacaaaagcggcctttgaagcagccatcacataatcaacctcagcccgaagaggaagctcaaccccctcaggcattcccaccatttggaaatgggctattcccctatcaacaaccaccatggcaaattccacagaggttaccaccaccaggttatggacgcccaccaatcagcaatgaagaaggggggaatccttactttggatattttggatatcatggctttgggggtcgccctccttattattcagaagaaatgtttgaacaagattttgaaaaacccaaagaagaagatcctcctaaagcagaaagtccaggcacagaacccacagctaattcaacagtcactgagacgaattctacccaaccaaatcctaaagggagtcagggaggaaatgacaccagccccacaggaaacagtaccccaggactaaacactgggaacaaccctccagctcaaaatgggattggcccactccctgcagtcaacgcttcaggccagggagggccaggaagtcaaatcccatggagaccaagtcagccaaatattcgtgaaaatcatccatatcctaatataagaaattttccttcaggaagacagtggtatttcactggtactgtcatggggcacagacagaataggcctttttacagaaatcaacaagttcaaaggggtcctcggtggaacttctttgcttgggaacgtaaacaagtagctcgtccaggaaatccagtttatcacaaagcttaccctcctacttcaagaggcaattatcccaattatgcaggaaatccagcaaatctcagaagaaagcctcaggggccaaataaacaccctgtaggaactactgttgccccactgggtcccaaacctggccctgttgttcgcaatgaaaaaatccaaaatccaaaggagaagcccctgggtccaaaagaacaaataatagttcctacaaagaatccaaccagcccctggagaaactctcaacagtatgaagttaataaatcaaattataaactgcctcactctgagggttatatgccagtcccaaattttaattctgttgatcaacatgaaaactcctattacccaagaggagattccagaaaagtcccaaattctgatggacaaacccaaagccagaatttgcccaaagggattgttttagggtcaagaaggatgccatatgaatcagaaactaatcagtcagaattaaagcacagctcatatcagcctgctgtataccctgaggaaatcccttctcctgcaaaagaacattttcctgctggaagaaatacttgggaccaccaagaaatctctccaccttttaaggaagatccagggaggcaagaagaacatttaccccatccttcccatggttctagaggaagtgttttctaccctgaatataacccatatgatcccagggaaaactcaccataccttagaggcaatacatgggatgagagagatgattctcccaatactatggggcaaaaagaaagtccactctaccccataaataccccagaccagaaggagatagtcccttataatgaagaggacccagttgatccaactggagatgaagtctttcctggacaaaatagatggggtgaagagttgagcttcaaaggaggcccaacagttaggcactatgaaggtgaacaatatacctcaaatcagccaaaggaatatcttccctattctttagataatccatcaaaaccaagggaggatttttattacagtgaattttacccatggagcccggatgagaattttccatcatataatacagcttctactatgccaccacctatagagagcaggggctactacgttaataatgccgctggaccagaagaaagcactctatttccttcacggaattcctgggaccacaggatacaagcccaagggcagagagaaagaaggccgtattttaacagaaatatctgggatcaggcaacacatttacaaaaagccccagctaggccaccagaccagaaaggtaaccagccctattacagtaacaccccagctgggcttcagaaaaatccaatatggcatgaaggtgagaatttgaactatggcatgcaaataactaggatgaattctccagagagagaacattcatctttccctaacttcatcccaccaagttacccatcaggtcaaaaagaagcacatttatttcacctaagccagagaggctcttgctgtgctggtagctccacagggcccaaggacaatccactagctctacaagactacactccatcctatggtcttgcacctggggagaaccaagacaccagtcctctgtatacagacggtagtcataccaagcagacaagagatatcatctccccaacaagcatcctaccaggccaaagaaacagctcagagaagagggaaagccaaaacccttttagagatgatgtgtccacgctgaggaggaacacaccatgttctataaagaatcaactgggccaaaaggaaattatgccctttcctgaagccagttcccttcaatcaaagaatacaccttgtctcaaaaatgatcttggaggagatgggaacaacattctggaacaagtttttgaagacaaccagctcaatgaaagaactgttgaccttactcctgagcagcttgttattggtacacctgatgaaggctccaatccagaaggcatccaaagtcaagtccaagaaaatgagagtgagaggcaacagcaaagaccatctaacattctgcatttgccatgctttggctccaaattagcaaagcatcactcttccaccaccggaactccatctagcgatggaaggcaaagcccatttgatggggattcaattacgcctactgaaaatcctaacacattggttgagttagctactgaggaacaatttaagagtataaatgtagacccacttgatgcagatgaacacagtccatttgaattccttcaaagagggaccaatgtacaggaccaggtacaagactgcttactacttcaggcctaggggttatccaaccaagcattcttggggaaagagaaatcactgacattctataccaatggttcccaaaattttttccccaagacttaattaagtgtctgactgtcttggtgatccttaagttttctcccctctcagcaataggagtagcgacccaggtggagctgagattaggcctctggggatcaccagatctagcactttcacagattagtgcagaccttaaaaaagcaagaaggccatgaccatccctgcctcgaaacttgcaagtcacttgtctgagttagtttccttttgcttgatgacttcttttgctctcaaagttccatacttgcaaaattggtttttcaagactgaaaggcagattaactttccattctacttatggagatccacacatcagtatagtcctgatgcactgtacgttttttgcttgtgttgatcttgtcaggtttttttcctactcaatattctcttcaagcattttttttcttccactgccactctctttacctttatcatttctttttcttagctttcttccttcttttctctctccctcaaccattctgtatttagctttctaatcctcatctttttctctctgtatatcacttcttacatattaaattagctattttaaccatttctagtctcttctttatgtctacctcctccattatgtcttcgtctcttccaacctatctgttctgtctcccaatgtaccacttatcaactaatccctctcctctctgattcctttcttcccttcaatttatctttttccctgttacaccattttcatcttaagactgcatgtcactctcttcctttttgtatccactctccaaatcgtaccctaaatttttcttgacccagcttaaccatcattacagaatatattttggaaatggtagacactgatagctactttgtttttagttatcttagggtctctaccaagtagacacagttcagttagagagacgtatttaaggagaagggaaggcaggatacccagaactagcagcctagggaaaaggcttaggaagatggagaatgaggaactgaagaaactgccgctctgagactgcacatccaggaaaaaagactaggacttgccacacactgccaattcataatccgcaggatctgtagaagacattttgggaaacactgtcttaaataaaaactcaatgtttagttgtttttttttttttttactagttcagcataagggattctaccagtatgtgctactactaacattcttcatgtccatgcagaattacttacagacactctttcttggtatcttgaataaattgtgtaaattattttgaaaagtggatatttctatatgccttgcttataatacatcagggattattattcttattaataacatgttggcctattatctggatgtcccttgcctagagcaggaaaaaagtctcagaattacctaaaaacatactttataactttaagagatttcttaggatacatcttcaggggcagatttcataacaacatctcaaaaatttggggaaacacaacgttgaaaacttcctaagaaaaggaatcttgcccttgaatcttctgaagtacctagcacagtgtcttcaacatagaaggtacccaataaatatatatcaattcattttttaatgactttcaacactcccatgaaaacaccgtagtctgcttttcctgaaaggtgactgtctaggatgctgaatgagccaccactccgtagctttatatattcagcaacatttccatcatagaatttcagcgttagaagggatcttagaggtagattatccaggccatcccctactgcttacattcccctccccctggccagttttatattttaatcacacattgaaaaattcattaacttattctgtataaaactgtcttttaagaattatcctttcaaaataaaaatgttattgtttcacta

SEQ ID NO: 352 - DNA, 1330 bp, Homo sapiens
  source 1..1330: mol_type = genomic DNA
cccggagccggaccggggccaccgcgcccgctctgctccgacaccgcgccccctggacagccgccctctcctccaggcccgtggggctggccctgcaccgccgagcttcccgggatgagggcccccggtgtggtcacccggcgcgccccaggtcgctgagggaccccggccaggcgcggagatgggggtgcacgaatgtcctgcctggctgtggcttctcctgtccctgctgtcgctccctctgggcctcccagtcctgggcgccccaccacgcctcatctgtgacagccgagtcctggagaggtacctcttggaggccaaggaggccgagaatatcacgacgggctgtgctgaacactgcagcttgaatgagaatatcactgtcccagacaccaaagttaatttctatgcctggaagaggatggaggtcgggcagcaggccgtagaagtctggcagggcctggccctgctgtcggaagctgtcctgcggggccaggccctgttggtcaactcttcccagccgtgggagcccctgcagctgcatgtggataaagccgtcagtggccttcgcagcctcaccactctgcttcgggctctgggagcccagaaggaagccatctcccctccagatgcggcctcagctgctccactccgaacaatcactgctgacactttccgcaaactcttccgagtctactccaatttcctccggggaaagctgaagctgtacacaggggaggcctgcaggacaggggacagatgaccaggtgtgtccacctgggcatatccaccacctccctcaccaacattgcttgtgccacaccctcccccgccactcctgaaccccgtcgaggggctctcagctcagcgccagcctgtcccatggacactccagtgccagcaatgacatctcaggggccagaggaactgtccagagagcaactctgagatctaaggatgtcacagggccaacttgagggcccagagcaggaagcattcagagagcagctttaaactcagggacagagccatgctgggaagacgcctgagctcactcggcaccctgcaaaatttgatgccaggacacgctttggaggcgatttacctgttttcgcacctaccatcagggacaggatgacctggataacttaggtggcaagctgtgacttctccaggtctcacgggcatgggcactcccttggtggcaagagcccccttgacaccggggtggtgggaaccatgaagacaggatgggggctggcctctggctctcatggggtccaagttttgtgtattcttcaacctcattgacaagaactgaaaccaccaa

SEQ ID NO: 353 - DNA, 1275 bp, Homo sapiens
  source 1..1275: mol_type = genomic DNA
gcgccgagaccacactttcatggaggcggtgaaggcggaagcgtgggagggggccgcggtggcccaggacctgctggctctggggtatggaggtgtcccgggggcggcgtcgcggggcgcctcatgcccagacttcagggggctgtgcgtgcggctggcggcggagctggcgacgctgggcgccctcgagcagcagcgagaggcgggcgcggaggtgctgagcgccggcgacggccctggcgcggaggaggactttctgcggcagctcggcagcctgctgcgggagctgcactgcccggatcgcgcgctctgcggcggggatggcgcggctgcgcttcgggaacccggtgccggactgcgcctgctgcgctttctctgctcagagctccaagccacccgcctcctgtgcctccgctctctgctggatccgagtcctaggccaccccttggtgaaggggtagtggagggagccggcatggtccaagaactggaccttaccctccaagccctggggctgcccagacctgcaccagggacccccgccagccagctgctgcaggagttgcatgctaagatctcagagctgcagccttctctgcccccagggtccctgcagcccctcctcagctgctcgctagatgcacccagatgggaagcgttggagtctctgtcccaaagcctcagagatcagtaccgctgccgccgctgcctcctcctcaagcgccttgacctcactacatctgctttccactggagtgaccgggcagaggcccaaggagaggccatgagggcagtgctgatcccaattcgagaggttctgaccccagaatcggacatctccattgcacacgttctggctgcccgagccgacctgtcttgtctcgtcccagccaccagcgtggctgtccgcagagggacctgctgtgccatcaacaaggtgcttatgggcaacgttccagaccgggggggccgcccaaatgagctggagcctcccatgcccacctggaggagccgaagagaggatggaggcccccagtgttggggtcgcaagaagaagaagaagaagtaaagggggactggtggtcgggggcggggggtcctccatgagatgctaatgctatcggtaatctctggggagtccgtttaaggctttccttggtatttggcacccaagccccccatctcctattcctgagtccccaaatgccctgctcccattcacgtcaataccaagaaccatgttctccagagaataaatttaatttatgacagctg

SEQ ID NO: 354 - DNA, 1029 bp, Homo sapiens
  source 1..1029: mol_type = genomic DNA
gcgccgagaccacactttcatggaggcggtgaaggcggaagcgtgggagggggccgcggtggcccaggacctgctggctctggggtatggaggtgtcccgggggcggcgtcgcggggcgcctcatgcccagacttcagggggctgtgcgtgcggctggcggcggagctggcgacgctgggcgccctcgagcagcagcgagaggcgggcgcggaggtgctgagcgccggcgacggccctggcgcggaggaggactttctgcggcagctcggcagcctgctgcgggagctgcactgcccggatcgcgcgctctgcggcggggatggcgcggctgcgcttcgggaacccggtgccggactgcgcctgctgcgctttctctgctcagagctccaagccacccgcctcctgtgcctccgctctctgctggatccgagtcctaggccaccccttggtgaaggggtagtggagggagccggcatggtccaagaactggaccttaccctccaagccctggggctgcccagacctgcaccagggacccccgccagccagctgctgcaggagttgcatgctaaggaagcgttggagtctctgtcccaaagcctcagagatcagtaccgctgccgccgctgcctcctcctcaagcgccttgacctcactacatctgctttccactggagtgaccgggcagaggtgcttatgggcaacgttccagaccgggggggccgcccaaatgagctggagcctcccatgcccacctggaggagccgaagagaggatggaggcccccagtgttggggtcgcaagaagaagaagaagaagtaaagggggactggtggtcgggggcggggggtcctccatgagatgctaatgctatcggtaatctctggggagtccgtttaaggctttccttggtatttggcacccaagccccccatctcctattcctgagtccccaaatgccctgctcccattcacgtcaataccaagaaccatgttctccagagaataaatttaatttatgacagctg

SEQ ID NO: 355 - DNA, 3678 bp, Homo sapiens
  source 1..3678: mol_type = genomic DNA
aggatgggaactaggagtggcagcaatcctttctttcagctggagtgctcctcaggagccagccccacccttagaaaagatgttttccatgaggatcgtctgcctggtcctaagtgtggtgggcacagcatggactgcagatagtggtgaaggtgactttctagctgaaggaggaggcgtgcgtggcccaagggttgtggaaagacatcaatctgcctgcaaagattcagactggcccttctgctctgatgaagactggaactacaaatgcccttctggctgcaggatgaaagggttgattgatgaagtcaatcaagattttacaaacagaataaataagctcaaaaattcactatttgaatatcagaagaacaataaggattctcattcgttgaccactaatataatggaaattttgagaggcgatttttcctcagccaataaccgtgataatacctacaaccgagtgtcagaggatctgagaagcagaattgaagtcctgaagcgcaaagtcatagaaaaagtacagcatatccagcttctgcagaaaaatgttagagctcagttggttgatatgaaacgactggaggtggacattgatattaagatccgatcttgtcgagggtcatgcagtagggctttagctcgtgaagtagatctgaaggactatgaagatcagcagaagcaacttgaacaggtcattgccaaagacttacttccctctagagataggcaacacttaccactgataaaaatgaaaccagttccagacttggttcccggaaattttaagagccagcttcagaaggtacccccagagtggaaggcattaacagacatgccgcagatgagaatggagttagagagacctggtggaaatgagattactcgaggaggctccacctcttatggaaccggatcagagacggaaagccccaggaaccctagcagtgctggaagctggaactctgggagctctggacctggaagtactggaaaccgaaaccctgggagctctgggactggagggactgcaacctggaaacctgggagctctggacctggaagtactggaagctggaactctgggagctctggaactggaagtactggaaaccaaaaccctgggagccctagacctggtagtaccggaacctggaatcctggcagctctgaacgcggaagtgctgggcactggacctctgagagctctgtatctggtagtactggacaatggcactctgaatctggaagttttaggccagatagcccaggctctgggaacgcgaggcctaacaacccagactggggcacatttgaagaggtgtcaggaaatgtaagtccagggacaaggagagagtaccacacagaaaaactggtcacttctaaaggagataaagagctcaggactggtaaagagaaggtcacctctggtagcacaaccaccacgcgtcgttcatgctctaaaaccgttactaagactgttattggtcctgatggtcacaaagaagttaccaaagaagtggtgacctccgaagatggttctgactgtcccgaggcaatggatttaggcacattgtctggcataggtactctggatgggttccgccataggcaccctgatgaagctgccttcttcgacactgcctcaactggaaaaacattcccaggtttcttctcacctatgttaggagagtttgtcagtgagactgagtctaggggctcagaatctggcatcttcacaaatacaaaggaatccagttctcatcaccctgggatagctgaattcccttcccgtggtaaatcttcaagttacagcaaacaatttactagtagcacgagttacaacagaggagactccacatttgaaagcaagagctataaaatggcagatgaggccggaagtgaagccgatcatgaaggaacacatagcaccaagagaggccatgctaaatctcgccctgtcagagactgtgatgatgtcctccaaacacatccttcaggtacccaaagtggcattttcaatatcaagctaccgggatccagtaagattttttctgtttattgcgatcaagagaccagtttgggaggatggcttttgatccagcaaagaatggatggatcactgaattttaaccggacctggcaagactacaagagaggtttcggcagcctgaatgacgagggggaaggagaattctggctaggcaatgactacctccacttactaacccaaaggggctctgttcttagggttgaattagaggactgggctgggaatgaagcttatgcagaatatcacttccgggtaggctctgaggctgaaggctatgccctccaagtctcctcctatgaaggcactgcgggtgatgctctgattgagggttccgtagaggaaggggcagagtacacctctcacaacaacatgcagttcagcacctttgacagggatgcagaccagtgggaagagaactgtgcagaagtctatgggggaggctggtggtataataactgccaagcagccaatctcaatggaatctactaccctgggggctcctatgacccaaggaataacagtccttatgagattgagaatggagtggtctgggtttcctttagaggggcagattattccctcagggctgttcgcatgaaaattaggccccttgtgacccaataggctgaagaagtgggaatgggagcactctgtcttctttgctagagaagtggagagaaaatacaaaaggtaaagcagttgagattctctacaacctaaaaaattcctaggtgctattttcttatcctttgtactgtagctaaatgtacctgagacatattagtctttgaaaaataaagttatgtaaggttttttttatctttaaatagctctgtgggttttaacatttttataaagatataccaagggccattcagtacatcaggaaagtggcagacagaagcttctctctgcaaccttgaagactattggtttgagaacttctcttcccataccacccaaaatcataatgccattggaaagcaaaaagttgttttatccatttgatttgaattgttttaagccaatattttaaggtaaaactcactgaatctaaccatagctgacctttgtagtagaatttacaacttataattacaatgcacaatttataattacaatatgtatttatgtcttttgctatggagcaaatccaggaaggcaagagaaacattctttcctaaatataaatgaaaatctatcctttaaactcttccactagacgttgtaatgcacacttatttttttcccaaggagtaaccaatttctttctaaaacacatttaaaattttaaaactatttatgaatattaaaaaaagacataattcacacattaataaacaatctcccaagtattgatttaacttcatttttctaataatcataaactatattctgtgacatgctaattattattaaatgtaagtcgttagttcgaaagcctctcactaagtatgatctatgctatattcaaaattcaacccatttactttggtcaatatttgatctaagttgcatctttaatcctggtggtcttgccttctgatttttaatttgtatccttttctattaagatatatttgtcattttctcttgaatatgtattaaaatatcccaagcaa

SEQ ID NO: 356 - DNA, 2248 bp, Homo sapiens
  source 1..2248: mol_type = genomic DNA
aggatgggaactaggagtggcagcaatcctttctttcagctggagtgctcctcaggagccagccccacccttagaaaagatgttttccatgaggatcgtctgcctggtcctaagtgtggtgggcacagcatggactgcagatagtggtgaaggtgactttctagctgaaggaggaggcgtgcgtggcccaagggttgtggaaagacatcaatctgcctgcaaagattcagactggcccttctgctctgatgaagactggaactacaaatgcccttctggctgcaggatgaaagggttgattgatgaagtcaatcaagattttacaaacagaataaataagctcaaaaattcactatttgaatatcagaagaacaataaggattctcattcgttgaccactaatataatggaaattttgagaggcgatttttcctcagccaataaccgtgataatacctacaaccgagtgtcagaggatctgagaagcagaattgaagtcctgaagcgcaaagtcatagaaaaagtacagcatatccagcttctgcagaaaaatgttagagctcagttggttgatatgaaacgactggaggtggacattgatattaagatccgatcttgtcgagggtcatgcagtagggctttagctcgtgaagtagatctgaaggactatgaagatcagcagaagcaacttgaacaggtcattgccaaagacttacttccctctagagataggcaacacttaccactgataaaaatgaaaccagttccagacttggttcccggaaattttaagagccagcttcagaaggtacccccagagtggaaggcattaacagacatgccgcagatgagaatggagttagagagacctggtggaaatgagattactcgaggaggctccacctcttatggaaccggatcagagacggaaagccccaggaaccctagcagtgctggaagctggaactctgggagctctggacctggaagtactggaaaccgaaaccctgggagctctgggactggagggactgcaacctggaaacctgggagctctggacctggaagtactggaagctggaactctgggagctctggaactggaagtactggaaaccaaaaccctgggagccctagacctggtagtaccggaacctggaatcctggcagctctgaacgcggaagtgctgggcactggacctctgagagctctgtatctggtagtactggacaatggcactctgaatctggaagttttaggccagatagcccaggctctgggaacgcgaggcctaacaacccagactggggcacatttgaagaggtgtcaggaaatgtaagtccagggacaaggagagagtaccacacagaaaaactggtcacttctaaaggagataaagagctcaggactggtaaagagaaggtcacctctggtagcacaaccaccacgcgtcgttcatgctctaaaaccgttactaagactgttattggtcctgatggtcacaaagaagttaccaaagaagtggtgacctccgaagatggttctgactgtcccgaggcaatggatttaggcacattgtctggcataggtactctggatgggttccgccataggcaccctgatgaagctgccttcttcgacactgcctcaactggaaaaacattcccaggtttcttctcacctatgttaggagagtttgtcagtgagactgagtctaggggctcagaatctggcatcttcacaaatacaaaggaatccagttctcatcaccctgggatagctgaattcccttcccgtggtaaatcttcaagttacagcaaacaatttactagtagcacgagttacaacagaggagactccacatttgaaagcaagagctataaaatggcagatgaggccggaagtgaagccgatcatgaaggaacacatagcaccaagagaggccatgctaaatctcgccctgtcagaggtatccacacttctcctttggggaagccttccctgtccccctagactaagttaaatatttctgcacagtgttcccatggccccttgcatttccttcttaactctctgttacacgtcattgaaactacacttttttggtctgtttttgtgctagactgtaagttccttgggggcagggcctttgtctgtctcatctctgtattcccaaatgcctaacagtacagagccatgactcaataaatacatgttaaatggatgaatgaattcctctgaaactct

SEQ ID NO: 357 - DNA, 928 bp, Homo sapiens
  source 1..928: mol_type = genomic DNA
agcaatcctttctttcagctggagtgctcctcaggagccagccccacccttagaaaagatgttttccatgaggatcgtctgcctggtcctaagtgtggtgggcacagcatggactgcagatagtggtgaaggtgactttctagctgaaggaggaggcgtgcgtggcccaagggttgtggaaagacatcaatctgcctgcaaagattcagactggcccttctgctctgatgaagactggaactacaaatgcccttctggctgcaggatgaaagggttgattgatgaagtcaatcaagattttacaaacagaataaataagctcaaaaattcactatttgaatatcagaagaacaataaggattctcattcgttgaccactaatataatggaaattttgagaggcgatttttcctcagccaataaccgtgataatacctacaaccgagtgtcagaggatctgagaagcagaattgaagtcctgaagcgcaaagtcatagaaaaagtacagcatatccagcttctgcagaaaaatgttagagctcagttggttgatatgaaacgactggaggtggacattgatattaagatccgatcttgtcgagggtcatgcagtagggctttagctcgtgaagtagatctgaaggactatgaagatcagcagaagcaacttgaacaggtcattgccaaagacttacttcccgtggtaaatcttcaagttacagcaaacaatttactagtagcacgagttacaacagaggagactccacatttgaaagcaagagctataaaatggcagatgaggccggaagtgaagccgatcatgaaggaacacatagcaccaagagaggccatgctaaatctcgccctgtcagaggtatccacacttctcctttggggaagccttccctgtccccctagactaagttaa

SEQ ID NO: 358 - DNA, 1975 bp, Homo sapiens
  source 1..1975: mol_type = genomic DNA
gaagtcattcctagcagaggactcagatatatataggattgaagatctctcagttaagtctacatgaaaaggatggtttcttggagcttccacaaacttaaaaccatgaaacatctattattgctactattgtgtgtttttctagttaagtcccaaggtgtcaacgacaatgaggagggtttcttcagtgcccgtggtcatcgaccccttgacaagaagagagaagaggctcccagcctgaggcctgccccaccgcccatcagtggaggtggctatcgggctcgtccagccaaagcagctgccactcaaaagaaagtagaaagaaaagcccctgatgctggaggctgtcttcacgctgacccagacctgggggtgttgtgtcctacaggatgtcagttgcaagaggctttgctacaacaggaaaggccaatcagaaatagtgttgatgagttaaataacaatgtggaagctgtttcccagacctcctcttcttcctttcagtacatgtatttgctgaaagacctgtggcaaaagaggcagaagcaagtaaaagataatgaaaatgtagtcaatgagtactcctcagaactggaaaagcaccaattatatatagatgagactgtgaatagcaatatcccaactaaccttcgtgtgcttcgttcaatcctggaaaacctgagaagcaaaatacaaaagttagaatctgatgtctcagctcaaatggaatattgtcgcaccccatgcactgtcagttgcaatattcctgtggtgtctggcaaagaatgtgaggaaattatcaggaaaggaggtgaaacatctgaaatgtatctcattcaacctgacagttctgtcaaaccgtatagagtatactgtgacatgaatacagaaaatggaggatggacagtgattcagaaccgtcaagacggtagtgttgactttggcaggaaatgggatccatataaacagggatttggaaatgttgcaaccaacacagatgggaagaattactgtggcctaccaggtgaatattggcttggaaatgataaaattagccagcttaccaggatgggacccacagaacttttgatagaaatggaggactggaaaggagacaaagtaaaggctcactatggaggattcactgtacagaatgaagccaacaaataccagatctcagtgaacaaatacagaggaacagccggtaatgccctcatggatggagcatctcagctgatgggagaaaacaggaccatgaccattcacaacggcatgttcttcagcacgtatgacagagacaatgacggctggttaacatcagatcccagaaaacagtgttctaaagaagacggtggtggatggtggtataatagatgtcatgcagccaatccaaacggcagatactactggggtggacagtacacctgggacatggcaaagcatggcacagatgatggtgtagtatggatgaattggaaggggtcatggtactcaatgaggaagatgagtatgaagatcaggcccttcttcccacagcaatagtccccaatacgtagatttttgctcttctgtatgtgacaacatttttgtacattatgttattggaattttctttcatacattatattcctctaaaactctcaagcagacgtgagtgtgactttttgaaaaaagtataggataaattacattaaaatagcacatgattttcttttgttttcttcatttctcttgctcaccaagaagtaacaaaagtatagttttgacagagttggtgttcataatttcagttctagttgattgcgagaattttcaaataaggaagaggggtcttttatccttgtcgtaggaaaaccatgacggaaaggaaaaactgatgtttaaaagtccacttttaaaactatatttatttatgtaggatctgtcaaagaaaacttccaaaaagatttattaattaaaccagactctgttgcaataa

SEQ ID NO: 359 - DNA, 1759 bp, Homo sapiens
  source 1..1759: mol_type = genomic DNA
aagtctacatgaaaaggatggtttcttggagcttccacaaacttaaaaccatgaaacatctattattgctactattgtgtgtttttctagttaagtcccaaggtgtcaacgacaatgaggagggtttcttcagtgcccgtggtcatcgaccccttgacaagaagagagaagaggctcgtccagccaaagcagctgccactcaaaagaaagtagaaagaaaagcccctgatgctggaggctgtcttcacgctgacccagacctgggggtgttgtgtcctacaggatgtcagttgcaagaggctttgctacaacaggaaaggccaatcagaaatagtgttgatgagttaaataacaatgtggaagctgtttcccagacctcctcttcttcctttcagtacatgtatttgctgaaagacctgtggcaaaagaggcagaagcaagtaaaagataatgaaaatgtagtcaatgagtactcctcagaactggaaaagcaccaattatatatagatgagactgtgaatagcaatatcccaactaaccttcgtgtgcttcgttcaatcctggaaaacctgagaagcaaaatacaaaagttagaatctgatgtctcagctcaaatggaatattgtcgcaccccatgcactgtcagttgcaatattcctgtggtgtctggcaaagaatgtgaggaaattatcaggaaaggaggtgaaacatctgaaatgtatctcattcaacctgacagttctgtcaaaccgtatagagtatactgtgacatgaatacagaaaatggaggatggacagtgattcagaaccgtcaagacggtagtgttgactttggcaggaaatgggatccatataaacagggatttggaaatgttgcaaccaacacagatgggaagaattactgtggcctaccaggtgaatattggcttggaaatgataaaattagccagcttaccaggatgggacccacagaacttttgatagaaatggaggactggaaaggagacaaagtaaaggctcactatggaggattcactgtacagaatgaagccaacaaataccagatctcagtgaacaaatacagaggaacagccggtaatgccctcatggatggagcatctcagctgatgggagaaaacaggaccatgaccattcacaacggcatgttcttcagcacgtatgacagagacaatgacggctggttaacatcagatcccagaaaacagtgttctaaagaagacggtggtggatggtggtataatagatgtcatgcagccaatccaaacggcagatactactggggtggacagtacacctgggacatggcaaagcatggcacagatgatggtgtagtatggatgaattggaaggggtcatggtactcaatgaggaagatgagtatgaagatcaggcccttcttcccacagcaatagtccccaatacgtagatttttgctcttctgtatgtgacaacatttttgtacattatgttattggaattttctttcatacattatattcctctaaaactctcaagcagacgtgagtgtgactttttgaaaaaagtataggataaattacattaaaatagcacatgattttcttttgttttcttcatttctcttgctcaccaagaagtaacaaaagtatagttttgacagagttggtgttcataatttcagttctagttgattgcgagaattttcaaataaggaagaggggtcttttatccttgtcgtaggaaaaccatgacggaaagg

SEQ ID NO: 360 - DNA, 1659 bp, Homo sapiens
  source 1..1659: mol_type = genomic DNA
tgacactacaaggctcggagctccgggcactcagacatcatgagttggtccttgcacccccggaatttaattctctacttctatgctcttttatttctctcttcaacatgtgtagcatatgttgctaccagagacaactgctgcatcttagatgaaagattcggtagttattgtccaactacctgtggcattgcagatttcctgtctacttatcaaaccaaagtagacaaggatctacagtctttggaagacatcttacatcaagttgaaaacaaaacatcagaagtcaaacagctgataaaagcaatccaactcacttataatcctgatgaatcatcaaaaccaaatatgatagacgctgctactttgaagtccaggaaaatgttagaagaaattatgaaatatgaagcatcgattttaacacatgactcaagtattcgatatttgcaggaaatatataattcaaataatcaaaagattgttaacctgaaagagaaggtagcccagcttgaagcacagtgccaggaaccttgcaaagacacggtgcaaatccatgatatcactgggaaagattgtcaagacattgccaataagggagctaaacagagcgggctttactttattaaacctctgaaagctaaccagcaattcttagtctactgtgaaatcgatgggtctggaaatggatggactgtgtttcagaagagacttgatggcagtgtagatttcaagaaaaactggattcaatataaagaaggatttggacatctgtctcctactggcacaacagaattttggctgggaaatgagaagattcatttgataagcacacagtctgccatcccatatgcattaagagtggaactggaagactggaatggcagaaccagtactgcagactatgccatgttcaaggtgggacctgaagctgacaagtaccgcctaacatatgcctacttcgctggtggggatgctggagatgcctttgatggctttgattttggcgatgatcctagtgacaagtttttcacatcccataatggcatgcagttcagtacctgggacaatgacaatgataagtttgaaggcaactgtgctgaacaggatggatctggttggtggatgaacaagtgtcacgctggccatctcaatggagtttattaccaaggtggcacttactcaaaagcatctactcctaatggttatgataatggcattatttgggccacttggaaaacccggtggtattccatgaagaaaaccactatgaagataatcccattcaacagactcacaattggagaaggacagcaacaccacctggggggagccaaacaggtcagaccagagcaccctgcggaaacagaatatgactcactttaccctgaggatgatttgtagaaaattaactgctaacttctattgacccacaaagtttcagaaattctctgaaagtttcttccttttttctcttactatatttattgatttcaagtcttctattaaggacatttagccttcaatggaaattaaaactcatttaggactgtatttccaaattactgatatcagagttatttaaaaattgtttatttgaggagataacatttcaactttgttcctaaatatataataataaaatgattgactttatttgca

SEQ ID NO: 361 - DNA, 1760 bp, Homo sapiens
  source 1..1760: mol_type = genomic DNA
aaaaaggaggagcttcaacctgtgtgcaaaatctgggaacctgacagtataggttgggggccaggatgaggaaaaaggaacgggaaagacctgcccacccttctggtaaggaggccccgtgatcagctccagccatttgcagtcctggctatcccaggagcttacataaagggacaattggagcctgagaggtgacagtgctgacactacaaggctcggagctccgggcactcagacatcatgagttggtccttgcacccccggaatttaattctctacttctatgctcttttatttctctcttcaacatgtgtagcatatgttgctaccagagacaactgctgcatcttagatgaaagattcggtagttattgtccaactacctgtggcattgcagatttcctgtctacttatcaaaccaaagtagacaaggatctacagtctttggaagacatcttacatcaagttgaaaacaaaacatcagaagtcaaacagctgataaaagcaatccaactcacttataatcctgatgaatcatcaaaaccaaatatgatagacgctgctactttgaagtccaggaaaatgttagaagaaattatgaaatatgaagcatcgattttaacacatgactcaagtattcgatatttgcaggaaatatataattcaaataatcaaaagattgttaacctgaaagagaaggtagcccagcttgaagcacagtgccaggaaccttgcaaagacacggtgcaaatccatgatatcactgggaaagattgtcaagacattgccaataagggagctaaacagagcgggctttactttattaaacctctgaaagctaaccagcaattcttagtctactgtgaaatcgatgggtctggaaatggatggactgtgtttcagaagagacttgatggcagtgtagatttcaagaaaaactggattcaatataaagaaggatttggacatctgtctcctactggcacaacagaattttggctgggaaatgagaagattcatttgataagcacacagtctgccatcccatatgcattaagagtggaactggaagactggaatggcagaaccagtactgcagactatgccatgttcaaggtgggacctgaagctgacaagtaccgcctaacatatgcctacttcgctggtggggatgctggagatgcctttgatggctttgattttggcgatgatcctagtgacaagtttttcacatcccataatggcatgcagttcagtacctgggacaatgacaatgataagtttgaaggcaactgtgctgaacaggatggatctggttggtggatgaacaagtgtcacgctggccatctcaatggagtttattaccaaggtggcacttactcaaaagcatctactcctaatggttatgataatggcattatttgggccacttggaaaacccggtggtattccatgaagaaaaccactatgaagataatcccattcaacagactcacaattggagaaggacagcaacaccacctggggggagccaaacaggctggagacgtttaaaagaccgtttcaaaagagatttacttttttaaaggactttatctgaacagagagatataatatttttcctattggacaatggacttgcaaagcttcacttcattttaagagcaaaagaccccatgttgaaaactccataacagttttatgctgatgataatttatctacatgcatttcaataaaccttttgtttcctaagactaga

SEQ ID NO: 362 - DNA, 883 bp, Homo sapiens
  source 1..883: mol_type = genomic DNA
ctgtcagctgaggatccagccgaaagaggagccaggcactcaggccacctgagtctactcacctggacaactggaatctggcaccaattctaaaccactcagcttctccgagctcacaccccggagatcacctgaggacccgagccattgatggactcggacgagaccgggttcgagcactcaggactgtgggtttctgtgctggctggtcttctgctgggagcctgccaggcacaccccatccctgactccagtcctctcctgcaattcgggggccaagtccggcagcggtacctctacacagatgatgcccagcagacagaagcccacctggagatcagggaggatgggacggtggggggcgctgctgaccagagccccgaaagtctcctgcagctgaaagccttgaagccgggagttattcaaatcttgggagtcaagacatccaggttcctgtgccagcggccagatggggccctgtatggatcgctccactttgaccctgaggcctgcagcttccgggagctgcttcttgaggacggatacaatgtttaccagtccgaagcccacggcctcccgctgcacctgccagggaacaagtccccacaccgggaccctgcaccccgaggaccagctcgcttcctgccactaccaggcctgccccccgcactcccggagccacccggaatcctggccccccagccccccgatgtgggctcctcggaccctctgagcatggtgggaccttcccagggccgaagccccagctacgcttcctgaagccagaggctgtttactatgacatctcctctttatttattaggttatttatcttatttatttttttatttttcttacttgagataataaagagttccagagg

SEQ ID NO: 363 - DNA, 1312 bp, Homo sapiens
  source 1..1312: mol_type = genomic DNA
gaggcttccaaggcaggatacttgtgtctcagatgcggtcgcttctttcatacagcaattgccgccttgctgaggatcaaggaacctcagtgtcagatcacgccctccccccaaacttagaaattcagatggggcgcagaaatttctcttgttctgcgtgatctgcatagatggtccaagaggtggtttttccaggagcccagcacccctcctccctccgactcagacccaggagtctggccctccattgaaaggaccccaggttacatcatccattcaggctgcccttgccacgatggaattctgtagctcctgccaaatgggtcaaatatcatggttcaggcgcagggagggtgattgggcgggcctgtctgggtataaattctggagcttctgcatctatcccaaaaaacaagggtgttctgtcagctgaggatccagccgaaagaggagccaggcactcaggccacctgagtctactcacctggacaactggaatctggcaccaattctaaaccactcagcttctccgagctcacaccccggagatcacctgaggacccgagccattgatggactcggacgagaccgggttcgagcactcaggactgtgggtttctgtgctggctggtcttctgctgggagcctgccaggcacaccccatccctgactccagtcctctcctgcaattcgggggccaagtccggcagcggtacctctacacagatgatgcccagcagacagaagcccacctggagatcagggaggatgggacggtggggggcgctgctgaccagagccccgaaagtctcctgcagctgaaagccttgaagccgggagttattcaaatcttgggagtcaagacatccaggttcctgtgccagcggccagatggggccctgtatggatcgctccactttgaccctgaggcctgcagcttccgggagctgcttcttgaggacggatacaatgtttaccagtccgaagcccacggcctcccgctgcacctgccagggaacaagtccccacaccgggaccctgcaccccgaggaccagctcgcttcctgccactaccaggcctgccccccgcactcccggagccacccggaatcctggccccccagccccccgatgtgggctcctcggaccctctgagcatggtgggaccttcccagggccgaagccccagctacgcttcctgaagccagaggctgtttactatgacatctcctctttatttattaggttatttatcttatttatttttttatttttcttacttgagataataaagagttccagaggaggataa

SEQ ID NO: 364 - DNA, 1959 bp, Homo sapiens
  source 1..1959: mol_type = genomic DNA
tggctgggctgcgtctgcttcgcgctggtgcaggcggacagtccctcagccccagtgaacgtcaccgtcaggcacctcaaggccaactctgcagtggtgagctgggatgttctggaggatgaggttgtcatcggatttgccatctcccagcagaagaaggatgtgcggatgctgcgcttcatccaggaggtgaacaccaccacccgctcatgtgccctctgggacctggaggaggatacggagtacatagtccacgtgcaggccatctccattcagggccagagcccagccagcgagcctgtgctcttcaagaccccgcgtgaggctgagaagatggcctccaagaacaaagatgaggtaaccatgaaagagatggggaggaaccaacagctgcggacaggcgaggtgctgatcatcgtcgtggtcctgttcatgtgggcaggtgtcattgccctcttctgccgccagtatgacatcattgaagcgtgactgcctgtctgcagggagaaggattccatttttcttctcagctggtccccaggcccacgggcacagggagagggacaactgcagcagtggggaggaggcacagctagctgcacagttctctcttctccttgtcctagtcagatgaaggaggctgcactacaaacccaaattctgcaaaaaaataaaaataagccacaaaactaaaaggcctggccccattctggaaaaggcaaagctgcatgagacacagccttctgcctcctcgcctctcctggactggcttcctctttgagaaaatgcacaaagccctgggagatgacaagcacaaggactgactcaagctgtgtctttcagaccaaggaacatcagagaagctgtggggctgcctgccaggcaggatcatggctgccatcaagccttttctggatccagccatcaaggacatgtttgtggtgtgatgcacacttttgcaagcgtgtaagatgttacctggtttgtctcttttggaaaacaaaaatcagaaggctgcattctagagggcagagaaattcccccgaagactgagctggttgcctgcatcctctatcttctttgacccttatgactgaaagatcatcagtttggaaggtactggtccaatttatttaggaagtatctcttggagtttcagaaatgctagcttggacaactgaaaagtcacatcacagctggcattctgggggctaccaaaacaccccttctggagtagaagctgctggaaggcaggcctgagccattcaccacggacaggaagagcagctctggctatcaccactggcctctggggtcttcatatcttgccatctcatccagggttccatgaaagttacccagggtcctcatgtccttccttagagcctgagtggtgtgaggtgacaggtctctctctccactgcccctttctggtttaaaaaaatggtgcttgatgagggaaggtagactcttccctaggactgacgagttacggctgccagatgcctgcatgggaagaggtggacatctgcatcttccattggtggtcaaggatgggtgtgggagaaccacacctagtgcaagcctggtactcagtaaatatttgttgaaatgaatgataagagcattggtccccaagccagagagccagaagccatcacccaatgaccgccccttccttccggtctacaagagctctcaaggctgggtctgccaccactctgctttgcccaagtgtgacagcactggggaggagagacaggataaagggcagatgtcagcaatactaagggcttcctcatgggagggcatgaggctccactcattgtcttgtgacttccatccctgctgaatggggctgcaaggccaaggctccttaggggagaggtccttacctctgatccacttagagcaataaccactttttaaatgtaaaataaaaagacaaatgaaaaggca

SEQ ID NO: 365 - DNA, 2732 bp, Homo sapiens
  source 1..2732: mol_type = genomic DNA
gcggccgccgggcgccggagccgcgtccccctgcgccgccccgggcctgccggccggaggagccaccatacaccccgggtcgccgagcgcctggccgccccgcgcccgcgccgcgctccgcctgtggctgggctgcgtctgcttcgcgctggtgcaggcggacagtccctcagccccagtgaacgtcaccgtcaggcacctcaaggccaactctgcagtggtgagctgggatgttctggaggatgaggttgtcatcggatttgccatctcccagcagaagaaggatgtgcggatgctgcgcttcatccaggaggtgaacaccaccacccgctcatgtgccctctgggacctggaggaggatacggagtacatagtccacgtgcaggccatctccattcagggccagagcccagccagcgagcctgtgctcttcaagaccccgcgtgaggctgagaagatggcctccaagaacaaagatgaggtaaccatgaaagagatggggaggaaccaacagctgcggacaggcgaggtgctgatcatcgtcgtggtcctgttcatgtgggcaggtgtcattgccctcttctgccgccagtatgacatcatcaaggacaatgaacccaataacaacaaggaaaaaaccaagagtgcatcagaaaccagcacaccagagcaccagggcggggggcttctccgcagcaagatatgaaaaccttttcagtgcttgccctcagcagctaagaagacagacagtagagaatgtgagaggatctcatggttctgatgatgattatccaacaaacatctggccctctctacatctcttccctccatctccttgtaccctctggcttactgtcctctctctggcgcactttcctgaagcctcttattaactcccatctccagaagcacctcaacaatgtcagtggctgaggctgcactcagagggatgactgctgggggtagactgggtgccaggggccatgggcccaggacccagtcttggccattcagttgagtgaggctgaaggctgggtttgaaaaggcaaaaagacaagacatccaggcagggcttctcttttctttccacaagggacaagagcttggcttatttaggctacagccctgctgctgctcccttccttcttctgtcctgtttccagccttgcaagaaggctattcacaattaggcctggctgcttctctcatttttttcctcccagtttccaaacaagccctcagtgaacatcattgaagcgtgactgcctgtctgcagggagaaggattccatttttcttctcagctggtccccaggcccacgggcacagggagagggacaactgcagcagtggggaggaggcacagctagctgcacagttctctcttctccttgtcctagtcagatgaaggaggctgcactacaaacccaaattctgcaaaaaaataaaaataagccacaaaactaaaaggcctggccccattctggaaaaggcaaagctgcatgagacacagccttctgcctcctcgcctctcctggactggcttcctctttgagaaaatgcacaaagccctgggagatgacaagcacaaggactgactcaagctgtgtctttcagaccaaggaacatcagagaagctgtggggctgcctgccaggcaggatcatggctgccatcaagccttttctggatccagccatcaaggacatgtttgtggtgtgatgcacacttttgcaagcgtgtaagatgttacctggtttgtctcttttggaaaacaaaaatcagaaggctgcattctagagggcagagaaattcccccgaagactgagctggttgcctgcatcctctatcttctttgacccttatgactgaaagatcatcagtttggaaggtactggtccaatttatttaggaagtatctcttggagtttcagaaatgctagcttggacaactgaaaagtcacatcacagctggcattctgggggctaccaaaacaccccttctggagtagaagctgctggaaggcaggcctgagccattcaccacggacaggaagagcagctctggctatcaccactggcctctggggtcttcatatcttgccatctcatccagggttccatgaaagttacccagggtcctcatgtccttccttagagcctgagtggtgtgaggtgacaggtctctctctccactgcccctttctggtttaaaaaaatggtgcttgatgagggaaggtagactcttccctaggactgacgagttacggctgccagatgcctgcatgggaagaggtggacatctgcatcttccattggtggtcaaggatgggtgtgggagaaccacacctagtgcaagcctggtactcagtaaatatttgttgaaatgaatgataagagcattggtccccaagccagagagccagaagccatcacccaatgaccgccccttccttccggtctacaagagctctcaaggctgggtctgccaccactctgctttgcccaagtgtgacagcactggggaggagagacaggataaagggcagatgtcagcaatactaagggcttcctcatgggagggcatgaggctccactcattgtcttgtgacttccatccctgctgaatggggctgcaaggccaaggctccttaggggagaggtccttacctctgatccacttagagcaataaccactttttaaatgtaaaataaaaagacaaatgaaaaggca

SEQ ID NO: 366 - DNA, 1698 bp, Homo sapiens
  source 1..1698: mol_type = genomic DNA
acagctcttgccaggcaaggcagccgaccacaggtgagtcttggcatctaccgttttcaagtgaccaggatgaagacactccagtttttcttccttttctgttgctggaaagcaatctgctgcaatagctgtgagctgaccaacatcaccattgcaatagagaaagaagaatgtcgtttctgcataagcatcaacaccacttggtgtgctggctactgctacaccagggatctggtgtataaggacccagccaggcccaaaatccagaaaacatgtaccttcaaggaactggtatacgaaacagtgagagtgcccggctgtgctcaccatgcagattccttgtatacatacccagtggccacccagtgtcactgtggcaagtgtgacagcgacagcactgattgtactgtgcgaggcctggggcccagctactgctcctttggtgaaatgaaagaataaagatcagtggacatttcaggccacatacccttgtcctgaaggaccaagatattcaaaaagtctgtgtgtgtgcaatgtgcccaggggacaaaccactggatcaggggattcagactctactgatccctggtctactggcagagggaactctgggaattgagagtgctgggggccaggactccatcatgattcagctctatattcctaggtctgatttcataaggtttattcagtcttaactcacagacttgtgcctggtttcttctttaaaaatcttagaaatcttctcaggcaatgcctctctcttagggggaaacataagcctagaaggaggaagcagtaatgggagtgagtgaaagaactaactgcagcagtcttctggtagactcttgggccctctagagcaaggtcagcatcttcagcattgtagcgtcaatgcctagcactctgcctggaacttagaaacacaacaatgacttctttagatcagaaaggtcaagggtagaaaatactggaagacgatgtttgaggtaagctgatgaggctgcccgcagccacaccagtcccatgaaagttagtggcatcagttccacctcgccttttctccagcacatggagtattgagacatgatgtatctttctgaattgtttggtacagatggggagtaacagagctcaagatttccaagctattactaccaagcctgttagttaagggcaaaggcaagaaattgtaatttggggctgtggaaattagcctgcctctattcattacttaaacaaattgatcacatgctactaggctcctgcaaaactcctttttgagataaagggaaaaaaccaaactatctcaccctaccctccctaggatccacttctttggaatgacaaaggatttgaaagtaggtttgaaagcagtttcagcaatttaataaatataattaatttgtctacaaatatatttgtataaataaatagctcctttagaaagaattagccatgggggacgaggggaaactgctgttttctaggatcctgtctacatcaatcttctattttatccatccatgttctcccaaatctgtgctttctttcaacaggttatatattaaaactatttcatgagttgatttcttttaaacgtgttaactgtcttagttatgcactcagtttcacactcatattgtttaactaatttatttaaatcttatttttttaataaagatgctagccaccaga

SEQ ID NO: 367 - DNA, 1890 bp, Homo sapiens
  source 1..1890: mol_type = genomic DNA
acagctcttgccaggcaaggcagccgaccacagaccaggatgaagacactccagtttttcttccttttctgttgctggaaagcaatctgctgcaatagctgtgagctgaccaacatcaccattgcaatagagaaagaagaatgtcgtttctgcataagcatcaacaccacttggtgtgctggctactgctacaccagggatctggtgtataaggacccagccaggcccaaaatccagaaaacatgtaccttcaaggaactggtatacgaaacagtgagagtgcccggctgtgctcaccatgcagattccttgtatacatacccagtggccacccagtgtcactgtggcaagtgtgacagcgacagcactgattgtactgtgcgaggcctggggcccagctactgctcctttggtgaaatgaaagaataaagatcagtggacatttcaggccacatacccttgtcctgaaggaccaagatattcaaaaagtctgtgtgtgtgcaatgtgcccaggggacaaaccactggatcaggggattcagactctactgatccctggtctactggcagagggaactctgggaattgagagtgctgggggccaggactccatcatgattcagctctatattcctaggtctgatttcataaggtttattcagtcttaactcacagacttgtgcctggtttcttctttaaaaatcttagaaatcttctcaggcaatgcctctctcttagggggaaacataagcctagaaggaggaagcagtaatgggagtgagtgaaagaactaactgcagcagtcttctggtagactcttgggccctctagagcaaggtcagcatcttcagcattgtagcgtcaatgcctagcactctgcctggaacttagaaacacaacaatgacttctttagatcagaaaggtcaagggtagaaaatactggaagacgatgtttgaggtaagctgatgaggctgcccgcagccacaccagtcccatgaaagttagtggcatcagttccacctcgccttttctccagcacatggagtattgagacatgatgtatctttctgaattgtttggtacagatggggagtaacagagctcaagatttccaagctattactaccaagcctgttagttaagggcaaaggcaagaaattgtaatttggggctgtggaaattagcctgcctctattcattacttaaacaaattgatcacatgctactaggctcctgcaaaactcctttttgagataaagggaaaaaaccaaactatctcaccctaccctccctaggatccacttctttggaatgacaaaggatttgaaagtaggtttgaaagcagtttcagcaatttaataaatataattaatttgtctacaaatatatttgtataaataaatagctcctttagaaagaattagccatgggggacgaggggaaactgctgttttctaggatcctgtctacatcaatcttctattttatccatccatgttctcccaaatctgtgctttctttcaacaggttatatattaaaactatttcatgagttgatttcttttaaacgtgttaactgtcttagttatgcactcagtttcacactcatattgtttaactaatttatttaaatcttatttttttaataaagatgctagccaccagagtcacaggcttggattgttttatgtacaaacagatgacttagatattctgtattttataatattagtggaatgaaatcttaaaatataattcccagtgtttctataaatattacctttccttatctttggagatattaaaaataattttgttggatttctgaagtgttttgtcacttaaatttcctgtcattttttgaagacattttctgatgtaatttggg

SEQ ID NO: 368 - DNA, 1368 bp, Homo sapiens
  source 1..1368: mol_type = genomic DNA
tgggcttcattgtttgcttcccagaccaggatgaagacactccagtttttcttccttttctgttgctggaaagcaatctgctgcaatagctgtgagctgaccaacatcaccattgcaatagagaaagaagaatgtcgtttctgcataagcatcaacaccacttggtgtgctggctactgctacaccagggatctggtgtataaggacccagccaggcccaaaatccagaaaacatgtaccttcaaggaactggtatacgaaacagtgagagtgcccggctgtgctcaccatgcagattccttgtatacatacccagtggccacccagtgtcactgtggcaagtgtgacagcgacagcactgattgtactgtgcgaggcctggggcccagctactgctcctttggtgaaatgaaagaataaagatcagtggacatttcaggccacatacccttgtcctgaaggaccaagatattcaaaaagtctgtgtgtgtgcaatgtgcccaggggacaaaccactggatcaggggattcagactctactgatccctggtctactggcagagggaactctgggaattgagagtgctgggggccaggactccatcatgattcagctctatattcctaggtctgatttcataaggtttattcagtcttaactcacagacttgtgcctggtttcttctttaaaaatcttagaaatcttctcaggcaatgcctctctcttagggggaaacataagcctagaaggaggaagcagtaatgggagtgagtgaaagaactaactgcagcagtcttctggtagactcttgggccctctagagcaaggtcagcatcttcagcattgtagcgtcaatgcctagcactctgcctggaacttagaaacacaacaatgacttctttagatcagaaaggtcaagggtagaaaatactggaagacgatgtttgaggtaagctgatgaggctgcccgcagccacaccagtcccatgaaagttagtggcatcagttccacctcgccttttctccagcacatggagtattgagacatgatgtatctttctgaattgtttggtacagatggggagtaacagagctcaagatttccaagctattactaccaagcctgttagttaagggcaaaggcaagaaattgtaatttggggctgtggaaattagcctgcctctattcattacttaaacaaattgatcacatgctactaggctcctgcaaaactcctttttgagataaagggaaaaaaccaaactatctcaccctaccctccctaggatccacttctttggaatgacaaaggatttgaaagtaggtttgaaagcagtttcagcaatttaataaatataattaattt

SEQ ID NO: 369 - DNA, 1471 bp, Homo sapiens
  source 1..1471: mol_type = genomic DNA
ggaagggcgggcgagactgtggaggacctggagctggcgggggtcagggcccgcagccgtgccgggtgctcttcagcatgtccttcatcccggtggccgaggattccgacttccccatccacaacctgccctacggcgtcttctcgaccagaggcgacccaagaccgaggataggtgtggccattggcgaccagatcctggacctcagcatcatcaagcacctctttactggtcctgtcctctccaaacaccaggatgtcttcaatcagcctacactcaacagcttcatgggcctgggtcaggctgcctggaaggaggcgagagtgttcttgcagaacttgctgtctgtgagccaagccaggctcagagatgacaccgaacttcggaagtgtgcattcatctcccaggcttctgccacgatgcaccttccagccaccataggagactacacagacttctattcctctcggcagcatgctaccaacgtcggaatcatgttcagggacaaggagaatgcgttgatgccaaattggctgcacttaccagtgggctaccatggccgtgcctcctctgtcgtggtgtctggcaccccaatccgaaggcccatgggacagatgaaacctgatgactctaagcctcccgtatatggtgcctgcaagctcttggacatggagctggaaatggctttttttgtaggccctggaaacagattgggagagccgatccccatttccaaggcccatgagcacatttttggaatggtccttatgaacgactggagtgcacgagacattcagaagtgggagtatgtccctctcgggccattccttgggaagagttttgggaccactgtctctccgtgggtggtgcccatggatgctctcatgccctttgctgtgcccaacccgaagcaggaccccaggcccctgccgtatctgtgccatgacgagccctacacatttgacatcaacctctctgttaacctgaaaggagaaggaatgagccaggcggctaccatatgcaagtccaattttaagtacatgtactggacgatgctgcagcagctcactcaccactctgtcaacggctgcaacctgcggccgggggacctcctggcttctgggaccatcagcgggccggagccagaaaacttcggctccatgttggaactgtcgtggaagggaacgaagcccatagacctggggaatggtcagaccaggaagtttctgctggacggggatgaagtcatcataacagggtactgccagggggatggttaccgcatcggctttggccagtgtgctggaaaagtgctgcctgctctcctgccatcatgagattttctctgctcttctggaaacaaagggctcaagcacccctttcaaccctgtgactggggtcctccctcgggctgtaggcctggtccgccattcagtgacaaataaagccattgtgctctgaggcctgcact

SEQ ID NO: 370 - DNA, 2152 bp, Homo sapiens
  source 1..2152: mol_type = genomic DNA
cggggcggggctctggaagggcgggcgagactgtggaggacctggagctggcgggggtcagggtaggggggaggggcagggctcggggttcgggggcggggtgttcacggtgagaccaaaagtcaggcccgcagccgtgccgggtgctcttcagcatgtccttcatcccggtggccgaggattccgacttccccatccacaacctgccctacggcgtcttctcgaccagaggcgacccaagaccgaggataggtgtggccattggcgaccagatcctggacctcagcatcatcaagcacctctttactggtcctgtcctctccaaacaccaggatgtcttcaatcagcctacactcaacagcttcatgggcctgggtcaggctgcctggaaggaggcgagagtgttcttgcagaacttgctgtctgtgagccaagccaggctcagagatgacaccgaacttcggaagtgtgcattcatctcccaggcttctgccacgatgcaccttccagccaccataggagactacacagacttctattcctctcggcagcatgctaccaacgtcggaatcatgttcagggacaaggagaatgcgttgatgccaaattggctgcacttaccagtgggctaccatggccgtgcctcctctgtcgtggtgtctggcaccccaatccgaaggcccatgggacagatgaaacctgatgactctaagcctcccgtatatggtgcctgcaagctcttggacatggagctggaaatggctttttttgtaggccctggaaacagattgggagagccgatccccatttccaaggcccatgagcacatttttggaatggtccttatgaacgactggagtgcacgagacattcagaagtgggagtatgtccctctcgggccattccttgggaagagttttgggaccactgtctctccgtgggtggtgcccatggatgctctcatgccctttgctgtgcccaacccgaagcaggaccccaggcccctgccgtatctgtgccatgacgagccctacacatttgacatcaacctctctgttaacctgaaaggagaaggaatgagccaggcggctaccatatgcaagtccaattttaagtacatgtactggacgatgctgcagcagctcactcaccactctgtcaacggctgcaacctgcggccgggggacctcctggcttctgggaccatcagcgggccggagccagaaaacttcggctccatgttggaactgtcgtggaagggaacgaagcccatagacctggggaatggtcagaccaggaagtttctgctggacggggatgaagtcatcataacagggtactgccagggggatggttaccgcatcggctttggccagtgtgctggaaaagtgctgcctgctctcctgccatcatgagattttctctgctcttctggaaacaaagggctcaagcacccctttcaaccctgtgactggggtcctccctcgggctgtaggcctggtccgccattcagtgacaaataaagccattgtgctctgaggcctgcactgccgcagatgcagctgtgtccacttatgatcgtgatttgatccagtgggtcaaggtgtgtaaagcctccctgccagatattcattaatatgttttctcactcttattagtgaggtcaggggtctttgtgggattttcttattagacatcccaggcctcctggtattccatggaatttgaaaagagactggcacctgtagtagtcagggctctccagagaaatagaaccaaggagaaagagatcgatttattgattgattgattgattttaagcaaattggcttctgggattctggagggtggcaagcccaaaacctgctgggtgggttgctggctggagacccaaggaagagctgcagtttgagtctgaagcagtctgctgtcaaaatttcctcttcctctgggaagtgagtcattgtttggtgaaggccatcaactgattagatgaggcccagccacactgtgggggtcttctgctttactccactgatttaagttttatttcacctaaaaagtactttcttagaaacatgtagaatagcatttgagcaaatatttgggtaccttagtctagccaaattaatacagaaaactgcccatcaca

SEQ ID NO: 371 - DNA, 1549 bp, Homo sapiens
  source 1..1549: mol_type = genomic DNA
aaaagtcaggtaggagcctccggggtccctgctgtgtcacccggacaggccgtgggggcgggcaggggggcggggccgggcctgaccacagcggccgagttcagtcctgctctccgcacgccaccttaggcccgcagccgtgccgggtgctcttcagcatgtccttcatcccggtggccgaggattccgacttccccatccacaacctgccctacggcgtcttctcgaccagaggcgacccaagaccgaggataggtgtggccattggcgaccagatcctggacctcagcatcatcaagcacctctttactggtcctgtcctctccaaacaccaggatgtcttcaatcagcctacactcaacagcttcatgggcctgggtcaggctgcctggaaggaggcgagagtgttcttgcagaacttgctgtctgtgagccaagccaggctcagagatgacaccgaacttcggaagtgtgcattcatctcccaggcttctgccacgatgcaccttccagccaccataggagactacacagacttctattcctctcggcagcatgctaccaacgtcggaatcatgttcagggacaaggagaatgcgttgatgccaaattggctgcacttaccagtgggctaccatggccgtgcctcctctgtcgtggtgtctggcaccccaatccgaaggcccatgggacagatgaaacctgatgactctaagcctcccgtatatggtgcctgcaagctcttggacatggagctggaaatggctttttttgtaggccctggaaacagattgggagagccgatccccatttccaaggcccatgagcacatttttggaatggtccttatgaacgactggagtgcacgagacattcagaagtgggagtatgtccctctcgggccattccttgggaagagttttgggaccactgtctctccgtgggtggtgcccatggatgctctcatgccctttgctgtgcccaacccgaagcaggaccccaggcccctgccgtatctgtgccatgacgagccctacacatttgacatcaacctctctgttaacctgaaaggagaaggaatgagccaggcggctaccatatgcaagtccaattttaagtacatgtactggacgatgctgcagcagctcactcaccactctgtcaacggctgcaacctgcggccgggggacctcctggcttctgggaccatcagcgggccggagccagaaaacttcggctccatgttggaactgtcgtggaagggaacgaagcccatagacctggggaatggtcagaccaggaagtttctgctggacggggatgaagtcatcataacagggtactgccagggggatggttaccgcatcggctttggccagtgtgctggaaaagtgctgcctgctctcctgccatcatgagattttctctgctcttctggaaacaaagggctcaagcacccctttcaaccctgtgactggggtcctccctcgggctgtaggcctggtccgccattcagtgacaaataaagccattgtgctctgaggcctgc

SEQ ID NO: 372 - DNA, 1361 bp, Homo sapiens
  source 1..1361: mol_type = genomic DNA
cccgagcatcccgcgccgacggggctgtgccggagcagctgtgcagagctgcaggcgcgcgtcatggctgctttgagacagccccaggtcgcggagctgctggccgaggcccggcgagccttccgggaggagttcggggccgagcccgagctggccgtgtcagcgccgggccgcgtcaacctcatcggggaacacacggactacaaccagggcctggtgctgcctatggctctggagctcatgacggtgctggtgggcagcccccgcaaggatgggctggtgtctctcctcaccacctctgagggtgccgatgagccccagcggctgcagtttccactgcccacagcccagcgctcgctggagcctgggactcctcggtgggccaactatgtcaagggagtgattcagtactacccagctgcccccctccctggcttcagtgcagtggtggtcagctcagtgcccctggggggtggcctgtccagctcagcatccttggaagtggccacgtacaccttcctccagcagctctgtccagactcgggcacaatagctgcccgcgcccaggtgtgtcagcaggccgagcacagcttcgcagggatgccctgtggcatcatggaccagttcatctcacttatgggacagaaaggccacgcgctgctcattgactgcaggtccttggagaccagcctggtgccactctcggaccccaagctggccgtgctcatcaccaactctaatgtccgccactccctggcctccagcgagtaccctgtgcggcggcgccaatgtgaagaagtggcccgggcgctgggcaaggaaagcctccgggaggtacaactggaagagctagaggctgccagggacctggtgagcaaagagggcttccggcgggcccggcacgtggtgggggagattcggcgcacggcccaggcagcggccgccctgagacgtggcgactacagagcctttggccgcctcatggtggagagccaccgctcactcagagacgactatgaggtgagctgcccagagctggaccagctggtggaggctgcgcttgctgtgcctggggtttatggcagccgcatgacgggcggtggcttcggtggctgcacggtgacactgctggaggcctccgctgctccccacgccatgcggcacatccaggagcactacggcgggactgccaccttctacctctctcaagcagccgatggagccaaggtgctgtgcttgtgaggcacccccaggacagcacacggtgagggtgcggggcctgcaggccagtcccacggctctgtgcccggtgccatcttccatatccgggtgctcaataaacttgtgcctccaatgtggta

SEQ ID NO: 373 - DNA, 1247 bp, Homo sapiens
  source 1..1247: mol_type = genomic DNA
cggggctgtgccggagcagctgtgcagagctgcaggcgcgcgtcatggctgctttgagacagccccaggtcgcggagctgctggccgaggcccggcgagccttccgggaggagttcggggccgagcccgagctggccgtgtcagcgccgggccgcgtcaacctcatcggggaacacacggactacaaccagggcctggtgctgcctatgcgggacaggctgttccccacgttggaagggaggaagcgaggaagtggccgggagagggtgcgcggccgcctcttggctcaagcccgccctctgggggctggggctcctcgccttcaacctgggagcatgttccccttaaactgtgaggccctgtgtgccacgcagaaggggacactccgcgcctccggccaccgtggggccccaaccgcagacctgggcgaacgtagccttctggcccagcccgttcaatttacagaggaggaaacggggggcgctttccgccccatctgcagcttggggagtgcacaggctagctctcccccttgccccacagctcagggcagagtccaggatgggctggtgtctctcctcaccacctctgagggtgccgatgagccccagcggctgcagtttccactgcccacagcccagcgctcgctggagcctgggactcctcggtgggccaactatgtcaagggagtgattcagtactacccagctgcccccctccctggcttcagtgcagtggtggtcagctcagtgcccctggggggtggcctgtccagctcagcatccttggaagtggccacgtacaccttcctccagcagctctgtccagactcgggcacaatagctgcccgcgcccaggtgtgtcagcaggccgagcacagcttcgcagggatgccctgtggcatcatggaccagttcatctcacttatgggacagaaaggccacgcgctgctcattgactgcaggtccttggagaccagcctggtgccactctcggaccccaagctggccgtgctcatcaccaactctaatgtccgccactccctggcctccagcgagtaccctgtgcggcggcgccaatgtgaagaagtggcccgggcgctgggcaaggaaagcctccgggaggtacaactggaagagctagaggctgccagggacctggtgagcaaagagggcttccggcgggcccggcacgtggtgggggagattcggcgcacggccgatggagccaaggtgctgtgcttgtga

SEQ ID NO: 374 - DNA, 1379 bp, Homo sapiens
  source 1..1379: mol_type = genomic DNA
atgtgcgcacccccgcgcggggccccgcccgagcatcccgcgccgacggggctgtgccggagcagctgtgcagagctgcaggcgcgcgtcatggctgctttgagacagccccaggtcgcggagctgctggccgaggcccggcgagccttccgggaggagttcggggccgagcccgagctggccgtgtcagcgccgggccgcgtcaacctcatcggggaacacacggactacaaccagggcctggtgctgcctatggctctggagctcatgacggtgctggtgggcagcccccgcaaggatgggctggtgtctctcctcaccacctctgagggtgccgatgagccccagcggctgcagtttccactgcccacagcccagcgctcgctggagcctgggactcctcggtgggccaactatgtcaagggagtgattcagtactacccagctgcccccctccctggcttcagtgcagtggtggtcagctcagtgcccctggggggtggcctgtccagctcagcatccttggaagtggccacgtacaccttcctccagcagctctgtccagactcgggcacaatagctgcccgcgcccaggtgtgtcagcaggccgagcacagcttcgcagggatgccctgtggcatcatggaccagttcatctcacttatgggacagaaaggccacgcgctgctcattgactgcaggtccttggagaccagcctggtgccactctcggaccccaagctggccgtgctcatcaccaactctaatgtccgccactccctggcctccagcgagtaccctgtgcggcggcgccaatgtgaagaagtggcccgggcgctgggcaaggaaagcctccgggaggtacaactggaagagctagaggctgccagggacctggtgagcaaagagggcttccggcgggcccggcacgtggtgggggagattcggcgcacggcccaggcagcggccgccctgagacgtggcgactacagagcctttggccgcctcatggtggagagccaccgctcactcagagacgactatgaggtgagctgcccagagctggaccagctggtggaggctgcgcttgctgtgcctggggtttatggcagccgcatgacgggcggtggcttcggtggctgcacggtgacactgctggaggcctccgctgctccccacgccatgcggcacatccaggagcactacggcgggactgccaccttctacctctctcaagcagccgatggagccaaggtgctgtgcttgtgaggcacccccaggacagcacacggtgagggtgcggggcctgcaggccagtcccacggctctgtgcccggtgccatcttccatatccgggtgctcaataaacttgtgcctcc

SEQ ID NO: 375 - DNA, 1866 bp, Homo sapiens
  source 1..1866: mol_type = genomic DNA
ggcgtgagccactgcgcccggcccaaacttgtctgtctttatctctacttacagtgagtgtcaggtcaccctcttggagaccggtgatcagaggctgatgacctctcacagctgctggccctggggacctaggggatccctttgggaatcccaggtcaaccgggtgccagctccattgctctggctgtgtgggtggtggtgggtggtgaggcacatagaaagtcaccagcgccagggaagggcagctcagaaatcctggtcatgccaagtgccactcagggctattctcactctagtgagtgctcattggttcttcccgaagtccagagggaaggacaccatcgggggcgctgtatcccacccggcaccattagcccctgccacccaccacccagcagctggattcccacgggagttgcgggtgggggcggaaccggctgaggtctgggggcggggcgtccgggcgcggggcggggctggcgggaatgtgcgcacccccgcgcggggccccgcccgagcatcccgcgccgacggggctgtgccggagcagctgtgcagagctgcaggcgcgcgtcatggctgctttgagacagccccaggtcgcggagctgctggccgaggcccggcgagccttccgggaggagttcggggccgagcccgagctggccgtgtcagcgccgggccgcgtcaacctcatcggggaacacacggactacaaccagggcctggtgctgcctatggctctggagctcatgacggtgctggtgggcagcccccgcaaggatgggctggtgtctctcctcaccacctctgagggtgccgatgagccccagcggctgcagtttccactgcccacagcccagcgctcgctggagcctgggactcctcggtgggccaactatgtcaagggagtgattcagtactacccagctgcccccctccctggcttcagtgcagtggtggtcagctcagtgcccctggggggtggcctgtccagctcagcatccttggaagtggccacgtacaccttcctccagcagctctgtccagactcgggcacaatagctgcccgcgcccaggtgtgtcagcaggccgagcacagcttcgcagggatgccctgtggcatcatggaccagttcatctcacttatgggacagaaaggccacgcgctgctcattgactgcaggtccttggagaccagcctggtgccactctcggaccccaagctggccgtgctcatcaccaactctaatgtccgccactccctggcctccagcgagtaccctgtgcggcggcgccaatgtgaagaagtggcccgggcgctgggcaaggaaagcctccgggaggtacaactggaagagctagaggctgccagggacctggtgagcaaagagggcttccggcgggcccggcacgtggtgggggagattcggcgcacggcccaggcagcggccgccctgagacgtggcgactacagagcctttggccgcctcatggtggagagccaccgctcactcagagacgactatgaggtgagctgcccagagctggaccagctggtggaggctgcgcttgctgtgcctggggtttatggcagccgcatgacgggcggtggcttcggtggctgcacggtgacactgctggaggcctccgctgctccccacgccatgcggcacatccaggagcactacggcgggactgccaccttctacctctctcaagcagccgatggagccaaggtgctgtgcttgtgaggcacccccaggacagcacacggtgagggtgcggggcctgcaggccagtcccacggctctgtgcccggtgccatcttccatatccgggtgctcaataaacttgtgcctccaa

SEQ ID NO: 376 - DNA, 2363 bp, Homo sapiens
  source 1..2363: mol_type = genomic DNA
aggccccgccccgcagcccagccggaagggccggcggacgctcgctaggtcggctcgctggccggggctccgcggctcccgtggttgccatggcggcggttgtcgcggcgacgaggtggtggcagctgttgctggtgctcagcgccgcggggatgggggcctcgggcgccccgcagccccccaacatcctgctcctgctcatggacgacatgggatggggtgacctcggggtgtatggagagccctccagagagaccccgaatttggaccggatggctgcagaagggctgcttttcccaaacttctattctgccaaccctctgtgctcgccatcgagggcggcactgctcacaggacggctacccatccgcaatggcttctacaccaccaacgcccatgccagaaacgcctacacaccgcaggagattgtgggcggcatcccagactcggagcagctcctgccggagcttctgaagaaggccggctacgtcagcaagattgtcggcaagtggcatctgggtcacaggccccagttccaccccctgaagcacggatttgatgagtggtttggatcccccaactgccactttggaccttatgacaacaaggccaggcccaacatccctgtgtacagggactgggagatggttggcagatattatgaagaatttcctattaatctgaagacgggggaagccaacctcacccagatctacctgcaggaagccctggacttcattaagagacaggcacggcaccacccctttttcctctactgggctgtcgacgccacgcacgcacccgtctatgcctccaaacccttcttgggcaccagtcagcgagggcggtatggagacgccgtccgggagattgatgacagcattgggaagatactggagctcctccaagacctgcacgtcgcggacaacaccttcgtcttcttcacgtcggacaacggcgctgccctcatttccgcccccgaacaaggtggcagcaacggcccctttctgtgtgggaagcagaccacgtttgaaggagggatgagggagcctgccctcgcatggtggccagggcacgtcactgcaggccaggtgagccaccagctgggcagcatcatggacctcttcaccaccagcctggcccttgcgggcctgacgccgcccagcgacagggccattgatggcctcaacctcctccccaccctcctgcagggccggctgatggacaggcctatcttctattaccgtggcgacacgctgatggcggccaccctcgggcagcacaaggctcacttctggacctggaccaactcctgggagaacttcagacagggcattgatttctgccctgggcagaacgtttcaggggtcacaactcacaatctggaagaccacacgaagctgcccctgatcttccacctgggacgggacccaggggagaggttccccctcagctttgccagcgccgagtaccaggaggccctcagcaggatcacctcggtcgtccagcagcaccaggaggccttggtccccgcgcagccccagctcaacgtgtgcaactgggcggtcatgaactgggcacctccgggctgtgaaaagttagggaagtgtctgacacctccagaatccattcccaagaagtgcctctggtcccactagcacctgcgcagactcaggccaggcctagaatctccggttggccctgcaagtgcctggaggaaggatggctctggcctcggtcctcccccaaccctgcccaagccagacagacagcacctgcagacgcagggggactgcacaattccacctgcccaggacctgaccctggcgtgtgcttggccctcctcctcgcccacggcgcctcagatttcaggaccctcctcctcgcccacggcgcctcagacctcaggaccctgccgtctcacgcctttgtgaaccccaaatatctgagaccagtctcagtttattttgccaaggttaaggatgcacctgtgacagcctcaggaggtcctgacaacaggtgcctgaggtggctggggatacagtttgcctttatacatcttagggagacacaagatcagtatgtgtatggcgtacattggttcagtcagccttccactgaatacacgattgagtctggcccagtgaatccgcatttttatgtaaacagtaagggaacggggcaatcatataagcgtttgtctcaggggagccccagagggatgacttccagttccgtctgtcctttgtccacaaggaatttccctggacgctaattatgagggaggcgtgtagcttcttatcattgtaactatgttatttagaaataaaacgggaggcaggtttgcctaattcccagcttga

SEQ ID NO: 377 - DNA, 1511 bp, Homo sapiens
  source 1..1511: mol_type = genomic DNA
ggaagggccggcggacgctcgctaggtcggctcgctggccggggctccgcggctcccgtggttgccatggcggcggttgtcgcggcgacgaggtggtggcagctgttgctggtgctcagcgccgcggggatgggggcctcgggcgccccgcagccccccaacatcctgctcctgctcatggacgaccgagggcggcactgctcacaggacggctacccatccgcaatggcttctacaccaccaacgcccatgccagaaacgcctacacaccgcaggagattgtgggcggcatcccagactcggagcagctcctgccggagcttctgaagaaggccggctacgtcagcaagattgtcggcaagtggcatctgggtcacaggccccagttccaccccctgaagcacggatttgatgagtggtttggatcccccaactgccactttggaccttatgacaacaaggccaggcccaacatccctgtgtacagggactgggagatggttggcagatattatgaagaatttcctattaatctgaagacgggggaagccaacctcacccagatctacctgcaggaagccctggacttcattaagagacaggcacggcaccacccctttttcctctactgggctgtcgacgccacgcacgcacccgtctatgcctccaaacccttcttgggcaccagtcagcgagggcggtatggagacgccgtccgggagattgatgacagcattgggaagatactggagctcctccaagacctgcacgtcgcggacaacaccttcgtcttcttcacgtcggacaacggcgctgccctcatttccgcccccgaacaaggtggcagcaacggcccctttctgtgtgggaagcagaccacgtttgaaggagggatgagggagcctgccctcgcatggtggccagggcacgtcactgcaggccaggtgagccaccagctgggcagcatcatggacctcttcaccaccagcctggcccttgcgggcctgacgccgcccagcgacagggccattgatggcctcaacctcctccccaccctcctgcagggccggctgatggacaggcctatcttctattaccgtggcgacacgctgatggcggccaccctcgggcagcacaaggctcacttctggacctggaccaactcctgggagaacttcagacagggcattgatttctgccctgggcagaacgtttcaggggtcacaactcacaatctggaagaccacacgaagctgcccctgatcttccacctgggacgggacccaggggagaggttccccctcagctttgccagcgccgagtaccaggaggccctcagcaggatcacctcggtcgtccagcagcaccaggaggccttggtccccgcgcagccccagctcaacgtgtgcaactgggcggtcatgaactgggcacctccgggctgtgaaaagttagggaagtgtctgacacctccagaatccattcccaagaagtgcctctggtcccactag

SEQ ID NO: 378 - DNA, 2048 bp, Homo sapiens
  source 1..2048: mol_type = genomic DNA
atggcggcggttgtcgcggcgacgaggtggtggcagctgttgctggtgctcagcgccgcggggatgggggcctcgggcgccccaggacagagggcctacacaccgcaggagattgtgggcggcatcccagactcggagcagctcctgccggagcttctgaagaaggccggctacgtcagcaagattgtcggcaagtggcatctgggtcacaggccccagttccaccccctgaagcacggatttgatgagtggtttggatcccccaactgccactttggaccttatgacaacaaggccaggcccaacatccctgtgtacagggactgggagatggttggcagatattatgaagaatttcctattaatctgaagacgggggaagccaacctcacccagatctacctgcaggaagccctggacttcattaagagacaggcacggcaccacccctttttcctctactgggctgtcgacgccacgcacgcacccgtctatgcctccaaacccttcttgggcaccagtcagcgagggcggtatggagacgccgtccgggagattgatgacagcattgggaagatactggagctcctccaagacctgcacgtcgcggacaacaccttcgtcttcttcacgtcggacaacggcgctgccctcatttccgcccccgaacaaggtggcagcaacggcccctttctgtgtgggaagcagaccacgtttgaaggagggatgagggagcctgccctcgcatggtggccagggcacgtcactgcaggccaggtgagccaccagctgggcagcatcatggacctcttcaccaccagcctggcccttgcgggcctgacgccgcccagcgacagggccattgatggcctcaacctcctccccaccctcctgcagggccggctgatggacaggcctatcttctattaccgtggcgacacgctgatggcggccaccctcgggcagcacaaggctcacttctggacctggaccaactcctgggagaacttcagacagggcattgatttctgccctgggcagaacgtttcaggggtcacaactcacaatctggaagaccacacgaagctgcccctgatcttccacctgggacgggacccaggggagaggttccccctcagctttgccagcgccgagtaccaggaggccctcagcaggatcacctcggtcgtccagcagcaccaggaggccttggtccccgcgcagccccagctcaacgtgtgcaactgggcggtcatgaactgggcacctccgggctgtgaaaagttagggaagtgtctgacacctccagaatccattcccaagaagtgcctctggtcccactagcacctgcgcagactcaggccaggcctagaatctccggttggccctgcaagtgcctggaggaaggatggctctggcctcggtcctcccccaaccctgcccaagccagacagacagcacctgcagacgcagggggactgcacaattccacctgcccaggacctgaccctggcgtgtgcttggccctcctcctcgcccacggcgcctcagatttcaggaccctcctcctcgcccacggcgcctcagacctcaggaccctgccgtctcacgcctttgtgaaccccaaatatctgagaccagtctcagtttattttgccaaggttaaggatgcacctgtgacagcctcaggaggtcctgacaacaggtgcctgaggtggctggggatacagtttgcctttatacatcttagggagacacaagatcagtatgtgtatggcgtacattggttcagtcagccttccactgaatacacgattgagtctggcccagtgaatccgcatttttatgtaaacagtaagggaacggggcaatcatataagcgtttgtctcaggggagccccagagggatgacttccagttccgtctgtcctttgtccacaaggaatttccctggacgctaattatgagggaggcgtgtagcttcttatcattgtaactatgttatttagaaataaaacgggaggcaggtttgcctaattcccagcttg

SEQ ID NO: 379 - DNA, 1768 bp, Homo sapiens
  source 1..1768: mol_type = genomic DNA
gcacggccctgcagattttccagcggatcccccggtggcctcatgtcgcgcagtggaaccgatcctcagcaacgccagcaggcgtcagaggcggacgccgcagcagcaaccttccgggcaaacgaccatcagcatatccgctacaacccgctgcaggatgagtgggtgctggtgtcagctcaccgcatgaagcggccctggcagggtcaagtggagccccagcttctgaagacagtgccccgccatgaccctctcaaccctctgtgtcctggggccatccgagccaacggagaggtgaatccccagtacgatagcaccttcctgtttgacaacgacttcccagctctgcagcctgatgcccccagtccaggacccagtgatcatccccttttccaagcaaagtctgctcgaggagtctgtaaggtcatgtgcttccacccctggtcggatgtaacgctgccactcatgtcggtccctgagatccgggctgttgttgatgcatgggcctcagtcacagaggagctgggtgcccagtacccttgggtgcagatctttgaaaacaaaggtgccatgatgggctgttctaacccccacccccactgccaggtatgggccagcagtttcctgccagatattgcccagcgtgaggagcgatctcagcaggcctataagagtcagcatggagagcccctgctaatggagtacagccgccaggagctactcaggaaggaacgtctggtcctaaccagtgagcactggttagtactggtccccttctgggcaacatggccctaccagacactgctgctgccccgtcggcatgtgcggcggctacctgagctgacccctgctgagcgtgatgatctagcctccatcatgaagaagctcttgaccaagtatgacaacctctttgagacgtcctttccctactccatgggctggcatggggctcccacaggatcagaggctggggccaactggaaccattggcagctgcacgctcattactaccctccgctcctgcgctctgccactgtccggaaattcatggttggctacgaaatgcttgctcaggctcagagggacctcacccctgagcaggctgcagagagactaagggcacttcctgaggttcattaccacctggggcagaaggacagggagacagcaaccatcgcctgaccacgccgaccacagggccttgaatccttttttgttttcaacagtcttgctgaattaagcagaaagggccttgaatcctggcctggaatttgggcagatatagcattaataaaactgtgcatctcaaacttttatcacatactctaatatcagaggagtgtgaaccttcagagatctagggttaaaagctaaaggcatagctccagctacaacttttctttgtctacagatgtgtaaaatcttgatgcaaaaatctaccccaaatttctgaacaaaattaatattcagtattatatctagcctatagattctcttactcttggtgtaatgacagcattcccagtttaggaaactgttttaaaatcttgtgtcttggttgtggctgaggctttgggaaggccagagccccctttgccaccacccctagggtgtcagctccaagcctgggcctgagggtttgatggggagcgggtgagctggatcctgatcccagtggtcagtggccagatcctgggctgctggccagaaccctggctttgtgagtggctgcagcttggctctgctccagcccacaggggctaaaggg

SEQ ID NO: 380 - DNA, 1164 bp, Homo sapiens
  source 1..1164: mol_type = genomic DNA
gtgtggacggagaaagtgaaaggtgaggcacggccctgcagattttccagcggatcccccggtggcctcatgtcgcgcagtggaaccgatcctcagcaacgccagcaggcgtcagaggcggacgccgcagcagcaaccttccgggcaaacgaccatcagcatatccgctacaacccgctgcaggatgagtgggtgctggtgtcagctcaccgcatgaagcggccctggcagggtcaagtggagccccagcttctgaagacagtgccccgccatgaccctctcaaccctctgtgtcctggggccatccgagccaacggagagtaaggtcatgtgcttccacccctggtcggatgtaacgctgccactcatgtcggtccctgagatccgggctgttgttgatgcatgggcctcagtcacagaggagctgggtgcccagtacccttgggtgcagatctttgaaaacaaaggtgccatgatgggctgttctaacccccacccccactgccaggtatgggccagcagtttcctgccagatattgcccagcgtgaggagcgatctcagcaggcctataagagtcagcatggagagcccctgctaatggagtacagccgccaggagctactcaggaaggaacgtctggtcctaaccagtgagcactggttagtactggtccccttctgggcaacatggccctaccagacactgctgctgccccgtcggcatgtgcggcggctacctgagctgacccctgctgagcgtgatgatctagcctccatcatgaagaagctcttgaccaagtatgacaacctctttgagacgtcctttccctactccatgggctggcatggggctcccacaggatcagaggctggggccaactggaaccattggcagctgcacgctcattactaccctccgctcctgcgctctgccactgtccggaaattcatggttggctacgaaatgcttgctcaggctcagagggacctcacccctgagcaggctgcagagagactaagggcacttcctgaggttcattaccacctggggcagaaggacagggagacagcaaccatcgcctgaccacgccgaccacagggccttgaatccttttttgttttcaacagtcttgctgaattaagcagaaagggccttgaatcctg

SEQ ID NO: 381 - DNA, 1164 bp, Homo sapiens; identical to SEQ ID NO: 380
  source 1..1164: mol_type = genomic DNA

SEQ ID NO: 382 - DNA, 1318 bp, Homo sapiens
  source 1..1318: mol_type = genomic DNA
atgctgtccggtcaccgtgacaatgcagctgaggaacccagaactacatctgggctgcgcgcttgcgcttcgcttcctggccctcgtttcctgggacatccctggggctagagcactggacaatggattggcaaggacgcctaccatgggctggctgcactgggagcgcttcatgtgcaaccttgactgccaggaagagccagattcctgcatcagtgagaagctcttcatggagatggcagagctcatggtctcagaaggctggaaggatgcaggttatgagtacctctgcattgatgactgttggatggctccccaaagagattcagaaggcagacttcaggcagaccctcagcgctttcctcatgggattcgccagctagctaattatgttcacagcaaaggactgaagctagggatttatgcagatgttggaaataaaacctgcgcaggcttccctgggagttttggatactacgacattgatgcccagacctttgctgactggggagtagatctgctaaaatttgatggttgttactgtgacagtttggaaaatttggcagatggttataagcacatgtccttggccctgaataggactggcagaagcattgtgtactcctgtgagtggcctctttatatgtggccctttcaaaagcccaattatacagaaatccgacagtactgcaatcactggcgaaattttgctgacattgatgattcctggaaaagtataaagagtatcttggactggacatcttttaaccaggagagaattgttgatgttgctggaccagggggttggaatgacccagatatgttagtgattggcaactttggcctcagctggaatcagcaagtaactcagatggccctctgggctatcatggctgctcctttattcatgtctaatgacctccgacacatcagccctcaagccaaagctctccttcaggataaggacgtaattgccatcaatcaggaccccttgggcaagcaagggtaccagcttagacagggagacaactttgaagtgtgggaacgacctctctcaggcttagcctgggctgtagctatgataaaccggcaggagattggtggacctcgctcttataccatcgcagttgcttccctgggtaaaggagtggcctgtaatcctgcctgcttcatcacacagctcctccctgtgaaaaggaagctagggttctatgaatggacttcaaggttaagaagtcacataaatcccacaggcactgttttgcttcagctagaaaatacaatgcagatgtcattaaaagacttactttaaaatgtt

SEQ ID NO: 383 - DNA, 314 bp, Homo sapiens
  source 1..314: mol_type = genomic DNA
taatacgactcactatagggaaataagagagaaaagaagagtaagaagaaatataagagccaccatgggggtccggcatcccccatgctcccacagactgctggctgtatgtgcactcgtgtcgctcgcgacagccgcgcttttgccgcagaactcaaagatccccggacctacgttcttggacccgcactgataagctgccttctgcggggcttgccttctggccatgcccttcttctctcccttgcacctgtacctcttggtctttgaataaagcctgagtaggaaggcggccgctcgagcatgcatctaga

SEQ ID NO: 384 - DNA, 317 bp, Homo sapiens
  source 1..317: mol_type = genomic DNA
taatacgactcactatagggaaataagagagaaaagaagagtaagaagaaatataagagccaccatgggagtacggcatccaccttgctcgcacagattgctcgcggtctgtgccttggtgtcactggctaccgcggcacttctcgccaacacgccgtgtgggccctacacacacgactgccccgtgaagaggtgataagctgccttctgcggggcttgccttctggccatgcccttcttctctcccttgcacctgtacctcttggtctttgaataaagcctgagtaggaaggcggccgctcgagcatgcatctaga

SEQ ID NO: 385 - DNA, 3810 bp, Homo sapiens
  source 1..3810: mol_type = genomic DNA
ccgcctccagcgcgcccttgctgccccgcgcgaccccaggattgcgaactcttgcccctgacctgttgggcggggctccgcgctccagccatcagcccggatgggtctcctggctgggacttggggcacctggagttaatgtccaacctagggtctgcggagacccgatccgaggtgccgccgccggacgggactttaagatgaagttatgggatgtcgtggctgtctgcctggtgctgctccacaccgcgtccgccttcccgctgcccgccggtaagaggcctcccgaggcgcccgccgaagaccgctccctcggccgccgccgcgcgcccttcgcgctgagcagtgactcaaatatgccagaggattatcctgatcagttcgatgatgtcatggattttattcaagccaccattaaaagactgaaaaggtcaccagataaacaaatggcagtgcttcctagaagagagcggaatcggcaggctgcagctgccaacccagagaattccagaggaaaaggtcggagaggccagaggggcaaaaaccggggttgtgtcttaactgcaatacatttaaatgtcactgacttgggtctgggctatgaaaccaaggaggaactgatttttaggtactgcagcggctcttgcgatgcagctgagacaacgtacgacaaaatattgaaaaacttatccagaaatagaaggctggtgagtgacaaagtagggcaggcatgttgcagacccatcgcctttgatgatgacctgtcgtttttagatgataacctggtttaccatattctaagaaagcattccgctaaaaggtgtggatgtatctgactccggctccagagactgctgtgtattgcattcctgctacagtgcaaagaaagggaccaaggttcccaggaaatgtttgcccagaatggaagatgaggaccaaggaggcggaggaggaggaagaagaagaggaggaggaggaggaggaggaggaggaggaggaaggcagccatcatgggagcctggtagagggagatccagctacagacaactggacaggagagagagaaaacagccctctggattctccaggatggcagccgatgtcactagaagctcagggctgatgttcctggttggctattgccaccatttcagctgatacagtccaccatcactgattaccggcgcggttgcggtggatgcacttgaaccaaaccagtgtatctcctgtgatttgttttcatgtgtccgaagacaccagggaaacagagatcctggtgttgttccttgttattacgttttactgctgaaagtaagaggtttatttttctgtcactcagtggagacataccctggaaaggagaggggaaaaaaaaagcaaagatacaagagataatcacctttgcatttgaaagttgaggcccgaggtttactacaaccagcatttttgccaacggttggtgattgatttccatcacggtgtgtggggtgggaagaagttggctaggaaccaaaaaggctgtgctcatgattaaacacaaacctgaaggtatttcctttatgtccttggaaacaggaaacgagttgtggttttcgccagcattcttgtaggagagaatcggggaaggccccgaactgcccccgggcagggagagcccctcaggcctgttggtttacagagagacagatgttacataaccagctccgttgatgcgtggtcaccagtgaccagagaagctactcgatgcaatgcatctgtttcagatacagaaatatagagaagatatttattgaaatttaagttattgttatttattaccgttcactaatgaatttctcttttttcccttatttattaaagtttcttttcaaaggtgccaaagtatatgtgctcgcaaaatgcaaagaaaggtgacaaaaggaaatttgaattgggaacaagggtccatgcttttcaaagtattaaaaagttttttgccaggcaaaaatcacttactttacctttttaagaaaatttgtcattaattttccccagatttcagcatttttcccaatttttatttgtggagcatctcaggcaagccccctttcctggagcagcgtgcagagaccactggcacttgactttatttcttccttgctccattgctgaacagaaatgtcgtgggctccacttcctgttgtctttaagctcttagtcccctccacgtatacctatctgtactatgcataaccatatgtagaaaaggttcagttccttttagtaggtagtcctggatttaatgctgacctaaaagtaatgtcgacaatgctgtcaggtagctgccgttctaccgactccctccatccctgcccacccactgccctcccgagaatatgctggctgcccagtgcagcccgggagacacaggggccttccagaggtagggtctaccaggtcctgtacaacccctgggctgtcaccgggggtcaacagctgctgctcctatatacccaaacacctgacagctccctggggagcagatggctgagaagggtgctgaggaagccatattgggaccagccacagccacacacatggagcctcatacttaggagcgtgctgcctttaaatgaaggtggtcggggccagtgcagcggctcacacccataatcccaacactttggaaagccaaggtgggaggatctcttgaacccaggagtttgagaccagcttgggcaacatagggagaccctgtctctacagaaactttaaaaattaggcaggcatgatggtgcacacctgtggtcccagctactcaagaggctgaaggaggatcacttgagtccagaaggtcgaggctgcagtgagctgtgatcatgccactgcactccagcctaagtgacagtgcggtaccctgtctcaaaaaaaaaaaaaaaaaaaaaaagaggttggagcaggaggaagcataggggcgggaacagccacctcctccatgccctagattgtgaatttatcgggcagccaacacatgtatgacacactaggccctgtattacagcttgttacgcatttcataaaagggattttcattaaggagataatctattactacctaccttagtggctactagtataaaactatgacagatttagcaattaaatgaaatactggcctccatcaaataatcatagtaacaagaagcagcagttaccagacatctgatccccttcccccaaaatacccaaattcttcatggttctgcccttctctgtcctttctgctccccttgctcgcctgggaaatggaggaaaggccttccctctcacactgtcttgggatcttgctgagaattcagactgctcgaaacagtgacaaaccccagccatccagtcattcgtggagcacaatttggatgtggccccaggggcatctgtcccattcagagaaccttggcagtgcgatggccactgttcccaggcttcaacctcagtgaccccccccaacaactccccatggagagtccctgcccaaaaaagctgtaggatccaaggggtgtcaatagctcgttcccggcatcacctacacaccacaagcaggttttaatggaagcaagttgctccaccaaatccacaaaagggtaaagtttgtgatttttctttatcattgcgatcaccatctgataccgtaaggagtgcacttgtttggaagttctgacttctctgatctgtcttggtcgtttgtgttataaaaccaaagttctctacagactttatttttgtacaatatcattttgtaactttttacaaataaaaactcatttctattgc

SEQ ID NO: 386 - DNA, 3655 bp, Homo sapiens
  source 1..3655: mol_type = genomic DNA
catacaggccaaaagtctccaagtccctgctaacttcttgctctcgcaacagaatacctatttaggtgggaagaatgaggtgtgggcggcaggctgggtgccgccgccggacgggactttaagatgaagttatgggatgtcgtggctgtctgcctggtgctgctccacaccgcgtccgccttcccgctgcccgccgcaaatatgccagaggattatcctgatcagttcgatgatgtcatggattttattcaagccaccattaaaagactgaaaaggtcaccagataaacaaatggcagtgcttcctagaagagagcggaatcggcaggctgcagctgccaacccagagaattccagaggaaaaggtcggagaggccagaggggcaaaaaccggggttgtgtcttaactgcaatacatttaaatgtcactgacttgggtctgggctatgaaaccaaggaggaactgatttttaggtactgcagcggctcttgcgatgcagctgagacaacgtacgacaaaatattgaaaaacttatccagaaatagaaggctggtgagtgacaaagtagggcaggcatgttgcagacccatcgcctttgatgatgacctgtcgtttttagatgataacctggtttaccatattctaagaaagcattccgctaaaaggtgtggatgtatctgactccggctccagagactgctgtgtattgcattcctgctacagtgcaaagaaagggaccaaggttcccaggaaatgtttgcccagaatggaagatgaggaccaaggaggcggaggaggaggaagaagaagaggaggaggaggaggaggaggaggaggaggaggaaggcagccatcatgggagcctggtagagggagatccagctacagacaactggacaggagagagagaaaacagccctctggattctccaggatggcagccgatgtcactagaagctcagggctgatgttcctggttggctattgccaccatttcagctgatacagtccaccatcactgattaccggcgcggttgcggtggatgcacttgaaccaaaccagtgtatctcctgtgatttgttttcatgtgtccgaagacaccagggaaacagagatcctggtgttgttccttgttattacgttttactgctgaaagtaagaggtttatttttctgtcactcagtggagacataccctggaaaggagaggggaaaaaaaaagcaaagatacaagagataatcacctttgcatttgaaagttgaggcccgaggtttactacaaccagcatttttgccaacggttggtgattgatttccatcacggtgtgtggggtgggaagaagttggctaggaaccaaaaaggctgtgctcatgattaaacacaaacctgaaggtatttcctttatgtccttggaaacaggaaacgagttgtggttttcgccagcattcttgtaggagagaatcggggaaggccccgaactgcccccgggcagggagagcccctcaggcctgttggtttacagagagacagatgttacataaccagctccgttgatgcgtggtcaccagtgaccagagaagctactcgatgcaatgcatctgtttcagatacagaaatatagagaagatatttattgaaatttaagttattgttatttattaccgttcactaatgaatttctcttttttcccttatttattaaagtttcttttcaaaggtgccaaagtatatgtgctcgcaaaatgcaaagaaaggtgacaaaaggaaatttgaattgggaacaagggtccatgcttttcaaagtattaaaaagttttttgccaggcaaaaatcacttactttacctttttaagaaaatttgtcattaattttccccagatttcagcatttttcccaatttttatttgtggagcatctcaggcaagccccctttcctggagcagcgtgcagagaccactggcacttgactttatttcttccttgctccattgctgaacagaaatgtcgtgggctccacttcctgttgtctttaagctcttagtcccctccacgtatacctatctgtactatgcataaccatatgtagaaaaggttcagttccttttagtaggtagtcctggatttaatgctgacctaaaagtaatgtcgacaatgctgtcaggtagctgccgttctaccgactccctccatccctgcccacccactgccctcccgagaatatgctggctgcccagtgcagcccgggagacacaggggccttccagaggtagggtctaccaggtcctgtacaacccctgggctgtcaccgggggtcaacagctgctgctcctatatacccaaacacctgacagctccctggggagcagatggctgagaagggtgctgaggaagccatattgggaccagccacagccacacacatggagcctcatacttaggagcgtgctgcctttaaatgaaggtggtcggggccagtgcagcggctcacacccataatcccaacactttggaaagccaaggtgggaggatctcttgaacccaggagtttgagaccagcttgggcaacatagggagaccctgtctctacagaaactttaaaaattaggcaggcatgatggtgcacacctgtggtcccagctactcaagaggctgaaggaggatcacttgagtccagaaggtcgaggctgcagtgagctgtgatcatgccactgcactccagcctaagtgacagtgcggtaccctgtctcaaaaaaaaaaaaaaaaaaaaaaagaggttggagcaggaggaagcataggggcgggaacagccacctcctccatgccctagattgtgaatttatcgggcagccaacacatgtatgacacactaggccctgtattacagcttgttacgcatttcataaaagggattttcattaaggagataatctattactacctaccttagtggctactagtataaaactatgacagatttagcaattaaatgaaatactggcctccatcaaataatcatagtaacaagaagcagcagttaccagacatctgatccccttcccccaaaatacccaaattcttcatggttctgcccttctctgtcctttctgctccccttgctcgcctgggaaatggaggaaaggccttccctctcacactgtcttgggatcttgctgagaattcagactgctcgaaacagtgacaaaccccagccatccagtcattcgtggagcacaatttggatgtggccccaggggcatctgtcccattcagagaaccttggcagtgcgatggccactgttcccaggcttcaacctcagtgaccccccccaacaactccccatggagagtccctgcccaaaaaagctgtaggatccaaggggtgtcaatagctcgttcccggcatcacctacacaccacaagcaggttttaatggaagcaagttgctccaccaaatccacaaaagggtaaagtttgtgatttttctttatcattgcgatcaccatctgataccgtaaggagtgcacttgtttggaagttctgacttctctgatctgtcttggtcgtttgtgttataaaaccaaagttctctacagactttatttttgtacaatatcattttgtaactttttacaaataaaaactcatttctattgc

SEQ ID NO: 387 - DNA, 856 bp, Homo sapiens
  source 1..856: mol_type = genomic DNA
ccaaagcgtccgagactgggtacagtcgtccaggcgtgacgggggcgcggggagccagtgactcctctgggaggggaagggattagggccagaatctctcaaaggtgcaaaaatccagtcaagagagggttttcgggtataccacggaggattaaaactttcaagacaaatgcagtctttgcctaacagcaatggtgccgccgccggacgggactttaagatgaagttatgggatgtcgtggctgtctgcctggtgctgctccacaccgcgtccgccttcccgctgcccgccggtaagaggcctcccgaggcgcccgccgaagaccgctccctcggccgccgccgcgcgcccttcgcgctgagcagtgactcaaatatgccagaggattatcctgatcagttcgatgatgtcatggattttattcaagccaccattaaaagactgaaaaggtcaccagataaacaaatggcagtgcttcctagaagagagcggaatcggcaggctgcagctgccaacccagagaattccagaggaaaaggtcggagaggccagaggggcaaaaaccggggttgtgtcttaactgcaatacatttaaatgtcactgacttgggtctgggctatgaaaccaaggaggaactgatttttaggtactgcagcggctcttgcgatgcagctgagacaacgtacgacaaaatattgaaaaacttatccagaaatagaaggctggtgagtgacaaagtagggcaggcatgttgcagacccatcgcctttgatgatgacctgtcgtttttagatgataacctggtttaccatattctaagaaagcattccgctaaaaggtgtggatgtatctga

SEQ ID NO: 388 - DNA, 306 bp, Homo sapiens
  source 1..306: mol_type = genomic DNA
catacaggccaaaagtctccaagtccctgctaacttcttgctctcgcaacagaatacctatttaggtgggaagaatgaggtgtgggcggcaggctgggtgccgccgccggacgggactttaagatgaagttatgggatgtcgtggctgtctgcctggtgctgctccacaccgcgtccgccttcccgctgcccgccgcaaatatgccagaggattatcctgatcagttcgatgatgtcatggattttattcaagccaccattaaaagactgaaaaggtcaccagataaacaaatggcagtgcttcct

SEQ ID NO: 389 - DNA, 295 bp, Homo sapiens
  source 1..295: mol_type = genomic DNA
tggagaggggcgcagggacccgcagggagcccaggcttaacgtgcattctgcggttctctcccccacctcccgcctgcccgcgcaggtgccgccgccggacgggactttaagatgaagttatgggatgtcgtggctgtctgcctggtgctgctccacaccgcgtccgccttcccgctgcccgccgcaaatatgccagaggattatcctgatcagttcgatgatgtcatggattttattcaagccaccattaaaagactgaaaaggtcaccagataaacaaatggcagtgcttcct

SEQ ID NO: 390 - DNA, 764 bp, Homo sapiens
  source 1..764: mol_type = genomic DNA
tggccgccgcctccagcgcgcccttgctgccccgcgcgaccccaggattgcgaactcttgcccctgacctgttgggcggggctccgcgctccagccatcagcccggatgggtctcctggctgggacttggggcacctggagttaatgtccaacctagggtctgcggagacccgatccgaggtgccgccgccggacgggactttaagatgaagttatgggatgtcgtggctgtctgcctggtgctgctccacaccgcgtccgccttcccgctgcccgccgcaaatatgccagaggattatcctgatcagttcgatgatgtcatggattttattcaagccaccattaaaagactgaaaaggtcaccagataaacaaatggcagtgcttcctagaagagagcggaatcggcaggctgcagctgccaacccagagaattccagaggaaaaggtcggagaggccagaggggcaaaaaccggggttgtgtcttaactgcaatacatttaaatgtcactgacttgggtctgggctatgaaaccaaggaggaactgatttttaggtactgcagcggctcttgcgatgcagctgagacaacgtacgacaaaatattgaaaaacttatccagaaatagaaggctggtgagtgacaaagtagggcaggcatgttgcagacccatcgcctttgatgatgacctgtcgtttttagatgataacctggtttaccatattctaagaaagcattccgctaaaaggtgtggatgtatctga

SEQ ID NO: 391 - DNA, 778 bp, Homo sapiens
  source 1..778: mol_type = genomic DNA
ccaaagcgtccgagactgggtacagtcgtccaggcgtgacgggggcgcggggagccagtgactcctctgggaggggaagggattagggccagaatctctcaaaggtgcaaaaatccagtcaagagagggttttcgggtataccacggaggattaaaactttcaagacaaatgcagtctttgcctaacagcaatggtgccgccgccggacgggactttaagatgaagttatgggatgtcgtggctgtctgcctggtgctgctccacaccgcgtccgccttcccgctgcccgccgcaaatatgccagaggattatcctgatcagttcgatgatgtcatggattttattcaagccaccattaaaagactgaaaaggtcaccagataaacaaatggcagtgcttcctagaagagagcggaatcggcaggctgcagctgccaacccagagaattccagaggaaaaggtcggagaggccagaggggcaaaaaccggggttgtgtcttaactgcaatacatttaaatgtcactgacttgggtctgggctatgaaaccaaggaggaactgatttttaggtactgcagcggctcttgcgatgcagctgagacaacgtacgacaaaatattgaaaaacttatccagaaatagaaggctggtgagtgacaaagtagggcaggcatgttgcagacccatcgcctttgatgatgacctgtcgtttttagatgataacctggtttaccatattctaagaaagcattccgctaaaaggtgtggatgtatctga

SEQ ID NO: 392 - DNA, 799 bp, Homo sapiens
  source 1..799: mol_type = genomic DNA
gcatagaatgcagatgagcaaagtgagtgggagagggaagtcatttgtaacaaaaactcattatttacagatgagaaatttatattgtcagcgtaatatctgtgaggctaaacagagctggagagtatataaaagcagtgcgccttggtgcagaagtacagagcttaggacacagagcacatcaaaagttcccaaagagggcttgctctctcttcacctgctctgttctacagcacactaccagaagacagcagaaatgaaaagcatttactttgtggctggattatttgtaatgctggtacaaggcagctggcaacgttcccttcaagacacagaggagaaatccagatcattctcagcttcccaggcagacccactcagtgatcctgatcagatgaacgaggacaagcgccattcacagggcacattcaccagtgactacagcaagtatctggactccaggcgtgcccaagattttgtgcagtggttgatgaataccaagaggaacaggaataacattgccaaacgtcacgatgaatttgagagacatgctgaagggacctttaccagtgatgtaagttcttatttggaaggccaagctgccaaggaattcattgcttggctggtgaaaggccgaggaaggcgagatttcccagaagaggtcgccattgttgaagaacttggccgcagacatgctgatggttctttctctgatgagatgaacaccattcttgataatcttgccgccagggactttataaactggttgattcagaccaaaatcactgacaggaaataa

SEQ ID NO: 393 - DNA, 1280 bp, Homo sapiens
  source 1..1280: mol_type = genomic DNA
catagaatgcagatgagcaaagtgagtgggagagggaagtcatttgtaacaaaaactcattatttacagatgagaaatttatattgtcagcgtaatatctgtgaggctaaacagagctggagagtatataaaagcagtgcgccttggtgcagaagtacagagcttaggacacagagcacatcaaaagttcccaaagagggcttgctctctcttcacctgctctgttctacagcacactaccagaagacagcagaaatgaaaagcatttactttgtggctggattatttgtaatgctggtacaaggcagctggcaacgttcccttcaagacacagaggagaaatccagatcattctcagcttcccaggcagacccactcagtgatcctgatcagatgaacgaggacaagcgccattcacagggcacattcaccagtgactacagcaagtatctggactccaggcgtgcccaagattttgtgcagtggttgatgaataccaagaggaacaggaataacattgccaaacgtcacgatgaatttgagagacatgctgaagggacctttaccagtgatgtaagttcttatttggaaggccaagctgccaaggaattcattgcttggctggtgaaaggccgaggaaggcgagatttcccagaagaggtcgccattgttgaagaacttggccgcagacatgctgatggttctttctctgatgagatgaacaccattcttgataatcttgccgccagggactttataaactggttgattcagaccaaaatcactgacaggaaataactatatcactattcaagatcatcttcacaacatcacctgctagccacgtgggatgtttgaaatgttaagtcctgtaaatttaagaggtgtattctgaggccacattgctttgcatgccaataaataaattttcttttagtgttgtgtagccaaaaattacaaatggaataaagttttatcaaaatattgctaaaatatcagctttaaaatatgaaagtgctagattctgttattttcttcttattttggatgaagtaccccaacctgtttacatttagcgataaaattatttttctatgatataatttgtaaatgtaaattattccgatctgacatatctgcattataataataggagaatagaagaactggtagccacagtggtgaaattggaaagagaactttcttcctgaaacctttgtcttaaaaatactcagctttcaatgtatcaaagatacaattaaataaaattttcaagcttc

SEQ ID NO: 394 - DNA, 2968 bp, Homo sapiens
  source 1..2968: mol_type = genomic DNA
agggccccggaccgccgcggctcgcctcggcttgcctcgacacgcctaggcgccctccggctccgccctagccgccgcgtcccagctagagctccagcgcccgctcaggccccactccctctcgggcctcggctacttggactgcggcggaatatggcggctccgatgactcccgcggctcggcccgaggactacgaggcggcgctcaatgccgccctggctgacgtgcccgaactggccagactcctggagatcgacccgtacttgaagccctacgccgtggacttccagcgcaggtataagcagtttagccaaattttgaagaacattggagaaaatgaaggtggtattgataagttttccagaggctatgaatcatttggcgtccacagatgtgctgatggtggtttatactgcaaagaatgggccccgggagcagaaggagtttttcttactggagattttaatggttggaatccattttcgtacccatacaaaaaactggattatggaaaatgggagctgtatatcccaccaaagcagaataaatctgtactcgtgcctcatggatccaaattaaaggtagttattactagtaaaagcggagagatcttgtatcgtatttcaccgtgggcaaagtatgtggttcgtgaaggtgataatgtgaattatgattggatacactgggatccagaacactcatatgagtttaagcattccagaccaaagaagccacggagtctaagaatttatgaatctcatgtgggaatttcttcccatgaaggaaaagtagcttcttataaacattttacatgcaatgtactaccaagaatcaaaggccttggatacaactgcattcagttgatggcaatcatggagcatgcttactatgccagctttggttaccaaatcacaagcttctttgcagcttccagccgttatggaacacctgaagagctacaagaactggtagacacagctcattccatgggtatcatagtcctcttagatgtggtacacagccatgcttcaaaaaattcagcagatggattgaatatgtttgatgggacagattcctgttattttcattctggacctagagggactcatgatctttgggatagcagattgtttgcctactccagctgggaaattttaagattccttctgtcaaacataagatggtggttggaagaatatcgctttgatggatttcgttttgatggtgttacgtccatgctttatcatcaccatggagtgggtcaaggtttctcaggtgattacagtgaatatttcggactacaagtagatgaagatgccttgacttacctcatgttggcaaatcatttggttcacacgctgtgtcccgattctataacaatagctgaggatgtatcaggaatgccagctctgtgctctccaatttcccagggagggggtggttttgactatcgactagccatggcaattccagataagtggattcagctacttaaagagtttaaagatgaagactggaacatgggcgatatagtatacacgctcacaaacaggcgctaccttgaaaagtgcattgcttatgcagagagccatgatcaggcattggttggggataagtcgctggcattttggttgatggatgccgaaatgtatacaaacatgagtgtcctgactccttttactccagttattgatcgtggaatacagcttcataaaatgattcgactcattacgcatgggcttggtggagaaggctatctcaatttcatgggtaatgaatttgggcatcctgaatggttagacttcccaagaaaaggaaataatgagagttaccattatgccaggcggcagtttcatttaactgacgacgaccttcttcgctacaagttcctaaataattttgacagggatatgaatagattggaagaaagatatggttggcttgcagctccacaggcctacgtgagtgaaaaacatgaaggcaataagatcattgcttttgaaagagcaggtcttcttttcattttcaacttccatccaagcaagagctacactgactaccgagttggaacagcattgccagggaaattcaaaattgtgctagattcagatgcagcggaatatggagggcatcagagactggaccacagcactgactttttttctgaggcttttgaacataatgggcgtccctattctcttttggtgtacattccaagcagagtggccctcatccttcagaatgtggatctgccgaattgaagaggcctgatttcagctccaccagatgcagatttgtgttttgttttcttgttatcactgtcacacagcttataacatgtatgcttttcagaatacagttgtctagccaagccatcaagtgtctgaaattcaatattggtttatgcaaatacagcaaacttttatttaagtagatgggagaatatgtttaaaatattaggaatcctagaccatattttcaagtcatcttagcagctaggattctcaaatggaagtgttatatataatatgttaaaaacattttgctttcctggctaattatttgatccttttaaattcaaatttgaatcatttgtcatgtatgattatttctgttaaatgtacacagtatttaagatggatatttggtggctctatttgttctgatatcttttggtctaaattatgaggtaccaagattgtttctttgtttctttttttcaaattgtgtttagaaatactgtaataaatatgcagtagtgatataaagaattatatccaaggtaatataaaagccattacgtatgaactcatccgtgtctcattttgtgttttattttgtgatctcttgtccactaagtatcttgttaaatgccagtatctcagtctttctgaagccctgaaatggtaattgtagcatttcagaaaatgtctttcatttcaatcaataaaaagcttttgtaaaatt

SEQ ID NO: 395 - DNA, 3461 bp, Homo sapiens
  source 1..3461: mol_type = genomic DNA
aaacttaggagagtcctggttgtaagaggtattaacattttcagcagtagtactctagctacacttgactgttcccctctctgtgaatttacatgatatgtttgaaatactgcccctcaaaagtctcagaactttgagaaatacggtcctttccaaaaaaaccccttatgtccaatttgaaggggtcgctgtcagtgggtgcttaagtgggtaaagaaaagccaagaatatgtcagggtgaggaaggccaaggctgagcgaggtcagcttgggacccacctcctagaatgacctccgccagcaggaaaaaaccgttaaggggaggaaagggcaggtccctgcggcctccaggtgccagccgcgtgagtgggcggagaggcctcggtgcctcctacccgctccggacgtgcgtcccggcatcaccccgggatccgctcctccccgctggcggggggagaaagggcaggaggccttccgtcccggctataaagggccccggaccgccgcggctcgcctcggcttgcctcgacacgcctaggcgccctccggctccgccctagccgccgcgtcccagctagagctccagcgcccgctcaggccccactcgacctctcgggcctcggctacttggactgcggcggaatatggcggctccgatgactcccgcggctcggcccgaggactacgaggcggcgctcaatgccgccctggctgacgtgcccgaactggccagactcctggagatcgacccgtacttgaagccctacgccgtggacttccagcgcaggtataagcagtttagccaaattttgaagaacattggagaaaatgaaggtggtattgataagttttccagaggctatgaatcatttggcgtccacagatgtgctgatggtggtttatactgcaaagaatgggccccgggagcagaaggagtttttcttactggagattttaatggttggaatccattttcgtacccatacaaaaaactggattatggaaaatgggagctgtatatcccaccaaagcagaataaatctgtactcgtgcctcatggatccaaattaaaggtagttattactagtaaaagcggagagatcttgtatcgtatttcaccgtgggcaaagtatgtggttcgtgaaggtgataatgtgaattatgattggatacactgggatccagaacactcatatgagtttaagcattccagaccaaagaagccacggagtctaagaatttatgaatctcatgtgggaatttcttcccatgaaggaaaagtagcttcttataaacattttacatgcaatgtactaccaagaatcaaaggccttggatacaactgcattcagttgatggcaatcatggagcatgcttactatgccagctttggttaccaaatcacaagcttctttgcagcttccagccgttatggaacacctgaagagctacaagaactggtagacacagctcattccatgggtatcatagtcctcttagatgtggtacacagccatgcttcaaaaaattcagcagatggattgaatatgtttgatgggacagattcctgttattttcattctggacctagagggactcatgatctttgggatagcagattgtttgcctactccagctgggaaattttaagattccttctgtcaaacataagatggtggttggaagaatatcgctttgatggatttcgttttgatggtgttacgtccatgctttatcatcaccatggagtgggtcaaggtttctcaggtgattacagtgaatatttcggactacaagtagatgaagatgccttgacttacctcatgttggcaaatcatttggttcacacgctgtgtcccgattctataacaatagctgaggatgtatcaggaatgccagctctgtgctctccaatttcccagggagggggtggttttgactatcgactagccatggcaattccagataagtggattcagctacttaaagagtttaaagatgaagactggaacatgggcgatatagtatacacgctcacaaacaggcgctaccttgaaaagtgcattgcttatgcagagagccatgatcaggcattggttggggataagtcgctggcattttggttgatggatgccgaaatgtatacaaacatgagtgtcctgactccttttactccagttattgatcgtggaatacagcttcataaaatgattcgactcattacgcatgggcttggtggagaaggctatctcaatttcatgggtaatgaatttgggcatcctgaatggttagacttcccaagaaaaggaaataatgagagttaccattatgccaggcggcagtttcatttaactgacgacgaccttcttcgctacaagttcctaaataattttgacagggatatgaatagattggaagaaagatatggttggcttgcagctccacaggcctacgtgagtgaaaaacatgaaggcaataagatcattgcttttgaaagagcaggtcttcttttcattttcaacttccatccaagcaagagctacactgactaccgagttggaacagcattgccagggaaattcaaaattgtgctagattcagatgcagcggaatatggagggcatcagagactggaccacagcactgactttttttctgaggcttttgaacataatgggcgtccctattctcttttggtgtacattccaagcagagtggccctcatccttcagaatgtggatctgccgaattgaagaggcctgatttcagctccaccagatgcagatttgtgttttgttttcttgttatcactgtcacacagcttataacatgtatgcttttcagaatacagttgtctagccaagccatcaagtgtctgaaattcaatattggtttatgcaaatacagcaaacttttatttaagtagatgggagaatatgtttaaaatattaggaatcctagaccatattttcaagtcatcttagcagctaggattctcaaatggaagtgttatatataatatgttaaaaacattttgctttcctggctaattatttgatccttttaaattcaaatttgaatcatttgtcatgtatgattatttctgttaaatgtacacagtatttaagatggatatttggtggctctatttgttctgatatcttttggtctaaattatgaggtaccaagattgtttctttgtttctttttttcaaattgtgtttagaaatactgtaataaatatgcagtagtgatataaagaattatatccaaggtaatataaaagccattacgtatgaactcatccgtgtctcattttgtgttttattttgtgatctcttgtccactaagtatcttgttaaatgccagtatctcagtctttctgaagccctgaaatggtaattgtagcatttcagaaaatgtctttcatttcaatcaataaaaagcttttgtaaaattgc

SEQ ID NO: 396 - DNA, 2010 bp, Homo sapiens
  source 1..2010: mol_type = genomic DNA
cgcggctcgcctcggcttgcctcgacacgcctaggcgccctccggctccgccctagccgccgcgtcccagctagagctccagcgcccgctcaggccccactcgacctctcgggcctcggctacttggactgcggcggaatatggcggctccgatgactcccgcggctcggcccgaggactacgaggcggcgctcaatgccgccctggctgacgtgcccgaactggccagactcctggagatcgacccgtacttgaagccctacgccgtggacttccagcgcaggtataagcagtttagccaaattttgaagaacattggagaaagtgggaatttcttcccatgaaggaaaagtagcttcttataaacattttacatgcaatgtactaccaagaatcaaaggccttggatacaactgcattcagttgatggcaatcatggagcatgcttactatgccagctttggttaccaaatcacaagcttctttgcagcttccagccgttatggaacacctgaagagctacaagaactggtagacacagctcattccatgggtatcatagtcctcttagatgtggtacacagccatgcttcaaaaaattcagcagatggattgaatatgtttgatgggacagattcctgttattttcattctggacctagagggactcatgatctttgggatagcagattgtttgcctactccagctgggaaattttaagattccttctgtcaaacataagatggtggttggaagaatatcgctttgatggatttcgttttgatggtgttacgtccatgctttatcatcaccatggagtgggtcaaggtttctcaggtgattacagtgaatatttcggactacaagtagatgaagatgccttgacttacctcatgttggcaaatcatttggttcacacgctgtgtcccgattctataacaatagctgaggatgtatcaggaatgccagctctgtgctctccaatttcccagggagggggtggttttgactatcgactagccatggcaattccagataagtggattcagctacttaaagagtttaaagatgaagactggaacatgggcgatatagtatacacgctcacaaacaggcgctaccttgaaaagtgcattgcttatgcagagagccatgatcaggcattggttggggataagtcgctggcattttggttgatggatgccgaaatgtatacaaacatgagtgtcctgactccttttactccagttattgatcgtggaatacagcttcataaaatgattcgactcattacgcatgggcttggtggagaaggctatctcaatttcatgggtaatgaatttgggcatcctgaatggttagacttcccaagaaaaggaaataatgagagttaccattatgccaggcggcagtttcatttaactgacgacgaccttcttcgctacaagttcctaaataattttgacagggatatgaatagattggaagaaagatatggttggcttgcagctccacaggcctacgtgagtgaaaaacatgaaggcaataagatcattgcttttgaaagagcaggtcttcttttcattttcaacttccatccaagcaagagctacactgactaccgagttggaacagcattgccagggaaattcaaaattgtgctagattcagatgcagcggaatatggagggcatcagagactggaccacagcactgactttttttctgaggcttttgaacataatgggcgtccctattctcttttggtgtacattccaagcagagtggccctcatccttcagaatgtggatctgccgaattgaagaggcctgatttcagctccaccagatgcagatttgtgttttgttttcttgttatcactgtcacacagcttataacatgtatgcttttcagaatacagttgtctagccaagccatcaagtgtctgaaattcaatattggtttatgcaaatacagcaaacttttatttaagtagatgggagaatatg

SEQ ID NO: 397 - DNA, 3096 bp, Homo sapiens
  source 1..3096: mol_type = genomic DNA
tagcagagcaatcaccaccaagcctggaataactgcaagggctctgctgacatcttcctgaggtgccaaggaaatgaggatggaggaaggaatgaatgttctccatgactttgggatccagtcaacacattacctccaggtgaattaccaagactcccaggactggttcatcttggtgtccgtgatcgcagacctcaggaatgccttctacgtcctcttccccatctggttccatcttcaggaagctgtgggcattaaactcctttgggtagctgtgattggagactggctcaacctcgtctttaagtggattctctttggacagcgtccatactggtgggttttggatactgactactacagcaacacttccgtgcccctgataaagcagttccctgtaacctgtgagactggaccagggagcccctctggccatgccatgggcacagcaggtgtatactacgtgatggtcacatctactctttccatctttcagggaaagataaagccgacctacagatttcggtgcttgaatgtcattttgtggttgggattctgggctgtgcagctgaatgtctgtctgtcacgaatctaccttgctgctcattttcctcatcaagttgttgctggagtcctgtcaggcattgctgttgcagaaactttcagccacatccacagcatctataatgccagcctcaagaaatattttctcattaccttcttcctgttcagcttcgccatcggattttatctgctgctcaagggactgggtgtagacctcctgtggactctggagaaagcccagaggtggtgcgagcagccagaatgggtccacattgacaccacaccctttgccagcctcctcaagaacctgggcacgctctttggcctggggctggctctcaactccagcatgtacagggagagctgcaaggggaaactcagcaagtggctcccattccgcctcagctctattgtagcctccctcgtcctcctgcacgtctttgactccttgaaacccccatcccaagtcgagctggtcttctacgtcttgtccttctgcaagagtgcggtagtgcccctggcatccgtcagtgtcatcccctactgcctcgcccaggtcctgggccagccgcacaagaagtcgttgtaagagatgtggagtcttcggtgtttaaagtcaacaaccatgccagggattgaggaggactactatttgaagcaatgggcactggtatttggagcaagtgacatgccatccattctgccgtcgtggaattaaatcacggatggcagattggagggtcgcctggcttattcccatgtgtgactccagcctgccctcagcacagactctttcagatggaggtgccatatcacgtacaccatatgcaagtttcccgccaggaggtcctcctctctctacttgaatactctcacaagtagggagctcactcccactggaacagcccattttatctttgaatggtcttctgccagcccattttgaggccagaggtgctgtcagctcaggtggtcctcttttacaatcctaatcatattgggtaatgtttttgaaaagctaatgaagctattgagaaagacctgttgctagaagttgggttgttctggattttcccctgaagacttacttattcttccgtcacatatacaaaagcaagacttccaggtagggccagctcacaagcccaggctggagatcctaactgagaattttctacctgtgttcattcttaccgagaaaaggagaaaggagctctgaatctgataggaaaagaaggctgcctaaggaggagtttttagtatgtggcgtatcatgcaagtgctatgccaagccatgtctaaatggctttaattatatagtaatgcactctcagtaatgggggaccagcttaagtataattaatagatggttagtggggtaattctgcttctagtattttttttactgtgcatacatgttcatcgtatttccttggatttctgaatggctgcagtgacccagatattgcactaggtcaaaacattcaggtatagctgacatctcctctatcacattacatcatcctccttataagcccagctctgctttttccagattcttccactggctccacatccaccccactggatcttcagaaggctagagggcgactctggtggtgcttttgtatgtttcaattaggctctgaaatcttgggcaaaatgacaaggggagggccaggattcctctctcaggtcactccagtgttacttttaattcctagagggtaaatatgactcctttctctatcccaagccaaccaagagcacattcttaaaggaaaagtcaacatcttctctctttttttttttttttgagacagggtctcactatgttgcccaggctgctcttgaattcctgggctcaagcagtcctcccaccctaccacagcgtcccgcgtagctgggactacaggtgcaagccactatgtccagctagccaactcctccttgcctgcttttctttttttttctttttttgagacggcgcacctatcacccaggctggagtggagtggcacgatcttggctcactgcaacctcttcctcctggttcaagcgattctcatgtctcagcctcctcagtagctaggactaccggcgtgcaccaccatgccaggctaatttttatatttttagaattttagaagagatgggatttcatcatgttggccaggctggtctcgaactcctgacctcaagtgatccacctgccttggcctcccaaggtgctaggattacaggcatgagccaccgcaccgggccctccttgcctgtttttcaatctcatctgatatgcagagtatttctgccccacccacctaccccccaaaaaaagctgaagcctatttatttgaaagtccttgtttttgctactaattatatagtataccatacattatcattcaaaacaaccatcctgctcataacatctttgaaaagaaaaatatatatgtgcagtattttattaaagcaacattttatttaagaataaagtcttgttaattactatattttagatgcaatgtgatc

SEQ ID NO: 398 - DNA, 3774 bp, Homo sapiens
  source 1..3774: mol_type = genomic DNA
acccgcctctgcgcgcccccgggcacgaccccggagtctccgcgggcggccagggcgcgcgtgcgcggaggtgagccgggccggggctgcggggcttccctgagcgcgggccgggtcggtggggcggtcggctgcccgcgcggcctctcagttgggaaagctgaggttgtcgccggggccgcgggtggaggtcggggatgaggcagcaggtaggacagtgacctcggtgacgcgaaggaccccggccacctctaggttctcctcgtccgcccgttgttcagcgagggaggctctgcgcgtgccgcagctgacggggaaactgaggcacggagcgggcctgtaggagctgtccaggccatctccaaccatgggagtgaggcacccgccctgctcccaccggctcctggccgtctgcgccctcgtgtccttggcaaccgctgcactcctggggcacatcctactccatgatttcctgctggttccccgagagctgagtggctcctccccagtcctggaggagactcacccagctcaccagcagggagccagcagaccagggccccgggatgcccaggcacaccccggccgtcccagagcagtgcccacacagtgcgacgtcccccccaacagccgcttcgattgcgcccctgacaaggccatcacccaggaacagtgcgaggcccgcggctgttgctacatccctgcaaagcaggggctgcagggagcccagatggggcagccctggtgcttcttcccacccagctaccccagctacaagctggagaacctgagctcctctgaaatgggctacacggccaccctgacccgtaccacccccaccttcttccccaaggacatcctgaccctgcggctggacgtgatgatggagactgagaaccgcctccacttcacgatcaaagatccagctaacaggcgctacgaggtgcccttggagaccccgcatgtccacagccgggcaccgtccccactctacagcgtggagttctccgaggagcccttcggggtgatcgtgcgccggcagctggacggccgcgtgctgctgaacacgacggtggcgcccctgttctttgcggaccagttccttcagctgtccacctcgctgccctcgcagtatatcacaggcctcgccgagcacctcagtcccctgatgctcagcaccagctggaccaggatcaccctgtggaaccgggaccttgcgcccacgcccggtgcgaacctctacgggtctcaccctttctacctggcgctggaggacggcgggtcggcacacggggtgttcctgctaaacagcaatgccatggatgtggtcctgcagccgagccctgcccttagctggaggtcgacaggtgggatcctggatgtctacatcttcctgggcccagagcccaagagcgtggtgcagcagtacctggacgttgtgggatacccgttcatgccgccatactggggcctgggcttccacctgtgccgctggggctactcctccaccgctatcacccgccaggtggtggagaacatgaccagggcccacttccccctggacgtccagtggaacgacctggactacatggactcccggagggacttcacgttcaacaaggatggcttccgggacttcccggccatggtgcaggagctgcaccagggcggccggcgctacatgatgatcgtggatcctgccatcagcagctcgggccctgccgggagctacaggccctacgacgagggtctgcggaggggggttttcatcaccaacgagaccggccagccgctgattgggaaggtatggcccgggtccactgccttccccgacttcaccaaccccacagccctggcctggtgggaggacatggtggctgagttccatgaccaggtgcccttcgacggcatgtggattgacatgaacgagccttccaacttcatcaggggctctgaggacggctgccccaacaatgagctggagaacccaccctacgtgcctggggtggttggggggaccctccaggcggccaccatctgtgcctccagccaccagtttctctccacacactacaacctgcacaacctctacggcctgaccgaagccatcgcctcccacagggcgctggtgaaggctcgggggacacgcccatttgtgatctcccgctcgacctttgctggccacggccgatacgccggccactggacgggggacgtgtggagctcctgggagcagctcgcctcctccgtgccagaaatcctgcagtttaacctgctgggggtgcctctggtcggggccgacgtctgcggcttcctgggcaacacctcagaggagctgtgtgtgcgctggacccagctgggggccttctaccccttcatgcggaaccacaacagcctgctcagtctgccccaggagccgtacagcttcagcgagccggcccagcaggccatgaggaaggccctcaccctgcgctacgcactcctcccccacctctacacactgttccaccaggcccacgtcgcgggggagaccgtggcccggcccctcttcctggagttccccaaggactctagcacctggactgtggaccaccagctcctgtggggggaggccctgctcatcaccccagtgctccaggccgggaaggccgaagtgactggctacttccccttgggcacatggtacgacctgcagacggtgccagtagaggcccttggcagcctcccacccccacctgcagctccccgtgagccagccatccacagcgaggggcagtgggtgacgctgccggcccccctggacaccatcaacgtccacctccgggctgggtacatcatccccctgcagggccctggcctcacaaccacagagtcccgccagcagcccatggccctggctgtggccctgaccaagggtggggaggcccgaggggagctgttctgggacgatggagagagcctggaagtgctggagcgaggggcctacacacaggtcatcttcctggccaggaataacacgatcgtgaatgagctggtacgtgtgaccagtgagggagctggcctgcagctgcagaaggtgactgtcctgggcgtggccacggcgccccagcaggtcctctccaacggtgtccctgtctccaacttcacctacagccccgacaccaaggtcctggacatctgtgtctcgctgttgatgggagagcagtttctcgtcagctggtgttagccgggcggagtgtgttagtctctccagagggaggctggttccccagggaagcagagcctgtgtgcgggcagcagctgtgtgcgggcctgggggttgcatgtgtcacctggagctgggcactaaccattccaagccgccgcatcgcttgtttccacctcctgggccggggctctggcccccaacgtgtctaggagagctttctccctagatcgcactgtgggccggggccctggagggctgctctgtgttaataagattgtaaggtttgccctcctcacctgttgccggcatgcgggtagtattagccacccccctccatctgttcccagcaccggagaagggggtgctcaggtggaggtgtggggtatgcacctgagctcctgcttcgcgcctgctgctctgccccaacgcgaccgctgcccggctgcccagagggctggatgcctgccggtccccgagcaagcctgggaactcaggaaaattcacaggacttgggagattctaaatcttaagtgcaattatttttaataaaaggggcatttggaatc

SEQ ID NO: 399 - DNA, 3589 bp, Homo sapiens
  source 1..3589: mol_type = genomic DNA
acccgcctctgcgcgcccccgggcacgaccccggagtctccgcgggcggccagggcgcgcgtgcgcggaggttctcctcgtccgcccgttgttcagcgagggaggctctgcgcgtgccgcagctgacggggaaactgaggcacggagcgggcctgtaggagctgtccaggccatctccaaccatgggagtgaggcacccgccctgctcccaccggctcctggccgtctgcgccctcgtgtccttggcaaccgctgcactcctggggcacatcctactccatgatttcctgctggttccccgagagctgagtggctcctccccagtcctggaggagactcacccagctcaccagcagggagccagcagaccagggccccgggatgcccaggcacaccccggccgtcccagagcagtgcccacacagtgcgacgtcccccccaacagccgcttcgattgcgcccctgacaaggccatcacccaggaacagtgcgaggcccgcggctgttgctacatccctgcaaagcaggggctgcagggagcccagatggggcagccctggtgcttcttcccacccagctaccccagctacaagctggagaacctgagctcctctgaaatgggctacacggccaccctgacccgtaccacccccaccttcttccccaaggacatcctgaccctgcggctggacgtgatgatggagactgagaaccgcctccacttcacgatcaaagatccagctaacaggcgctacgaggtgcccttggagaccccgcatgtccacagccgggcaccgtccccactctacagcgtggagttctccgaggagcccttcggggtgatcgtgcgccggcagctggacggccgcgtgctgctgaacacgacggtggcgcccctgttctttgcggaccagttccttcagctgtccacctcgctgccctcgcagtatatcacaggcctcgccgagcacctcagtcccctgatgctcagcaccagctggaccaggatcaccctgtggaaccgggaccttgcgcccacgcccggtgcgaacctctacgggtctcaccctttctacctggcgctggaggacggcgggtcggcacacggggtgttcctgctaaacagcaatgccatggatgtggtcctgcagccgagccctgcccttagctggaggtcgacaggtgggatcctggatgtctacatcttcctgggcccagagcccaagagcgtggtgcagcagtacctggacgttgtgggatacccgttcatgccgccatactggggcctgggcttccacctgtgccgctggggctactcctccaccgctatcacccgccaggtggtggagaacatgaccagggcccacttccccctggacgtccagtggaacgacctggactacatggactcccggagggacttcacgttcaacaaggatggcttccgggacttcccggccatggtgcaggagctgcaccagggcggccggcgctacatgatgatcgtggatcctgccatcagcagctcgggccctgccgggagctacaggccctacgacgagggtctgcggaggggggttttcatcaccaacgagaccggccagccgctgattgggaaggtatggcccgggtccactgccttccccgacttcaccaaccccacagccctggcctggtgggaggacatggtggctgagttccatgaccaggtgcccttcgacggcatgtggattgacatgaacgagccttccaacttcatcaggggctctgaggacggctgccccaacaatgagctggagaacccaccctacgtgcctggggtggttggggggaccctccaggcggccaccatctgtgcctccagccaccagtttctctccacacactacaacctgcacaacctctacggcctgaccgaagccatcgcctcccacagggcgctggtgaaggctcgggggacacgcccatttgtgatctcccgctcgacctttgctggccacggccgatacgccggccactggacgggggacgtgtggagctcctgggagcagctcgcctcctccgtgccagaaatcctgcagtttaacctgctgggggtgcctctggtcggggccgacgtctgcggcttcctgggcaacacctcagaggagctgtgtgtgcgctggacccagctgggggccttctaccccttcatgcggaaccacaacagcctgctcagtctgccccaggagccgtacagcttcagcgagccggcccagcaggccatgaggaaggccctcaccctgcgctacgcactcctcccccacctctacacactgttccaccaggcccacgtcgcgggggagaccgtggcccggcccctcttcctggagttccccaaggactctagcacctggactgtggaccaccagctcctgtggggggaggccctgctcatcaccccagtgctccaggccgggaaggccgaagtgactggctacttccccttgggcacatggtacgacctgcagacggtgccagtagaggcccttggcagcctcccacccccacctgcagctccccgtgagccagccatccacagcgaggggcagtgggtgacgctgccggcccccctggacaccatcaacgtccacctccgggctgggtacatcatccccctgcagggccctggcctcacaaccacagagtcccgccagcagcccatggccctggctgtggccctgaccaagggtggggaggcccgaggggagctgttctgggacgatggagagagcctggaagtgctggagcgaggggcctacacacaggtcatcttcctggccaggaataacacgatcgtgaatgagctggtacgtgtgaccagtgagggagctggcctgcagctgcagaaggtgactgtcctgggcgtggccacggcgccccagcaggtcctctccaacggtgtccctgtctccaacttcacctacagccccgacaccaaggtcctggacatctgtgtctcgctgttgatgggagagcagtttctcgtcagctggtgttagccgggcggagtgtgttagtctctccagagggaggctggttccccagggaagcagagcctgtgtgcgggcagcagctgtgtgcgggcctgggggttgcatgtgtcacctggagctgggcactaaccattccaagccgccgcatcgcttgtttccacctcctgggccggggctctggcccccaacgtgtctaggagagctttctccctagatcgcactgtgggccggggccctggagggctgctctgtgttaataagattgtaaggtttgccctcctcacctgttgccggcatgcgggtagtattagccacccccctccatctgttcccagcaccggagaagggggtgctcaggtggaggtgtggggtatgcacctgagctcctgcttcgcgcctgctgctctgccccaacgcgaccgctgcccggctgcccagagggctggatgcctgccggtccccgagcaagcctgggaactcaggaaaattcacaggacttgggagattctaaatcttaagtgcaattatttttaataaaaggggcatttggaatc

SEQ ID NO: 400 - DNA, 2387 bp, Homo sapiens
  source 1..2387: mol_type = genomic DNA
tccccagggctgcttttctcgcggctgcgggtggtcgggctgcatcctgccttcagagtcttactgcgcggggccccagtctccagtcccgcccaggcgcctttgcaggctgcggtgggatttcgttttgcctccggttggggctgctgtttctcttcgccgacgtggatcctctatccttcagagactctggaacccctgtggtcttctcttcatctaatgaccctgaggggatggagttttcaagtccttccagagaggaatgtcccaagcctttgagtagggtaagcatcatggctggcagcctcacaggattgcttctacttcaggcagtgtcgtgggcatcaggtgcccgcccctgcatccctaaaagcttcggctacagctcggtggtgtgtgtctgcaatgccacatactgtgactcctttgaccccccgacctttcctgcccttggtaccttcagccgctatgagagtacacgcagtgggcgacggatggagctgagtatggggcccatccaggctaatcacacgggcacaggcctgctactgaccctgcagccagaacagaagttccagaaagtgaagggatttggaggggccatgacagatgctgctgctctcaacatccttgccctgtcaccccctgcccaaaatttgctacttaaatcgtacttctctgaagaaggaatcggatataacatcatccgggtacccatggccagctgtgacttctccatccgcacctacacctatgcagacacccctgatgatttccagttgcacaacttcagcctcccagaggaagataccaagctcaagatacccctgattcaccgagccctgcagttggcccagcgtcccgtttcactccttgccagcccctggacatcacccacttggctcaagaccaatggagcggtgaatgggaaggggtcactcaagggacagcccggagacatctaccaccagacctgggccagatactttgtgaagttcctggatgcctatgctgagcacaagttacagttctgggcagtgacagctgaaaatgagccttctgctgggctgttgagtggataccccttccagtgcctgggcttcacccctgaacatcagcgagacttcattgcccgtgacctaggtcctaccctcgccaacagtactcaccacaatgtccgcctactcatgctggatgaccaacgcttgctgctgccccactgggcaaaggtggtactgacagacccagaagcagctaaatatgttcatggcattgctgtacattggtacctggactttctggctccagccaaagccaccctaggggagacacaccgcctgttccccaacaccatgctctttgcctcagaggcctgtgtgggctccaagttctgggagcagagtgtgcggctaggctcctgggatcgagggatgcagtacagccacagcatcatcacgaacctcctgtaccatgtggtcggctggaccgactggaaccttgccctgaaccccgaaggaggacccaattgggtgcgtaactttgtcgacagtcccatcattgtagacatcaccaaggacacgttttacaaacagcccatgttctaccaccttggccacttcagcaagttcattcctgagggctcccagagagtggggctggttgccagtcagaagaacgacctggacgcagtggcactgatgcatcccgatggctctgctgttgtggtcgtgctaaaccgctcctctaaggatgtgcctcttaccatcaaggatcctgctgtgggcttcctggagacaatctcacctggctactccattcacacctacctgtggcgtcgccagtgatggagcagatactcaaggaggcactgggctcagcctgggcattaaagggacagagtcagctcacacgctgtctgtgactaaagagggcacagcagggccagtgtgagcttacagcgacgtaagcccaggggcaatggtttgggtgactcactttcccctctaggtggtgccaggggctggaggcccctagaaaaagatcagtaagccccagtgtccccccagcccccatgcttatgtgaacatgcgctgtgtgctgcttgctttggaaactgggcctgggtccaggcctagggtgagctcactgtccgtacaaacacaagatcagggctgagggtaaggaaaagaagagactaggaaagctgggcccaaaactggagactgtttgtctttcctggagatgcagaactgggcccgtggagcagcagtgtcagcatcagggcggaagccttaaagcagcagcgggtgtgcccaggcacccagatgattcctatggcaccagccaggaaaaatggcagctcttaaaggagaaaatgtttgagccca

SEQ ID NO: 401 - DNA, 2276 bp, Homo sapiens
  source 1..2276: mol_type = genomic DNA
gctaacctagtgcctatagctaaggcaggtacctgcatccttgtttttgtttagtggatcctctatccttcagagactctggaacccctgtggtcttctcttcatctaatgaccctgaggggatggagttttcaagtccttccagagaggaatgtcccaagcctttgagtagggtaagcatcatggctggcagcctcacaggattgcttctacttcaggcagtgtcgtgggcatcaggtgcccgcccctgcatccctaaaagcttcggctacagctcggtggtgtgtgtctgcaatgccacatactgtgactcctttgaccccccgacctttcctgcccttggtaccttcagccgctatgagagtacacgcagtgggcgacggatggagctgagtatggggcccatccaggctaatcacacgggcacaggcctgctactgaccctgcagccagaacagaagttccagaaagtgaagggatttggaggggccatgacagatgctgctgctctcaacatccttgccctgtcaccccctgcccaaaatttgctacttaaatcgtacttctctgaagaaggaatcggatataacatcatccgggtacccatggccagctgtgacttctccatccgcacctacacctatgcagacacccctgatgatttccagttgcacaacttcagcctcccagaggaagataccaagctcaagatacccctgattcaccgagccctgcagttggcccagcgtcccgtttcactccttgccagcccctggacatcacccacttggctcaagaccaatggagcggtgaatgggaaggggtcactcaagggacagcccggagacatctaccaccagacctgggccagatactttgtgaagttcctggatgcctatgctgagcacaagttacagttctgggcagtgacagctgaaaatgagccttctgctgggctgttgagtggataccccttccagtgcctgggcttcacccctgaacatcagcgagacttcattgcccgtgacctaggtcctaccctcgccaacagtactcaccacaatgtccgcctactcatgctggatgaccaacgcttgctgctgccccactgggcaaaggtggtactgacagacccagaagcagctaaatatgttcatggcattgctgtacattggtacctggactttctggctccagccaaagccaccctaggggagacacaccgcctgttccccaacaccatgctctttgcctcagaggcctgtgtgggctccaagttctgggagcagagtgtgcggctaggctcctgggatcgagggatgcagtacagccacagcatcatcacgaacctcctgtaccatgtggtcggctggaccgactggaaccttgccctgaaccccgaaggaggacccaattgggtgcgtaactttgtcgacagtcccatcattgtagacatcaccaaggacacgttttacaaacagcccatgttctaccaccttggccacttcagcaagttcattcctgagggctcccagagagtggggctggttgccagtcagaagaacgacctggacgcagtggcactgatgcatcccgatggctctgctgttgtggtcgtgctaaaccgctcctctaaggatgtgcctcttaccatcaaggatcctgctgtgggcttcctggagacaatctcacctggctactccattcacacctacctgtggcgtcgccagtgatggagcagatactcaaggaggcactgggctcagcctgggcattaaagggacagagtcagctcacacgctgtctgtgactaaagagggcacagcagggccagtgtgagcttacagcgacgtaagcccaggggcaatggtttgggtgactcactttcccctctaggtggtgccaggggctggaggcccctagaaaaagatcagtaagccccagtgtccccccagcccccatgcttatgtgaacatgcgctgtgtgctgcttgctttggaaactgggcctgggtccaggcctagggtgagctcactgtccgtacaaacacaagatcagggctgagggtaaggaaaagaagagactaggaaagctgggcccaaaactggagactgtttgtctttcctggagatgcagaactgggcccgtggagcagcagtgtcagcatcagggcggaagccttaaagcagcagcgggtgtgcccaggcacccagatgattcctatggcaccagccaggaaaaatggcagctcttaaaggagaaaatgtttgagccca

SEQ ID NO: 402 - DNA, 1739 bp, Homo sapiens
  source 1..1739: mol_type = genomic DNA
acttgcagggctaacctagtgcctatagctaaggcaggtacctgcatccttgtttttgtttagtggatcctctatccttcagagactctggaacccctgtggtcttctcttcatctaatgaccctgaggggatggagttttcaagtccttccagagaggaatgtcccaagcctttgagtagggtaagcatcatggctggcagcctcacaggattgcttctacttcaggcagtgtcgtgggcatcaggtgcccgcccctgcatccctaaaagcttcggctacagctcggtggtgtgtgtctgcaatgccacatactgtgactcctttgaccccccgacctttcctgcccttggtaccttcagccgctatgagagtacacgcagtgggcgacggatggagctgagtatggggcccatccaggctaatcacacgggcacaggcctgctactgaccctgcagccagatgctgctgctctcaacatccttgccctgtcaccccctgcccaaaatttgctacttaaatcgtacttctctgaagaaggaatcggatataacatcatccgggtacccatggccagctgtgacttctccatccgcacctacacctatgcagacacccctgatgatttccagttgcacaacttcagcctcccagaggaagataccaagctcaagatacccctgattcaccgagccctgcagttggcccagcgtcccgtttcactccttgccagcccctggacatcacccacttggctcaagaccaatggagcggtgaatgggaaggggtcactcaagggacagcccggagacatctaccaccagacctgggccagatactttgtgaagttcctggatgcctatgctgagcacaagttacagttctgggcagtgacagctgaaaatgagccttctgctgggctgttgagtggataccccttccagtgcctgggcttcacccctgaacatcagcgagacttcattgcccgtgacctaggtcctaccctcgccaacagtactcaccacaatgtccgcctactcatgctggatgaccaacgcttgctgctgccccactgggcaaaggtggtactgacagacccagaagcagctaaatatgttcatggcattgctgtacattggtacctggactttctggctccagccaaagccaccctaggggagacacaccgcctgttccccaacaccatgctctttgcctcagaggcctgtgtgggctccaagttctgggagcagagtgtgcggctaggctcctgggatcgagggatgcagtacagccacagcatcatcacgaacctcctgtaccatgtggtcggctggaccgactggaaccttgccctgaaccccgaaggaggacccaattgggtgcgtaactttgtcgacagtcccatcattgtagacatcaccaaggacacgttttacaaacagcccatgttctaccaccttggccacttcagcaagttcattcctgagggctcccagagagtggggctggttgccagtcagaagaacgacctggacgcagtggcactgatgcatcccgatggctctgctgttgtggtcgtgctaaaccgctcctctaaggatgtgcctcttaccatcaaggatcctgctgtgggcttcctggagacaatctcacctggctactccattcacacctacctgtggcgtcgccagtgatggagcagatactcaaggaggcactgggctcagcctgggcat

SEQ ID NO: 403 - DNA, 2174 bp, Homo sapiens
  source 1..2174: mol_type = genomic DNA
acatgacccatccacatcgggaagccggaattacttgcagggctaacctagtgcctatagctaaggcaggtacctgcatccttgtttttgtttagtggatcctctatccttcagagactctggaacccctgtggtcttctcttcatctaatgaccctgaggggatggagttttcaagtccttccagagaggaatgtcccaagcctttgagtagggtaagcatcatggctggcagcctcacaggattgcttctacttcaggcagtgtcgtgggcatcaggtgcccgcccctgcatccctaaaagcttcggctacagctcggtggtgtgtgtctgcaatgccacatactgtgactcctttgaccccccgacctttcctgcccttggtaccttcagccgctatgagagtacacgcagtgggcgacggatggagctgagtatggggcccatccaggctaatcacacgggcacaggaatcggatataacatcatccgggtacccatggccagctgtgacttctccatccgcacctacacctatgcagacacccctgatgatttccagttgcacaacttcagcctcccagaggaagataccaagctcaagatacccctgattcaccgagccctgcagttggcccagcgtcccgtttcactccttgccagcccctggacatcacccacttggctcaagaccaatggagcggtgaatgggaaggggtcactcaagggacagcccggagacatctaccaccagacctgggccagatactttgtgaagttcctggatgcctatgctgagcacaagttacagttctgggcagtgacagctgaaaatgagccttctgctgggctgttgagtggataccccttccagtgcctgggcttcacccctgaacatcagcgagacttcattgcccgtgacctaggtcctaccctcgccaacagtactcaccacaatgtccgcctactcatgctggatgaccaacgcttgctgctgccccactgggcaaaggtggtactgacagacccagaagcagctaaatatgttcatggcattgctgtacattggtacctggactttctggctccagccaaagccaccctaggggagacacaccgcctgttccccaacaccatgctctttgcctcagaggcctgtgtgggctccaagttctgggagcagagtgtgcggctaggctcctgggatcgagggatgcagtacagccacagcatcatcacgaacctcctgtaccatgtggtcggctggaccgactggaaccttgccctgaaccccgaaggaggacccaattgggtgcgtaactttgtcgacagtcccatcattgtagacatcaccaaggacacgttttacaaacagcccatgttctaccaccttggccacttcagcaagttcattcctgagggctcccagagagtggggctggttgccagtcagaagaacgacctggacgcagtggcactgatgcatcccgatggctctgctgttgtggtcgtgctaaaccgctcctctaaggatgtgcctcttaccatcaaggatcctgctgtgggcttcctggagacaatctcacctggctactccattcacacctacctgtggcgtcgccagtgatggagcagatactcaaggaggcactgggctcagcctgggcattaaagggacagagtcagctcacacgctgtctgtgactaaagagggcacagcagggccagtgtgagcttacagcgacgtaagcccaggggcaatggtttgggtgactcactttcccctctaggtggtgccaggggctggaggcccctagaaaaagatcagtaagccccagtgtccccccagcccccatgcttatgtgaacatgcgctgtgtgctgcttgctttggaaactgggcctgggtccaggcctagggtgagctcactgtccgtacaaacacaagatcagggctgagggtaaggaaaagaagagactaggaaagctgggcccaaaactggagactgtttgtctttcctggagatgcagaactgggcccgtggagcagcagtgtcagcatcagggcggaagccttaaagcagcagcgggtgtgcccaggcacccagatgattcctatggcaccagccaggaaaaatggcagctcttaaaggagaaaatgtttgagcccagtca

SEQ ID NO: 404 - DNA, 2400 bp, Homo sapiens
  source 1..2400: mol_type = genomic DNA
ctctctctctctcgctcgctctctcgctctctcgctctctctcgctcgctctctcgctctcgctctctctctctctccggctcgccagcgacacttgttcgttcaacttgaccaatgagacttgaggaagggctctgagtcccgcctctgcatgagtgaccgtctcttttccaatccaggtcccgccccgactccccagggctgcttttctcgcggctgcgggtggtcgggctgcatcctgccttcagagtcttactgcgcggggccccagtctccagtcccgcccaggcgcctttgcaggctgcggtgggatttcgttttgcctccggttggggctgctgtttctcttcgccgacggtgcccgcccctgcatccctaaaagcttcggctacagctcggtggtgtgtgtctgcaatgccacatactgtgactcctttgaccccccgacctttcctgcccttggtaccttcagccgctatgagagtacacgcagtgggcgacggatggagctgagtatggggcccatccaggctaatcacacgggcacaggcctgctactgaccctgcagccagaacagaagttccagaaagtgaagggatttggaggggccatgacagatgctgctgctctcaacatccttgccctgtcaccccctgcccaaaatttgctacttaaatcgtacttctctgaagaaggaatcggatataacatcatccgggtacccatggccagctgtgacttctccatccgcacctacacctatgcagacacccctgatgatttccagttgcacaacttcagcctcccagaggaagataccaagctcaagatacccctgattcaccgagccctgcagttggcccagcgtcccgtttcactccttgccagcccctggacatcacccacttggctcaagaccaatggagcggtgaatgggaaggggtcactcaagggacagcccggagacatctaccaccagacctgggccagatactttgtgaagttcctggatgcctatgctgagcacaagttacagttctgggcagtgacagctgaaaatgagccttctgctgggctgttgagtggataccccttccagtgcctgggcttcacccctgaacatcagcgagacttcattgcccgtgacctaggtcctaccctcgccaacagtactcaccacaatgtccgcctactcatgctggatgaccaacgcttgctgctgccccactgggcaaaggtggtactgacagacccagaagcagctaaatatgttcatggcattgctgtacattggtacctggactttctggctccagccaaagccaccctaggggagacacaccgcctgttccccaacaccatgctctttgcctcagaggcctgtgtgggctccaagttctgggagcagagtgtgcggctaggctcctgggatcgagggatgcagtacagccacagcatcatcacgaacctcctgtaccatgtggtcggctggaccgactggaaccttgccctgaaccccgaaggaggacccaattgggtgcgtaactttgtcgacagtcccatcattgtagacatcaccaaggacacgttttacaaacagcccatgttctaccaccttggccacttcagcaagttcattcctgagggctcccagagagtggggctggttgccagtcagaagaacgacctggacgcagtggcactgatgcatcccgatggctctgctgttgtggtcgtgctaaaccgctcctctaaggatgtgcctcttaccatcaaggatcctgctgtgggcttcctggagacaatctcacctggctactccattcacacctacctgtggcgtcgccagtgatggagcagatactcaaggaggcactgggctcagcctgggcattaaagggacagagtcagctcacacgctgtctgtgactaaagagggcacagcagggccagtgtgagcttacagcgacgtaagcccaggggcaatggtttgggtgactcactttcccctctaggtggtgccaggggctggaggcccctagaaaaagatcagtaagccccagtgtccccccagcccccatgcttatgtgaacatgcgctgtgtgctgcttgctttggaaactgggcctgggtccaggcctagggtgagctcactgtccgtacaaacacaagatcagggctgagggtaaggaaaagaagagactaggaaagctgggcccaaaactggagactgtttgtctttcctggagatgcagaactgggcccgtggagcagcagtgtcagcatcagggcggaagccttaaagcagcagcgggtgtgcccaggcacccagatgattcctatggcaccagccaggaaaaatggcagctcttaaaggagaaaatgtttgagcccagtca

SEQ ID NO: 405 - DNA, 1790 bp, Homo sapiens
  source 1..1790: mol_type = genomic DNA
attacttgcagggctaacctagtgcctatagctaaggcaggtacctgcatccttgtttttgtttagtggatcctctatccttcagagactctggaacccctgtggtcttctcttcatctaatgaccctgaggggatggagttttcaagtccttccagagagcaatgccacatactgtgactcctttgaccccccgacctttcctgcccttggtaccttcagccgctatgagagtacacgcagtgggcgacggatggagctgagtatggggcccatccaggctaatcacacgggcacaggcctgctactgaccctgcagccagaacagaagttccagaaagtgaagggatttggaggggccatgacagatgctgctgctctcaacatccttgccctgtcaccccctgcccaaaatttgctacttaaatcgtacttctctgaagaaggaatcggatataacatcatccgggtacccatggccagctgtgacttctccatccgcacctacacctatgcagacacccctgatgatttccagttgcacaacttcagcctcccagaggaagataccaagctcaagatacccctgattcaccgagccctgcagttggcccagcgtcccgtttcactccttgccagcccctggacatcacccacttggctcaagaccaatggagcggtgaatgggaaggggtcactcaagggacagcccggagacatctaccaccagacctgggccagatactttgtgaagttcctggatgcctatgctgagcacaagttacagttctgggcagtgacagctgaaaatgagccttctgctgggctgttgagtggataccccttccagtgcctgggcttcacccctgaacatcagcgagacttcattgcccgtgacctaggtcctaccctcgccaacagtactcaccacaatgtccgcctactcatgctggatgaccaacgcttgctgctgccccactgggcaaaggtggtactgacagacccagaagcagctaaatatgttcatggcattgctgtacattggtacctggactttctggctccagccaaagccaccctaggggagacacaccgcctgttccccaacaccatgctctttgcctcagaggcctgtgtgggctccaagttctgggagcagagtgtgcggctaggctcctgggatcgagggatgcagtacagccacagcatcatcacgaacctcctgtaccatgtggtcggctggaccgactggaaccttgccctgaaccccgaaggaggacccaattgggtgcgtaactttgtcgacagtcccatcattgtagacatcaccaaggacacgttttacaaacagcccatgttctaccaccttggccacttcagcaagttcattcctgagggctcccagagagtggggctggttgccagtcagaagaacgacctggacgcagtggcactgatgcatcccgatggctctgctgttgtggtcgtgctaaaccgctcctctaaggatgtgcctcttaccatcaaggatcctgctgtgggcttcctggagacaatctcacctggctactccattcacacctacctgtggcgtcgccagtgatggagcagatactcaaggaggcactgggctcagcctgggcattaaagggacagagtcagctcacacgctgtctgtgactaaagagggcacagcagggccagtgtgagcttacagcgacgtaagcccaggggcaatggtttgggtgactcactttcccctctaggtggtgccaggggctggaggcccct

SEQ ID NO: 406 - DNA, 1652 bp, Homo sapiens
  source 1..1652: mol_type = genomic DNA
agtgcctatagctaaggcaggtacctgcatccttgtttttgtttagtggatcctctatccttcagagactctggaacccctgtggtcttctcttcatctaatgaccctgaggggatggagttttcaagtccttccagagaggaatgtcccaagcctttgagtagggtaagcatcatggctggcagcctcacaggattgcttctacttcaggcagtgtcgtgggcatcaggaatcggatataacatcatccgggtacccatggccagctgtgacttctccatccgcacctacacctatgcagacacccctgatgatttccagttgcacaacttcagcctcccagaggaagataccaagctcaagatacccctgattcaccgagccctgcagttggcccagcgtcccgtttcactccttgccagcccctggacatcacccacttggctcaagaccaatggagcggtgaatgggaaggggtcactcaagggacagcccggagacatctaccaccagacctgggccagatactttgtgaagttcctggatgcctatgctgagcacaagttacagttctgggcagtgacagctgaaaatgagccttctgctgggctgttgagtggataccccttccagtgcctgggcttcacccctgaacatcagcgagacttcattgcccgtgacctaggtcctaccctcgccaacagtactcaccacaatgtccgcctactcatgctggatgaccaacgcttgctgctgccccactgggcaaaggtggtactgacagacccagaagcagctaaatatgttcatggcattgctgtacattggtacctggactttctggctccagccaaagccaccctaggggagacacaccgcctgttccccaacaccatgctctttgcctcagaggcctgtgtgggctccaagttctgggagcagagtgtgcggctaggctcctgggatcgagggatgcagtacagccacagcatcatcacgaacctcctgtaccatgtggtcggctggaccgactggaaccttgccctgaaccccgaaggaggacccaattgggtgcgtaactttgtcgacagtcccatcattgtagacatcaccaaggacacgttttacaaacagcccatgttctaccaccttggccacttcagcaagttcattcctgagggctcccagagagtggggctggttgccagtcagaagaacgacctggacgcagtggcactgatgcatcccgatggctctgctgttgtggtcgtgctaaaccgctcctctaaggatgtgcctcttaccatcaaggatcctgctgtgggcttcctggagacaatctcacctggctactccattcacacctacctgtggcgtcgccagtgatggagcagatactcaaggaggcactgggctcagcctgggcattaaagggacagagtcagctcacacgctgtctgtgactaaagagggcacagcagggccagtgtgagcttacagcgacgtaagcccaggggcaatggtttgggtgactcactttcccctctaggtggtgccaggggctggaggcccctagaaaaagatcagtaagccccagtgtccccccagcccccatgcttatgtgaacatgcgctgtgtgctgcttgctttgg

SEQ ID NO: 407 - DNA, 3132 bp, Homo sapiens
  source 1..3132: mol_type = genomic DNA
agatactgacagggcagataccgtcctcacaatacctgcccagaaagacgagaaagaggaggaagaattcctccttccaccaggaattctgtgggaagcacataagatttcatgctactagtttattcccaagagaagctaccaaagcctggtaactctaccaactctaacttttgtgcctgtaagttctcttctcctgggattacaactaattgaaacaggaattcaaaggagtctcggaggactgtaagaagaatgcttcgaggccgatccctctctgtaacatccctgggtgggcttccccagtgggaagtcgaagaacttcctgtggaggagttactgctctttgaagttgcttgggaagtgaccaataaagttggaggcatctatactgtgattcagacaaaggccaaaacaacagcagatgaatggggagagaactattttctgataggtccatattttgagcataatatgaagactcaggtggaacagtgtgaacctgtaaatgatgctgtcagaagagcagtggacgcaatgaataagcatggctgccaggtgcattttggaagatggctgatagaaggaagtccttatgtggtactttttgacataggctattcagcttggaatctggacaggtggaagggtgacctctgggaagcatgcagtgtcggcattccttatcatgaccgagaagccaatgatatgctgatatttggatctttaactgcctggttcttaaaagaggtgacagatcatgcagatggtaaatatgtcgttgcccaattccatgaatggcaggctggaattggactgatcctttctcgagccaggaaacttcctattgccacaatatttacaacccacgctacactacttgggaggtatctctgtgcagcaaatattgatttctacaaccatcttgataagtttaacattgacaaagaggctggggaaaggcagatttaccaccggtactgcatggagcgagcttccgttcattgcgctcacgtgttcaccacggtttctgaaataacagcaatagaagctgaacatatgctgaagagaaagcctgatgtagttactccaaacggcttgaatgttaagaaattttcagcagtgcatgagtttcaaaatctacatgccatgtacaaggccagaatccaagattttgttcgaggtcatttctatggtcatctcgactttgatcttgaaaagactttgttccttttcattgctgggaggtatgagttttcaaacaaaggagctgacatcttcctagaatccttatccaggctaaatttcctgctgaggatgcataaaagtgacatcacagtgatggtgtttttcattatgcctgccaagacaaataatttcaacgtggaaaccctgaaaggacaagcagtgcgaaaacagctgtgggatgttgcacattctgtgaaggaaaagtttggaaaaaaactctatgatgcattattaagaggagaaattcctgacctgaacgatattttagatcgagatgatctaacaattatgaaaagagccatcttttcaactcagcgacagtcattgcccccagtgaccacgcacaacatgattgatgactccaccgaccccatcctcagcaccattagacggattggacttttcaacaaccgcacagatagagtcaaggtgattttgcacccagagtttctatcctccaccagtcccttactacccatggactatgaagagtttgttagaggttgtcatcttggagtatttccatcatactatgaaccctggggttatactccagctgaatgcactgtgatgggtatccccagtgtgaccacgaatctctccgggtttggctgtttcatgcaggagcacgtggctgatcctactgcttacggtatttacatcgttgacaggcggttccgttctccagatgattcttgcaatcagctgactaagtttctctatggattttgcaaacagtcacgccgccaaaggattatccagaggaacagaactgagaggctctcagatcttctggattggagatacttaggcagatattaccagcatgccagacacctgacattaagcagagcttttccagataaattccatgtggaactaacatcaccaccaacgacagaaggatttaaatatcccaggccttcctcagtaccaccttctccttcagggtctcaggcctccagtcctcagagcagtgatgtggaagatgaagtggaggatgagagatacgatgaggaagaggaggctgaaagggatcggttaaatatcaagtcaccattttcactgagccacgttcctcatgggaagaaaaagctgcatggtgaatataagaactgaattctacatgtgctgcatgaagagctaatttaaaaaagcaaagtaagactaattatttaaaataaaaatgccacaaatttcattttctccttctaagtattacaatggagtttattctctgcctaaaaagtggaagaaattgagtgaatgacaattttgtaatttaggataagatccaagttattttccccaactcttgtttcccccataaagttaggcatgaggaggagcactcattaaaggcagaagacggaaaagtgtttttaaaatggtgaatttaagtggtaaggattttctcttactctgtttatttttaaatgatcatcataatcctttgcttactatttatgcagcttctctaccccaccacacaaatttcccatttcccccccgaaaaccttgatcttacccatgaatgtgcactacctacattttttaaatagctaggtttttactgattattttcatttttcacatgcatcagaaccatgatttagatgtagttttgcagagacaaaaatccatgagtgaatagctatcctaagtccatattttgatgcatattaatggacatttatgtcacttttgaaatctagaattgatgttgtaattaatgcaagatattaccatgtacatggtaccaccatcttactgtaacatttttctattgtttaaatagaaagcctttttaaaatttggtcaatcttcatagatgataacttgtaaaatccaagtaaataaacacattaatatttaataacttaa

SEQ ID NO: 408 - DNA, 710 bp, Homo sapiens
  source 1..710: mol_type = genomic DNA
gcagttactgagaactcataagacgaagctaaaatccctcttcggatccacagtcaaccgccctgaacacatcctgcaaaaagcccagagaaaggagcgccatggattactacagaaaatatgcagctatctttctggtcacattgtcggtgtttctgcatgttctccattccgctcctgatgtgcaggattgcccagaatgcacgctacaggaaaacccattcttctcccagccgggtgccccaatacttcagtgcatgggctgctgcttctctagagcatatcccactccactaaggtccaagaagacgatgttggtccaaaagaacgtcacctcagagtccacttgctgtgtagctaaatcatataacagggtcacagtaatggggggtttcaaagtggagaaccacacggcgtgccactgcagtacttgttattatcacaaatcttaaatgttttaccaagtgctgtcttgatgactgctgattttctggaatggaaaattaagttgtttagtgtttatggctttgtgagataaaactctccttttccttaccataccactttgacacgcttcaaggatatactgcagctttactgccttcctccttatcctacagtacaatcagcagtctagttcttttcatttggaatgaatacagcatttagcttgttccactgcaaataaagccttttaaatcatcattcaa

SEQ ID NO: 409 - DNA, 803 bp, Homo sapiens
  source 1..803: mol_type = genomic DNA
ccccgaaccactcagggtcctgtggacagctcacctagctgcaatggctacaggctcccggacgtccctgctcctggcttttggcctgctctgcctgccctggcttcaagagggcagtgccttcccaaccattcccttatccaggctttttgacaacgctatgctccgcgcccatcgtctgcaccagctggcctttgacacctaccaggagtttgaagaagcctatatcccaaaggaacagaagtattcattcctgcagaacccccagacctccctctgtttctcagagtctattccgacaccctccaacagggaggaaacacaacagaaatccaacctagagctgctccgcatctccctgctgctcatccagtcgtggctggagcccgtgcagttcctcaggagtgtcttcgccaacagcctggtgtacggcgcctctgacagcaacgtctatgacctcctaaaggacctagaggaaggcatccaaacgctgatggggaggctggaagatggcagcccccggactgggcagatcttcaagcagacctacagcaagttcgacacaaactcacacaacgatgacgcactactcaagaactacgggctgctctactgcttcaggaaggacatggacaaggtcgagacattcctgcgcatcgtgcagtgccgctctgtggagggcagctgtggcttctagctgcccgggtggcatccctgtgacccctccccagtgcctctcctggccctggaagttgccactccagtgcccaccagccttgtcctaataaaattaagttgcatca

SEQ ID NO: 410 - DNA, 537 bp, Homo sapiens
  source 1..537: mol_type = genomic DNA
aggatcccaaggcccaactccccgaaccactcagggtcctgtggacagctcacctagctgcaatggctacaggctcccggacgtccctgctcctggcttttggcctgctctgcctgccctggcttcaagagggcagtgccttcccaaccattcccttatccaggctttttgacaacgctatgctccgcgcccatcgtctgcaccagctggcctttgacacctaccaggagtttaggctggaagatggcagcccccggactgggcagatcttcaagcagacctacagcaagttcgacacaaactcacacaacgatgacgcactactcaagaactacgggctgctctactgcttcaggaaggacatggacaaggtcgagacattcctgcgcatcgtgcagtgccgctctgtggagggcagctgtggcttctagctgcccgggtggcatccctgtgacccctccccagtgcctctcctggccctggaagttgccactccagtgcccaccagccttgtcctaataaaattaagttgcatca

SEQ ID NO: 411 - DNA, 702 bp, Homo sapiens
  source 1..702: mol_type = genomic DNA
aggatcccaaggcccaactccccgaaccactcagggtcctgtggacagctcacctagctgcaatggctacaggctcccggacgtccctgctcctggcttttggcctgctctgcctgccctggcttcaagagggcagtgccttcccaaccattcccttatccaggctttttgacaacgctatgctccgcgcccatcgtctgcaccagctggcctttgacacctaccaggagtttaacctagagctgctccgcatctccctgctgctcatccagtcgtggctggagcccgtgcagttcctcaggagtgtcttcgccaacagcctggtgtacggcgcctctgacagcaacgtctatgacctcctaaaggacctagaggaaggcatccaaacgctgatggggaggctggaagatggcagcccccggactgggcagatcttcaagcagacctacagcaagttcgacacaaactcacacaacgatgacgcactactcaagaactacgggctgctctactgcttcaggaaggacatggacaaggtcgagacattcctgcgcatcgtgcagtgccgctctgtggagggcagctgtggcttctagctgcccgggtggcatccctgtgacccctccccagtgcctctcctggccctggaagttgccactccagtgcccaccagccttgtcctaataaaattaagttgcatca

SEQ ID NO: 412 - DNA, 756 bp, Homo sapiens
  source 1..756: mol_type = genomic DNA
ccgaaccactcagggtcctgtggacagctcacctagctgcaatggctacaggctcccggacgtccctgctcctggcttttggcctgctctgcctgccctggcttcaagagggcagtgccttcccaaccattcccttatccaggctttttgacaacgctatgctccgcgcccatcgtctgcaccagctggcctttgacacctaccaggagtttaacccccagacctccctctgtttctcagagtctattccgacaccctccaacagggaggaaacacaacagaaatccaacctagagctgctccgcatctccctgctgctcatccagtcgtggctggagcccgtgcagttcctcaggagtgtcttcgccaacagcctggtgtacggcgcctctgacagcaacgtctatgacctcctaaaggacctagaggaaggcatccaaacgctgatggggaggctggaagatggcagcccccggactgggcagatcttcaagcagacctacagcaagttcgacacaaactcacacaacgatgacgcactactcaagaactacgggctgctctactgcttcaggaaggacatggacaaggtcgagacattcctgcgcatcgtgcagtgccgctctgtggagggcagctgtggcttctagctgcccgggtggcatccctgtgacccctccccagtgcctctcctggccctggaagttgccactccagtgcccaccagccttgtcctaataaaattaagttgcatca

SEQ ID NO: 413 - DNA, 1138 bp, Homo sapiens
  source 1..1138: mol_type = genomic DNA
gagaaacaggtgaggagaagcagcgagagagaaggggccaggtataaaaagggcccacaagagaccagctcaaggatcccaaggcccaactccccgaaccactcagggtcctgtggacagctcacctagcggcaatggctgcaggctcccggacgtccctgctcctggcttttggcctgctctgcctgtcctggcttcaagagggcagtgccttcccaaccattcccttatccaggctttttgacaacgctatgctccgcgcccgtcgcctgtaccagctggcatatgacacctatcaggagtttgaagaagcctatatcctgaaggagcagaagtattcattcctgcagaacccccagacctccctctgcttctcagagtctattccaacaccttccaacagggtgaaaacgcagcagaaatctaacctagagctgctccgcatctccctgctgctcatccagtcatggctggagcccgtgcagctcctcaggagcgtcttcgccaacagcctggtgtatggcgcctcggacagcaacgtctatcgccacctgaaggacctagaggaaggcatccaaacgctgatgtgggtgagggtggcaccagggatccccaatcctggggccccactggcttccagggactggggagagaaacactgctgccctctttttagcagtcaggcgctgacccaagagaactcaccgtattcttcatttcccctcgtgaatcctccaggcctttctctacaacctggaggggagggaggaaaatggatgaatgagagagggagggaacagtgcccaagcgcttggcctctccttctcttccttcactttgcagaggctggaagatggcagcccccggactgggcagatcttcaatcagtcctacagcaagtttgacacaaaatcgcacaacgatgacgcactgctcaagaactacgggctgctctactgcttcaggaaggacatggacaaggtcgagacattcctgcgcatcgtgcagtgccgctctgtggagggcagctgtggcttctagctgcccgggtggcatccctgtgacccctccccagtgcctctcctggtcgtggaaggtgctactccagtgcccaccagccttgtcctaataaaattaa

SEQ ID NO: 414 - DNA, 819 bp, Homo sapiens
  source 1..819: mol_type = genomic DNA
aggatcccaaggcccaactccccgaaccactcagggtcctgtggacagctcacctagcggcaatggctgcaggctcccggacgtccctgctcctggcttttggcctgctctgcctgtcctggcttcaagagggcagtgccttcccaaccattcccttatccaggctttttgacaacgctatgctccgcgcccgtcgcctgtaccagctggcatatgacacctatcaggagtttgaagaagcctatatcctgaaggagcagaagtattcattcctgcagaacccccagacctccctctgcttctcagagtctattccaacaccttccaacagggtgaaaacgcagcagaaatctaacctagagctgctccgcatctccctgctgctcatccagtcatggctggagcccgtgcagctcctcaggagcgtcttcgccaacagcctggtgtatggcgcctcggacagcaacgtctatcgccacctgaaggacctagaggaaggcatccaaacgctgatgtggaggctggaagatggcagcccccggactgggcagatcttcaatcagtcctacagcaagtttgacacaaaatcgcacaacgatgacgcactgctcaagaactacgggctgctctactgcttcaggaaggacatggacaaggtcgagacattcctgcgcatcgtgcagtgccgctctgtggagggcagctgtggcttctagctgcccgggtggcatccctgtgacccctccccagtgcctctcctggtcgtggaaggtgctactccagtgcccaccagccttgtcctaataaaattaagttgca

SEQ ID NO: 415 - DNA, 753 bp, Homo sapiens
  source 1..753: mol_type = genomic DNA
ccgaaccactcagggtcctgtggacagctcacctagcggcaatggctgcaggctcccggacgtccctgctcctggcttttggcctgctctgcctgtcctggcttcaagagggcagtgccttcccaaccattcccttatccaggctttttgacaacgctatgctccgcgcccgtcgcctgtaccagctggcatatgacacctatcaggagtttaacccccagacctccctctgcttctcagagtctattccaacaccttccaacagggtgaaaacgcagcagaaatctaacctagagctgctccgcatctccctgctgctcatccagtcatggctggagcccgtgcagctcctcaggagcgtcttcgccaacagcctggtgtatggcgcctcggacagcaacgtctatcgccacctgaaggacctagaggaaggcatccaaacgctgatgtggaggctggaagatggcagcccccggactgggcagatcttcaatcagtcctacagcaagtttgacacaaaatcgcacaacgatgacgcactgctcaagaactacgggctgctctactgcttcaggaaggacatggacaaggtcgagacattcctgcgcatcgtgcagtgccgctctgtggagggcagctgtggcttctagctgcccgggtggcatccctgtgacccctccccagtgcctctcctggtcgtggaaggtgctactccagtgcccaccagccttgtcctaataaaattaagttgca

SEQ ID NO: 416 - DNA, 794 bp, Homo sapiens
  source 1..794: mol_type = genomic DNA
ccgaaccactcagggtcctgtggacagctcacctagcggcaatggctgcaggctcccggacgtccctgctcctggcttttggcctgctctgcctgtcctggcttcaagagggcagtgccttcccaaccattcccttatccaggctttttgacaacgctatgctccgcgcccgtcgcctgtaccagctggcatatgacacctatcaggagtttgaagaagcctatatcctgaaggagcagaagtattcattcctgcagaacccccagacctccctctgcttctcagagtctattccaacaccttccaacagggtgaaaacgcagcagaaatctaacctagagctgctccgcatctccctgctgctcatccagtcatggctggagcccgtgcagctcctcaggagcgtcttcgccaacagcctggtgtatggcgcctcggacagcaacgtctatcgccacctgaaggacctagaggaaggcatccaaacgctgataggctggaagatggcagcccccggactgggcagatcttcaatcagtcctacagcaagtttgacacaaaatcgcacaacgatgacgcactgctcaagaactacgggctgctctactgcttcaggaaggacatggacaaggtcgagacattcctgcgcatcgtgcagtgccgctctgtggagggcagctgtggcttctagctgcccgggtggcatccctgtgacccctccccagtgcctctcctggtcgtggaaggtgctactccagtgcccaccagccttgtcctaataaaattaagttgca

SEQ ID NO: 417 - DNA, 1977 bp, Homo sapiens
  source 1..1977: mol_type = genomic DNA
cctgtggccgctcccggctcggagtgtgatctaagcaggttgcgtaccttcctcaggtgactccggccacagcccattgtccgcggccaccggcggagtttagccgcagacctcgaagcgccccggggtccttcccgaacggcagcggctgcggcgggtccatggagaagggccctgtgcgggcaccggcggagaagccgcggggcgccaggtgcagcaatgggttccccgagcgggatccgccgcggcccgggcccagcaggccggcggagaagcccccgcggcccgaggccaagagcgcgcagcccgcggacggctggaagggcgagcggccccgcagcgaggaggataacgagctgaacctccctaacctggcagccgcctactcgtccatcctgagctcgctgggcgagaacccccagcggcaagggctgctcaagacgccctggagggcggcctcggccatgcagttcttcaccaagggctaccaggagaccatctcagatgtcctaaacgatgctatatttgatgaagatcatgatgagatggtgattgtgaaggacatagacatgttttccatgtgtgagcatcacttggttccatttgttggaaaggtccatattggttatcttcctaacaagcaagtccttggcctcagcaaacttgcgaggattgtagaaatctatagtagaagactacaagttcaggagcgccttacaaaacaaattgctgtagcaatcacggaagccttgcggcctgctggagtcggggtagtggttgaagcaacacacatgtgtatggtaatgcgaggtgtacagaaaatgaacagcaaaactgtgaccagcacaatgttgggtgtgttccgggaggatccaaagactcgggaagagttcctgactctcattaggagctgagcttcattcagtgtgtgtctgcagaaccatagcttccacgcacctgaacgagcacagaatgaactgacggtggaagacattatgagctgtgtccaacgttttaaccaaagcgtatcgtaccaacgatctgtgaaaatgcactggaagcttctggtcccggtttcctttgtggtctatgtgggtcttgtcctcattgtaactccgtatagatggtataggtattttaatcctggaagctgttgccttattaatgattatcttaaaatttcctccattggggcagcgtgggccaaattaaaacaaacaaaaccgcaactcctccacagaaacacaaacacagttattccatgaagtttagtatttggttgacatagtgctcttcaaattcatcccattaccctaaaagtaataactttgatgcttgctttaactttagtcccatctctgccactttgatgctatttgggttatgatggggcaagatggcagaggtattgggtttttttgtttttttccattcctctctacttctgtttcctagctttttctttctggagtttaagtacagtgatggttggcttgagtacctttttaaatctagcccagtataaacattagcctgcttaatatttagacatttataggtagaattctgagcactcaactcatgtttggcattttaaagtaaaaacaagtgtgacttcgaggaccaaagaaattgtcagctatacatttatctttatgaactcatttatattcctttttaatgactcgttgttctaacatttcctagaagtgttcttataaaggtctaatgtatccacaggctgttgtcttattagtaaatgcaaagtaatgactttgtctgttttactctagtctttagtacttcaaaattaccttttcatatccatgatcttgagtccatttgggggatttttaagaatttgatgtatttcaatacactgttcaaaattaaattgtttaattttatgtatgagtatgtatgttcctgaaggtggtcctatttaaattattaaactattgtaactttgttcttgtg

SEQ ID NO: 418 - DNA, 846 bp, Homo sapiens
  source 1..846: mol_type = genomic DNA
cgctcccggctcggagtgtgatctaagcaggttgcgtaccttcctcaggtgactccggccacagcccattgtccgcggccaccggcggagtttagccgcagacctcgaagcgccccggggtccttcccgaacggcagcggctgcggcgggtccatggagaagggccctgtgcgggcaccggcggagaagccgcggggcgccaggtgcagcaatgggttccccgagcgggatccgccgcggcccgggcccagcaggccggcggagaagcccccgcggcccgaggccaagagcgcgcagcccgcggacggctggaagggcgagcggccccgcagcgaggaggataacgagctgaacctccctaacctggcagccgcctactcgtccatcctgagctcgctgggcgagaacccccagcggcaagggctgctcaagacgccctggagggcggcctcggccatgcagttcttcaccaagggctaccaggagaccatctcagatgtcctaaacgatgctatatttgatgaagatcatgatgagatggtgattgtgaaggacatagacatgttttccatgtgtgagcatcacttggttccatttgttggaaaggtccatattggttatcttcctaacaagcaagtccttggcctcagcaaacttgcgaggattgtagaaatctatagtagaagactacaagttcaggagcgccttacaaaacaaattgctgtagcaatcacggaagccttgcggcctgctggagtcggggtagtggttgaagcaacgaagtcaaataaatataataaagggttgagctactttcttcttgccacctttttgtggcaatattaa

SEQ ID NO: 419 - DNA, 2943 bp, Homo sapiens
  source 1..2943: mol_type = genomic DNA
aaaaaggaggcgcggccgggctttccagcctgtggccgctcccggctcggagtgtgatctaagcaggttgcgtaccttcctcaggtgactccggccacagcccattgtccgcggccaccggcggagtttagccgcagacctcgaagcgccccggggtccttcccgaacggcagcggctgcggcgggtccatggagaagggccctgtgcgggcaccggcggagaagccgcggggcgccaggtgcagcaatgggttccccgagcgggatccgccgcggcccgggcccagcaggccggcggagaagcccccgcggcccgaggccaagagcgcgcagcccgcggacggctggaagggcgagcggccccgcagcgaggaggataacgagctgaacctccctaacctggcagccgcctactcgtccatcctgagctcgctgggcgagaacccccagcggcaagggctgctcaagacgccctggagggcggcctcggccatgcagttcttcaccaagggctaccaggagaccatctcagatgtcctaaacgatgctatatttgatgaagatcatgatgagatggtgattgtgaaggacatagacatgttttccatgtgtgagcatcacttggttccatttgttggaaaggtccatattggttatcttcctaacaagcaagtccttggcctcagcaaacttgcgaggattgtagaaatctatagtagaagactacaagttcaggagcgccttacaaaacaaattgctgtagcaatcacggaagccttgcggcctgctggagtcggggtagtggttgaagcaacacacatgtgtatggtaatgcgaggtgtacagaaaatgaacagcaaaactgtgaccagcacaatgttgggtgtgttccgggaggatccaaagactcgggaagagttcctgactctcattaggagctgagcttcattcagtgtgtgtgcgttggttgccgatcgtactgccagtagcattgtctgtctgtccggtcttgtttgtacattccattttcaattgttacagatgtgaactttattccttgtcactaattatatttaaaattatttctaggaagtcaaataaatataataaagggttgagccctctactttcttcttgccacctttttgtggcaatattaaagtgaactgctaatagtgtaagtacgtgcacaaaaccactgccagataaccagaggggcctgggaagggagaagaattagtgtatttttttcaaatagtacagtaatttgcctcataagcataggagcattgggaatgagagggaactgtgcccagtatactgttttttttcttcctccaataaaagtggtgtagtgccgaaagtgctaaaatatttagtgcggtattgctctgtgaattcaagttcaacagacttcactttggtcatgtttattaaaccaccagtgacatttaaaaatatatttttagcagtcgtaatgttagtcaccaagggaaggtggtggaatgtctatgtttttgattttactgtgagttaaaaaggcacatttctaccttctattgtttttaaattcaagaatagggaattagttcctggtgttgtttacgagtgtattctcgtgtcaacatacagggatttagacatttaactctctgtgccttgataagaatatcatttagagtgtagatacttttgcctttttaaaaaagccattattttatgagacttagtactcacactgcaaataactagtcagctcagttttaactttataggtttattgagtttcctttgtgtgatccatgtagatgcctcaaaatgtttcttcttcttcttttttttaatcttataagatatttttctaagtatttccagaaacatttgagagtgcccatcattttcaggtctgcagaaccatagcttccacgcacctgaacgagcacagaatgaactgacggtggaagacattatgagctgtgtccaacgttttaaccaaagcgtatcgtaccaacgatctgtgaaaatgcactggaagcttctggtcccggtttcctttgtggtctatgtgggtcttgtcctcattgtaactccgtatagatggtataggtattttaatcctggaagctgttgccttattaatgattatcttaaaatttcctccattggggcagcgtgggccaaattaaaacaaacaaaaccgcaactcctccacagaaacacaaacacagttattccatgaagtttagtatttggttgacatagtgctcttcaaattcatcccattaccctaaaagtaataactttgatgcttgctttaactttagtcccatctctgccactttgatgctatttgggttatgatggggcaagatggcagaggtattgggtttttttgtttttttccattcctctctacttctgtttcctagctttttctttctggagtttaagtacagtgatggttggcttgagtacctttttaaatctagcccagtataaacattagcctgcttaatatttagacatttataggtagaattctgagcactcaactcatgtttggcattttaaagtaaaaacaagtgtgacttcgaggaccaaagaaattgtcagctatacatttatctttatgaactcatttatattcctttttaatgactcgttgttctaacatttcctagaagtgttcttataaaggtctaatgtatccacaggctgttgtcttattagtaaatgcaaagtaatgactttgtctgttttactctagtctttagtacttcaaaattaccttttcatatccatgatcttgagtccatttgggggatttttaagaatttgatgtatttcaatacactgttcaaaattaaattgtttaattttatgtatgagtatgtatgttcctgaaggtggtcctatttaaattattaaactattgtaactttg

SEQ ID NO: 420 - DNA, 1805 bp, Homo sapiens
  source 1..1805: mol_type = genomic DNA
cgctcccggctcggagtgtgatctaagcaggttgcgtaccttcctcaggtgactccggccacagcccattgtccgcggccaccggcggagtttagccgcagacctcgaagcgccccggggtccttcccgaacggcagcggctgcggcgggtccatggagaagggccctgtgcgggcaccggcggagaagccgcggggcgccaggtgcagcaatgggttccccgagcgggatccgccgcggcccgggcccagcaggccggcggagaagcccccgcggcccgaggccaagagcgcgcagcccgcggacggctggaagggcgagcggccccgcagcgaggaggataacgagctgaacctccctaacctggcagccgcctactcgtccatcctgagctcgctgggcgagaacccccagcggcaagggctgctcaagacgccctggagggcggcctcggccatgcagttcttcaccaagggctaccaggagaccatctcagatgtcctaaacgatgctatatttgatgaagatcatgatgagatggtgattgtgaaggacatagacatgttttccatgtgtgagcatcacttggttccatttgttggaaaggtccatattggttatcttcctaacaagcaagtccttggcctcagcaaacttgcgaggattgtagaaatctatagtagaagactacaagttcaggagcgccttacaaaacaaattgctgtagcaatcacggaagccttgcggcctgctggagtcggggtagtggttgaagcaacgtctgcagaaccatagcttccacgcacctgaacgagcacagaatgaactgacggtggaagacattatgagctgtgtccaacgttttaaccaaagcgtatcgtaccaacgatctgtgaaaatgcactggaagcttctggtcccggtttcctttgtggtctatgtgggtcttgtcctcattgtaactccgtatagatggtataggtattttaatcctggaagctgttgccttattaatgattatcttaaaatttcctccattggggcagcgtgggccaaattaaaacaaacaaaaccgcaactcctccacagaaacacaaacacagttattccatgaagtttagtatttggttgacatagtgctcttcaaattcatcccattaccctaaaagtaataactttgatgcttgctttaactttagtcccatctctgccactttgatgctatttgggttatgatggggcaagatggcagaggtattgggtttttttgtttttttccattcctctctacttctgtttcctagctttttctttctggagtttaagtacagtgatggttggcttgagtacctttttaaatctagcccagtataaacattagcctgcttaatatttagacatttataggtagaattctgagcactcaactcatgtttggcattttaaagtaaaaacaagtgtgacttcgaggaccaaagaaattgtcagctatacatttatctttatgaactcatttatattcctttttaatgactcgttgttctaacatttcctagaagtgttcttataaaggtctaatgtatccacaggctgttgtcttattagtaaatgcaaagtaatgactttgtctgttttactctagtctttagtacttcaaaattaccttttcatatccatgatcttgagtccatttgggggatttttaagaatttgatgtatttcaatacactgttcaaaattaaattgtttaattttatgtatgagtatgtatgttcctgaaggtggtcctatttaaattattaaac

SEQ ID NO: 421 - DNA, 1897 bp, Homo sapiens
  source 1..1897: mol_type = genomic DNA
ctcggagtgtgatctaagcaggttgcgtaccttcctcaggtgactccggccacagcccattgtccgcggccaccggcggagtttagccgcagacctcgaagcgccccggggtccttcccgaacggcagcggctgcggcgggtccatggagaagggccctgtgcgggcaccggcggagaagccgcggggcgccaggtgcagcaatgggttccccgagcgggatccgccgcggcccgggcccagcaggccggcggagaagcccccgcggcccgaggccaagagcgcgcagcccgcggacggctggaagggcgagcggccccgcagcgaggaggataacgagctgaacctccctaacctggcagccgcctactcgtccatcctgagctcgctgggcgagaacccccagcggcaagggctgctcaagacgccctggagggcggcctcggccatgcagttcttcaccaagggctaccaggagaccatctcagatgtcctaaacgatgctatatttgatgaagatcatgatgagatggtgattgtgaaggacatagacatgttttccatgtgtgagcatcacttggttccatttgttggaaaggtccatattggttatcttcctaacaagcaagtccttggcctcagcaaacttgcgaggattgtagaaatctatagtagaagactacaagttcaggagcgccttacaaaacaaattgctgtagcaatcacggaagccttgcggcctgctggagtcggggtagtggttgaagcaacgaagtcaaataaatataataaagggttgagccctctactttcttcttgccacctttttgtggcaatattaaagtgaactgctaatagtgtctgcagaaccatagcttccacgcacctgaacgagcacagaatgaactgacggtggaagacattatgagctgtgtccaacgttttaaccaaagcgtatcgtaccaacgatctgtgaaaatgcactggaagcttctggtcccggtttcctttgtggtctatgtgggtcttgtcctcattgtaactccgtatagatggtataggtattttaatcctggaagctgttgccttattaatgattatcttaaaatttcctccattggggcagcgtgggccaaattaaaacaaacaaaaccgcaactcctccacagaaacacaaacacagttattccatgaagtttagtatttggttgacatagtgctcttcaaattcatcccattaccctaaaagtaataactttgatgcttgctttaactttagtcccatctctgccactttgatgctatttgggttatgatggggcaagatggcagaggtattgggtttttttgtttttttccattcctctctacttctgtttcctagctttttctttctggagtttaagtacagtgatggttggcttgagtacctttttaaatctagcccagtataaacattagcctgcttaatatttagacatttataggtagaattctgagcactcaactcatgtttggcattttaaagtaaaaacaagtgtgacttcgaggaccaaagaaattgtcagctatacatttatctttatgaactcatttatattcctttttaatgactcgttgttctaacatttcctagaagtgttcttataaaggtctaatgtatccacaggctgttgtcttattagtaaatgcaaagtaatgactttgtctgttttactctagtctttagtacttcaaaattaccttttcatatccatgatcttgagtccatttgggggatttttaagaatttgatgtatttcaatacactgttcaaaattaaattgtttaattttatgtatgagtatgtatgttcctgaaggtggtcctatttaaattattaaactattgtaactttg

SEQ ID NO: 422 - DNA, 1158 bp, Homo sapiens
  source 1..1158: mol_type = genomic DNA
aaatgggcccgcgagccaggccggcgcttctcctcctgatgcttttgcagaccgcggtcctgcaggggcgcttgctgcgttcacactctctgcactacctcttcatgggtgcctcagagcaggaccttggtctttccttgtttgaagctttgggctacgtggatgaccagctgttcgtgttctatgatcatgagagtcgccgtgtggagccccgaactccatgggtttccagtagaatttcaagccagatgtggctgcagctgagtcagagtctgaaagggtgggatcacatgttcactgttgacttctggactattatggaaaatcacaaccacagcaaggagtcccacaccctgcaggtcatcctgggctgtgaaatgcaagaagacaacagtaccgagggctactggaagtacgggtatgatgggcaggaccaccttgaattctgccctgacacactggattggagagcagcagaacccagggcctggcccaccaagctggagtgggaaaggcacaagattcgggccaggcagaacagggcctacctggagagggactgccctgcacagctgcagcagttgctggagctggggagaggtgttttggaccaacaagtgcctcctttggtgaaggtgacacatcatgtgacctcttcagtgaccactctacggtgtcgggccttgaactactacccccagaacatcaccatgaagtggctgaaggataagcagccaatggatgccaaggagttcgaacctaaagacgtattgcccaatggggatgggacctaccagggctggataaccttggctgtaccccctggggaagagcagagatatacgtgccaggtggagcacccaggcctggatcagcccctcattgtgatctgggagccctcaccgtctggcaccctagtcattggagtcatcagtggaattgctgtttttgtcgtcatcttgttcattggaattttgttcataatattaaggaagaggcagggttcaagtttctgagttcctgcatgccggtgatccctagctgtgacctctcccctggaactgtctctcatgaacctcaagctgcatctagaggcttccttcatttcctccgtcacctcagagacatacacctatgtcatttcatttcctatttttg

SEQ ID NO: 423 - DNA, 1922 bp, Homo sapiens
  source 1..1922: mol_type = genomic DNA
ctaaagttctgaaagacctgttgcttttcaccaggaagttttactgggcatctcctgagcctaggcaatagctgtagggtgacttctggagccatccccgtttccccgccccccaaaagaagcggagatttaacggggacgtgcggccagagctggggaaatgggcccgcgagccaggccggcgcttctcctcctgatgcttttgcagaccgcggtcctgcaggggcgcttgctgcgttcacactctctgcactacctcttcatgggtgcctcagagcaggaccttggtctttccttgtttgaagctttgggctacgtggatgaccagctgttcgtgttctatgatcatgagagtcgccgtgtggagccccgaactccatgggtttccagtagaatttcaagccagatgtggctgcagctgagtcagagtctgaaagggtgggatcacatgttcactgttgacttctggactattatggaaaatcacaaccacagcaaggtgcctcctttggtgaaggtgacacatcatgtgacctcttcagtgaccactctacggtgtcgggccttgaactactacccccagaacatcaccatgaagtggctgaaggataagcagccaatggatgccaaggagttcgaacctaaagacgtattgcccaatggggatgggacctaccagggctggataaccttggctgtaccccctggggaagagcagagatatacgtgccaggtggagcacccaggcctggatcagcccctcattgtgatctgggagccctcaccgtctggcaccctagtcattggagtcatcagtggaattgctgtttttgtcgtcatcttgttcattggaattttgttcataatattaaggaagaggcagggttcaagaggagccatggggcactacgtcttagctgaacgtgagtgacacgcagcctgcagactcactgtgggaaggagacaaaactagagactcaaagagggagtgcatttatgagctcttcatgtttcaggagagagttgaacctaaacatagaaattgcctgacgaactccttgattttagccttctctgttcatttcctcaaaaagatttccccatttaggtttctgagttcctgcatgccggtgatccctagctgtgacctctcccctggaactgtctctcatgaacctcaagctgcatctagaggcttccttcatttcctccgtcacctcagagacatacacctatgtcatttcatttcctatttttggaagaggactccttaaatttgggggacttacatgattcattttaacatctgagaaaagctttgaaccctgggacgtggctagtcataaccttaccagatttttacacatgtatctatgcattttctggacccgttcaacttttcctttgaatcctctctctgtgttacccagtaactcatctgtcaccaagccttggggattcttccatctgattgtgatgtgagttgcacagctatgaaggctgtacactgcacgaatggaagaggcacctgtcccagaaaaagcatcatggctatctgtgggtagtatgatgggtgtttttagcaggtaggaggcaaatatcttgaaaggggttgtgaagaggtgttttttctaattggcatgaaggtgtcatacagatttgcaaagtttaatggtgccttcatttgggatgctactctagtattccagacctgaagaatcacaataattttctacctggtctctccttgttctgataatgaaaattatgataaggatgataaaagcacttacttcgtgtccgactcttctgagcacctacttacatgcattactgcatgcacttcttacaataattctatgagataggtactattatccccatttcttttttaaatgaagaaagtgaagtaggccgggcac

SEQ ID NO: 424 - DNA, 804 bp, Homo sapiens
  source 1..804: mol_type = genomic DNA
aagaagcggagatttaacggggacgtgcggccagagctggggaaatgggcccgcgagccaggccggcgcttctcctcctgatgcttttgcagaccgcggtcctgcaggggcgcttgctgcgttcacactctctgcactacctcttcatgggtgcctcagagcaggaccttggtctttccttgtttgaagctttgggctacgtggatgaccagctgttcgtgttctatgatcatgagagtcgccgtgtggagccccgaactccatgggtttccagtagaatttcaagccagatgtggctgcagctgagtcagagtctgaaagggtgggatcacatgttcactgttgacttctggactattatggaaaatcacaaccacagcaaggtgaccactctacggtgtcgggccttgaactactacccccagaacatcaccatgaagtggctgaaggataagcagccaatggatgccaaggagttcgaacctaaagacgtattgcccaatggggatgggacctaccagggctggataaccttggctgtaccccctggggaagagcagagatatacgtgccaggtggagcacccaggcctggatcagcccctcattgtgatctgggagccctcaccgtctggcaccctagtcattggagtcatcagtggaattgctgtttttgtcgtcatcttgttcattggaattttgttcataatattaaggaagaggcagggttcaagaggagccatggggcactacgtcttagctgaacgtgagtgacacgcagcctgcagactcactgtgggaagga

SEQ ID NO: 425 - DNA, 1704 bp, Homo sapiens
  source 1..1704: mol_type = genomic DNA
ctaaagttctgaaagacctgttgcttttcaccaggaagttttactgggcatctcctgagcctaggcaatagctgtagggtgacttctggagccatccccgtttccccgccccccaaaagaagcggagatttaacggggacgtgcggccagagctggggaaatgggcccgcgagccaggccggcgcttctcctcctgatgcttttgcagaccgcggtcctgcaggggcgcttgctgcagtcccacaccctgcaggtcatcctgggctgtgaaatgcaagaagacaacagtaccgagggctactggaagtacgggtatgatgggcaggaccaccttgaattctgccctgacacactggattggagagcagcagaacccagggcctggcccaccaagctggagtgggaaaggcacaagattcgggccaggcagaacagggcctacctggagagggactgccctgcacagctgcagcagttgctggagctggggagaggtgttttggaccaacaagtgcctcctttggtgaaggtgacacatcatgtgacctcttcagtgaccactctacggtgtcgggccttgaactactacccccagaacatcaccatgaagtggctgaaggataagcagccaatggatgccaaggagttcgaacctaaagacgtattgcccaatggggatgggacctaccagggctggataaccttggctgtaccccctggggaagagcagagatatacgtgccaggtggagcacccaggcctggatcagcccctcattgtgatctgggagccctcaccgtctggcaccctagtcattggagtcatcagtggaattgctgtttttgtcgtcatcttgttcattggaattttgttcataatattaaggaagaggcagggttcaagaggagccatggggcactacgtcttagctgaacgtgagtgacacgcagcctgcagactcactgtgggaaggagacaaaactagagactcaaagagggagtgcatttatgagctcttcatgtttcaggagagagttgaacctaaacatagaaattgcctgacgaactccttgattttagccttctctgttcatttcctcaaaaagatttccccatttaggtttctgagttcctgcatgccggtgatccctagctgtgacctctcccctggaactgtctctcatgaacctcaagctgcatctagaggcttccttcatttcctccgtcacctcagagacatacacctatgtcatttcatttcctatttttggaagaggactccttaaatttgggggacttacatgattcattttaacatctgagaaaagctttgaaccctgggacgtggctagtcataaccttaccagatttttacacatgtatctatgcattttctggacccgttcaacttttcctttgaatcctctctctgtgttacccagtaactcatctgtcaccaagccttggggattcttccatctgattgtgatgtgagttgcacagctatgaaggctgtacactgcacgaatggaagaggcacctgtcccagaaaaagcatcatggctatctgtgggtagtatgatgggtgtttttagcaggtaggaggcaaatatcttgaaaggggttgtgaagaggtgttttttctaattggcatgaaggtgtcatacagatttgcaaagtttaatggtgccttcatttgggatg

SEQ ID NO: 426 - DNA, 653 bp, Homo sapiens
  source 1..653: mol_type = genomic DNA
ctaaagttctgaaagacctgttgcttttcaccaggaagttttactgggcatctcctgagcctaggcaatagctgtagggtgacttctggagccatccccgtttccccgccccccaaaagaagcggagatttaacggggacgtgcggccagagctggggaaatgggcccgcgagccaggccggcgcttctcctcctgatgcttttgcagaccgcggtcctgcaggggcgcttgctgcagccctcaccgtctggcaccctagtcattggagtcatcagtggaattgctgtttttgtcgtcatcttgttcattggaattttgttcataatattaaggaagaggcagggttcaagaggagccatggggcactacgtcttagctgaacgtgagtgacacgcagcctgcagactcactgtgggaaggagacaaaactagagactcaaagagggagtgcatttatgagctcttcatgtttcaggagagagttgaacctaaacatagaaattgcctgacgaactccttgattttagccttctctgttcatttcctcaaaaagatttccccatttaggtttctgagttcctgcatgccggtgatccctagctgtgacctctcccctggaactgtctctcatgaacctcaagctgcatctaga

SEQ ID NO: 427 - DNA, 809 bp, Homo sapiens
  source 1..809: mol_type = genomic DNA
ctaaagttctgaaagacctgttgcttttcaccaggaagttttactgggcatctcctgagcctaggcaatagctgtagggtgacttctggagccatccccgtttccccgccccccaaaagaagcggagatttaacggggacgtgcggccagagctggggaaatgggcccgcgagccaggccggcgcttctcctcctgatgcttttgcagaccgcggtcctgcaggggcgcttgctgctgcctcctttggtgaaggtgacacatcatgtgacctcttcagtgaccactctacggtgtcgggccttgaactactacccccagaacatcaccatgaagtggctgaaggataagcagccaatggatgccaaggagttcgaacctaaagacgtattgcccaatggggatgggacctaccagggctggataaccttggctgtaccccctggggaagagcagagatatacgtgccaggtggagcacccaggcctggatcagcccctcattgtgatctgggagccctcaccgtctggcaccctagtcattggagtcatcagtggaattgctgtttttgtcgtcatcttgttcattggaattttgttcataatattaaggaagaggcagggttcaagaggagccatggggcactacgtcttagctgaacgtgagtgacacgcagcctgcagactcactgtgggaaggagacaaaactagagactcaaagagggagtgcatttatgagctcttcatgtttcaggagagagttgaacctaaacatagaaattgcctgacgaactccttgattttagccttc

SEQ ID NO: 428 - DNA, 5286 bp, Homo sapiens
  source 1..5286: mol_type = genomic DNA
ttttactgggcatctcctgagcctaggcaatagctgtagggtgacttctggagccatccccgtttccccgccccccaaaagaagcggagatttaacggggacgtgcggccagagctggggaaatgggcccgcgagccaggccggcgcttctcctcctgatgcttttgcagaccgcggtcctgcaggggcgcttgctgcgttcacactctctgcactacctcttcatgggtgcctcagagcaggaccttggtctttccttgtttgaagctttgggctacgtggatgaccagctgttcgtgttctatgatcatgagagtcgccgtgtggagccccgaactccatgggtttccagtagaatttcaagccagatgtggctgcagctgagtcagagtctgaaagggtgggatcacatgttcactgttgacttctggactattatggaaaatcacaaccacagcaaggagtcccacaccctgcaggtcatcctgggctgtgaaatgcaagaagacaacagtaccgagggctactggaagtacgggtatgatgggcaggaccaccttgaattctgccctgacacactggattggagagcagcagaacccagggcctggcccaccaagctggagtgggaaaggcacaagattcgggccaggcagaacagggcctacctggagagggactgccctgcacagctgcagcagttgctggagctggggagaggtgttttggaccaacaagtgcctcctttggtgaaggtgacacatcatgtgacctcttcagtgaccactctacggtgtcgggccttgaactactacccccagaacatcaccatgaagtggctgaaggataagcagccaatggatgccaaggagttcgaacctaaagacgtattgcccaatggggatgggacctaccagggctggataaccttggctgtaccccctggggaagagcagagatatacgtgccaggtggagcacccaggcctggatcagcccctcattgtgatctgggagccctcaccgtctggcaccctagtcattggagtcatcagtggaattgctgtttttgtcgtcatcttgttcattggaattttgttcataatattaaggaagaggcagggttcaagaggagccatggggcactacgtcttagctgaacgtgagtgacacgcagcctgcagactcactgtgggaaggagacaaaactagagactcaaagagggagtgcatttatgagctcttcatgtttcaggagagagttgaacctaaacatagaaattgcctgacgaactccttgattttagccttctctgttcatttcctcaaaaagatttccccatttaggtttctgagttcctgcatgccggtgatccctagctgtgacctctcccctggaactgtctctcatgaacctcaagctgcatctagaggcttccttcatttcctccgtcacctcagagacatacacctatgtcatttcatttcctatttttggaagaggactccttaaatttgggggacttacatgattcattttaacatctgagaaaagctttgaaccctgggacgtggctagtcataaccttaccagatttttacacatgtatctatgcattttctggacccgttcaacttttcctttgaatcctctctctgtgttacccagtaactcatctgtcaccaagccttggggattcttccatctgattgtgatgtgagttgcacagctatgaaggctgtacactgcacgaatggaagaggcacctgtcccagaaaaagcatcatggctatctgtgggtagtatgatgggtgtttttagcaggtaggaggcaaatatcttgaaaggggttgtgaagaggtgttttttctaattggcatgaaggtgtcatacagatttgcaaagtttaatggtgccttcatttgggatgctactctagtattccagacctgaagaatcacaataattttctacctggtctctccttgttctgataatgaaaattatgataaggatgataaaagcacttacttcgtgtccgactcttctgagcacctacttacatgcattactgcatgcacttcttacaataattctatgagataggtactattatccccatttcttttttaaatgaagaaagtgaagtaggccgggcacggtggctcacgcctgtaatcccagcactttgggaggccaaagcgggtggatcacgaggtcaggagatcgagaccatcctggctaacatggtgaaaccccatctctaataaaaatacaaaaaattagctgggcgtggtggcagacgcctgtagtcccagctactcggaaggctgaggcaggagaatggcatgaacccaggaggcagagcttgcagtgagccgagtttgcgccactgcactccagcctaggtgacagagtgagactccatctcaaaaaaataaaaataaaaataaaaaaatgaaaaaaaaaagaaagtgaagtatagagtatctcatagtttgtcagtgatagaaacaggtttcaaactcagtcaatctgaccgtttgatacatctcagacaccactacattcagtagtttagatgcctagaataaatagagaaggaaggagatggctcttctcttgtctcattgtgtttcttctgagtgagcttgaatcacatgaaggggaacagcagaaaacaaccaactgatcctcagctgtcatgtttcctttaaaagtccctgaaggaaggtcctggaatgtgactcccttgctcctctgttgctctctttggcattcatttctttggaccctacgcaaggactgtaattggtggggacagctagtggccctgctgggcttcacacacggtgtcctccctaggccagtgcctctggagtcagaactctggtggtatttccctcaatgaagtggagtaagctctctcattttgagatggtataatggaagccaccaagtggcttagaggatgcccaggtccttccatggagccactggggttccggtgcacattaaaaaaaaaatctaaccaggacattcaggaattgctagattctgggaaatcagttcaccatgttcaaaagagtcttttttttttttttgagactctattgcccaggctggagtgcaatggcatgatctcggctcactgtaacctctgcctcccaggttcaagcgattctcctgtctcagcctcccaagtagctgggattacaggcgtgcaccaccatgcccggctaatttttgtatttttagtagagacagggtttcaccatgttggccaggctggtctcgaactctcctgacctcgtgatccgcctgcctcggcctcccaaagtgctgagattacaggtgtgagccaccctgcccagccgtcaaaagagtcttaatatatatatccagatggcatgtgtttactttatgttactacatgcacttggctgcataaatgtggtacaagcattctgtcttgaagggcaggtgcttcaggataccatatacagctcagaagtttcttctttaggcattaaattttagcaaagatatctcatctcttcttttaaaccattttctttttttgtggttagaaaagttatgtagaaaaaagtaaatgtgatttacgctcattgtagaaaagctataaaatgaatacaattaaagctgttatttaattagccagtgaaaaactattaacaacttgtctattacctgttagtattattgttgcattaaaaatgcatatactttaataaatgtatattgtattgtatactgcatgattttattgaagttcttgttcatcttgtgtatatacttaatcgctttgtcattttggagacatttattttgcttctaatttctttacattttgtcttacggaatattttcattcaactgtggtagccgaattaatcgtgtttcttcactctagggacattgtcgtctaagttgtaagacattggttattttaccagcaaaccattctgaaagcatatgacaaattatttctctcttaatatcttactatactgaaagcagactgctataaggcttcacttactcttctacctcataaggaatatgttacaattaatttattaggtaagcatttgttttatattggttttatttcacctgggctgagatttcaagaaacaccccagtcttcacagtaacacatttcactaacacatttactaaacatcagcaactgtggcctgttaatttttttaatagaaattttaagtcctcattttctttcggtgttttttaagcttaatttttctggctttattcataaattcttaaggtcaactacatttgaaaaatcaaagacctgcattttaaattcttattcacctctggcaaaaccattcacaaaccatggtagtaaagagaagggtgacacctggtggccataggtaaatgtaccacggtggtccggtgaccagagatgcagcgctgagggttttcctgaaggtaaaggaataaagaatgggtggaggggcgtgcactggaaatcacttgtagagaaaagcccctgaaaatttgagaaaacaaacaagaaactacttaccagctatttgaattgctggaatcacaggccattgctgagctgcctgaactgggaacacaacagaaggaaaacaaaccactctgataatcattgagtcaagtacagcaggtgattgaggactgctgagaggtacaggccaaaattcttatgttgtattataataatgtcatcttataatactgtcagtattttataaaacattcttcacaaactcacacacatttaaaaacaaaacactgtctctaaaatccccaaatttttcataaactcagttttaaactaactttttttcaaaccacaatctgatttaacaatgactatcatttaaatatttctgactttcaaattaaagattttcacatgcaggctgatatttgtaattgtgattctctctgtaggctttgggtataatgtgttcttttccttttttgcatcagcgattaacttctacactctaacatgtagaatgttactacaatattaaagtattttgtatgacaattttatttgaaagcctaggatgcgttgacatcctgcatgcatttattacttgatatgcatgcattctggtatctcaagcattctatttctgagtaattgtttaaggtgtagaagagatagatatggtggatttggagttgatacttatatattttctatttcttggatggatgaatttgtacattaaaagttttccatggcagaaa

SEQ ID NO: 429 - DNA, 1280 bp, Homo sapiens
  source 1..1280: mol_type = genomic DNA
ctaaagttctgaaagacctgttgcttttcaccaggaagttttactgggcatctcctgagcctaggcaatagctgtagggtgacttctggagccatccccgtttccccgccccccaaaagaagcggagatttaacggggacgtgcggccagagctggggaaatgggcccgcgagccaggccggcgcttctcctcctgatgcttttgcagaccgcggtcctgcaggggcgcttgctgcctttgggctacgtggatgaccagctgttcgtgttctatgatcatgagagtcgccgtgtggagccccgaactccatgggtttccagtagaatttcaagccagatgtggctgcagctgagtcagagtctgaaagggtgggatcacatgttcactgttgacttctggactattatggaaaatcacaaccacagcaaggagtcccacaccctgcaggtcatcctgggctgtgaaatgcaagaagacaacagtaccgagggctactggaagtacgggtatgatgggcaggaccaccttgaattctgccctgacacactggattggagagcagcagaacccagggcctggcccaccaagctggagtgggaaaggcacaagattcgggccaggcagaacagggcctacctggagagggactgccctgcacagctgcagcagttgctggagctggggagaggtgttttggaccaacaagtgcctcctttggtgaaggtgacacatcatgtgacctcttcagtgaccactctacggtgtcgggccttgaactactacccccagaacatcaccatgaagtggctgaaggataagcagccaatggatgccaaggagttcgaacctaaagacgtattgcccaatggggatgggacctaccagggctggataaccttggctgtaccccctggggaagagcagagatatacgtgccaggtggagcacccaggcctggatcagcccctcattgtgatctgggagccctcaccgtctggcaccctagtcattggagtcatcagtggaattgctgtttttgtcgtcatcttgttcattggaattttgttcataatattaaggaagaggcagggttcaagaggagccatggggcactacgtcttagctgaacgtgagtgacacgcagcctgcagactcactgtgggaaggagacaaaactagagactcaaagagggagtgcatttatgagctcttcatgtttcaggagagagttgaacctaaacatagaaattgcctgacgaactccttgattttagccttc

SEQ ID NO: 430 - DNA, 1045 bp, Homo sapiens
  source 1..1045: mol_type = genomic DNA
gagatttaacggggacgtgcggccagagctggggaaatgggcccgcgagccaggccggcgcttctcctcctgatgcttttgcagaccgcggtcctgcaggggcgcttgctgcgttcacactctctgcactacctcttcatgggtgcctcagagcaggaccttggtctttccttgtttgaagctttgggctacgtggatgaccagctgttcgtgttctatgatcatgagagtcgccgtgtggagccccgaactccatgggtttccagtagaatttcaagccagatgtggctgcagctgagtcagagtctgaaagggtgggatcacatgttcactgttgacttctggactattatggaaaatcacaaccacagcaaggagtcccacaccctgcaggtcatcctgggctgtgaaatgcaagaagacaacagtaccgagggctactggaagtacgggtatgatgggcaggaccaccttgaattctgccctgacacactggattggagagcagcagaacccagggcctggcccaccaagctggagtgggaaaggcacaagattcgggccaggcagaacagggcctacctggagagggactgccctgcacagctgcagcagttgctggagctggggagaggtgttttggaccaacaagtgaccactctacggtgtcgggccttgaactactacccccagaacatcaccatgaagtggctgaaggataagcagccaatggatgccaaggagttcgaacctaaagacgtattgcccaatggggatgggacctaccagggctggataaccttggctgtaccccctggggaagagcagagatatacgtgccaggtggagcacccaggcctggatcagcccctcattgtgatctgggagccctcaccgtctggcaccctagtcattggagtcatcagtggaattgctgtttttgtcgtcatcttgttcattggaattttgttcataatattaaggaagaggcagggttcaagaggagccatggggcactacgtcttagctgaacgtgagtgacacg

SEQ ID NO: 431 - DNA, 1123 bp, Homo sapiens
  source 1..1123: mol_type = genomic DNA
cccaaaagaagcggagatttaacggggacgtgcggccagagctggggaaatgggcccgcgagccaggccggcgcttctcctcctgatgcttttgcagaccgcggtcctgcaggggcgcttgctgcgttcacactctctgcactacctcttcatgggtgcctcagagcaggaccttggtctttccttgtttgaagctttgggctacgtggatgaccagctgttcgtgttctatgatcatgagagtcgccgtgtggagccccgaactccatgggtttccagtagaatttcaagccagatgtggctgcagctgagtcagagtctgaaagggtgggatcacatgttcactgttgacttctggactattatggaaaatcacaaccacagcaaggagtcccacaccctgcaggtcatcctgggctgtgaaatgcaagaagacaacagtaccgagggctactggaagtacgggtatgatgggcaggaccaccttgaattctgccctgacacactggattggagagcagcagaacccagggcctggcccaccaagctggagtgggaaaggcacaagattcgggccaggcagaacagggcctacctggagagggactgccctgcacagctgcagcagttgctggagctggggagaggtgttttggaccaacaagaaggaagtgaaagttccagtcttcctggcaaggtgaccactctacggtgtcgggccttgaactactacccccagaacatcaccatgaagtggctgaaggataagcagccaatggatgccaaggagttcgaacctaaagacgtattgcccaatggggatgggacctaccagggctggataaccttggctgtaccccctggggaagagcagagatatacgtgccaggtggagcacccaggcctggatcagcccctcattgtgatctgggagccctcaccgtctggcaccctagtcattggagtcatcagtggaattgctgtttttgtcgtcatcttgttcattggaattttgttcataatattaaggaagaggcagggttcaagaggagccatggggcactacgtcttagctgaacgtgagtgacacgcagcctgcagactcactgtgggaaggagacaa

SEQ ID NO: 432 - DNA, 781 bp, Homo sapiens
  source 1..781: mol_type = genomic DNA
gagatttaacggggacgtgcggccagagctggggaaatgggcccgcgagccaggccggcgcttctcctcctgatgcttttgcagaccgcggtcctgcaggggcgcttgctgcagtcccacaccctgcaggtcatcctgggctgtgaaatgcaagaagacaacagtaccgagggctactggaagtacgggtatgatgggcaggaccaccttgaattctgccctgacacactggattggagagcagcagaacccagggcctggcccaccaagctggagtgggaaaggcacaagattcgggccaggcagaacagggcctacctggagagggactgccctgcacagctgcagcagttgctggagctggggagaggtgttttggaccaacaagtgaccactctacggtgtcgggccttgaactactacccccagaacatcaccatgaagtggctgaaggataagcagccaatggatgccaaggagttcgaacctaaagacgtattgcccaatggggatgggacctaccagggctggataaccttggctgtaccccctggggaagagcagagatatacgtgccaggtggagcacccaggcctggatcagcccctcattgtgatctgggagccctcaccgtctggcaccctagtcattggagtcatcagtggaattgctgtttttgtcgtcatcttgttcattggaattttgttcataatattaaggaagaggcagggttcaagaggagccatggggcactacgtcttagctgaacgtgagtgacacg

SEQ ID NO: 433 - DNA, 646 bp, Homo sapiens
  source 1..646: mol_type = genomic DNA
ctaaagttctgaaagacctgttgcttttcaccaggaagttttactgggcatctcctgagcctaggcaatagctgtagggtgacttctggagccatccccgtttccccgccccccaaaagaagcggagatttaacggggacgtgcggccagagctggggaaatgggcccgcgagccaggccggcgcttctcctcctgatgcttttgcagaccgcggtcctgcaggggcgcttgctgcgttcacactctctgcactacctcttcatgggtgcctcagagcaggaccttggtctttccttgtttgaagctttgggctacgtggatgaccagctgttcgtgttctatgatcatgagagtcgccgtgtggagccccgaactccatgggtttccagtagaatttcaagccagatgtggctgcagctgagtcagagtctgaaagggtgggatcacatgttcactgttgacttctggactattatggaaaatcacaaccacagcaaggagtcccacaccctgcaggtcatcctgggctgtgaaatgcaagaagacaacagtaccgagggctactggaagtacgggtatgatgggcaggtgcttcaggataccatatacagctcagaagtttcttctttaggcattaaattttag

SEQ ID NO: 434 - DNA, 841 bp, Homo sapiens
  source 1..841: mol_type = genomic DNA
ctaaagttctgaaagacctgttgcttttcaccaggaagttttactgggcatctcctgagcctaggcaatagctgtagggtgacttctggagccatccccgtttccccgccccccaaaagaagcggagatttaacggggacgtgcggccagagctggggaaatgggcccgcgagccaggccggcgcttctcctcctgatgcttttgcagaccgcggtcctgcaggggcgcttgctgcgttcacactctctgcactacctcttcatgggtgcctcagagcaggaccttggtctttccttgtttgaagctttgggctacgtggatgaccagctgttcgtgttctatgatcatgagagtcgccgtgtggagccccgaactccatgggtttccagtagaatttcaagccagatgtggctgcagctgagtcagagtctgaaagggtgggatcacatgttcactgttgacttctggactattatggaaaatcacaaccacagcaaggagtcccacaccctgcaggtcatcctgggctgtgaaatgcaagaagacaacagtaccgagggctactggaagtacgggtatgatgggcaggaccaccttgaattctgccctgacacactggattggagagcagcagaacccagggcctggcccaccaagctggagtgggaaaggcacaagattcgggccaggcagaacagggcctacctggagagggactgccctgcacagctgcagcagttgctggagctggggagaggtgttttggaccaacaagtgcctcctttggtgaaggtgacacatcatgtgagccaccctgcccagccgtcaaaagagtcttaa

SEQ ID NO: 435 - DNA, 2128 bp, Homo sapiens
  source 1..2128: mol_type = genomic DNA
cttctctggttccctgacctcagtgagacagcagccggcctggggacctgggggagacacggaggaccccctggctggagctgacccacagagtagggaatcatggctggagaattggatagcagagtaatgtttgacctctggaaacatcacttacagggcttccggtcaaaattcactaggtaggagggtcatcagctgggaagaaccggcgcctgggaaacctggctggataggtatgggggagccaggccagtcccctagtcccaggtcctcccatggcagtcccccaactctaagcactctcactctcctgctgctcctctgtggacatgctcattctcaatgcaagatcctccgctgcaatgctgagtacgtatcgtccactctgagccttagaggtgggggttcatcaggagcacttcgaggaggaggaggaggaggccggggtggaggggtgggctctggcggcctctgtcgagccctccgctcctatgcgctctgcactcggcgcaccgcccgcacctgccgcggggacctcgccttccattcggcggtacatggcatcgaagacctgatgatccagcacaactgctcccgccagggccctacagcccctcccccgccccggggccccgcccttccaggcgcgggctccggcctccctgccccggacccttgtgactatgaaggccggttttcccggctgcatggtcgtcccccggggttcttgcattgcgcttccttcggggacccccatgtgcgcagcttccaccatcactttcacacatgccgtgtccaaggagcttggcctctactggataatgacttcctctttgtccaagccaccagctcccccatggcgttgggggccaacgctaccgccacccggaagctcaccatcatatttaagaacatgcaggaatgcattgatcagaaggtgtatcaggctgaggtggataatcttcctgtagcctttgaagatggttctatcaatggaggtgaccgacctgggggatccagtttgtcgattcaaactgctaaccctgggaaccatgtggagatccaagctgcctacattggcacaactataatcattcggcagacagctgggcagctctccttctccatcaaggtagcagaggatgtggccatggccttctcagctgaacaggacctgcagctctgtgttggggggtgccctccaagtcagcgactctctcgatcagagcgcaatcgtcggggagctataaccattgatactgccagacggctgtgcaaggaagggcttccagtggaagatgcttacttccattcctgtgtctttgatgttttaatttctggtgatcccaactttaccgtggcagctcaggcagcactggaggatgcccgagccttcctgccagacttagagaagctgcatctcttcccctcagatgctggggttcctctttcctcagcaaccctcttagctccactcctttctgggctctttgttctgtggctttgcattcagtaaggggaccatcagtcccattactagtttggaaatgatttggagatacagattggcatagaagaatgtaaagaatcattaaaggaagcagggcctaggagacacgtgaaacaatgacattatccagagtcagatgaggctgcagtccagggttgaaattatcacagaataaggattctgggcaaggttactgcattccggatctctgtggggctcttcaccaatttttccagcctcatttatagtaaacaaattgttctaatccatttactgcagatttcacccttataagtttagaggtcatgaaggttttaatgatcagtaaagatttaagggttgagatttttaagaggcaagagctgaaagcagaagacatgatcattagccataagaaactcaaaggaggaagacataattagggaaagaagtctatttgatgaatatgtgtgtgtaaggtatgttctgctttcttgattcaaaaatgaagcaggcattgtctagctcttaggtgaagggagtctctgcttttgaagaatggcacaggtaggacagaagtatcatccctaccccctaactaatctgttattaaagctacaaattcttcacaccatc

SEQ ID NO: 436 - DNA, 2123 bp, Homo sapiens
  source 1..2123: mol_type = genomic DNA
atattctttctaatcctctaaccctccccactcccccaactcccacaccctacccccaccaacgttcctggaattttggacttagctatttttaaaaccgtcaactcagtagccacctccctccctgctcagctgtccagtactctggccagccatatactcccccttccccccataccaaaccttctctggttccctgacctcagtgagacagcagccggcctggggacctgggggagacacggaggaccccctggctggagctgacccacagagtagggaatcatggctggagaattggatagcagagtaatgtttgacctctggaaacactcattctcaatgcaagatcctccgctgcaatgctgagtacgtatcgtccactctgagccttagaggtgggggttcatcaggagcacttcgaggaggaggaggaggaggccggggtggaggggtgggctctggcggcctctgtcgagccctccgctcctatgcgctctgcactcggcgcaccgcccgcacctgccgcggggacctcgccttccattcggcggtacatggcatcgaagacctgatgatccagcacaactgctcccgccagggccctacagcccctcccccgccccggggccccgcccttccaggcgcgggctccggcctccctgccccggacccttgtgactatgaaggccggttttcccggctgcatggtcgtcccccggggttcttgcattgcgcttccttcggggacccccatgtgcgcagcttccaccatcactttcacacatgccgtgtccaaggagcttggcctctactggataatgacttcctctttgtccaagccaccagctcccccatggcgttgggggccaacgctaccgccacccggaagctcaccatcatatttaagaacatgcaggaatgcattgatcagaaggtgtatcaggctgaggtggataatcttcctgtagcctttgaagatggttctatcaatggaggtgaccgacctgggggatccagtttgtcgattcaaactgctaaccctgggaaccatgtggagatccaagctgcctacattggcacaactataatcattcggcagacagctgggcagctctccttctccatcaaggtagcagaggatgtggccatggccttctcagctgaacaggacctgcagctctgtgttggggggtgccctccaagtcagcgactctctcgatcagagcgcaatcgtcggggagctataaccattgatactgccagacggctgtgcaaggaagggcttccagtggaagatgcttacttccattcctgtgtctttgatgttttaatttctggtgatcccaactttaccgtggcagctcaggcagcactggaggatgcccgagccttcctgccagacttagagaagctgcatctcttcccctcagatgctggggttcctctttcctcagcaaccctcttagctccactcctttctgggctctttgttctgtggctttgcattcagtaaggggaccatcagtcccattactagtttggaaatgatttggagatacagattggcatagaagaatgtaaagaatcattaaaggaagcagggcctaggagacacgtgaaacaatgacattatccagagtcagatgaggctgcagtccagggttgaaattatcacagaataaggattctgggcaaggttactgcattccggatctctgtggggctcttcaccaatttttccagcctcatttatagtaaacaaattgttctaatccatttactgcagatttcacccttataagtttagaggtcatgaaggttttaatgatcagtaaagatttaagggttgagatttttaagaggcaagagctgaaagcagaagacatgatcattagccataagaaactcaaaggaggaagacataattagggaaagaagtctatttgatgaatatgtgtgtgtaaggtatgttctgctttcttgattcaaaaatgaagcaggcattgtctagctcttaggtgaagggagtctctgcttttgaagaatggcacaggtaggacagaagtatcatccctaccccctaactaatctgttattaaagctacaaattcttcacacca

SEQ ID NO: 437 - DNA, 536 bp, Homo sapiens
  source 1..536: mol_type = genomic DNA
cttctctggttccctgacctcagtgagacagcagccggcctggggacctgggggagacacggaggaccccctggctggagctgacccacagagtagggaatcatggctggagaattggatagcagagtaatgtttgacctctggaaacaccaaatttcttttttcagtcacttacagggcttccggtcaaaattcactaggtaggagggtcatcagctgggaagaaccggcgcctgggaaacctggctggataggtatgggggagccaggccagtcccctagtcccaggtcctcccatggcagtcccccaactctaagcactctcactctcctgctgctcctctgtggacatgctcattctcaatgcaagatcctccgctgcaatgctgagtacgtatcgtccactctgagccttagaggtgggggttcatcaggagcacttcgaggaggaggaggaggaggccggggtggaggggtgggctctggcggcctctgtcgagccctccgctcctatgcgctctgcactcggcgcaccg

SEQ ID NO: 438 - DNA, 1381 bp, Homo sapiens
  source 1..1381: mol_type = genomic DNA
ttctctggttccctgacctcagtgagacagcagccggcctggggacctgggggagacacggaggaccccctggctggagctgacccacagagtagggaatcatggctggagaattggatagcagagtaatgtttgacctctggaaacactcaccatcatatttaagaacatgcaggaatgcattgatcagaaggtgtatcaggctgaggtggataatcttcctgtagcctttgaagatggttctatcaatggaggtgaccgacctgggggatccagtttgtcgattcaaactgctaaccctgggaaccatgtggagatccaagctgcctacattggcacaactataatcattcggcagacagctgggcagctctccttctccatcaaggtagcagaggatgtggccatggccttctcagctgaacaggacctgcagctctgtgttggggggtgccctccaagtcagcgactctctcgatcagagcgcaatcgtcggggagctataaccattgatactgccagacggctgtgcaaggaagggcttccagtggaagatgcttacttccattcctgtgtctttgatgttttaatttctggtgatcccaactttaccgtggcagctcaggcagcactggaggatgcccgagccttcctgccagacttagagaagctgcatctcttcccctcagatgctggggttcctctttcctcagcaaccctcttagctccactcctttctgggctctttgttctgtggctttgcattcagtaaggggaccatcagtcccattactagtttggaaatgatttggagatacagattggcatagaagaatgtaaagaatcattaaaggaagcagggcctaggagacacgtgaaacaatgacattatccagagtcagatgaggctgcagtccagggttgaaattatcacagaataaggattctgggcaaggttactgcattccggatctctgtggggctcttcaccaatttttccagcctcatttatagtaaacaaattgttctaatccatttactgcagatttcacccttataagtttagaggtcatgaaggttttaatgatcagtaaagatttaagggttgagatttttaagaggcaagagctgaaagcagaagacatgatcattagccataagaaactcaaaggaggaagacataattagggaaagaagtctatttgatgaatatgtgtgtgtaaggtatgttctgctttcttgattcaaaaatgaagcaggcattgtctagctcttaggtgaagggagtctctgcttttgaagaatggcacaggtaggacagaagtatcatccctaccccctaactaatctgttattaaagctacaaattcttcacaccatc

SEQ ID NO: 439 - DNA, 1419 bp, Homo sapiens
  source 1..1419: mol_type = genomic DNA
cttctctggttccctgacctcagtgagacagcagccggcctggggacctgggggagacacggaggaccccctggctggagctgacccacagagtagggaatcatggctggagaattggatagcagagtaatgtttgacctctggaaacactcattctcaatgcaagatcctccgctgcaatgctgactcaccatcatatttaagaacatgcaggaatgcattgatcagaaggtgtatcaggctgaggtggataatcttcctgtagcctttgaagatggttctatcaatggaggtgaccgacctgggggatccagtttgtcgattcaaactgctaaccctgggaaccatgtggagatccaagctgcctacattggcacaactataatcattcggcagacagctgggcagctctccttctccatcaaggtagcagaggatgtggccatggccttctcagctgaacaggacctgcagctctgtgttggggggtgccctccaagtcagcgactctctcgatcagagcgcaatcgtcggggagctataaccattgatactgccagacggctgtgcaaggaagggcttccagtggaagatgcttacttccattcctgtgtctttgatgttttaatttctggtgatcccaactttaccgtggcagctcaggcagcactggaggatgcccgagccttcctgccagacttagagaagctgcatctcttcccctcagatgctggggttcctctttcctcagcaaccctcttagctccactcctttctgggctctttgttctgtggctttgcattcagtaaggggaccatcagtcccattactagtttggaaatgatttggagatacagattggcatagaagaatgtaaagaatcattaaaggaagcagggcctaggagacacgtgaaacaatgacattatccagagtcagatgaggctgcagtccagggttgaaattatcacagaataaggattctgggcaaggttactgcattccggatctctgtggggctcttcaccaatttttccagcctcatttatagtaaacaaattgttctaatccatttactgcagatttcacccttataagtttagaggtcatgaaggttttaatgatcagtaaagatttaagggttgagatttttaagaggcaagagctgaaagcagaagacatgatcattagccataagaaactcaaaggaggaagacataattagggaaagaagtctatttgatgaatatgtgtgtgtaaggtatgttctgctttcttgattcaaaaatgaagcaggcattgtctagctcttaggtgaagggagtctctgcttttgaagaatggcacaggtaggacagaagtatcatccctaccccctaactaatctgttattaaagctacaaattcttcacaccatc

SEQ ID NO: 440 - DNA, 1381 bp, Homo sapiens; identical to SEQ ID NO: 438
  source 1..1381: mol_type = genomic DNA

SEQ ID NO: 441 - DNA, 1419 bp, Homo sapiens; identical to SEQ ID NO: 439
  source 1..1419: mol_type = genomic DNA

SEQ ID NO: 442 - DNA, 5989 bp, Homo sapiens
  source 1..5989: mol_type = genomic DNA
gaggaaaggagggggctggaagagagtaaagggctgttgttaaacagtttcttaccgtaagagggagttcagacctagatctttccagttaatcacacaacaaacttagctcatcgcaataaaaagcagctcagagccgactggctcttttaggcactgactccgaacaggattctttcacccaggcatctcctccagagggatccgccagcccgtccagcagcaccatgtgggtgaccaaactcctgccagccctgctgctgcagcatgtcctcctgcatctcctcctgctccccatcgccatcccctatgcagagggacaaaggaaaagaagaaatacaattcatgaattcaaaaaatcagcaaagactaccctaatcaaaatagatccagcactgaagataaaaaccaaaaaagtgaatactgcagaccaatgtgctaatagatgtactaggaataaaggacttccattcacttgcaaggcttttgtttttgataaagcaagaaaacaatgcctctggttccccttcaatagcatgtcaagtggagtgaaaaaagaatttggccatgaatttgacctctatgaaaacaaagactacattagaaactgcatcattggtaaaggacgcagctacaagggaacagtatctatcactaagagtggcatcaaatgtcagccctggagttccatgataccacacgaacacagctttttgccttcgagctatcggggtaaagacctacaggaaaactactgtcgaaatcctcgaggggaagaagggggaccctggtgtttcacaagcaatccagaggtacgctacgaagtctgtgacattcctcagtgttcagaagttgaatgcatgacctgcaatggggagagttatcgaggtctcatggatcatacagaatcaggcaagatttgtcagcgctgggatcatcagacaccacaccggcacaaattcttgcctgaaagatatcccgacaagggctttgatgataattattgccgcaatcccgatggccagccgaggccatggtgctatactcttgaccctcacacccgctgggagtactgtgcaattaaaacatgcgctgacaatactatgaatgacactgatgttcctttggaaacaactgaatgcatccaaggtcaaggagaaggctacaggggcactgtcaataccatttggaatggaattccatgtcagcgttgggattctcagtatcctcacgagcatgacatgactcctgaaaatttcaagtgcaaggacctacgagaaaattactgccgaaatccagatgggtctgaatcaccctggtgttttaccactgatccaaacatccgagttggctactgctcccaaattccaaactgtgatatgtcacatggacaagattgttatcgtgggaatggcaaaaattatatgggcaacttatcccaaacaagatctggactaacatgttcaatgtgggacaagaacatggaagacttacatcgtcatatcttctgggaaccagatgcaagtaagctgaatgagaattactgccgaaatccagatgatgatgctcatggaccctggtgctacacgggaaatccactcattccttgggattattgccctatttctcgttgtgaaggtgataccacacctacaatagtcaatttagaccatcccgtaatatcttgtgccaaaacgaaacaattgcgagttgtaaatgggattccaacacgaacaaacataggatggatggttagtttgagatacagaaataaacatatctgcggaggatcattgataaaggagagttgggttcttactgcacgacagtgtttcccttctcgagacttgaaagattatgaagcttggcttggaattcatgatgtccacggaagaggagatgagaaatgcaaacaggttctcaatgtttcccagctggtatatggccctgaaggatcagatctggttttaatgaagcttgccaggcctgctgtcctggatgattttgttagtacgattgatttacctaattatggatgcacaattcctgaaaagaccagttgcagtgtttatggctggggctacactggattgatcaactatgatggcctattacgagtggcacatctctatataatgggaaatgagaaatgcagccagcatcatcgagggaaggtgactctgaatgagtctgaaatatgtgctggggctgaaaagattggatcaggaccatgtgagggggattatggtggcccacttgtttgtgagcaacataaaatgagaatggttcttggtgtcattgttcctggtcgtggatgtgccattccaaatcgtcctggtatttttgtccgagtagcatattatgcaaaatggatacacaaaattattttaacatataaggtaccacagtcatagctgaagtaagtgtgtctgaagcacccaccaatacaactgtcttttacatgaagatttcagagaatgtggaatttaaaatgtcacttacaacaatcctaagacaactactggagagtcatgtttgttgaaattctcattaatgtttatgggtgttttctgttgttttgtttgtcagtgttattttgtcaatgttgaagtgaattaaggtacatgcaagtgtaataacatatctcctgaagatacttgaatggattaaaaaaacacacaggtatatttgctggatgataaagatttcatgggaaaaaaaatcaattaatctgtctaagctgctttctgatgttggtttcttaataatgagtaaaccacaaattaaatgttattttaacctcaccaaaacaatttataccttgtgtccctaaattgtagccctatattaaattatattacatttcatatgctatatgttatagttcattcatttctcttcaccatgtatcctgcaatactggtacacgaacacactttttacaaaaccacatacccatgtacacatgcctaggtacacatgtgcatgcactacagtttaaattatggtgtacctaatgtaacccctaaatattttagaagtatgtacctatagttttacctcaaaaaaaccagaaatctctaaagaccagtagaaatattaaaaaatgatgcaagatcaaaatgattagctaattctccatacataatctgcagatgatcttctttggttggcatttcaggtgtggccatcacccagagttaaataacacctaatctaggtgtttacatgtattcattatcctagttatttcatgtagtttctaattcttaaaggaaagagggtaatagttctatttgtgtaatttgtttcctccaaacttaaggccacttatttacacaagatatttgtagatctattttcctaaagcatttcttaagtgctcagatcagtatctaattgaagaagtttaaaagtgttttggtcattaaaaatgtacttaaataggttaaatctaagccttgctgctgtgattggcttctagctcactgcctttaaattttaaaaaatttaagaggaaaatttccaagtctccaaagttttataaatacccttcatcaagtcatgcattaaagtatatattggagaaaaaaataaaaatacttttctcaacctggaagattttagcctaataaagcttttttgaagtaaaagacaacttgtaaaaggaaagaaactagtttgtctcaactctgtattcatttattttttttttgaagtagagtggaatctgttgaatcagatattttatcaagatatgtttattttttcttatttcattttacaaagttcactcctaatgccatatgtaacagacatttaaattttgtgttctgtataacagccaaattatcatatttatcattgtatttgtcatgcttagctaaagatcatgtatttgttgagaaatagaataacaaaaagtaataggataggctttgaatttttgcagaaatcttcctgtacaaaacacctttaaaaataattttttgaatggtgtgaatccagtagtcccatttctctgacttagttttcttgagtgatttttatcaaggccaagtccccaaacaattccctaccagctctttagagtactgttcaatctggactaaaatggttttaagtttatggagagcttagtccacagaatatagggcggcgagtccagaaatgcttatacaatttttttttcataataagatatgtgctggcatcaagaaacttaaagtggaagcaaaaagacatccaactagttgctggtctctatcatcttatctgatggtatttctattttccttatataatacaccattttagtaagaactcctagaaatttcaagagcatattgccaaaatataaagtatatttcatagtttcttctggctgaaccagtgaaattttattattgcatattaatgatatttgtaaaacttttataaaaattgtcataattttaaatactcacattttaaaaatacttctttaatgactcttcctctaaatttcctggaaatacagataaagattagctagatacaagatacagctaagtatttagacattttgaggctagtatttttcattttattaaaggctaaaaacaataccaccaataaatcatcaaacaaaccgtacaaagtaattctctctttgggaggctcctttcgtgatagagggacatgggtggaattgacaatgaaacttagatgaacaaggtccatgttattttaggtggtagaacagggtagagtcatgtcattatttgctggtggaagacactatttaccaggtgttctttgctgaataaatcattaaacatttttaaaaatccaacaatccactttattttgtgtcattgacaaaaggatcttttaaatcagaaggtttcaatgcaatttttggtttggctgtttgaataatggttatgtactgttataattgtagacattttctcacgtctaccaggaattgaagtgtaaaactaaaatatttttcataatgcctctgccgtgcagaaggaatgataatccttttgtatacttctttaattttattgtaaaatgtgtaatgacttttacctatatgctgtgggcaggtcctcagtaaaatctattgagtcaatttctagtattaacaggcttttgcttgctatctaagtgtttcaaattatgggaagtgtgagacactggaaggcaagaaaattaacaataatggcatgtgatagcaaaattgtatttcacttattcctgtgaatatttcttgttggtaccaatggtactgtacaaagtgaatgttatagccacaacattctcttgaaaagaacactgtcaagaagtgggaaattgctgtcaggcatttcattgttgtttttaaacttttttaaaagaaatactggttttgcaatatagagatcatgtggtaaagaattttaataagatcttatactaaaaagccttaaatcaatttattgagattcaaaaaatactattataattaattacatcccatacatataggcaaactcatttaaaaaataaaactaattttggtaaaagtacatggcctttgtttttaaaatacataattttaaaataaatcacttgtcatgataaagtccaaaaagaagttatcattcaacattcaactaaggttggagctaagaatttactaatacaaaaaaagttaaaattttttggaccatatatatcttgacagtgtaacttttaagtaggttcatttccatttgcacagaaagtttctgtctttaggaaactgaaaatgaaatactgtggatgctatgactgtttgtcttgtatgtaaataggaaattaataagctgcctattgagtggtatagctgtatgcttacccaaaaaagggaacactgtggttatgacttgtattataaactttctgtagttaataaagttgttatttttataaccatgattatattattattattaataaaatattttatcaaaatgct

SEQ ID NO: 443 - DNA, 1425 bp, Homo sapiens
  source 1..1425: mol_type = genomic DNA
atgtgggtgaccaaactcctgccagccctgctgctgcagcatgtcctcctgcatctcctcctgctccccatcgccatcccctatgcagagggacaaaggaaaagaagaaatacaattcatgaattcaaaaaatcagcaaagactaccctaatcaaaatagatccagcactgaagataaaaaccaaaaaagtgaatactgcagaccaatgtgctaatagatgtactaggaataaaggacttccattcacttgcaaggcttttgtttttgataaagcaagaaaacaatgcctctggttccccttcaatagcatgtcaagtggagtgaaaaaagaatttggccatgaatttgacctctatgaaaacaaagactacattagaaactgcatcattggtaaaggacgcagctacaagggaacagtatctatcactaagagtggcatcaaatgtcagccctggagttccatgataccacacgaacacagtggtggtgatgactgccttgttgaatccactttttattctattccattttggggacacaattctgcaagatgattcttcattaggaaacagagatgagttattgaccaacacagaaagaaaaagagtttgttgctccacactgggattaaacctatgatcttggcctaattaacactagctagtaagtgtccaagctgatcatctctacaacatttcaataacagaaaacaacaattttcaaaattagttacttacaattatgtagaaatgcctctaaaacacagtattttccttatattacaaaaacaaaaattataattggttttgtcctcttttgagagtttgcatggtgttactccctgcatagtgaagaaaacattttatttaagtagatggatctaagtttttcatgaacaaaggaatgacatttgaaatcaatcctaccctagtccaggagaatgcattagattaacctagtagaggtcttatttcaccctgagttttctatgatcgtgattctctgctggaggagtaattgtgaaatagatctctctgggaactggcttcctagtccaatcagctcttttaccaatgaacacttccttgtgatatagatgtttatggccgagaggatccagtatattaataaaatccctttttgtattcaatgagggaaacacataattttcatcaattagcagcttattggaatatctgcatgatggtttaacacttttaagtgttgactaaagattaattttacagaaaatagaaaaagaaatatgtttctgtctggaggaatgatttattgttgacccctaaattgaaatattttactagtggcttaatggaaagatgatgaaagatgatgaaattaatgtagaagcttaactagaaaatcaggtgacctgatatctacatctgtatccttcattggccacc

SEQ ID NO: 444 - DNA, 1053 bp, Homo sapiens
  source 1..1053: mol_type = genomic DNA
agttcagacctagatctttccagttaatcacacaacaaacttagctcatcgcaataaaaagcagctcagagccgactggctcttttaggcactgactccgaacaggattctttcacccaggcatctcctccagagggatccgccagcccgtccagcagcaccatgtgggtgaccaaactcctgccagccctgctgctgcagcatgtcctcctgcatctcctcctgctccccatcgccatcccctatgcagagggacaaaggaaaagaagaaatacaattcatgaattcaaaaaatcagcaaagactaccctaatcaaaatagatccagcactgaagataaaaaccaaaaaagtgaatactgcagaccaatgtgctaatagatgtactaggaataaaggacttccattcacttgcaaggcttttgtttttgataaagcaagaaaacaatgcctctggttccccttcaatagcatgtcaagtggagtgaaaaaagaatttggccatgaatttgacctctatgaaaacaaagactacattagaaactgcatcattggtaaaggacgcagctacaagggaacagtatctatcactaagagtggcatcaaatgtcagccctggagttccatgataccacacgaacacagctttttgccttcgagctatcggggtaaagacctacaggaaaactactgtcgaaatcctcgaggggaagaagggggaccctggtgtttcacaagcaatccagaggtacgctacgaagtctgtgacattcctcagtgttcagaagttgaatgcatgacctgcaatggggagagttatcgaggtctcatggatcatacagaatcaggcaagatttgtcagcgctgggatcatcagacaccacaccggcacaaattcttgcctgaaagatatcccgacaagggctttgatgataattattgccgcaatcccgatggccagccgaggccatggtgctatactcttgaccctcacacccgctgggagtactgtgcaattaaaacatgcggagacataacatgggctctcaactga

SEQ ID NO: 445 - DNA, 590 bp, Homo sapiens
  source 1..590: mol_type = genomic DNA
attgggctcagccttgctcctcccttccttactcggataggagccactgggatctggagctccagcttccaaattgaagctggcctcaggccaggtgaccttttctttgattctttcacccaggcatctcctccagagggatccgccagcccgtccagcagcaccatgtgggtgaccaaactcctgccagccctgctgctgcagcatgtcctcctgcatctcctcctgctccccatcgccatcccctatgcagagggacaaaggaaaagaagaaatacaattcatgaattcaaaaaatcagcaaagactaccctaatcaaaatagatccagcactgaagataaaaaccaaaaaagtgaatactgcagaccaatgtgctaatagatgtactaggaataaaggacttccattcacttgcaaggcttttgtttttgataaagcaagaaaacaatgcctctggttccccttcaatagcatgtcaagtggagtgaaaaaagaatttggccatgaatttgacctctatgaaaacaaagactacattagaaactgcatcattggtaaaggacgcagctacaagggaacagtatctat

SEQ ID NO: 446 - DNA, 545 bp, Homo sapiens
  source 1..545: mol_type = genomic DNA
attgagcgaattggtcccctgcctgtgccttgatttagccattgggctcagccttgctcctcccttccttactcggataggagccactgggatctggagctccagcttccaaattgaagctggcctcaggccaggtgaccttttctttgcatctcctccagagggatccgccagcccgtccagcagcaccatgtgggtgaccaaactcctgccagccctgctgctgcagcatgtcctcctgcatctcctcctgctccccatcgccatcccctatgcagagggacaaaggaaaagaagaaatacaattcatgaattcaaaaaatcagcaaagactaccctaatcaaaatagatccagcactgaagataaaaaccaaaaaagtgaatactgcagaccaatgtgctaatagatgtactaggaataaaggacttccattcacttgcaaggcttttgtttttgataaagcaagaaaacaatgcctctggttccccttcaatagcatgtcaagtggagtgaaaaaagaatttggccatgaatttgacctct

SEQ ID NO: 447 - DNA, 1990 bp, Homo sapiens
  source 1..1990: mol_type = genomic DNA
cacacaacaaacttagctcatcgcaataaaaagcagctcagagccgactggctcttttaggcactgactccgaacaggattctttcacccaggcatctcctccagagggatccgccagcccgtccagcagcaccatgtgggtgaccaaactcctgccagccctgctgctgcagcatgtcctcctgcatctcctcctgctccccatcgccatcccctatgcagagggacaaaggaaaagaagaaatacaattcatgaattcaaaaaatcagcaaagactaccctaatcaaaatagatccagcactgaagataaaaaccaaaaaagtgaatactgcagaccaatgtgctaatagatgtactaggaataaaggacttccattcacttgcaaggcttttgtttttgataaagcaagaaaacaatgcctctggttccccttcaatagcatgtcaagtggagtgaaaaaagaatttggccatgaatttgacctctatgaaaacaaagactacattagaaactgcatcattggtaaaggacgcagctacaagggaacagtatctatcactaagagtggcatcaaatgtcagccctggagttccatgataccacacgaacacagctttttgccttcgagctatcggggtaaagacctacaggaaaactactgtcgaaatcctcgaggggaagaagggggaccctggtgtttcacaagcaatccagaggtacgctacgaagtctgtgacattcctcagtgttcagaaggtaaataaacctgaatgccatgtgggccattctattccccctatgtgtagaactgtaactcacattaaaggttaacagcaacgaatcaatcataacaaatatgttgttcgtgcaaatgcaactacaaataattatttaaacatttttatacaatgtttttaaaactgttggattatcaccagattaatgcaaaataacagagcgagttatcagtttgaatttcaacactgcctgagacatccctctggggaaagtgaaagagagggtttacttacctactgtcttgagctcacatacctcaaaatctactactgtgtggcacctgaaaggagttgaatgaagcttagcctttcattagcaatgttaattctattcaaccagcacctgcttccacagaaattctgtccaaactatcatgaagtggtgtgacaagggtatatggacccagaagataatacaatataagaagggatcactggaagcttgaccccatgcacattttggtgaaaatgtgcctagaatcaaatgtgacacgtaggctggaactgagtaccattcagaataggatctgaagagatcaaagcaatggagaccaccaaactgtcttgaaggcatgtctatggaccttaagtccatgtctatgttttcagctcttctcacagcataaaagggcattgtccttacttttgcagtggaaaactgaatggctgacaagatggaagagtaaccatttcagcattgtatgtggtttcatttttcttagttatctggctactgaatagccggatttttcagttctgtcagaaactctaaatttccaaaaatctaagtgaaacatggatgaaactctgttagaaaattgttaggattttggagtatttggggagggggactactggaatgctgtccaagttttatactaagatatcttacctgtttgttattaaccaaatatttttaaaaatatttcctccataaatattcatttaatattaggttgatatttatcacataaaaagtaaaggctactgttagctaattgtcacagagaaggatttgttttctgttgttagtgaatttgaaatccttgactttatgtgctacagccagttccatctctgtttgtaaattcttactttccattccatatcatattctgttccctataacctcttcattgttttcttttcttttaaaaataataaacttttctatgatcacgttttgaaca

SEQ ID NO: 448 - DNA, 1184 bp, Homo sapiens
  source 1..1184: mol_type = genomic DNA
caggattctttcacccaggcatctcctccagagggatccgccagcccgtccagcagcaccatgtgggtgaccaaactcctgccagccctgctgctgcagcatgtcctcctgcatctcctcctgctccccatcgccatcccctatgcagagggacaaaggaaaagaagaaatacaattcatgaattcaaaaaatcagcaaagactaccctaatcaaaatagatccagcactgaagataaaaaccaaaaaagtgaatactgcagaccaatgtgctaatagatgtactaggaataaaggacttccattcacttgcaaggcttttgtttttgataaagcaagaaaacaatgcctctggttccccttcaatagcatgtcaagtggagtgaaaaaagaatttggccatgaatttgacctctatgaaaacaaagactacattagaaactgcatcattggtaaaggacgcagctacaagggaacagtatctatcactaagagtggcatcaaatgtcagccctggagttccatgataccacacgaacacagctttttgccttcgagctatcggggtaaagacctacaggaaaactactgtcgaaatcctcgaggggaagaagggggaccctggtgtttcacaagcaatccagaggtacgctacgaagtctgtgacattcctcagtgttcagaagttgaatgcatgacctgcaatggggagagttatcgaggtctcatggatcatacagaatcaggcaagatttgtcagcgctgggatcatcagacaccacaccggcacaaattcttgcctgaaagatatcccgacaagggctttgatgataattattgccgcaatcccgatggccagccgaggccatggtgctatactcttgaccctcacacccgctgggagtactgtgcaattaaaacatgcgagacataacatgggctctcaactgatggtgaacttcttctggtgagtgacagaggctgcagtgaagaataatgagtctaatagaagtttatcacagatgtctctaatctttatagctgatccctacctctctcgctgtctttgtacccagcctgcattctgtttcgatctgtcttttagcagtccatacaatcatttttctacatgctggcccttacctagcttttctgaatttacaataaaaactattttttaacgtg

SEQ ID NO: 449 - DNA, 1111 bp, Homo sapiens
  source 1..1111: mol_type = genomic DNA
ggcatctcctccagagggatccgccagcccgtccagcagcaccatgtgggtgaccaaactcctgccagccctgctgctgcagcatgtcctcctgcatctcctcctgctccccatcgccatcccctatgcagagggacaaaggaaaagaagaaatacaattcatgaattcaaaaaatcagcaaagactaccctaatcaaaatagatccagcactgaagataaaaaccaaaaaagtgaatactgcagaccaatgtgctaatagatgtactaggaataaaggacttccattcacttgcaaggcttttgtttttgataaagcaagaaaacaatgcctctggttccccttcaatagcatgtcaagtggagtgaaaaaagaatttggccatgaatttgacctctatgaaaacaaagactacattagaaactgcatcattggtaaaggacgcagctacaagggaacagtatctatcactaagagtggcatcaaatgtcagccctggagttccatgataccacacgaacacagctatcggggtaaagacctacaggaaaactactgtcgaaatcctcgaggggaagaagggggaccctggtgtttcacaagcaatccagaggtacgctacgaagtctgtgacattcctcagtgttcagaagttgaatgcatgacctgcaatggggagagttatcgaggtctcatggatcatacagaatcaggcaagatttgtcagcgctgggatcatcagacaccacaccggcacaaattcttgcctgaaagatatcccgacaagggctttgatgataattattgccgcaatcccgatggccagccgaggccatggtgctatactcttgaccctcacacccgctgggagtactgtgcaattaaaacatgcgagacataacatgggctctcaactgatggtgaacttcttctggtgagtgacagaggctgcagtgaagaataatgagtctaatagaagtttatcacagatgtctctaatctttatagctgatccctacctctctcgctgtctttgtacccagcctgcattctgtttcgatctgtcttttagcagtccatacaatcatttttctacatgctggcccttacc

SEQ ID NO: 450 - DNA, 2249 bp, Homo sapiens
  source 1..2249: mol_type = genomic DNA
taggcactgactccgaacaggattctttcacccaggcatctcctccagagggatccgccagcccgtccagcagcaccatgtgggtgaccaaactcctgccagccctgctgctgcagcatgtcctcctgcatctcctcctgctccccatcgccatcccctatgcagagggacaaaggaaaagaagaaatacaattcatgaattcaaaaaatcagcaaagactaccctaatcaaaatagatccagcactgaagataaaaaccaaaaaagtgaatactgcagaccaatgtgctaatagatgtactaggaataaaggacttccattcacttgcaaggcttttgtttttgataaagcaagaaaacaatgcctctggttccccttcaatagcatgtcaagtggagtgaaaaaagaatttggccatgaatttgacctctatgaaaacaaagactacattagaaactgcatcattggtaaaggacgcagctacaagggaacagtatctatcactaagagtggcatcaaatgtcagccctggagttccatgataccacacgaacacagctatcggggtaaagacctacaggaaaactactgtcgaaatcctcgaggggaagaagggggaccctggtgtttcacaagcaatccagaggtacgctacgaagtctgtgacattcctcagtgttcagaagttgaatgcatgacctgcaatggggagagttatcgaggtctcatggatcatacagaatcaggcaagatttgtcagcgctgggatcatcagacaccacaccggcacaaattcttgcctgaaagatatcccgacaagggctttgatgataattattgccgcaatcccgatggccagccgaggccatggtgctatactcttgaccctcacacccgctgggagtactgtgcaattaaaacatgcgctgacaatactatgaatgacactgatgttcctttggaaacaactgaatgcatccaaggtcaaggagaaggctacaggggcactgtcaataccatttggaatggaattccatgtcagcgttgggattctcagtatcctcacgagcatgacatgactcctgaaaatttcaagtgcaaggacctacgagaaaattactgccgaaatccagatgggtctgaatcaccctggtgttttaccactgatccaaacatccgagttggctactgctcccaaattccaaactgtgatatgtcacatggacaagattgttatcgtgggaatggcaaaaattatatgggcaacttatcccaaacaagatctggactaacatgttcaatgtgggacaagaacatggaagacttacatcgtcatatcttctgggaaccagatgcaagtaagctgaatgagaattactgccgaaatccagatgatgatgctcatggaccctggtgctacacgggaaatccactcattccttgggattattgccctatttctcgttgtgaaggtgataccacacctacaatagtcaatttagaccatcccgtaatatcttgtgccaaaacgaaacaattgcgagttgtaaatgggattccaacacgaacaaacataggatggatggttagtttgagatacagaaataaacatatctgcggaggatcattgataaaggagagttgggttcttactgcacgacagtgtttcccttctcgagacttgaaagattatgaagcttggcttggaattcatgatgtccacggaagaggagatgagaaatgcaaacaggttctcaatgtttcccagctggtatatggccctgaaggatcagatctggttttaatgaagcttgccaggcctgctgtcctggatgattttgttagtacgattgatttacctaattatggatgcacaattcctgaaaagaccagttgcagtgtttatggctggggctacactggattgatcaactatgatggcctattacgagtggcacatctctatataatgggaaatgagaaatgcagccagcatcatcgagggaaggtgactctgaatgagtctgaaatatgtgctggggctgaaaagattggatcaggaccatgtgagggggattatggtggcccacttgtttgtgagcaacataaaatgagaatggttcttggtgtcattgttcctggtcgtggatgtgccattccaaatcgtcctggtatttttgtccgagtagcatattatgcaaaatggatacacaaaattattttaacatataaggtaccacagtcatag

SEQ ID NO: 451 - DNA, 424 bp, Homo sapiens
  source 1..424: mol_type = genomic DNA
gactgtcactcggtcccagacaccagagcaagctcaagacccagcagtgggacagccagacagacggcacgatggcactgagctcccagatctgggccgcttgcctcctgctcctcctcctcctcgccagcctgaccagtggctctgttttcccacaacagacgggacaacttgcagagctgcaaccccaggacagagctggagccagggccagctggatgcccatgttccagaggcgaaggaggcgagacacccacttccccatctgcattttctgctgcggctgctgtcatcgatcaaagtgtgggatgtgctgcaagacgtagaacctacctgccctgcccccgtcccctcccttccttatttattcctgctgccccagaacataggtcttggaataaaatggctggttcttttgttttcc

SEQ ID NO: 452 - DNA, 652 bp, Homo sapiens
  source 1..652: mol_type = genomic DNA
gagcctcccacgtggtgtggatgaggaggcagatggcagggcctgtgcatttctgtgcttgagtgggccttgaaagtggttcagcaaccaggaagaagtgttcattcctcgacaacaacatccccgggctctggtgacttggctgacactggatggccctggaatgaaaaaggcaaagaggcaaaatgtgcaagggcccatctggaaccaaggccccataaaagcgactgtcactcggtcccagacaccagagcaagctcaagacccagcagtgggacagccagacagacggcacgatggcactgagctcccagatctgggccgcttgcctcctgctcctcctcctcctcgccagcctgaccagtggctctgttttcccacaacagacgggacaacttgcagagctgcaaccccaggacagagctggagccagggccagctggatgcccatgttccagaggcgaaggaggcgagacacccacttccccatctgcattttctgctgcggctgctgtcatcgatcaaagtgtgggatgtgctgcaagacgtagaacctacctgccctgcccccgtcccctcccttccttatttattcctgctgccccagaacataggtcttggaataaaatggctggttcttttgttttccaaa

SEQ ID NO: 453 - DNA, 1407 bp, Homo sapiens
  source 1..1407: mol_type = genomic DNA
ctgcttctcctcagcttcaggcggctgcgacgagccctcaggcgaacctctcggctttcccgcgcggcgccgcctcttgctgcgcctccgcctcctcctctgctccgccaccggcttcctcctcctgagcagtcagcccgcgcgccggccggctccgttatggcgacccgcagccctggcgtcgtgattagtgatgatgaaccaggttatgaccttgatttattttgcatacctaatcattatgctgaggatttggaaagggtgtttattcctcatggactaattatggacaggactgaacgtcttgctcgagatgtgatgaaggagatgggaggccatcacattgtagccctctgtgtgctcaaggggggctataaattctttgctgacctgctggattacatcaaagcactgaatagaaatagtgatagatccattcctatgactgtagattttatcagactgaagagctattgtaatgaccagtcaacaggggacataaaagtaattggtggagatgatctctcaactttaactggaaagaatgtcttgattgtggaagatataattgacactggcaaaacaatgcagactttgctttccttggtcaggcagtataatccaaagatggtcaaggtcgcaagcttgctggtgaaaaggaccccacgaagtgttggatataagccagactttgttggatttgaaattccagacaagtttgttgtaggatatgcccttgactataatgaatacttcagggatttgaatcatgtttgtgtcattagtgaaactggaaaagcaaaatacaaagcctaagatgagagttcaagttgagtttggaaacatctggagtcctattgacatcgccagtaaaattatcaatgttctagttctgtggccatctgcttagtagagctttttgcatgtatcttctaagaattttatctgttttgtactttagaaatgtcagttgctgcattcctaaactgtttatttgcactatgagcctatagactatcagttccctttgggcggattgttgtttaacttgtaaatgaaaaaattctcttaaaccacagcactattgagtgaaacattgaactcatatctgtaagaaataaagagaagatatattagttttttaattggtattttaatttttatatatgcaggaaagaatagaagtgattgaatattgttaattataccaccgtgtgttagaaaagtaagaagcagtcaattttcacatcaaagacagcatctaagaagttttgttctgtcctggaattattttagtagtgtttcagtaatgttgactgtattttccaacttgttcaaattattaccagtgaatctttgtcagcagttcccttttaaatgcaaatcaataaattcccaaaaatttaa

SEQ ID NO: 454 - DNA, 804 bp, Homo sapiens
  source 1..804: mol_type = genomic DNA
agcttcaggcggctgcgacgagccctcaggcgaacctctcggctttcccgcgcggcgccgcctcttgctgcgcctccgcctcctcctctgctccgccaccggcttcctcctcctgagcagtcagcccgcgcgccggccggctccgttatggcgacccgcagccctggcgtcgtgattagtgatgatgaaccaggttatgaccttgatttattttgcatacctaatcattatgctgaggatttggaaagggtgtttattcctcatggactaattatggacaggactgaacgtcttgctcgagatgtgatgaaggagatgggaggccatcacattgtagccctctgtgtgctcaaggggggctataaattctttgctgacctgctggattacatcaaagcactgaatagaaatagtgatagatccattcctatgactgtagattttatcagactgaagagctattgtaatgaccagtcaacaggggacataaaagtaattggtggagatgatctctcaactttaactggaaagtctaggttgttggcagaagatataattgacactggcaaaacaatgcagactttgctttccttggtcaggcagtataatccaaagatggtcaaggtcgcaagcttgctggtgaaaaggaccccacgaagtgttggatataagccagactttgttggatttgaaattccagacaagtttgttgtaggatatgcccttgactataatgaatacttcagggatttgaatcatgtttgtgtcattagtgaaactggaaaagcaaaatacaaagcctaa

SEQ ID NO: 455 - DNA, 7619 bp, Homo sapiens
  source 1..7619: mol_type = genomic DNA
gccccggaggggagggacgcagggaagagtcgcacggacgcactcgcgctgcggccagcgcccgggcctgcgggcccgggcggcggctgtgttgcgcagtcttcatgggttcccgacgaggaggtctctgtggctgcggcggcggctgctaactgcgccacctgctgcagcctgtccccgccgctctgaagcggccgcgtcgaagccgaaatgccgccaccccggaccggccgaggccttctctggctgggtctggttctgagctccgtctgcgtcgccctcggatccgaaacgcaggccaactcgaccacagatgctctgaacgttcttctcatcatcgtggatgacctgcgcccctccctgggctgttatggggataagctggtgaggtccccaaatattgaccaactggcatcccacagcctcctcttccagaatgcctttgcgcagcaagcagtgtgcgccccgagccgcgtttctttcctcactggcaggagacctgacaccacccgcctgtacgacttcaactcctactggagggtgcacgctggaaacttctccaccatcccccagtacttcaaggagaatggctatgtgaccatgtcggtgggaaaagtctttcaccctgggatatcttctaaccataccgatgattctccgtatagctggtcttttccaccttatcatccttcctctgagaagtatgaaaacactaagacatgtcgagggccagatggagaactccatgccaacctgctttgccctgtggatgtgctggatgttcccgagggcaccttgcctgacaaacagagcactgagcaagccatacagttgttggaaaagatgaaaacgtcagccagtcctttcttcctggccgttgggtatcataagccacacatccccttcagataccccaaggaatttcagaagttgtatcccttggagaacatcaccctggcccccgatcccgaggtccctgatggcctaccccctgtggcctacaacccctggatggacatcaggcaacgggaagacgtccaagccttaaacatcagtgtgccgtatggtccaattcctgtggactttcagcggaaaatccgccagagctactttgcctctgtgtcatatttggatacacaggtcggccgcctcttgagtgctttggacgatcttcagctggccaacagcaccatcattgcatttacctcggatcatgggtgggctctaggtgaacatggagaatgggccaaatacagcaattttgatgttgctacccatgttcccctgatattctatgttcctggaaggacggcttcacttccggaggcaggcgagaagcttttcccttacctcgacccttttgattccgcctcacagttgatggagccaggcaggcaatccatggaccttgtggaacttgtgtctctttttcccacgctggctggacttgcaggactgcaggttccacctcgctgccccgttccttcatttcacgttgagctgtgcagagaaggcaagaaccttctgaagcattttcgattccgtgacttggaagaggatccgtacctccctggtaatccccgtgaactgattgcctatagccagtatccccggccttcagacatccctcagtggaattctgacaagccgagtttaaaagatataaagatcatgggctattccatacgcaccatagactataggtatactgtgtgggttggcttcaatcctgatgaatttctagctaacttttctgacatccatgcaggggaactgtattttgtggattctgacccattgcaggatcacaatatgtataatgattcccaaggtggagatcttttccagttgttgatgccttgagttttgccaaccatggatggcaaatgtgatgtgctcccttccagctggtgagaggaggagttagagctggtcgttttgtgattacccataatattggaagcagcctgagggctagttaatccaaacatgcatcaacaatttggcctgagaatatgtaacagccaaaccttttcgtttagtctttattaaaatttataattggtaattggaccagttttttttttaatttccctctttttaaaacagttacggcttatttactgaataaatacaaagcaaacaaactcaagttatgtcatacctttggatacgaagaccatacataataaccaaacataacattatacacaaagaatactttcattatttgtggaatttagtgcatttcaaaaagtaatcatatatcaaactaggcaccacactaagttcctgattattttgtttataatttaataatatatcttatgagccctatatattcaaaatattatgttaacatgtaatccatgtttctttttcaaatctaaagttaaaaaaaaatagcagaagccagtgtcttaaagtctatcttttgtttctaagaccatgggatttcataatctcaagataaaatatgtatgaagtaattaatgtagaatttttacaccaaataataaataatgcttaataaactagagatatgagatgtgtaggaaatttggttaaacttttttcagatactttctggcccaaataataatttgttagcaaataatatgacccttgaactcaatggccatctattaaaagactgttgttcacactggaaaacatttaaagatgtgactatatccatgggtggattgaatcactcaaaatatattagtatccttctttagggatggttggttacagacatgtatttattcaggaggcagaaaatattccattttaattgcttattaaagaaaacattaaattctaaattattttgaggactgtgaagacttttcattagtgtaatattaggtcattgtcaatctcccagaatgtagttctatattctctaaatatgaaagtatccagaaaggccagtggtagtaaaaagcttagtgtatataatctcaaaagggatggaatatttacagctcatatttataacatgttgaatcttctcagttatcagtagtcatcagaagtgtcaatagctttctaaataaatattaaatatctactgtcctgtagtgaaggagtaatttttagtaattttctctttacaaagtctccagtgtttccaggtaaatatttgtgaaacaaaatacagcaaactacattgttacttcagtgtattgttgccaaaaatgacaagatattatattaaaatcagtaaattttagacagattttaaaaattaattagcctacaatagaggttatatggtaacacggtgatcttctaagcagttaagtgactgactgttctggcaacaacgacttctccgtgactgaagggccctgttcatttcctgatcctgaagctcgtctctcttttgagcctccgcttgctttggtcgatggtttccctcagctttttctttgctgttcttcatcctcgttgttgctgtcatcatgttcactgtggcttttacaatacagcctgtaaattccttatgacatagttcagtgcatttggctttatcgcctgctccacagttctttacctttacttggcttagagaaactgtatctttgttgcttcatataacctttccccaaccccactaagctggacataacttattagtggtcctcccgtcactttatttgtagaaatctctctttcacatgagcaggggttctttcatgtggtttagctgacagcagaactagtgattctagacattttgcatggccctcattcagtggctcacaaacatgagggagcatcagaactacttgaggggcttgttaaaacccagtgcgttagaagtcggatgcggtggctcacacctgtaatcccagcactttgggaggcccaggcaggcggatcacttgaggttaggagttcaagaccagcctggccaacatggtgaaaccccgtctctactaaaaatacaaaagttagccgggtgtggtggtgcatgcctgtaatcccagcttcttgggaggccaaggcacaagaatcgcttgaaccaggagacggaggtttcagtgaatgaagatcgtgccattgtattccagcctcggcaacacagcaggactgtgattttctttggagactcctagattttctgtggttttgaactgaatttgttggatgttggcaagtgcctcttatgagctgtttctttatcctgcatttgccccacaaagacttatctggaggtgagcaaagtatgtttggtagtgaggtcacaaaggcaatcagccccttcctccccactcccattgccatcttctcagtccttctccctttctttccaagtagtttacccacccctcctctttcctcccctgtccctaaaataatccacgtgtcttcctaaaatctctctttgatcctgtcctttgataacaccgtcagtgcctactactgggtctagacagacctctgttgagcagtcagagtcttccctgactccacaatgcccctttccttggctgaccagtatgactactggtccccacctttcccttgcctatccctacctccctcctactaggttgtcccatccctctcttcacccattcattcatgaccatttttcactaccaagctccccccctcccgaaggaggctgaggtttttgtgactctctagactctattgtgggatggaatgaacattgctaaagaatcttgtgttcgctttactttaaaaaggtatttttttcctaattataaaactgatgtgtcagttacggaaaaattagaaatgcagcacaaatacatgaatattttaccacgaaattgccatataatatcttgtcttttttgggggtgtgaattttttgcattgttctgatcatattctttatcatgtaatttatgttcttttttactaagtattatgtgtggttattatagattttcacaaagatatattgctggtaatatattttattgtgtagtcttataatttacttaaccttctttcaattgttagaaatttaggctatttccagattttcagtattgtaaataatgctgtgatgaccaattttgtgaataaaatgtttttatgtatttcagattattcccttaggatagtctctcagtgccaagttgtcaaaaacatctctattttgcttatcttcctgctctcttgctgccttagggggtagtaaactgaaacataaagtaaacatgcatacaaataaaaaacataaaacaaaaataagcaacctgatggtaataggtgaaagtggtaacctgttttaactttgaattcttgccgggcgcggtggctcacgcctgtaatcccagcactttgggaggctgaggcgggtggatcacgaggtcaggagttcaaaaccagcctggccaagatggtgaaatcccgtctctactaaaaatacaaaaattagccgggcgtggtggcgggcgcctgtaatcccagctacttgggaggctgaggcagagaattgcttgaacccaggaggcggaggttgcagtgagccaagatcgcgccactgcactccagcctgggtgacagagcgagactccgtctcaaataaaaaacaacaaaaaacaaaaaaaacttaaaattctttgcttgttagtgaccttgatcatggttctctttgtacgatagttgggcatctgtatttccacttgtgtgaatttgcctttaaattttggttatgggtttcaccttttaaaataatcaaacatatttatcttttcctgtgtgataggtttttttctgtatcttttcctgttaaacacacagacccctccccaatctggacattgaataaatattcattttcctttgcattgtttggggtttggttttatgcttactgtgtctctccaccccattatcagagtaatatatgctcattgcataaaatctggaacatgtgaaaactggagatgaaaagaagcccagcatttgagacatacccactgctgacatttgtatatttcctttcattcttttacctgcctaaagacatatatgcagatatggacatatttagctttacatacatgcagactaccacatataatctatatcttgtttttttgatctaacacaatgttagcttggttttttatgtcattgacagttcttgattaacagctgtaatggctgcacagccctgcttcattaatttttttttttggactgaaatgtatgtaccacgttccgcttatccattcatccaccagtgaccacttgggtcatttctaccttttggccattgcaataatgttgctgtcaacaaggatgtacaaatatctgttcgagtccctgctcttaattgttttgggtatacacccaacctacattaatctttaatcacttaagatgttggggtttgtgctgggaggtaaccaagtgactctggagcagcctcaccctagctacagagggaaactgactcttccctctctgcccaatcttttgccgcctgtcaggttcccaagctgtccataccttactgtgtgaagcgctttgggtataaactcccaaatagaggctcagccccttttcctttcccaagtccatcctgcaggttatagctcttcagaggaatctcttgaattctggcctgggatctgggattaaagtagaacccagggtgtcccttggggccttaggcatagcccgttgtggtggaacctgccatcagccccactgcactcagtggtcccctggtacttcaggacagtttctctcttctgcacatgagaacttcaagcagagaggactgtcagttgttgccttcacatcaccaatcgtttggccataatggccaagagccctcactgctcttgggtcttgcctttccacatgttactgaaagctcccgttggtgtccctgtccactaactcacctgatgggacagatgccactttcctctgagtgtctgataaaacacagtctgttgtggggagcccacgctcaagggttttctttgggatcagagtttcccggctattactccatgccctgcctgacatcactgtcatgtatggtgctaatcaccaaaggatgcccttgtttgattctggattctaggtgatagtccttatcctctgatgggggaagagtttgggtgggagagaacaaaccgacaagttggttccagatgaggtggctgggagccaaccctcaggtacttggctctgagtaatgtgacggcccaggcaagagggctcccactgccaatgaggaacaaaagctcaaggtctagtagtgtattcagcacatgctaggaaacaagagttgggacgtggacaaggagaggagcaaaggccaggggttaactgcttttggtttttcctctataaaagtcagggactatgatttatatgggtgagaaggtttggagtaggactgaagctgccatttacaaaccccttgccctaatttattgtagttttgggtgtgtttctgaaagaaccttttgcaggtgatttttattcagtactcattaacttacagcttttatgaattcacatcttctacactattgaaaaacataagtttgtattgtgttaagtgcagcatgagttattatatgaataaatcacattaaatttgc

SEQ ID NO: 456 - DNA, 1399 bp, Homo sapiens
  source 1..1399: mol_type = genomic DNA
gccccggaggggagggacgcagggaagagtcgcacggacgcactcgcgctgcggccagcgcccgggcctgcgggcccgggcggcggctgtgttgcgcagtcttcatgggttcccgacgaggaggtctctgtggctgcggcggcggctgctaactgcgccacctgctgcagcctgtccccgccgctctgaagcggccgcgtcgaagccgaaatgccgccaccccggaccggccgaggccttctctggctgggtctggttctgagctccgtctgcgtcgccctcggatccgaaacgcaggccaactcgaccacagatgctctgaacgttcttctcatcatcgtggatgacctgcgcccctccctgggctgttatggggataagctggtgaggtccccaaatattgaccaactggcatcccacagcctcctcttccagaatgcctttgcgcagcaagcagtgtgcgccccgagccgcgtttctttcctcactggcaggagacctgacaccacccgcctgtacgacttcaactcctactggagggtgcacgctggaaacttctccaccatcccccagtacttcaaggagaatggctatgtgaccatgtcggtgggaaaagtctttcaccctgggatatcttctaaccataccgatgattctccgtatagctggtcttttccaccttatcatccttcctctgagaagtatgaaaacactaagacatgtcgagggccagatggagaactccatgccaacctgctttgccctgtggatgtgctggatgttcccgagggcaccttgcctgacaaacagagcactgagcaagccatacagttgttggaaaagatgaaaacgtcagccagtcctttcttcctggccgttgggtatcataagccacacatccccttcagataccccaaggaatttcagaagttgtatcccttggagaacatcaccctggcccccgatcccgaggtccctgatggcctaccccctgtggcctacaacccctggatggacatcaggcaacgggaagacgtccaagccttaaacatcagtgtgccgtatggtccaattcctgtggactttcagcggaaaatccgccagagctactttgcctctgtgtcatatttggatacacaggtcggccgcctcttgagtgctttggacgatcttcagctggccaacagcaccatcattgcatttacctcggatcatggtttcctcatgaggacaaatacctgattttgaataaagcagcattcagttgaaataaccctttctgtggtaattccaagtgaatatttttcttctaggtgatgagtttctacttcctctggtttttacaacaggaaatgaaatggtatctaaaataaacaagctgtggtatgatgattattca

SEQ ID NO: 457 - DNA, 1156 bp, Homo sapiens
  source 1..1156: mol_type = genomic DNA
agaacccgccccggaggggagggacgcagggaagagtcgcacggacgcactcgcgctgcggccagcgcccgggcctgcgggcccgggcggcggctgtgttgcgcagtcttcatgggttcccgacgaggaggtctctgtggctgcggcggcggctgctaactgcgccacctgctgcagcctgtccccgccgctctgaagcggccgcgtcgaagccgaaatgccgccaccccggaccggccgaggccttctctggctgggtctggttctgagctccgtctgcgtcgccctcggatccgaaacgcaggccaactcgaccacagatgctctgaacgttcttctcatcatcgtggatgacctgcgcccctccctgggctgttatggggataagctggtgaggtccccaaatattgaccaactggcatcccacagcctcctcttccagaatgcctttgcgcagcaagcagtgtgcgccccgagccgcgtttctttcctcactggcaggagacctgacaccacccgcctgtacgacttcaactcctactggagggtgcacgctggaaacttctccaccatcccccagtacttcaaggagaatggctatgtgaccatgtcggtgggaaaagtctttcaccctgggatatcttctaaccataccgatgattctccgtatagctggtcttttccaccttatcatccttcctctgagaagtatgaaaacactaagacatgtcgagggccagatggagaactccatgccaacctgctttgccctgtggatgtgctggatgttcccgagggcaccttgcctgacaaacagagcactgagcaagccatacagttgttggaaaagatgaaaacgtcagccagtcctttcttcctggccgttgggtatcataagccacacatccccttcagataccccaaggaatttcagaagttgtatcccttggagaacatcaccctggcccccgatcccgaggtccctgatggcctaccccctgtggcctacaacccctggatggacatcaggcaacgggaagacgtccaagccttaaacatcagtgtgccgtatggtccaattcctgtggactttcaggaggaccaaagttccacaggtttcagactgaagacttcatctaccagaaagtataagtag

SEQ ID NO: 458 - DNA, 1213 bp, Homo sapiens
  source 1..1213: mol_type = genomic DNA
ctgcgggcccgggcggcggctgtgttgcgcagtcttcatgggttcccgacgaggaggtctctgtggctgcggcggcggctgctaactgcgccacctgctgcagcctgtccccgccgctctgaagcggccgcgtcgaagccgaaatgccgccaccccggaccggccgaggccttctctggctgggtctggttctgagctccgtctgcgtcgccctcggatccgaaacgcaggccaactcgaccacagatgctctgaacgttcttctcatcatcgtggatgacctgcgcccctccctgggctgttatggggataagctggtgaggtccccaaatattgaccaactggcatcccacagcctcctcttccagaatgcctttgcgcagcaagcagtgtgcgccccgagccgcgtttctttcctcactggcaggagacctgacaccacccgcctgtacgacttcaactcctactggagggtgcacgctggaaacttctccaccatcccccagtacttcaaggagaatggctatgtgaccatgtcggtgggaaaagtctttcaccctggtactgctccatgtccagagtctgggttctcttggtttgtggtgtctgaatccagcattcccatcctggggatggggctgtctttgcagagccctcttctggctgggcgagtccctcgctagtcagtgcttcctttctaaaaaactgacttgtcaacccagccacgttttcacccaaagtgaaaaagggtagaaagagctttgcttcctttcagaaaccactgagggtgtgctgttgggtctttcagctcctcgggtggtagggaggacacaggctggggaggtggcagtgttgggtggagtccagctcagggccccaccctctcccctgcagggtacctgtcagtaaacctaggggtggggtgaggacacctgagggcctcccgtgtggccagcattgctgttgctgacttattgcccaatgagggggctgtgcttaggtaggggctgctatccactctggaaattaagtcagaaagatgagtgtaatctggtacccaggatctatagggtcccagagacggacattccttacctcaaatgctgcctgataaactggctctctttaatgccaatatggggatagtgaaaagcaaacaaactttaaaactttttatttatagaagtaatgcatgagtatttgagaaaaaaaa

SEQ ID NO: 459 - DNA, 572 bp, Homo sapiens
  source 1..572: mol_type = genomic DNA
agcattttatcatgtttgttggcgcttgtatgtcgtcttttgagaagcgtctgttcatgtcctttgcctggtttttaatggggttgtttttagcttgttgattttagttccttgtagattctggatattagacatttttggatgcatactttccttgacctcatgaggacacccttcccaggacaggggggacatctgctgcttcccaaatgccacatttcttcaaataaaaagcagaagacagcatgcagtacataaggaactcatgtcttgcctgtccccgccgctctgaagcggccgcgtcgaagccgaaatgccgccaccccggaccggccgaggccttctctggctgggtctggttctgagctccgtctgcgtcgccctcggatccgaaacgcaggccaactcgaccacagatgctctgaacgttcttctcatcatcgtggatgacctgcgcccctccctgggctgttatggggataagctggtgaggtccccaaatattgaccaactggcatcccacagcctcctcttccagaatgcctttgcgcagcaagcagtgtgcgccccga

SEQ ID NO: 460 - DNA, 1032 bp, Homo sapiens
  source 1..1032: mol_type = genomic DNA
ctggccaacagcaccatcattgcatttacctcggatcatggcaggcaatccatggaccttgtggaacttgtgtctctttttcccacgctggctggacttgcaggactgcaggttccacctcgctgccccgttccttcatttcacgttgagctgtgcagagaaggcaagaaccttctgaagcattttcgattccgtgacttggaagaggatccgtacctccctggtaatccccgtgaactgattgcctatagccagtatccccggccttcagacatccctcagtggaattctgacaagccgagtttaaaagatataaagatcatgggctattccatacgcaccatagactataggtatactgtgtgggttggcttcaatcctgatgaatttctagctaacttttctgacatccatgcaggggaactgtattttgtggattctgacccattgcaggatcacaatatgtataatgattcccaaggtggagatcttttccagttgttgatgccttgagttttgccaaccatggatggcaaatgtgatgtgctcccttccagctggtgagaggaggagttagagctggtcgttttgtgattacccataatattggaagcagcctgagggctagttaatccaaacatgcatcaacaatttggcctgagaatatgtaacagccaaaccttttcgtttagtctttattaaaatttataattggtaattggaccagttttttttttaatttccctctttttaaaacagttacggcttatttactgaataaatacaaagcaaacaaactcaagttatgtcatacctttggatacgaagaccatacataataaccaaacataacattatacacaaagaatactttcattatttgtggaatttagtgcatttcaaaaagtaatcatatatcaaactaggcaccacactaagttcctgattattttgtttataatttaataatatatcttatgagccctatatattcaaaatattatgttaacatgtaatccatgtttctttttc

SEQ ID NO: 461 - DNA, 2635 bp, Homo sapiens
  source 1..2635: mol_type = genomic DNA
ttggagttcagccaccttagcaagtcctgggtttgttcttcagactttgctgctcgcccattgcctggatcgggggctactttgtaaaccaccaggaagactccagtgtttctggttaatttttagatgtttgttaattgctcttggtctctcattaatcccctgtgggtcatccaggaaacatactcaccactgtctgttctctgagttttcatttccaggcatccgccctgcctggatctcctcacctgccaggaacttcctctccacaagccggccatcccagcaaaagttctaacaccaaaggtctggcaactagcctgccatcttgtgcctggagccgcctgcgtgccacctactcccgaagatgggaaccttgttgccagttgggcagatgcggggcaatcctgtaccaagaccccattttaccacctgctttctcagaccactctggaacccactgtctcagattgtgtcttccaggaagcagaccatgagagggagttggcagggccaaagatttactggggctaactaacactcaggaaagggataggaaggaaacagggctggagagcaggttgagcccgacctgacagtctcgagcagcccaacagggaggtgtggagcaagggttgcccactagaggggcctgcattgggtacgggtgatggggtccacatggtacctggcatatagcaggctgtgcaatccatattaactgactggataaattaatgctcagaaaaggtgccctggagaatgggtgcgtgctgaacacaatagggaagggcccagcatctgccttggcataggcagaactgtgctgtgccctgcaacaggccacctgagagctgctttgatcttgtgtgtacattagacgactgccaggggcatgaaggggatgtgcttccagggcatttgctggcagggcgtcttgtgatttcttggtattggtgtgagcatagcctggcaggagagggcagatctccgtgcaaagtatgtcagaaagcagatggaagccaggccccctcctgaaagaggctccttgaagataattctaacatctttgtcatcagtgttgacatctcttgattgtatcctgtcattccatttgagatcttcctggttctggctggcatcctctgacatcactccagcagaagaaagggaaggaacacgctgcattactgcgtgggatatcttctaaccataccgatgattctccgtatagctggtcttttccaccttatcatccttcctctgagaagtatgaaaacactaagacatgtcgagggccagatggagaactccatgccaacctgctttgccctgtggatgtgctggatgttcccgagggcaccttgcctgacaaacagagcactgagcaagccatacagttgttggaaaagatgaaaacgtcagccagtcctttcttcctggccgttgggtatcataagccacacatccccttcagataccccaaggaatttcagaagttgtatcccttggagaacatcaccctggcccccgatcccgaggtccctgatggcctaccccctgtggcctacaacccctggatggacatcaggcaacgggaagacgtccaagccttaaacatcagtgtgccgtatggtccaattcctgtggactttcagcggaaaatccgccagagctactttgcctctgtgtcatatttggatacacaggtcggccgcctcttgagtgctttggacgatcttcagctggccaacagcaccatcattgcatttacctcggatcatgggtgggctctaggtgaacatggagaatgggccaaatacagcaattttgatgttgctacccatgttcccctgatattctatgttcctggaaggacggcttcacttccggaggcaggcgagaagcttttcccttacctcgacccttttgattccgcctcacagttgatggagccaggcaggcaatccatggaccttgtggaacttgtgtctctttttcccacgctggctggacttgcaggactgcaggttccacctcgctgccccgttccttcatttcacgttgagctgtgcagagaaggcaagaaccttctgaagcattttcgattccgtgacttggaagaggatccgtacctccctggtaatccccgtgaactgattgcctatagccagtatccccggccttcagacatccctcagtggaattctgacaagccgagtttaaaagatataaagatcatgggctattccatacgcaccatagactataggtatactgtgtgggttggcttcaatcctgatgaatttctagctaacttttctgacatccatgcaggggaactgtattttgtggattctgacccattgcaggatcacaatatgtataatgattcccaaggtggagatcttttccagttgttgatgccttgagttttgccaaccatggatggcaaatgtgatgtgctcccttccagctggtgagaggaggagttagagctggtcgttttgtgattacccataatattggaagcagcctgagggctagttaatccaaacatgcatcaacaatttggcctgagaatatgtaacagccaaaccttttcgtttagtctttattaaaatttataattggt

SEQ ID NO: 462 - DNA, 2163 bp, Homo sapiens
  source 1..2163: mol_type = genomic DNA
gtcacatggggtgcgcgcccagactccgacccggaggcggaaccggcagtgcagcccgaagccccgcagtccccgagcacgcgtggccatgcgtcccctgcgcccccgcgccgcgctgctggcgctcctggcctcgctcctggccgcgcccccggtggccccggccgaggccccgcacctggtgcatgtggacgcggcccgcgcgctgtggcccctgcggcgcttctggaggagcacaggcttctgccccccgctgccacacagccaggctgaccagtacgtcctcagctgggaccagcagctcaacctcgcctatgtgggcgccgtccctcaccgcggcatcaagcaggtccggacccactggctgctggagcttgtcaccaccagggggtccactggacggggcctgagctacaacttcacccacctggacgggtacctggaccttctcagggagaaccagctcctcccagggtttgagctgatgggcagcgcctcgggccacttcactgactttgaggacaagcagcaggtgtttgagtggaaggacttggtctccagcctggccaggagatacatcggtaggtacggactggcgcatgtttccaagtggaacttcgagacgtggaatgagccagaccaccacgactttgacaacgtctccatgaccatgcaaggcttcctgaactactacgatgcctgctcggagggtctgcgcgccgccagccccgccctgcggctgggaggccccggcgactccttccacaccccaccgcgatccccgctgagctggggcctcctgcgccactgccacgacggtaccaacttcttcactggggaggcgggcgtgcggctggactacatctccctccacaggaagggtgcgcgcagctccatctccatcctggagcaggagaaggtcgtcgcgcagcagatccggcagctcttccccaagttcgcggacacccccatttacaacgacgaggcggacccgctggtgggctggtccctgccacagccgtggagggcggacgtgacctacgcggccatggtggtgaaggtcatcgcgcagcatcagaacctgctactggccaacaccacctccgccttcccctacgcgctcctgagcaacgacaatgccttcctgagctaccacccgcaccccttcgcgcagcgcacgctcaccgcgcgcttccaggtcaacaacacccgcccgccgcacgtgcagctgttgcgcaagccggtgctcacggccatggggctgctggcgctgctggatgaggagcagctctgggccgaagtgtcgcaggccgggaccgtcctggacagcaaccacacggtgggcgtcctggccagcgcccaccgcccccagggcccggccgacgcctggcgcgccgcggtgctgatctacgcgagcgacgacacccgcgcccaccccaaccgcagcgtcgcggtgaccctgcggctgcgcggggtgccccccggcccgggcctggtctacgtcacgcgctacctggacaacgggctctgcagccccgacggcgagtggcggcgcctgggccggcccgtcttccccacggcagagcagttccggcgcatgcgcgcggctgaggacccggtggccgcggcgccccgccccttacccgccggcggccgcctgaccctgcgccccgcgctgcggctgccgtcgcttttgctggtgcacgtgtgtgcgcgccccgagaagccgcccgggcaggtcacgcggctccgcgccctgcccctgacccaagggcagctggttctggtctggtcggatgaacacgtgggctccaagtgcctgtggacatacgagatccagttctctcaggacggtaaggcgtacaccccggtcagcaggaagccatcgaccttcaacctctttgtgttcagcccagacacaggtgctgtctctggctcctaccgagttcgagccctggactactgggcccgaccaggccccttctcggaccctgtgccgtacctggaggtccctgtgccaagagggcccccatccccgggcaatccatgagcctgtgctgagccccagtgggttgcacctccaccggcagtcagcgagctggggctgcactgtgcccatgctgccctcccatcaccccctttgcaatatatttttatatttta

SEQ ID NO: 463 - DNA, 2251 bp, Homo sapiens
  source 1..2251: mol_type = genomic DNA
gtcacatggggtgcgcgcccagactccgacccggaggcggaaccggcagtgcagcccgaagccccgcagtccccgagcacgcgtggccatgcgtcccctgcgcccccgcgccgcgctgctggcgctcctggcctcgctcctggccgcgcccccggtggccccggccgaggccccgcacctggtgcatgtggacgcggcccgcgcgctgtggcccctgcggcgcttctggaggagcacaggcttctgggggtccactggacggggcctgagctacaacttcacccacctggacgggtacctggaccttctcagggagaaccagctcctcccagggtttgagctgatgggcagcgcctcgggccacttcactgactttgaggacaagcagcaggtgtttgagtggaaggacttggtctccagcctggccaggagatacatcggtaggtacggactggcgcatgtttccaagtggaacttcgagacgtggaatgagccagaccaccacgactttgacaacgtctccatgaccatgcaaggcttcctgaactactacgatgcctgctcggagggtctgcgcgccgccagccccgccctgcggctgggaggccccggcgactccttccacaccccaccgcgatccccgctgagctggggcctcctgcgccactgccacgacggtaccaacttcttcactggggaggcgggcgtgcggctggactacatctccctccacaggaaggtgcgccctgcccctccgtccgccccggtgttctgcgccctcagccgctgtgccccgggccgcgctgaccctggtggtgctgaggcggccccgcccgcagggtgcgcgcagctccatctccatcctggagcaggagaaggtcgtcgcgcagcagatccggcagctcttccccaagttcgcggacacccccatttacaacgacgaggcggacccgctggtgggctggtccctgccacagccgtggagggcggacgtgacctacgcggccatggtggtgaaggtgggccggcccaacgccctgcgcgccccccggccaccttcctcccgagacgggacaggcgagcggtggccgcgccacccggtcccagctgccctggacacccgcaggtcatcgcgcagcatcagaacctgctactggccaacaccacctccgccttcccctacgcgctcctgagcaacgacaatgccttcctgagctaccacccgcaccccttcgcgcagcgcacgctcaccgcgcgcttccaggtcaacaacacccgcccgccgcacgtgcagctgttgcgcaagccggtgctcacggccatggggctgctggcgctgctggatgaggagcagctctgggccgaagtgtcgcaggccgggaccgtcctggacagcaaccacacggtgggcgtcctggccagcgcccaccgcccccagggcccggccgacgcctggcgcgccgcggtgctgatctacgcgagcgacgacacccgcgcccaccccaaccgcagcgtcgcggtgaccctgcggctgcgcggggtgccccccggcccgggcctggtctacgtcacgcgctacctggacaacgggctctgcagccccgacggcgagtggcggcgcctgggccggcccgtcttccccacggcagagcagttccggcgcatgcgcgcggctgaggacccggtggccgcggcgccccgccccttacccgccggcggccgcctgaccctgcgccccgcgctgcggctgccgtcgcttttgctggtgcacgtgtgtgcgcgccccgagaagccgcccgggcaggtcacgcggctccgcgccctgcccctgacccaagggcagctggttctggtctggtcggatgaacacgtgggctccaagtgcctgtggacatacgagatccagttctctcaggacggtaaggcgtacaccccggtcagcaggaagccatcgaccttcaacctctttgtgttcagcccagacacaggtgctgtctctggctcctaccgagttcgagccctggactactgggcccgaccaggccccttctcggaccctgtgccgtacctggaggtccctgtgccaagagggcccccatccccgggcaatccatgagcctgtgctgagccccagtgggttgcacctccaccggcagtcagcgagctggggctgcactgtgcccatgctgccctcccatcaccccctttgcaatatatttttatattttattattttcttttatatcttggt

SEQ ID NO: 464 - DNA, 828 bp, Homo sapiens
  source 1..828: mol_type = genomic DNA
agccctccaggacaggctgcatcagaagaggccatcaagcagatcactgtccttctgccatggccctgtggatgcgcctcctgcccctgctggcgctgctggccctctggggacctgacccagccgcagcctttgtgaaccaacacctgtgcggctcacacctggtggaagctctctacctagtgtgcggggaacgaggcttcttctacacacccaagacccgccgggaggcagaggacctgcaggcctcagctttgtccctctcctcctccacgtcaacctggccagagggtctggacgccacagccagggcaccccctgctttggtggtgactgctaatattggccaggccggcggatcatcgtccaggcagtttcggcagagagccttgggcaccagtgactccccggtcctctttatccactgtccaggagctgcggggactgcgcagggactagagtacaggggccgaagagtcaccaccgagcttgtgtgggaggaggtggattccagcccccagccccagggctctgaatcgctgccagctcagccccctgcccagcctgccccacagcctgagccccagcaggccagagagcccagtcctgaggtgagctgctgtggcctgtggcccaggcgaccccagcgctcccagaactgaggctggcagccagccccagcctcagccccaactgcgaggcagagagggcctgcagggagggatccagcaggtgactcttcaggctgatttgcccatcccagatagaagccgggagtgttctttcaaaggtgtctttaccttagacactcaataaaatggtaacaca

SEQ ID NO: 465 - DNA, 503 bp, Homo sapiens
  source 1..503: mol_type = genomic DNA
ccagcagccctcagccctccaggacaggctgcatcagaagaggccatcaagcaggtctgttccaagggcctttgcgtcagatcactgtccttctgccatggccctgtggatgcgcctcctgcccctgctggcgctgctggccctctggggacctgacccagccgcagcctttgtgaaccaacacctgtgcggctcacacctggtggaagctctctacctagtgtgcggggaacgaggcttcttctacacacccaagacccgccgggaggcagaggacctgcaggtggggcaggtggagctgggcgggggccctggtgcaggcagcctgcagcccttggccctggaggggtccctgcagaagcgtggcattgtggaacaatgctgtaccagcatctgctccctctaccagctggagaactactgcaactagacgcagcccgcaggcagccccacacccgccgcctcctgcaccgagagagatggaataaagcccttgaaccagc

SEQ ID NO: 466 - DNA, 597 bp, Homo sapiens
  source 1..597: mol_type = genomic DNA
aaattgcagcctcagcccccagccatctgccgacccccccaccccaggccctaatgggccaggcggcaggggttgagaggtaggggagatgggctctgagactataaagccagcgggggcccagcagccctcagccctccaggacaggctgcatcagaagaggccatcaagcagatcactgtccttctgccatggccctgtggatgcgcctcctgcccctgctggcgctgctggccctctggggacctgacccagccgcagcctttgtgaaccaacacctgtgcggctcacacctggtggaagctctctacctagtgtgcggggaacgaggcttcttctacacacccaagacccgccgggaggcagaggacctgcaggtggggcaggtggagctgggcgggggccctggtgcaggcagcctgcagcccttggccctggaggggtccctgcagaagcgtggcattgtggaacaatgctgtaccagcatctgctccctctaccagctggagaactactgcaactagacgcagcccgcaggcagccccacacccgccgcctcctgcaccgagagagatggaataaagcccttgaaccagc

SEQ ID NO: 467 - DNA, 639 bp, Homo sapiens
  source 1..639: mol_type = genomic DNA
tccaggacaggctgcatcagaagaggccatcaagcaggtctgttccaagggcctttgcgtcaggtgggctcaggattccagggtggctggaccccaggccccagctctgcagcagggaggacgtggctgggctcgtgaagcatgtgggggtgagcccaggggccccaaggcagggcacctggccttcagcctgcctcagccctgcctgtctcccagatcactgtccttctgccatggccctgtggatgcgcctcctgcccctgctggcgctgctggccctctggggacctgacccagccgcagcctttgtgaaccaacacctgtgcggctcacacctggtggaagctctctacctagtgtgcggggaacgaggcttcttctacacacccaagacccgccgggaggcagaggacctgcaggtggggcaggtggagctgggcgggggccctggtgcaggcagcctgcagcccttggccctggaggggtccctgcagaagcgtggcattgtggaacaatgctgtaccagcatctgctccctctaccagctggagaactactgcaactagacgcagcccgcaggcagccccacacccgccgcctcctgcaccgagagagatggaataaagcccttgaaccagc

SEQ ID NO: 468 - DNA, 297 bp, Homo sapiens
  source 1..297: mol_type = genomic DNA
atggccctgtggatgcgcctcctgcccctgctggcgctgctggccctctggggacctgacccagccgcagcctttgtgaaccaacacctgtgcggctcacacctggtggaagctctctacctagtgtgcggggaacgaggcttcttctacacacccaagacccgccgggaggcagaggacctgcagggcagcctgcagcccttggccctggaggggtccctgcagaagcgtggcattgtggaacaatgctgtaccagcatctgctccctctaccagctggagaactactgcaactag

SEQ ID NO: 469 - DNA, 963 bp, Homo sapiens
  source 1..963: mol_type = genomic DNA
caaggttatccatctcaagtagcctagcaatatttgcaacatcccaatggccctgtccttttctttacttatggccgtgctggtgctcagctacaaatccatctgttctctaggctgtgatctgcctcagacccacagcctgggtaataggagggccttgatactcctgggacaaatgggaagaatctctcctttctcctgcctgaaggacagacatgatttccgaatcccccaggaggagtttgatggcaaccagttccagaaggctcaagccatctctgtcctccatgagatgatccagcagaccttcaatctcttcagcacagaggactcatctgctgcttgggaacagagcctcctagaaaaattttccactgaactttaccagcaactgaatgacctggaagcatgtgtgatacaggaggttggggtggaagagactcccctgatgaatgaggactccatcctggctgtgaggaaatacttccaaagaatcactctttatctaatagagaggaaatacagcccttgtgcctgggaggttgtcagagcagaaatcatgagatccctctcgttttcaacaaacttgcaaaaaagattaaggaggaaggattgaaaactggttcaacatggcaatgatcctgattgactaatacattatctcacactttcatgagttcttccatttcaaagactcacttctataaccacgacgcgttgaatcaaaattttcaaatgttttcagcagtgtaaagaagtgtcgtgtatacctgtgcaggcactagtcctttacagatgaccattctgatgtctctgttcatcttttgtttaaatatttatttaattatttttaaaatttatgtaatatcatgagtcgctttacattgtggttaatgtaacaatatatgttcttcatatttagccaatatattaatttcctttttcattaaatttttactatac

SEQ ID NO: 470 - DNA, 705 bp, Homo sapiens
  source 1..705: mol_type = genomic DNA
agagaacctagagcccaaggttcagagtcacccatctcagcaagcccagaagcatctgcaatatctatgatggcctcgccctttgctttactgatggccctggtggtgctcagctgcaagtcaagctgctctctgggctgtgatctccctgagacccacagcctggataacaggaggaccttgatgctcctggcacaaatgagcagaatctctccttcctcctgtctgatggacagacatgactttggatttccccaggaggagtttgatggcaaccagttccagaaggctccagccatctctgtcctccatgagctgatccagcagatcttcaacctctttaccacaaaagattcatctgctgcttgggatgaggacctcctagacaaattctgcaccgaactctaccagcagctgaatgacttggaagcctgtgtgatgcaggaggagagggtgggagaaactcccctgatgaatgcggactccatcttggctgtgaagaaatacttccgaagaatcactctctatctgacagagaagaaatacagcccttgtgcctgggaggttgtcagagcagaaatcatgagatccctctctttatcaacaaacttgcaagaaagattaaggaggaaggaataacacctggtccaacatgaaacaattcttattgactcatataccaggtcacgctttcatgaattctgc

SEQ ID NO: 471 - DNA, 778 bp, Homo sapiens
  source 1..778: mol_type = genomic DNA
gttacccctcatcaaccagcccagcagcatcttcgggattcccaatggcattgccctttgctttaatgatggccctggtggtgctcagctgcaagtcaagctgctctctgggctgtaatctgtctcaaacccacagcctgaataacaggaggactttgatgctcatggcacaaatgaggagaatctctcctttctcctgcctgaaggacagacatgactttgaatttccccaggaggaatttgatggcaaccagttccagaaagctcaagccatctctgtcctccatgagatgatgcagcagaccttcaatctcttcagcacaaagaactcatctgctgcttgggatgagaccctcctagaaaaattctacattgaacttttccagcaaatgaatgacctggaagcctgtgtgatacaggaggttggggtggaagagactcccctgatgaatgaggactccatcctggctgtgaagaaatacttccaaagaatcactctttatctgatggagaagaaatacagcccttgtgcctgggaggttgtcagagcagaaatcatgagatccctctctttttcaacaaacttgcaaaaaagattaaggaggaaggattgaaaactggttcatcatggaaatgattctcattgactaatacatcatctcacactttcatgagttcttccatttcaaagactcacttctcctataaccaccacaagttgaatcaaaattttcaaatgttttcaggagtgtaaagaagcatcatgtatacctgtgca

SEQ ID NO: 472 - DNA, 939 bp, Homo sapiens
  source 1..939: mol_type = genomic DNA
atcccaatggccctgtccttttctttactgatggccgtgctggtgctcagctacaaatccatctgttctctgggctgtgatctgcctcagactcacagcctgggtaataggagggccttgatactcctggcacaaatgggaagaatctctcatttctcctgcctgaaggacagatatgatttcggattcccccaggaggtgtttgatggcaaccagttccagaaggctcaagccatctctgccttccatgagatgatccagcagaccttcaatctcttcagcacaaaggattcatctgctgcttgggatgagaccctcctagacaaattctacattgaacttttccagcaactgaatgacctagaagcctgtgtgacacaggaggttggggtggaagagattgccctgatgaatgaggactccatcctggctgtgaggaaatactttcaaagaatcactctttatctgatggggaagaaatacagcccttgtgcctgggaggttgtcagagcagaaatcatgagatccttctctttttcaacaaacttgcaaaaaggattaagaaggaaggattgaaaactcattcaacatggaaatgatcctcattgattaatacatcatctcacactttcatgagttcttccatttcaaagactcacttctataaccaccacaagttgaatcaaaattttcaaatgttttcaggagtgtaaagaagcatcgtgtttacctgtgcaggcactagtcctttacagatgaccatgctgatgtctctattcatctatttatttaaatatttatttatttaactatttttaaggtttaaatcatgttttatgtaatatcatgtgtacctttacattttgcttaatgtaacaatatatgttcttcatatttagttaatatattaacttccttttcattaaatttttactatac

SEQ ID NO: 473 - DNA, 980 bp, Homo sapiens
  source 1..980: mol_type = genomic DNA
gttcaaggttacccatctcaagtagcctagcaacatttgcaacatcccaatggccctgtccttttctttactgatggccgtgctggtgctcagctacaaatccatctgttctctaggctgtgatctgcctcagacccacagcctgggtaataggagggccttgatactcctggcacaaatgggaagaatctctcctttctcctgcctgaaggacagacatgactttggacttccccaggaggagtttgatggcaaccagttccagaagactcaagccatctctgtcctccatgagatgatccagcagaccttcaatctcttcagcacagaggactcatctgctgcttgggaacagagcctcctagaaaaattttccactgaactttaccagcaactgaataacctggaagcatgtgtgatacaggaggttgggatggaagagactcccctgatgaatgaggactccatcctggctgtgaggaaatacttccaaagaatcactctttatctaacagagaagaaatacagcccttgtgcctgggaggttgtcagagcagaaatcatgagatctctctctttttcaacaaacttgcaaaaaatattaaggaggaaggattgaaaactggttcaacatggcaatgatcctgattgactaatacattatctcacactttcatgagttcctccatttcaaagactcacttctataaccaccacgagttgaatcaaaattttcaaatgttttcagcagtgtaaagaagcgtcgtgtatacctgtgcaggcactagtactttacagatgaccatgctgatgtctctgttcatctatttatttaaatatttatttaattatttttaagatttaaattatttttttatgtaatatcatgtgtacctttacattgtggtgaatgtaacaatatatgttcttcatatttagccaatatattaatttcctttttcattaaatttttactatac

SEQ ID NO: 474 - DNA, 1143 bp, Homo sapiens
  source 1..1143: mol_type = genomic DNA
gagaacctggagcctaaggtttaggctcacccatttcaaccagtctagcagcatctgcaacatctacaatggccttgacctttgctttactggtggccctcctggtgctcagctgcaagtcaagctgctctgtgggctgtgatctgcctcaaacccacagcctgggtagcaggaggaccttgatgctcctggcacagatgaggagaatctctcttttctcctgcttgaaggacagacatgactttggatttccccaggaggagtttggcaaccagttccaaaaggctgaaaccatccctgtcctccatgagatgatccagcagatcttcaatctcttcagcacaaaggactcatctgctgcttgggatgagaccctcctagacaaattctacactgaactctaccagcagctgaatgacctggaagcctgtgtgatacagggggtgggggtgacagagactcccctgatgaaggaggactccattctggctgtgaggaaatacttccaaagaatcactctctatctgaaagagaagaaatacagcccttgtgcctgggaggttgtcagagcagaaatcatgagatctttttctttgtcaacaaacttgcaagaaagtttaagaagtaaggaatgaaaactggttcaacatggaaatgattttcattgattcgtatgccagctcacctttttatgatctgccatttcaaagactcatgtttctgctatgaccatgacacgatttaaatcttttcaaatgtttttaggagtattaatcaacattgtattcagctcttaaggcactagtcccttacagaggaccatgctgactgatccattatctatttaaatatttttaaaatattatttatttaactatttataaaacaacttatttttgttcatattatgtcatgtgcacctttgcacagtggttaatgtaataaaatatgttctttgtatttggtaaatttattttgtgttgttcattgaacttttgctatggaaacttttgtacttgtttattctttaaaatgaaattccaagcctaattgtgcaacctgattacagaataactggtacacttcatttatccatcaatattatattcaagatataagtaaaaataaactttctgtaaacca

SEQ ID NO: 475 - DNA, 1024 bp, Homo sapiens
  source 1..1024: mol_type = genomic DNA
ttcaaggttacccatctcaagtagcctagcaatattggcaacatcccaatggccctgtccttttctttactgatggccgtgctggtgctcagctacaaatccatctgttctctgggctgtgatctgcctcagacccacagcctgggtaataggagggccttgatactcctggcacaaatgggaagaatctctcctttctcctgcctgaaggacagacatgactttggattcccccaggaggagtttgatggcaaccagttccagaaggctcaagccatctctgtcctccatgagatgatccagcagaccttcaatctcttcagcacaaaggactcatctgctacttgggaacagagcctcctagaaaaattttccactgaacttaaccagcagctgaatgacctggaagcctgcgtgatacaggaggttggggtggaagagactcccctgatgaatgtggactccatcctggctgtgaagaaatacttccaaagaatcactctttatctgacagagaagaaatacagcccttgtgcctgggaggttgtcagagcagaaatcatgagatccttctctttatcaaaaatttttcaagaaagattaaggaggaaggaatgaaacctgtttcaacatggaaatgatctgtattgactaatacaccagtccacacttctatgacttctgccatttcaaagactcatttctcctataaccaccgcatgagttgaatcaaaattttcagatcttttcaggagtgtaaggaaacatcatgtttacctgtgcaggcactagtcctttacagatgaccatgctgatagatctaattatctatctattgaaatatttatttatttattagatttaaattatttttgtccatgtaatattatgtgtacttttacattgtgttatatcaaaatatgttatttatatttagtcaatatattattttctttttattaatttttactattaaaacttcttatattatttgtttattctttaataaagaaataccaagccc

SEQ ID NO: 476 - DNA, 982 bp, Homo sapiens
  source 1..982: mol_type = genomic DNA
agaaaacctagaggccgaagttcaaggttatccatctcaagtagcctagcaatatttgcaacatcccaatggccctgtccttttctttactgatggccgtgctggtgctcagctacaaatccatctgttctctgggctgtgatctgcctcagacccacagcctgggtaataggagggccttgatactcctggcacaaatgggaagaatctctcatttctcctgcctgaaggacagacatgatttcggattccccgaggaggagtttgatggccaccagttccagaaggctcaagccatctctgtcctccatgagatgatccagcagaccttcaatctcttcagcacagaggactcatctgctgcttgggaacagagcctcctagaaaaattttccactgaactttaccagcaactgaatgacctggaagcatgtgtgatacaggaggttggggtggaagagactcccctgatgaatgaggactccatcctggctgtgaggaaatacttccaaagaatcactctttatctaacagagaagaaatacagcccttgtgcctgggaggttgtcagagcagaaatcatgagatccctctcgttttcaacaaacttgcaaaaaagattaaggaggaaggattgaaacctggttcaacatggaaatgatcctgattgactaatacattatctcacactttcatgagttcttccatttcaaagactcacttctataaccaccacgagttgaatcaaaattttcaaatgttttcagcagtgtgaagaagcttggtgtatacctgtgcaggcactagtcctttacagatgacaatgctgatgtctctgttcatctatttatttaaatatttatttatttttaaaatttaaattattttttatgtgatatcatgagtacctttacattgtggtgaatgtaacaatatatgttcttcatatttagccaatatattaatttcctttttcattaaa

SEQ ID NO: 477 - DNA, 700 bp, Homo sapiens
  source 1..700: mol_type = genomic DNA
gcccaaggttcagggtcactcaatctcaacagcccagaagcatctgcaacctccccaatggccttgccctttgttttactgatggccctggtggtgctcaactgcaagtcaatctgttctctgggctgtgatctgcctcagacccacagcctgagtaacaggaggactttgatgataatggcacaaatgggaagaatctctcctttctcctgcctgaaggacagacatgactttggatttcctcaggaggagtttgatggcaaccagttccagaaggctcaagccatctctgtcctccatgagatgatccagcagaccttcaatctcttcagcacaaaggactcatctgctacttgggatgagacacttctagacaaattctacactgaactttaccagcagctgaatgacctggaagcctgtatgatgcaggaggttggagtggaagacactcctctgatgaatgtggactctatcctgactgtgagaaaatactttcaaagaatcaccctctatctgacagagaagaaatacagcccttgtgcatgggaggttgtcagagcagaaatcatgagatccttctctttatcagcaaacttgcaagaaagattaaggaggaaggaatgaaaactggttcaacatcgaaatgattctcattgactagtacaccatttcacacttcttgagttctgccgtttca

SEQ ID NO: 478 - DNA, 1544 bp, Homo sapiens
  source 1..1544: mol_type = genomic DNA
tgctcagagttaagttaaatgtcaaatttttaaaaatttaacttttagttaaattactttgccattcctaacagatcaagaaataataaaagtaaactttatgctttttcttttagtgtgcaaagtagacatacatacagtacataaggagatatacaatatatttgttattaaaatttaataaaaatttaatttcaattaagaaaaaaatttcttaaaagactctggaggcaggcaagagaagggagtgtcaataatgaccacatacacacacaaacacacacacaaaactggttgaaaaactactctatacccatgtagagagtaaataaatgaaagcaaaatcagacgtagaaagtaaattctgaaaatggaaactagtatgttccctatttaagacctacacataaagcaaggtcttcagagaacctagagctgaaggttcagagtcacccatctcaacaagtccaacagcatctgcaacatctacaatggctttgccttttgctttactgatggccctggtggtgctcagctgcaagtcaagctgctctctggactgtgatctgcctcagacccacagcctgggtcacaggaggaccatgatgctcctggcacaaatgaggagaatctctcttttctcctgtctgaaggacagacatgacttcagatttccccaggaggagtttgatggcaaccagttccagaaggctgaagccatctctgtcctccatgaggtgattcagcagaccttcaacctcttcagcacaaaggactcatctgttgcttgggatgagaggcttctagacaaactctatactgaactttaccagcagctgaatgacctggaagcctgtgtgatgcaggaggtgtgggtgggagggactcccctgatgaatgaggactccatcctggctgtgagaaaatacttccaaagaatcactctctacctgacagagaaaaagtacagcccttgtgcctgggaggttgtcagagcagaaatcatgagatccttctcttcatcaagaaacttgcaagaaaggttaaggaggaaggaataagacctgatccaacacagaaacgactcccattgacgactacaccagcttgcactttcatgatctgccattttaaagactcttgtttctgctataaccataccatgagttgaatcaaacgcgtcaagtattttcaagtgtgttaagcaacatcgtgttcagttgcacaggaactagtcccttacagatgactaagctgatggatctatttatctatttattaaatgtatatttatttgactataatatttaattttttgcccatataaaagcataaaatgtatacctttatattgttgataacataacaaaatatattttctatgtttagtcgatgtattattttgtttagtttattaaatatttactatagaaaacttcttggatttgtttattctctaaggagaaacaccaagccgattctccaacatgatttaaaaatgtatggttcaattcattgattcattgttattatactcaagttat

SEQ ID NO: 479 - DNA, 737 bp, Homo sapiens
  source 1..737: mol_type = genomic DNA
tacccacctcaggtagcctagtgatatttgcaaaatcccaatggcccggtccttttctttactgatggtcgtgctggtactcagctacaaatccatctgctctctgggctgtgatctgcctcagacccacagcctgcgtaataggagggccttgatactcctggcacaaatgggaagaatctctcctttctcctgcttgaaggacagacatgaattcagattcccagaggaggagtttgatggccaccagttccagaagactcaagccatctctgtcctccatgagatgatccagcagaccttcaatctcttcagcacagaggactcatctgctgcttgggaacagagcctcctagaaaaattttccactgaactttaccagcaactgaatgacctggaagcatgtgtgatacaggaggttggggtggaagagactcccctgatgaatgaggacttcatcctggctgtgaggaaatacttccaaagaatcactctttatctaatggagaagaaatacagcccttgtgcctgggaggttgtcagagcagaaatcatgagatccttctctttttcaacaaacttgaaaaaaggattaaggaggaaggattgaaaactggttcatcatggaaatgattctcattgactaatgcatcatctcacactttcatgagttcttccatttcaaagactcacttctataaccaccacaagttgaatcaaaatttccaaatgttttc

SEQ ID NO: 480 - DNA, 1039 bp, Homo sapiens
  source 1..1039: mol_type = genomic DNA
accagctcagcagcatccacaacatctacaatggccttgactttttatttactggtggccctagtggtgctcagctacaagtcattcagctctctgggctgtgatctgcctcagactcacagcctgggtaacaggagggccttgatactcctggcacaaatgcgaagaatctctcctttctcctgcctgaaggacagacatgactttgaattcccccaggaggagtttgatgataaacagttccagaaggctcaagccatctctgtcctccatgagatgatccagcagaccttcaacctcttcagcacaaaggactcatctgctgctttggatgagacccttctagatgaattctacatcgaacttgaccagcagctgaatgacctggagtcctgtgtgatgcaggaagtgggggtgatagagtctcccctgatgtacgaggactccatcctggctgtgaggaaatacttccaaagaatcactctatatctgacagagaagaaatacagctcttgtgcctgggaggttgtcagagcagaaatcatgagatccttctctttatcaatcaacttgcaaaaaagattgaagagtaaggaatgagacctggtacaacacggaaatgattcttatagactaatacagcagctcacacttcgacaagttgtgctctttcaaagacccttgtttctgccaaaaccatgctatgaattgaatcaaatgtgtcaagtgttttcaggagtgttaagcaacatcctgttcagctgtatgggcactagtcccttacagatgaccatgctgatggatctattcatctatttatttaaatctttatttagttaactatctatagggcttaaattagttttgttcatattatattatgtgaacttttacattgtgaattgtgtaacaaaaacatgttctttatatttattattttgccttgtttattaaatttttactatagaaaaattctttatttattctttaaaattgaactccaaccctgattgtgcaaactgattaaagaatggatggt

SEQ ID NO: 481 - DNA, 840 bp, Homo sapiens
  source 1..840: mol_type = genomic DNA
acattctaactgcaacctttcgaagcctttgctctggcacaacaggtagtaggcgacactgttcgtgttgtcaacatgaccaacaagtgtctcctccaaattgctctcctgttgtgcttctccactacagctctttccatgagctacaacttgcttggattcctacaaagaagcagcaattttcagtgtcagaagctcctgtggcaattgaatgggaggcttgaatactgcctcaaggacaggatgaactttgacatccctgaggagattaagcagctgcagcagttccagaaggaggacgccgcattgaccatctatgagatgctccagaacatctttgctattttcagacaagattcatctagcactggctggaatgagactattgttgagaacctcctggctaatgtctatcatcagataaaccatctgaagacagtcctggaagaaaaactggagaaagaagatttcaccaggggaaaactcatgagcagtctgcacctgaaaagatattatgggaggattctgcattacctgaaggccaaggagtacagtcactgtgcctggaccatagtcagagtggaaatcctaaggaacttttacttcattaacagacttacaggttacctccgaaactgaagatctcctagcctgtgcctctgggactggacaattgcttcaagcattcttcaaccagcagatgctgtttaagtgactgatggctaatgtactgcatatgaaaggacactagaagattttgaaatttttattaaattatgagttatttttatttatttaaattttattttggaaaataaattatttttggtgcaaaagtca

SEQ ID NO: 482 - DNA, 1630 bp, Homo sapiens
  source 1..1630: mol_type = genomic DNA
acacatcaggggcttgctcttgcaaaaccaaaccacaagacagacttgcaaaagaaggcatgcacagctcagcactgctctgttgcctggtcctcctgactggggtgagggccagcccaggccagggcacccagtctgagaacagctgcacccacttcccaggcaacctgcctaacatgcttcgagatctccgagatgccttcagcagagtgaagactttctttcaaatgaaggatcagctggacaacttgttgttaaaggagtccttgctggaggactttaagggttacctgggttgccaagccttgtctgagatgatccagttttacctggaggaggtgatgccccaagctgagaaccaagacccagacatcaaggcgcatgtgaactccctgggggagaacctgaagaccctcaggctgaggctacggcgctgtcatcgatttcttccctgtgaaaacaagagcaaggccgtggagcaggtgaagaatgcctttaataagctccaagagaaaggcatctacaaagccatgagtgagtttgacatcttcatcaactacatagaagcctacatgacaatgaagatacgaaactgagacatcagggtggcgactctatagactctaggacataaattagaggtctccaaaatcggatctggggctctgggatagctgacccagccccttgagaaaccttattgtacctctcttatagaatatttattacctctgatacctcaacccccatttctatttatttactgagcttctctgtgaacgatttagaaagaagcccaatattataatttttttcaatatttattattttcacctgtttttaagctgtttccatagggtgacacactatggtatttgagtgttttaagataaattataagttacataagggaggaaaaaaaatgttctttggggagccaacagaagcttccattccaagcctgaccacgctttctagctgttgagctgttttccctgacctccctctaatttatcttgtctctgggcttggggcttcctaactgctacaaatactcttaggaagagaaaccagggagcccctttgatgattaattcaccttccagtgtctcggagggattcccctaacctcattccccaaccacttcattcttgaaagctgtggccagcttgttatttataacaacctaaatttggttctaggccgggcgcggtggctcacgcctgtaatcccagcactttgggaggctgaggcgggtggatcacttgaggtcaggagttcctaaccagcctggtcaacatggtgaaaccccgtctctactaaaaatacaaaaattagccgggcatggtggcgcgcacctgtaatcccagctacttgggaggctgaggcaagagaattgcttgaacccaggagatggaagttgcagtgagctgatatcatgcccctgtactccagcctgggtgacagagcaagactctgtctcaaaaaataaaaataaaaataaatttggttctaatagaactcagttttaactagaatttattcaattcctctgggaatgttacattgtttgtctgtcttcatagcagattttaattttgaataaataaatgtatcttattcacatca

SEQ ID NO: 483 - DNA, 629 bp, Homo sapiens
  source 1..629: mol_type = genomic DNA
gttctcagtcaagctgaagtgaaaacgagaccaaggtctagctctactgttggtacttatgagatccagtcctggcaacatggagaggattgtcatctgtctgatggtcatcttcttggggacactggtccacaaatcaagctcccaaggtcaagatcgccacatgattagaatgcgtcaacttatagatattgttgatcagctgaaaaattatgtgaatgacttggtccctgaatttctgccagctccagaagatgtagagacaaactgtgagtggtcagctttttcctgctttcagaaggcccaactaaagtcagcaaatacaggaaacaatgaaaggataatcaatgtatcaattaaaaagctgaagaggaaaccaccttccacaaatgcagggagaagacagaaacacagactaacatgcccttcatgtgattcttatgagaaaaaaccacccaaagaattcctagaaagattcaaatcacttctccaaaagatgattcatcagcatctgtcctctagaacacacggaagtgaagattcctgaggatctaacttgcagttggacactatgttacatactctaatatagtagtgaaagtcatttctttgtattccaagtggaggag

SEQ ID NO: 484 - DNA, 2076 bp, Homo sapiens
  source 1..2076: mol_type = genomic DNA
acatccgcggcaacgcctccttggtgtcgtccgcttccaataacccagcttgcgtcctgcacacttgtggcttccgtgcacacattaacaactcatggttctagctcccagtcgccaagcgttgccaaggcgttgagagatcatctgggaagtcttttacccagaattgctttgattcaggccagctggtttttcctgcggtgattcggaaattcgcgaattcctctggtcctcatccaggtgcgcgggaagcaggtgcccaggagagaggggataatgaagattccatgctgatgatcccaaagattgaacctgcagaccaagcgcaaagtagaaactgaaagtacactgctggcggatcctacggaagttatggaaaaggcaaagcgcagagccacgccgtagtgtgtgccgccccccttgggatggatgaaactgcagtcgcggcgtgggtaagaggaaccagctgcagagatcaccctgcccaacacagactcggcaactccgcggaagaccagggtcctgggagtgactatgggcggtgagagcttgctcctgctccagttgcggtcatcatgactacgcccgcctcccgcagaccatgttccatgtttcttttaggtatatctttggacttcctcccctgatccttgttctgttgccagtagcatcatctgattgtgatattgaaggtaaagatggcaaacaatatgagagtgttctaatggtcagcatcgatcaattattggacagcatgaaagaaattggtagcaattgcctgaataatgaatttaacttttttaaaagacatatctgtgatgctaataaggaaggtatgtttttattccgtgctgctcgcaagttgaggcaatttcttaaaatgaatagcactggtgattttgatctccacttattaaaagtttcagaaggcacaacaatactgttgaactgcactggccaggttaaaggaagaaaaccagctgccctgggtgaagcccaaccaacaaagagtttggaagaaaataaatctttaaaggaacagaaaaaactgaatgacttgtgtttcctaaagagactattacaagagataaaaacttgttggaataaaattttgatgggcactaaagaacactgaaaaatatggagtggcaatatagaaacacgaactttagctgcatcctccaagaatctatctgcttatgcagtttttcagagtggaatgcttcctagaagttactgaatgcaccatggtcaaaacggattagggcatttgagaaatgcatattgtattactagaagatgaatacaaacaatggaaactgaatgctccagtcaacaaactatttcttatatatgtgaacatttatcaatcagtataattctgtactgatttttgtaagacaatccatgtaaggtatcagttgcaataatacttctcaaacctgtttaaatatttcaagacattaaatctatgaagtatataatggtttcaaagattcaaaattgacattgctttactgtcaaaataattttatggctcactatgaatctattatactgtattaagagtgaaaattgtcttcttctgtgctggagatgttttagagttaacaatgatatatggataatgccggtgagaataagagagtcataaaccttaagtaagcaacagcataacaaggtccaagatacctaaaagagatttcaagagatttaattaatcatgaatgtgtaacacagtgccttcaataaatggtatagcaaatgttttgacatgaaaaaaggacaatttcaaaaaaataaaataaaataaaaataaattcacctagtctaaggatgctaaaccttagtactgagttacattgtcatttatatagattataacttgtctaaataagtttgcaatttgggagatatatttttaagataataatatatgtttaccttttaattaatgaaatatctgtatttaattttgacactatatctgtatataaaatattttcatacagcattacaaattgcttactttggaatacatttctcctttgataaaataaatgagctatgtattaa

SEQ ID NO: 485 - DNA, 817 bp, Homo sapiens
  source 1..817: mol_type = genomic DNA
acatccgcggcaacgcctccttggtgtcgtccgcttccaataacccagcttgcgtcctgcacacttgtggcttccgtgcacacattaacaactcatggttctagctcccagtcgccaagcgttgccaaggcgttgagagatcatctgggaagtcttttacccagaattgctttgattcaggccagctggtttttcctgcggtgattcggaaattcgcgaattcctctggtcctcatccaggtgcgcgggaagcaggtgcccaggagagaggggataatgaagattccatgctgatgatcccaaagattgaacctgcagaccaagcgcaaagtagaaactgaaagtacactgctggcggatcctacggaagttatggaaaaggcaaagcgcagagccacgccgtagtgtgtgccgccccccttgggatggatgaaactgcagtcgcggcgtgggtaagaggaaccagctgcagagatcaccctgcccaacacagactcggcaactccgcggaagaccagggtcctgggagtgactatgggcggtgagagcttgctcctgctccagttgcggtcatcatgactacgcccgcctcccgcagaccatgttccatgtttcttttaggtatatctttggacttcctcccctgatccttgttctgttgccagtagcatcatctgattgtgatattgaaggtaaagatggcaaacaatatgagagtgttctaatggtcagcatcgatcaattattgaatcagccctacaaaaagaaagaaaaaagaacagaaaggaagcagcaatcagctatgagcaataattag

SEQ ID NO: 486 - DNA, 393 bp, Homo sapiens
  source 1..393: mol_type = genomic DNA
gtttcttttaggtatatctttggacttcctcccctgatccttgttctgttgccagtagcatcatctgattgtgatattgaaggtaaagatggcaaacaatatgagagtgttctaatggtcagcatcgatcaattattggacagcatgaaagaaattggtagcaattgcctgaataatgaatttaacttttttaaaagacatatctgtgatgctaataaggttaaaggaagaaaaccagctgccctgggtgaagcccaaccaacaaagagtttggaagaaaataaatctttaaaggaacagaaaaaactgaatgacttgtgtttcctaaagagactattacaagagataaaaacttgttggaataaaattttgatgggcactaaagaacactga

SEQ ID NO: 487 - DNA, 1940 bp, Homo sapiens
  source 1..1940: mol_type = genomic DNA
cacacttgtggcttccgtgcacacattaacaactcatggttctagctcccagtcgccaagcgttgccaaggcgttgagagatcatctgggaagtcttttacccagaattgctttgattcaggccagctggtttttcctgcggtgattcggaaattcgcgaattcctctggtcctcatccaggtgcgcgggaagcaggtgcccaggagagaggggataatgaagattccatgctgatgatcccaaagattgaacctgcagaccaagcgcaaagtagaaactgaaagtacactgctggcggatcctacggaagttatggaaaaggcaaagcgcagagccacgccgtagtgtgtgccgccccccttgggatggatgaaactgcagtcgcggcgtgggtaagaggaaccagctgcagagatcaccctgcccaacacagactcggcaactccgcggaagaccagggtcctgggagtgactatgggcggtgagagcttgctcctgctccagttgcggtcatcatgactacgcccgcctcccgcagaccatgttccatgtttcttttaggtatatctttggacttcctcccctgatccttgttctgttgccagtagcatcatctgattgtgatattgaaggtaaagatggcaaacaatatgagagtgttctaatggtcagcatcgatcaattattgaatcagccctacaaaaagaaagaaaaaagaacagaaaggaagcagcaatcagctatgagcaataattagacattcgtttgctagctctagcacatgtgaccatgaagagtaactgtgaaccatattgactttctctcctgaaaagaaaaatatgaaaaaaattcagaagaaaactgtcctatcacaaagaatacagaaattgggacagcatgaaagaaattggtagcaattgcctgaataatgaatttaacttttttaaaagacatatctgtgatgctaataaggaaggtatgtttttattccgtgctgctcgcaagttgaggcaatttcttaaaatgaatagcactggtgattttgatctccacttattaaaagtttcagaaggcacaacaatactgttgaactgcactggccaggttaaaggaagaaaaccagctgccctgggtgaagcccaaccaacaaagagtttgaaaataaatctttaaaggaacagaaaaaactgaatgacttgtgtttcctaaagagactattacaagagataaaaacttgttggaataaaattttgatgggcactaaagaacactgaaaaatatggagtggcaatatagaaacacgaactttagctgcatcctccaagaatctatctgcttatgcagtttttcagagtggaatgcttcctagaagttactgaatgcaccatggtcaaaacggattagggcatttgagaaatgcatattgtattactagaagatgaatacaaacaatggaaactgaatgctccagtcaacaaactatttcttatatatgtgaacatttatcaatcagtataattctgtactgatttttgtaagacaatccatgtaaggtatcagttgcaataatacttctcaaacctgtttaaatatttcaagacattaaatctatgaagtatataatggtttcaaagattcaaaattgacattgctttactgtcaaaataattttatggctcactatgaatctattatactgtattaagagtgaaaattgtcttcttctgtgctggagatgttttagagttaacaatgatatatggataatgccggtgagaataagagagtcataaaccttaagtaagcaacagcataacaaggtccaagatacctaaaagagatttcaagagatttaattaatcatgaatgtgtaacacagtgccttcaataaatggtatagcaaatgttttgacatgaaaaaaggacaatttcaaaaaaa

SEQ ID NO: 488 - DNA, 400 bp, Homo sapiens
  source 1..400: mol_type = genomic DNA
cagaccatgttccatgtttcttttaggtatatctttggacttcctcccctgatccttgttctgttgccagtagcatcatctgattgtgatattgaaggacagcatgaaagaaattggtagcaattgcctgaataatgaatttaacttttttaaaagacatatctgtgatgctaataaggttaaaggaagaaaaccagctgccctgggtgaagcccaaccaacaaagagtttggaagaaaataaatctttaaaggaacagaaaaaactgaatgacttgtgtttcctaaagagactattacaagagataaaaacttgttggaataaaattttgatgggcactaaagaacactgaaaaatatggagtggcaatatagaaacacgaactttagctgcatcctcc

SEQ ID NO: 489 - DNA, 456 bp, Homo sapiens
  source 1..456: mol_type = genomic DNA
cagaccatgttccatgtttcttttaggtatatctttggacttcctcccctgatccttgttctgttgccagtagcatcatctgattgtgatattgaaggtaaagatggcaaacaatatgagagtgttctaatggtcagcatcgatcaattattggacagcatgaaagaaattggtagcaattgcctgaataatgaatttaacttttttaaaagacatatctgtgatgctaataaggttaaaggaagaaaaccagctgccctgggtgaagcccaaccaacaaagagtttggaagaaaataaatctttaaaggaacagaaaaaactgaatgacttgtgtttcctaaagagactattacaagagataaaaacttgttggaataaaattttgatgggcactaaagaacactgaaaaatatggagtggcaatatagaaacacgaactttagctgcatcctcc

SEQ ID NO: 490 - DNA, 1055 bp, Homo sapiens
  source 1..1055: mol_type = genomic DNA
tccgtgcacacattaacaactcatggttctagctcccagtcgccaagcgttgccaaggcgttgagagatcatctgggaagtcttttacccagaattgctttgattcaggccagctggtttttcctgcggtgattcggaaattcgcgaattcctctggtcctcatccaggtgcgcgggaagcaggtgcccaggagagaggggataatgaagattccatgctgatgatcccaaagattgaacctgcagaccaagcgcaaagtagaaactgaaagtacactgctggcggatcctacggaagttatggaaaaggcaaagcgcagagccacgccgtagtgtgtgccgccccccttgggatggatgaaactgcagtcgcggcgtgggtaagaggaaccagctgcagagatcaccctgcccaacacagactcggcaactccgcggaagaccagggtcctgggagtgactatgggcggtgagagcttgctcctgctccagttgcggtcatcatgactacgcccgcctcccgcagaccatgttccatgtttcttttaggtatatctttggacttcctcccctgatccttgttctgttgccagtagcatcatctgattgtgatattgaaggacagcatgaaagaaattggtagcaattgcctgaataatgaatttaacttttttaaaagacatatctgtgatgctaataaggaaggtatgtttttattccgtgctgctcgcaagttgaggcaatttcttaaaatgaatagcactggtgattttgatctccacttattaaaagtttcagaaggcacaacaatactgttgaactgcactggccaggttaaaggaagaaaaccagctgccctgggtgaagcccaaccaacaaagagtttggaagaaaataaatctttaaaggaacagaaaaaactgaatgacttgtgtttcctaaagagactattacaagagataaaaacttgttggaataaaattttgatgggcactaaagaacactgaaaaatatggagtggcaatatagaaacacgaactttagctgcatcctcc

SEQ ID NO: 491 - DNA, 195 bp, Homo sapiens
  source 1..195: mol_type = genomic DNA
atgaaagaaattggtagcaattgcctgaataatgaatttaacttttttaaaagacatatctgtgatgctaataaggaagaaaataaatctttaaaggaacagaaaaaactgaatgacttgtgtttcctaaagagactattacaagagataaaaacttgttggaataaaattttgatgggcactaaagaacactga

SEQ ID NO: 492 - DNA, 1642 bp, Homo sapiens
  source 1..1642: mol_type = genomic DNA
ccgcctcgcgccgagactagaagcgctgcgggaagcagggacagtggagagggcgctgcgctcgggctacccaatgcgtggactatctgccgccgctgttcgtgcaatatgctggagctccagaacagctaaacggagtcgccacaccactgtttgtgctggatcgcagcgctgcctttccttatgaagaagacacaaacttggattctcacttgcatttatcttcagctgctcctatttaatcctctcgtcaaaactgaagggatctgcaggaatcgtgtgactaataatgtaaaagacgtcactaaattggtggcaaatcttccaaaagactacatgataaccctcaaatatgtccccgggatggatgttttgccaagtcattgttggataagcgagatggtagtacaattgtcagacagcttgactgatcttctggacaagttttcaaatatttctgaaggcttgagtaattattccatcatagacaaacttgtgaatatagtggatgaccttgtggagtgcgtgaaagaaaactcatctaaggatctaaaaaaatcattcaagagcccagaacccaggctctttactcctgaagaattctttagaatttttaatagatccattgatgccttcaaggactttgtagtggcatctgaaactagtgattgtgtggtttcttcaacattaagtcctgagaaagattccagagtcagtgtcacaaaaccatttatgttaccccctgttgcagccagctcccttaggaatgacagcagtagcagtaataggaaggccaaaaatccccctggagactccagcctacactgggcagccatggcattgccagcattgttttctcttataattggctttgcttttggagccttatactggaagaagagacagccaagtcttacaagggcagttgaaaatatacaaattaatgaagaggataatgagataagtatgttgcaagagaaagagagagagtttcaagaagtgtaattgtggcttgtatcaacactgttactttcgtacattggctggtaacagttcatgtttgcttcataaatgaagcagctttaaacaaattcatattctgtctggagtgacagaccacatctttatctgttcttgctacccatgactttatatggatgattcagaaattggaacagaatgttttactgtgaaactggcactgaattaatcatctataaagaagaacttgcatggagcaggactctattttaaggactgcgggacttgggtctcatttagaacttgcagctgatgttggaagagaaagcacgtgtctcagactgcatgtaccatttgcatggctccagaaatgtctaaatgctgaaaaaacacctagctttattcttcagatacaaactgcagcctgtagttatcctggtctctgcaagtagatttcagcttggatagtgagggtaacaatttttctcaaagggatctggaaaaaatgtttaaaactcagtagtgtcagccactgtacagtgtagaaagcagtgggaactgtgattggatttggcaacatgtcagctttatagttgccgattagtgatatgggtctgatttcgatctcttcctgatgtaaaccatgctcacccatatccca

SEQ ID NO: 493 - DNA, 1948 bp, Homo sapiens
  source 1..1948: mol_type = genomic DNA
aacagagggagctccgagccctctctggcgcgcgaggtatttcgtctgtccccgggggtgccaggtgagccccagcggatccgggagggtaagctgggactcctcgcgagcagtagctgcagggtaccaagcttcgccctctgcgtccccgcgccttcgcggtctcccgccagtgcaggtccggggcccccaggcgagcggacaaggttggcctaatctgccaaacttctggggcatttaccgtgctctggccgccctcccgattcttccctccgcgcccttgcctgcttctcgcctaccccgggctccggaagggaaggaggcgtgtccggagcaggcgggcgggaactgtataaaagcgccggcggctcagcagccgggcttcgctcgccgcctcgcgccgagactagaagcgctgcgggaagcagggacagtggagagggcgctgcgctcgggctacccaatgcgtggactatctgccgccgctgttcgtgcaatatgctggagctccagaacagctaaacggagtcgccacaccactgtttgtgctggatcgcagcgctgcctttccttatgaagaagacacaaacttggattctcacttgcatttatcttcagctgctcctatttaatcctctcgtcaaaactgaagggatctgcaggaatcgtgtgactaataatgtaaaagacgtcactaaattggtggcaaatcttccaaaagactacatgataaccctcaaatatgtccccgggatggatgttttgccaagtcattgttggataagcgagatggtagtacaattgtcagacagcttgactgatcttctggacaagttttcaaatatttctgaaggcttgagtaattattccatcatagacaaacttgtgaatatagtggatgaccttgtggagtgcgtgaaagaaaactcatctaaggatctaaaaaaatcattcaagagcccagaacccaggctctttactcctgaagaattctttagaatttttaatagatccattgatgccttcaaggactttgtagtggcatctgaaactagtgattgtgtggtttcttcaacattaagtcctgagaaagggaaggccaaaaatccccctggagactccagcctacactgggcagccatggcattgccagcattgttttctcttataattggctttgcttttggagccttatactggaagaagagacagccaagtcttacaagggcagttgaaaatatacaaattaatgaagaggataatgagataagtatgttgcaagagaaagagagagagtttcaagaagtgtaattgtggcttgtatcaacactgttactttcgtacattggctggtaacagttcatgtttgcttcataaatgaagcagctttaaacaaattcatattctgtctggagtgacagaccacatctttatctgttcttgctacccatgactttatatggatgattcagaaattggaacagaatgttttactgtgaaactggcactgaattaatcatctataaagaagaacttgcatggagcaggactctattttaaggactgcgggacttgggtctcatttagaacttgcagctgatgttggaagagaaagcacgtgtctcagactgcatgtaccatttgcatggctccagaaatgtctaaatgctgaaaaaacacctagctttattcttcagatacaaactgcagcctgtagttatcctggtctctgcaagtagatttcagcttggatagtgagggtaacaatttttctcaaagggatctggaaaaaatgtttaaaactcagtagtgtcagccactgtacagtgtagaaagcagtgggaactgtgattggatttggcaacatgtcagctttatagttgccgattagtgatatgggtctgatttcgatctcttcctgatgtaaaccatgctcacccatatccca

SEQ ID NO: 494 - DNA, 93 bp, Homo sapiens
  source 1..93: mol_type = genomic DNA
gggatggatgttttgggaaggccaaaaatccccctggagactccagcctacactgggcagccatggcattgccagcattgttttctcttataa

SEQ ID NO: 495 - DNA, 5006 bp, Homo sapiens
  source 1..5006: mol_type = genomic DNA
cgcgcagcatgcccgccagcgccccgccgcgccgcccgcggccgccgccgccgtcgctgtcgctgctgctggtgctgctgggcctgggcggccgccgcctgcgtgcggagccgggcgacggcgcgcagacctgggcccgtttctcgcggcctcctgcccccgaggccgcgggcctcttccagggcaccttccccgacggcttcctctgggccgtgggcagcgccgcctaccagaccgagggcggctggcagcagcacggcaagggtgcgtccatctgggatacgttcacccaccaccccctggcacccccgggagactcccggaacgccagtctgccgttgggcgccccgtcgccgctgcagcccgccaccggggacgtagccagcgacagctacaacaacgtcttccgcgacacggaggcgctgcgcgagctcggggtcactcactaccgcttctccatctcgtgggcgcgagtgctccccaatggcagcgcgggcgtccccaaccgcgaggggctgcgctactaccggcgcctgctggagcggctgcgggagctgggcgtgcagcccgtggtcaccctgtaccactgggacctgccccagcgcctgcaggacgcctacggcggctgggccaaccgcgccctggccgaccacttcagggattacgcggagctctgcttccgccacttcggcggtcaggtcaagtactggatcaccatcgacaacccctacgtggtggcctggcacggctacgccaccgggcgcctggcccccggcatccggggcagcccgcggctcgggtacctggtggcgcacaacctcctcctggctcatgccaaagtctggcatctctacaatacttctttccgtcccactcagggaggtcaggtgtccattgccctaagctctcactggatcaatcctcgaagaatgaccgaccacagcatcaaagaatgtcaaaaatctctggactttgtactaggttggtttgccaaacccgtatttattgatggtgactatcccgagagcatgaagaataacctttcatctattctgcctgattttactgaatctgagaaaaagttcatcaaaggaactgctgacttttttgctctttgctttggacccaccttgagttttcaacttttggaccctcacatgaagttccgccaattggaatctcccaacctgaggcaactgctttcctggattgaccttgaatttaaccatcctcaaatatttattgtggaaaatggctggtttgtctcagggaccaccaagagagatgatgccaaatatatgtattacctcaaaaagttcatcatggaaaccttaaaagccatcaagctggatggggtggatgtcatcgggtataccgcatggtccctcatggatggtttcgagtggcacagaggttacagcatcaggcgtggactcttctatgttgactttctaagccaggacaagatgttgttgccaaagtcttcagccttgttctaccaaaagctgatagagaaaaatggcttccctcctttacctgaaaatcagcccctagaagggacatttccctgtgactttgcttggggagttgttgacaactacattcaagtagataccactctgtctcagtttaccgacctgaatgtttacctgtgggatgtccaccacagtaaaaggcttattaaagtggatggggttgtgaccaagaagaggaaatcctactgtgttgactttgctgccatccagccccagatcgctttactccaggaaatgcacgttacacattttcgcttctccctggactgggccctgattctccctctgggtaaccagtcccaggtgaaccacaccatcctgcagtactatcgctgcatggccagcgagcttgtccgtgtcaacatcaccccagtggtggccctgtggcagcctatggccccgaaccaaggactgccgcgcctcctggccaggcagggcgcctgggagaacccctacactgccctggcctttgcagagtatgcccgactgtgctttcaagagctcggccatcacgtcaagctttggataacgatgaatgagccgtatacaaggaatatgacatacagtgctggccacaaccttctgaaggcccatgccctggcttggcatgtgtacaatgaaaagtttaggcatgctcagaatgggaaaatatccatagccttgcaggctgattggatagaacctgcctgccctttctcccaaaaggacaaagaggtggctgagagagttttggaatttgacattggctggctggctgagcccattttcggctctggagattatccatgggtgatgagggactggctgaaccaaagaaacaattttcttcttccttatttcactgaagatgaaaaaaagctaatccagggtacctttgactttttggctttaagccattataccaccatccttgtagactcagaaaaagaagatccaataaaatacaatgattacctagaagtgcaagaaatgaccgacatcacgtggctcaactcccccagtcaggtggcggtagtgccctgggggttgcgcaaagtgctgaactggctgaagttcaagtacggagacctccccatgtacataatatccaatggaatcgatgacgggctgcatgctgaggacgaccagctgagggtgtattatatgcagaattacataaacgaagctctcaaagcccacatactggatggtatcaatctttgcggatactttgcttattcgtttaacgaccgcacagctccgaggtttggcctctatcgttatgctgcagatcagtttgagcccaaggcatccatgaaacattacaggaaaattattgacagcaatggtttcccgggcccagaaactctggaaagattttgtccagaagaattcaccgtgtgtactgagtgcagtttttttcacacccgaaagtctttactggctttcatagcttttctattttttgcttctattatttctctctcccttatattttactactcgaagaaaggcagaagaagttacaaatagttctgaacatttttctattcattcattttgaaataattatgcagacacatcagctgttaaccatttgcacctctaagtgttgtgaaactgtaaatttcatacatttgacttctagaaaacatttttgtggcttatgacagaggttttgaaatgggcataggtgatcgtaaaatattgaataatgcgaatagtgcctgaatttgttctctttttgggtgattaaaaaactgacaggcactataatttctgtaacacactaacaaaagcatgaaaaataggaaccacaccaatgcaacatttgtgcagaaatttgaatgacaagattaggaatattttcttctgcacccacttctaaatttaatgtttttctggaagtagtaattgcaagagttcgaatagaaagttatgtaccaagtaaccatttctcagctgccataataatgcctagtggcttcccctctgtcaaatctagtttcctatggaaaagaagatggcagatacaggagagacgacagagggtcctaggctggaatgttcctttcgaaagcaatgcttctatcaaatactagtattaatttatgtatctggttaatgacatacttggagagcaaattatggaaatgtgtattttatatgatttttgaggtcctgtctaaaccctgtgtccctgagggatctgtctcactggcatcttgttgagggccttgcacataggaaacttttgataagtatctgcggaaaaacaaacatgaatcctgtgatattgggctcttcaggaagcataaagcaattgtgaaatacagtataccgcagtggctctaggtggaggaaaggaggaaaaagtgcttattatgtgcaacattatgattaatctgattatacaccatttttgagcagatcttggaatgaatgacatgacctttccctagagaataaggatgaaataatcactcattctatgaacagtgacactactttctattctttagctgtactgtaatttctttgagttgatagttttacaaattcttaataggttcaaaagcaatctggtctgaataacactggatttgtttctgtgatctctgaggtctattttatgtttttgctgctacttctgtggaagtagctttgaactagttttactttgaactttcacgctgaaacatgctagtgatatctagaaagggctaattaggtctcatcctttaatgccccttaaataagtcttgctgattttcagacagggaagtctctctattacactggagctgttttatagataagtcaatattgtatcaggcaagataaaccaatgtcataacaggcattgccaacctcactgacacagggtcatagtgtataataatatactgtactatataatatatcatctttagaggtatgattttttcatgaaagataagcttttggtaatattcattttaaagtggacttattaaaattggatgctagagaatcaagtttattttatgtatatatttttctgattataagagtaatatatgttcattgtaaaaatttttaaaacacagaaactatatgcaaagaaaaaataaaaattatctataatctcagaacccagaaatagccactattaacatttcctacgtattttattttacatagatcatattgtatatagttagtatctttattaatttttattatgaaactttcctttgtcattattagtcttcaaaagcatgatttttaatagttgttgagtattccaccacaggaatgtatcacaacttaaccgttcccgtttgttagactagtttcttattaatgttgatgaatgttgtttaaaaataattttgttgctacatttactttaatttccttgactgtaaagagaagtaattttgctccttgataaagtattatattaataataaatctgcctgcaactttttgccttctttcataatcata

SEQ ID NO: 496 - DNA, 1925 bp, Homo sapiens
  source 1..1925: mol_type = genomic DNA
ccccgacgaagccgctccagggctgctctcagaggacgcgcggcaggcaaagagaatgaacctgagcgtccacgaaacgtcctgcacggctcccgggagctgggagaaacaggtgcctttctccgacgtccgcgggcgacgcctgccgcaccttgcccgctgccgcgcccctcccgggcacccctcgccctcggcgcccctgcccccgcccccagtgccagggcggaggcagtcccggctcgcaggctcatgccaaagtctggcatctctacaatacttctttccgtcccactcagggaggtcaggtgtccattgccctaagctctcactggatcaatcctcgaagaatgaccgaccacagcatcaaagaatgtcaaaaatctctggactttgtactaggttggtttgccaaacccgtatttattgatggtgactatcccgagagcatgaagaataacctttcatctattctgcctgattttactgaatctgagaaaaagttcatcaaaggaactgctgacttttttgctctttgctttggacccaccttgagttttcaacttttggaccctcacatgaagttccgccaattggaatctcccaacctgaggcaactgctttcctggattgaccttgaatttaaccatcctcaaatatttattgtggaaaatggctggtttgtctcagggaccaccaagagagatgatgccaaatatatgtattacctcaaaaagttcatcatggaaaccttaaaagccatcaagctggatggggtggatgtcatcgggtataccgcatggtccctcatggatggtttcgagtggcacagaggttacagcatcaggcgtggactcttctatgttgactttctaagccaggacaagatgttgttgccaaagtcttcagccttgttctaccaaaagctgatagagaaaaatggcttccctcctttacctgaaaatcagcccctagaagggacatttccctgtgactttgcttggggagttgttgacaactacattcaagtaagtcagctgacaaaaccaatcagcagtctcaccaagccctatcactagtagataccactctgtctcagtttaccgacctgaatgtttacctgtgggatgtccaccacagtaaaaggcttattaaagtggatggggttgtgaccaagaagaggaaatcctactgtgttgactttgctgccatccagccccagatcgctttactccaggaaatgcacgttacacattttcgcttctccctggactgggccctgattctccctctgggtaaccagtcccaggtgaaccacaccatcctgcagtactatcgctgcatggccagcgagcttgtccgtgtcaacatcaccccagtggtggccctgtggcagcctatggccccgaaccaaggactgccgcgcctcctggccaggcagggcgcctgggagaacccctacactgccctggcctttgcagagtatgcccgactgtgctttcaagagctcggccatcacgtcaagctttggataacgatgaatgagccgtatacaaggaatatgacatacagtgctggccacaaccttctgaaggcccatgccctggcttggcatgtgtacaatgaaaagtttaggcatgctcagaatgggaaaatatccatagccttgcaggctgattggatagaacctgcctgccctttctcccaaaaggacaaagaggtggctgagagagttttggaatttgacattggctggctggctgagcccattttcggctctggagattatccatgggtgatgagggactggctgaaccaaagaaacaattttcttcttccttatttcactgaagatgaaaaaaagctaatccagggtacctttgactttttggctttaagccattataccaccatccttgtagactcag

SEQ ID NO: 497 - DNA, 2813 bp, Homo sapiens
  source 1..2813: mol_type = genomic DNA
ctcccacccgcccgtggcccgcgcccatggccgcgcgcgctccacacaactcaccggagtccgcgccttgcgccgccgaccagttcgcagctccgcgccacggcagccagtctcacctggcggcaccgcccgcccaccgccccggccacagcccctgcgcccacggcagcactcgaggcgaccgcgacagtggtgggggacgctgctgagtggaagagagcgcagcccggccaccggacctacttactcgccttgctgattgtctatttttgcgtttacaacttttctaagaacttttgtatacaaaggaactttttaaaaaagacgcttccaagttatatttaatccaaagaagaaggatctcggccaatttggggttttgggttttggcttcgtttcttctcttcgttgactttggggttcaggtgccccagctgcttcgggctgccgaggaccttctgggcccccacattaatgaggcagccacctggcgagtctgacatggctgtcagcgacgcgctgctcccatctttctccacgttcgcgtctggcccggcgggaagggagaagacactgcgtcaagcaggtgccccgaataaccgctggcgggaggagctctcccacatgaagcgacttcccccagtgcttcccggccgcccctatgacctggcggcggcgaccgtggccacagacctggagagcggcggagccggtgcggcttgcggcggtagcaacctggcgcccctacctcggagagagaccgaggagttcaacgatctcctggacctggactttattctctccaattcgctgacccatcctccggagtcagtggccgccaccgtgtcctcgtcagcgtcagcctcctcttcgtcgtcgccgtcgagcagcggccctgccagcgcgccctccacctgcagcttcacctatccgatccgggccgggaacgacccgggcgtggcgccgggcggcacgggcggaggcctcctctatggcagggagtccgctccccctccgacggctcccttcaacctggcggacatcaacgacgtgagcccctcgggcggcttcgtggccgagctcctgcggccagaattggacccggtgtacattccgccgcagcagccgcagccgccaggtggcgggctgatgggcaagttcgtgctgaaggcgtcgctgagcgcccctggcagcgagtacggcagcccgtcggtcatcagcgtcagcaaaggcagccctgacggcagccacccggtggtggtggcgccctacaacggcgggccgccgcgcacgtgccccaagatcaagcaggaggcggtctcttcgtgcacccacttgggcgctggaccccctctcagcaatggccaccggccggctgcacacgacttccccctggggcggcagctccccagcaggactaccccgaccctgggtcttgaggaagtgctgagcagcagggactgtcaccctgccctgccgcttcctcccggcttccatccccacccggggcccaattacccatccttcctgcccgatcagatgcagccgcaagtcccgccgctccattaccaagagctcatgccacccggttcctgcatgccagaggagcccaagccaaagaggggaagacgatcgtggccccggaaaaggaccgccacccacacttgtgattacgcgggctgcggcaaaacctacacaaagagttcccatctcaaggcacacctgcgaacccacacaggtgagaaaccttaccactgtgactgggacggctgtggatggaaattcgcccgctcagatgaactgaccaggcactaccgtaaacacacggggcaccgcccgttccagtgccaaaaatgcgaccgagcattttccaggtcggaccacctcgccttacacatgaagaggcatttttaaatcccagacagtggatatgacccacactgccagaagagaattcagtattttttacttttcacactgtcttcccgatgagggaaggagcccagccagaaagcactacaatcatggtcaagttcccaactgagtcatcttgtgagtggataatcaggaaaaatgaggaatccaaaagacaaaaatcaaagaacagatggggtctgtgactggatcttctatcattccaattctaaatccgacttgaatattcctggacttacaaaatgccaagggggtgactggaagttgtggatatcagggtataaattatatccgtgagttgggggagggaagaccagaattcccttgaattgtgtattgatgcaatataagcataaaagatcaccttgtattctctttaccttctaaaagccattattatgatgttagaagaagaggaagaaattcaggtacagaaaacatgtttaaatagcctaaatgatggtgcttggtgagtcttggttctaaaggtaccaaacaaggaagccaaagttttcaaactgctgcatactttgacaaggaaaatctatatttgtcttccgatcaacatttatgacctaagtcaggtaatatacctggtttacttctttagcatttttatgcagacagtctgttatgcactgtggtttcagatgtgcaataatttgtacaatggtttattcccaagtatgccttaagcagaacaaatgtgtttttctatatagttccttgccttaataaatatgtaatataaatttaagcaaacgtctattttgtatatttgtaaactacaaagtaaaatgaacattttgtggagtttgtattttgcatactcaaggtgagaattaagttttaaataaacctataatattttatctgaa

SEQ ID NO: 498 - DNA, 800 bp, Homo sapiens
  source 1..800: mol_type = genomic DNA
gaggaccggtgggacgcgccggaacgacggccgaaagccgcccctgactctcctgtctccgctccctgccttgctcgcaggcagccacctggcgagtctgacatggctgtcagcgacgcgctgctcccatctttctccacgttcgcgtctggcccggcgggaagggagaagacactgcgtcaagcaggtgccccgaataaccgctggcgggaggagctctcccacatgaagcgacttcccccagtgcttcccggccgcccctatgacctggcggcggcgaccgtggccacagacctggagagcggcggagccggtgcggcttgcggcggtagcaacctggcgcccctacctcggagagagaccgaggagttcaacgatctcctggacctggactttattctctccaattcgctgacccatcctccggagtcagtggccgccaccgtgtcctcgtcagcgtcagcctcctcttcgtcgtcgccgtcgagcagcggccctgccagcgcgccctccacctgcagcttcacctatccgatccgggccgggaacgacccgggcgtggcgccgggcggcacgggcggaggcctcctctatggcagggagtccgctccccctccgacggctcccttcaacctggcggacatcaacgacgtgagcccctcgggcggcttcgtggccgagctcctgcggccagaattggacccggtgtacattccgccgcagcagccgcagccgccaggtggcgggctgatgggcaagttcgtgctgaaggcgtcgctgagcgcccctggcagcgagta

SEQ ID NO: 499 - DNA, 822 bp, Homo sapiens
  source 1..822: mol_type = genomic DNA
actcctctggccttctcttgaggctcccagttcacgctgcacagtgctgggcactgcctcctctccacacccctagcgccccccacccctcagcagaagggcccgcgaggaaccgtgcgaggtcaggccgagcgccggcaccgccaccggcactggcgctgagcgacgagagcggactcctgcgagcgcagagagggagggggagatggagggctggatgagtcacgcggataatcgcgctcttctccagcgcgcagacagcgcggcaagcgcgtatgctagcaggggtgcggacgcgtgaccgtgccgcccgctgaccccaccagtcttcgcgggcttcgaacccagggagccgacaatggcgttcgcagctccgcgccacggcagccagtctcacctggcggcaccgcccgcccaccgccccggccacagcccctgcgcccacggcagcactcgaggcgaccgcgacagtggtgggggacgctgctgagtggaagagagcgcagcccggccaccggacctacttactcgccttgctgattgtctatttttgcgtttacaacttttctaagaacttttgtatacaaaggaactttttaaaaaagacgcttccaagttatatttaatccaaagaagaaggatctcggccaatttggggttttgggttttggcttcgtttcttctcttcgttgactttggggttcaggtgccccagctgcttcgggctgccgaggaccttctgggcccccacattaatgaggcagccacctggcgagtctgacatggctgtcagcgacgcgctgctcccatctttctccacgt

SEQ ID NO: 500 - DNA, 545 bp, Homo sapiens
  source 1..545: mol_type = genomic DNA
ggcagtttcccgaccagagagaacgaacgtgtctgcgggcgcgcggggagcagaggcggtggcgggcggcggcggcaccgggagccgccgagtgaccctcccccgcccctctggccccccaccctcccacccgccgcgaccgcgacagtggtgggggacgctgctgagtggaagagagcgcagcccggccaccggacctacttactcgccttgctgattgtctatttttgcgtttacaacttttctaagaacttttgtatacaaaggaactttttaaaaaagacgcttccaagttatatttaatccaaagaagaaggatctcggccaatttggggttttgggttttggcttcgtttcttctcttcgttgactttggggttcaggtgccccagctgcttcgggctgccgaggaccttctgggcccccacattaatgaggcagccacctggcgagtctgacatggctgtcagcgacgcgctgctcccatctttctccacgttcgcgtctggcccggcgggaagggagaagacactgcgtcaagcagg

SEQ ID NO: 501 - DNA, 1887 bp, Homo sapiens
  source 1..1887: mol_type = genomic DNA
tttattgtttggatgtcaccatcagagacgaagggaagggtagccagggagggagtccagcccagctgcctgcaggaagatctggctcagtctactatgggcagggccccccaccaagctgagccgaatggagacagctgagctgaggcctgactttttcaataaaacattgtgtagttctgggcctcctgctgccccggctctgtttcccctggcgccaagagaagaaggcggaactgaacccaggcccagagccggctccctgaggctgtgcccctttccggcaatctctggccacaacccccactggccaggccgtccctcccactggccctagggcccctcccactcccacaccagataaggacagcccagtgccgctttctctggcagtaggcaccagggctggaatggggccgcccggctccccatggcagtgggtgacgctgctgctggggctgctgctccctcctgccgcccccttctggctcctcaatgtgctcttccccccgcacaccacgcccaaggctgagctcagtaaccacacacggcccgtcatcctcgtgcccggctgcctggggaatcagctagaagccaagctggacaaaccagatgtggtgaactggatgtgctaccgcaagacagaggacttcttcaccatctggctggatctcaacatgttcctaccccttggggtagactgctggatcgataacaccagggttgtctacaaccggagctctgggctcgtgtccaacgcccctggtgtccagatccgcgtccctggctttggcaagacctactctgtggagtacctggacagcagcaagctggcagggtacctgcacacactggtgcagaacctggtcaacaatggctacgtgcgggacgagactgtgcgcgccgccccctatgactggcggctggagcccggccagcaggaggagtactaccgcaagctcgcagggctggtggaggagatgcacgctgcctatgggaagcctgtcttcctcattggccacagcctcggctgtctacacttgctctatttcctgctgcgccagccccaggcctggaaggaccgctttattgatggcttcatctctcttggggctccctggggtggctccatcaagcccatgctggtcttggcctcaggtgacaaccagggcatccccatcatgtccagcatcaagctgaaagaggagcagcgcataaccaccacctccccctggatgtttccctctcgcatggcgtggcctgaggaccacgtgttcatttccacacccagcttcaactacacaggccgtgacttccaacgcttctttgcagacctgcactttgaggaaggctggtacatgtggctgcagtcacgtgacctcctggcaggactcccagcacctggtgtggaagtatactgtctttacggcgtgggcctgcccacgccccgcacctacatctacgaccacggcttcccctacacggaccctgtgggtgtgctctatgaggatggtgatgacacggtggcgacccgcagcaccgagctctgtggcctgtggcagggccgccagccacagcctgtgcacctgctgcccctgcacgggatacagcatctcaacatggtcttcagcaacctgaccctggagcacatcaatgccatcctgctgggtgcctaccgccagggtccccctgcatccccgactgccagcccagagcccccgcctcctgaataaagaccttcctttgctaccgtaagccctgatggctatgtttcaggttgaagggaggcactagagtcccacactaggtttcactcctcaccagccacaggctcagtgctgtgtgcagtgaggcaagatgggctctgctgaggcctgggactgagct

SEQ ID NO: 502 - DNA, 1146 bp, Homo sapiens
  source 1..1146: mol_type = genomic DNA
aggtcgcgcccctcagtgcccgcgctctccccgtcgggagcttcctggtcgcccctgcggcggcggctcggggtgtctggccggcgcggggctcgcccagcctggtccggggagaggactggctgggcaggggcgccgccccgcctcgggagaggcgggccgggcggggctgggagtatttgaggctcggagccaccgccccgccggcgcccgcagcacctcctcgccagcagccgtccggagccagccaacgagcggaaaatggcagacaatttttcgctccatgatgcgttatctgggtctggaaacccaaaccctcaaggatggcctggcgcatgggggaaccagcctgctggggcagggggctacccaggggcttcctatcctggggcctaccccgggcaggcacccccaggggcttatcctggacaggcacctccaggcgcctaccctggagcacctggagcttatcccggagcacctgcacctggagtctacccagggccacccagcggccctggggcctacccatcttctggacagccaagtgccaccggagcctaccctgccactggcccctatggcgcccctgctgggccactgattgtgccttataacctgcctttgcctgggggagtggtgcctcgcatgctgataacaattctgggcacggtgaagcccaatgcaaacagaattgctttagatttccaaagagggaatgatgttgccttccactttaacccacgcttcaatgagaacaacaggagagtcattgtttgcaatacaaagctggataataactggggaagggaagaaagacagtcggttttcccatttgaaagtgggaaaccattcaaaatacaagtactggttgaacctgaccacttcaaggttgcagtgaatgatgctcacttgttgcagtacaatcatcgggttaaaaaactcaatgaaatcagcaaactgggaatttctggtgacatagacctcaccagtgcttcatataccatgatataatctgaaaggggcagattaaaaaaaaaaaaagaatctaaaccttacatgtgtaaaggtttcatgttcactgtgagtgaaaatttttacattcatcaatatccctcttgtaagtcatctacttaataaatatta

SEQ ID NO: 503 - DNA, 3458 bp, Homo sapiens
  source 1..3458: mol_type = genomic DNA
cctttgccttcggacttctccggggccagcagccgcccgaccaggggcccggggccacgggctcagccgacgaccatgggctccgtgtccaaccagcagtttgcaggtggctgcgccaaggcggcagaagaggcgcccgaggaggcgccggaggacgcggcccgggcggcggacgagcctcagctgctgcacggtgcgggcatctgtaagtggttcaacgtgcgcatggggttcggcttcctgtccatgaccgcccgcgccggggtcgcgctcgaccccccagtggatgtctttgtgcaccagagtaagctgcacatggaagggttccggagcttgaaggagggtgaggcagtggagttcacctttaagaagtcagccaagggtctggaatccatccgtgtcaccggacctggtggagtattctgtattgggagtgagaggcggccaaaaggaaagagcatgcagaagcgcagatcaaaaggagacaggtgctacaactgtggaggtctagatcatcatgccaaggaatgcaagctgccaccccagcccaagaagtgccacttctgccagagcatcagccatatggtagcctcatgtccgctgaaggcccagcagggccctagtgcacagggaaagccaacctactttcgagaggaagaagaagaaatccacagccctaccctgctcccggaggcacagaattgagccacaatgggtgggggctattcttttgctatcaggaagttttgaggagcaggcagagtggagaaagtgggaatagggtgcattggggctagttggcactgccatgtatctcaggcttgggttcacaccatcaccctttcttccctctaggtggggggaaagggtgagtcaaaggaactccaaccatgctctgtccaaatgcaagtgagggttctgggggcaaccaggaggggggaatcaccctacaacctgcatactttgagtctccatccccagaatttccagcttttgaaagtggcctggatagggaagttgttttccttttaaagaaggatatataataattcccatgccagagtgaaatgattaagtataagaccagattcatggagccaagccactacattctgtggaaggagatctctcaggagtaagcattgtttttttttcacatcttgtatcctcatacccacttttgggatagggtgctggcagctgtcccaagcaatgggtaatgatgatggcaaaaagggtgtttgggggaacagctgcagacctgctgctctatgctcacccccgccccattctgggccaatgtgattttatttatttgctcccttggatactgcaccttgggtcccactttctccaggatgccaactgcactagctgtgtgcgaatgacgtatcttgtgcattttaactttttttccttaatataaatattctggttttgtatttttgtatattttaatctaaggccctcatttcctgcactgtgttctcaggtacatgagcaatctcagggatagccagcagcagctccaggtctgcgcagcaggaattactttttgttgtttttgccaccgtggagagcaactatttggagtgcacagcctattgaactacctcatttttgccaataagagctggcttttctgccatagtgtcctcttgaaaccccctctgccttgaaaatgttttatgggagactaggttttaactgggtggccccatgacttgattgccttctactggaagattgggaattagtctaaacaggaaatggtggtacacagaggctaggagaggctgggcccggtgaaaaggccagagagcaagccaagattaggtgagggttgtctaatcctatggcacaggacgtgctttacatctccagatctgttcttcaccagattaggttaggcctaccatgtgccacagggtgtgtgtgtgtttgtaaaactagagttgctaaggataagtttaaagaccaatacccctgtacttaatcctgtgctgtcgagggatggatatatgaagtaaggtgagatccttaacctttcaaaattttcgggttccagggagacacacaagcgagggttttgtggtgcctggagcctgtgtcctgccctgctacagtagtgattaatagtgtcatggtagctaaaggagaaaaagggggtttcgtttacacgctgtgagatcaccgcaaacctaccttactgtgttgaaacgggacaaatgcaatagaacgcattgggtggtgtgtgtctgatcctgggttcttgtctcccctaaatgctgccccccaagttactgtatttgtctgggctttgtaggacttcactacgttgattgctaggtggcctagtttgtgtaaatataatgtattggtctttctccgtgttctttgggggttttgtttacaaacttctttttgtattgagagaaaaatagccaaagcatctttgacagaaggttctgcaccaggcaaaaagatctgaaacattagtttggggggccctcttcttaaagtggggatcttgaaccatcctttcttttgtattccccttcccctattacctattagaccagatcttctgtcctaaaaacttgtcttctaccctgccctcttttctgttcacccccaaaagaaaacttacacacccacacacatacacatttcatgcttggagtgtctccacaactcttaaatgatgtatgcaaaaatactgaagctaggaaaaccctccatcccttgttcccaacctcctaagtcaagaccattaccatttctttctttcttttttttttttttttaaaatggagtctcactgtgtcacccaggcagaggttgcagtgagctgagatcgcaccactgcactccagcctggttacagagcaagactctgtctcaaacaaaacaaaacaaaacaaaaacacactactgtattttggatggatcaaacctccttaattttaatttctaatcctaaagtaaagagatgcaattgggggccttccatgtagaaagtggggtcaggaggccaagaaagggaatatgaatgtatatccaagtcactcaggaacttttatgcaggtgctagaaactttatgtcaaagtggccacaagattgtttaataggagacgaacgaatgtaactccatgtttactgctaaaaaccaaagctttgtgtaaaatcttgaatttatggggcgggagggtaggaaagcctgtacctgtctgtttttttcctgatccttttccctcattcctgaactgcaggagactgagcccctttgggctttggtgaccccatcactggggtgtgtttatttgatggttgattttgctgtactgggtacttcctttcccattttctaatcattttttaacacaagctgactcttcccttcccttctcctttccctgggaaaatacaatgaataaataaagacttattggtacgc

SEQ ID NO: 504 - DNA, 4008 bp, Homo sapiens
  source 1..4008: mol_type = genomic DNA
gtgcgggggaagatgtagcagcttcttctccgaaccaaccctttgccttcggacttctccggggccagcagccgcccgaccaggggcccggggccacgggctcagccgacgaccatgggctccgtgtccaaccagcagtttgcaggtggctgcgccaaggcggcagaagaggcgcccgaggaggcgccggaggacgcggcccgggcggcggacgagcctcagctgctgcacggtgcgggcatctgtaagtggttcaacgtgcgcatggggttcggcttcctgtccatgaccgcccgcgccggggtcgcgctcgaccccccagtggatgtctttgtgcaccagagtaagctgcacatggaagggttccggagcttgaaggagggtgaggcagtggagttcacctttaagaagtcagccaagggtctggaatccatccgtgtcaccggacctggtggagtattctgtattgggagtgagaggcggccaaaaggaaagagcatgcagaagcgcagatcaaaaggagacaggtgctacaactgtggaggtctagatcatcatgccaaggaatgcaagctgccaccccagcccaagaagtgccacttctgccagagcatcagccatatggtagcctcatgtccgctgaaggcccagcagggccctagtgcacagggaaagccaacctactttcgagaggaagaagaagaaatccacagccctaccctgctcccggaggcacagaattgagccacaatgggtgggggctattcttttgctatcaggaagttttgaggagcaggcagagtggagaaagtgggaatagggtgcattggggctagttggcactgccatgtatctcaggcttgggttcacaccatcaccctttcttccctctaggtggggggaaagggtgagtcaaaggaactccaaccatgctctgtccaaatgcaagtgagggttctgggggcaaccaggaggggggaatcaccctacaacctgcatactttgagtctccatccccagaatttccagcttttgaaagtggcctggatagggaagttgttttccttttaaagaaggatatataataattcccatgccagagtgaaatgattaagtataagaccagattcatggagccaagccactacattctgtggaaggagatctctcaggagtaagcattgtttttttttcacatcttgtatcctcatacccacttttgggatagggtgctggcagctgtcccaagcaatgggtaatgatgatggcaaaaagggtgtttgggggaacagctgcagacctgctgctctatgctcacccccgccccattctgggccaatgtgattttatttatttgctcccttggatactgcaccttgggtcccactttctccaggatgccaactgcactagctgtgtgcgaatgacgtatcttgtgcattttaactttttttccttaatataaatattctggttttgtatttttgtatattttaatctaaggccctcatttcctgcactgtgttctcaggtacatgagcaatctcagggatagccagcagcagctccaggtctgcgcagcaggaattactttttgttgtttttgccaccgtggagagcaactatttggagtgcacagcctattgaactacctcatttttgccaataagagctggcttttctgccatagtgtcctcttgaaaccccctctgccttgaaaatgttttatgggagactaggttttaactgggtggccccatgacttgattgccttctactggaagattgggaattagtctaaacaggaaatggtggtacacagaggctaggagaggctgggcccggtgaaaaggccagagagcaagccaagattaggtgagggttgtctaatcctatggcacaggacgtgctttacatctccagatctgttcttcaccagattaggttaggcctaccatgtgccacagggtgtgtgtgtgtttgtaaaactagagttgctaaggataagtttaaagaccaatacccctgtacttaatcctgtgctgtcgagggatggatatatgaagtaaggtgagatccttaacctttcaaaattttcgggttccagggagacacacaagcgagggttttgtggtgcctggagcctgtgtcctgccctgctacagtagtgattaatagtgtcatggtagctaaaggagaaaaagggggtttcgtttacacgctgtgagatcaccgcaaacctaccttactgtgttgaaacgggacaaatgcaatagaacgcattgggtggtgtgtgtctgatcctgggttcttgtctcccctaaatgctgccccccaagttactgtatttgtctgggctttgtaggacttcactacgttgattgctaggtggcctagtttgtgtaaatataatgtattggtctttctccgtgttctttgggggttttgtttacaaacttctttttgtattgagagaaaaatagccaaagcatctttgacagaaggttctgcaccaggcaaaaagatctgaaacattagtttggggggccctcttcttaaagtggggatcttgaaccatcctttcttttgtattccccttcccctattacctattagaccagatcttctgtcctaaaaacttgtcttctaccctgccctcttttctgttcacccccaaaagaaaacttacacacccacacacatacacatttcatgcttggagtgtctccacaactcttaaatgatgtatgcaaaaatactgaagctaggaaaaccctccatcccttgttcccaacctcctaagtcaagaccattaccatttctttctttcttttttttttttttttaaaatggagtctcactgtgtcacccaggctggagtgcagtggcatgatcggctcactgcagcctctgcctcttgggttcaagtgattctcctgcctcagcctcctgagtagctgggatttcaggcacccgccacactcagctaatttttgtatttttagtagagacggggtttcaccatgttgtccaggctggtctggaactcctgacctcaggtgatctgcccaccttggcttcccaaagtgctgggattacaggcatgagccaccatgctgggccaaccatttcttggtgtattcatgccaaacacttaagacactgctgtagcccaggcgcggtggctcacacctgtaatcccagcactttggaaggctgaggcgggcggatcacaaggtcacgagttcaaaactatcctggccaacacagtgaaaccccgtctctactaaaatacaaaaaaattagccgggtgtggtggtgcatgcctttagtcctagctattcaggaggctgaggcaggggaatcgcttgaacccgagaggcagaggttgcagtgagctgagatcgcaccactgcactccagcctggttacagagcaagactctgtctcaaacaaaacaaaacaaaacaaaaacacactactgtattttggatggatcaaacctccttaattttaatttctaatcctaaagtaaagagatgcaattgggggccttccatgtagaaagtggggtcaggaggccaagaaagggaatatgaatgtatatccaagtcactcaggaacttttatgcaggtgctagaaactttatgtcaaagtggccacaagattgtttaataggagacgaacgaatgtaactccatgtttactgctaaaaaccaaagctttgtgtaaaatcttgaatttatggggcgggagggtaggaaagcctgtacctgtctgtttttttcctgatccttttccctcattcctgaactgcaggagactgagcccctttgggctttggtgaccccatcactggggtgtgtttatttgatggttgattttgctgtactgggtacttcctttcccattttctaatcattttttaacacaagctgactcttcccttcccttctcctttccctgggaaaatacaatgaataaataaagacttattggtacgcaaa

SEQ ID NO: 505 - DNA, 753 bp, Homo sapiens
  source 1..753: mol_type = genomic DNA
agctcctgattctgcagaaaacacgaaactgagctgtacaaagatgctgatgaggggctgcagcatgcaattcacttcaccagcagtcactaagaatgaaaatgcggttcttggggttggtggtctgtttggttctctggaccctgcattctgaggggtctggagggaaactgacagctgtggatcctgaaacaaacatgaatgtgagtgaaattatctcttactggggattccctagtgaggaatacctagttgagacagaagatggatatattctgtgccttaaccgaattcctcatgggaggaagaaccattctgacaaaggtcccaaaccagttgtcttcctgcaacatggcttgctggcagattctagtaactgggtcacaaaccttgccaacagcagcctgggcttcattcttgctgatgctggttttgacgtgtggatgggcaacagcagaggaaatacctggtctcggaaacataagacactctcagtttctcaggatgaattctgggctttcagttatgatgagatggcaaaatatgacctaccagcttccattaacttcattctgaataaaactggccaagaacaagtgtattatgtgggtcattctcaaggcaccactataggttttatagcattttcacagatccctgagctggctaaaaggattaaaatgttttttgccctgggtcctgtggcttccgtcgccttctgtactagccctatggccaaattaggacgattac

SEQ ID NO: 506 - DNA, 2782 bp, Homo sapiens
  source 1..2782: mol_type = genomic DNA
gcgtaggcgacgcgctggtagagctgtggacctgccagcctgcgaggcggaggacgggctccatctcttagaaacgcctacggcgcatgctctatggggtcaactggggggctggcaagcggcagcgctggtctggggcggagtctccgaggcacttcccggtggctggctgctctgattggctgaacaaatagtccgagggtggtgggcatccgccctcccgacaaggcagaccaggccccctgcaggtcccctatccgcaccccggcccctgagagctggcactgcgactcgagacagcggcccggcaggacagctccagaatgaaaatgcggttcttggggttggtggtctgtttggttctctggaccctgcattctgaggggtctggagggaaactgacagctgtggatcctgaaacaaacatgaatgtgagtgaaattatctcttactggggattccctagtgaggaatacctagttgagacagaagatggatatattctgtgccttaaccgaattcctcatgggaggaagaaccattctgacaaaggtcccaaaccagttgtcttcctgcaacatggcttgctggcagattctagtaactgggtcacaaaccttgccaacagcagcctgggcttcattcttgctgatgctggttttgacgtgtggatgggcaacagcagaggaaatacctggtctcggaaacataagacactctcagtttctcaggatgaattctgggctttcagttatgatgagatggcaaaatatgacctaccagcttccattaacttcattctgaataaaactggccaagaacaagtgtattatgtgggtcattctcaaggcaccactataggttttatagcattttcacagatccctgagctggctaaaaggattaaaatgttttttgccctgggtcctgtggcttccgtcgccttctgtactagccctatggccaaattaggacgattaccagatcatctcattaaggacttatttggagacaaagaatttcttccccagagtgcgtttttgaagtggctgggtacccacgtttgcactcatgtcatactgaaggagctctgtggaaatctctgttttcttctgtgtggatttaatgagagaaatttaaatatgtctagagtggatgtatatacaacacattctcctgctggaacttctgtgcaaaacatgttacactggagccaggctgttaaattccaaaagtttcaagcctttgactggggaagcagtgccaagaattattttcattacaaccagagttatcctcccacatacaatgtgaaggacatgcttgtgccgactgcagtctggagcgggggtcacgactggcttgcagatgtctacgacgtcaatatcttactgactcagatcaccaacttggtgttccatgagagcattccggaatgggagcatcttgacttcatttggggcctggatgccccttggaggctttataataaaattattaatctaatgaggaaatatcagtgaaagctggacttgagctgtgtaccaccaagtcaatgattatgtcatgtgaaaatgtgtttgcttcatttctgtaaaacacttgtttttctttcccaggtcttttgtttttttatatccaagaaaatgataactttgaagatgcccagttcactctagtttcaattagaaacatactagctattttttctttaattagggctggaataggaagccagtgtctcaaccatagtattgtctctttaagtcttttaaatatcactgatgtgtaaaaaggtcattatatccattctgtttttaaaatttaaaatatattgactttttgcccttcataggacaaagtaatatatgtgttggaattttaaaattgtgttgtcattggtaaatctgtcactgacttaagcgaggtataaaagtacgcagttttcatgtccttgccttaaagagctctctagtctaacggtcttgtagttagagatctaaatgacattttatcatgttttcctgcagcaggtgcatagtcaaatccagaaatatcacagctgtgccagtaataaggatgctaacaattaattttatcaaacctaactgtgacagctgtgatttgacacgttttaattgctcaggttaaatgaaatagttttccggcgtcttcaaaaacaaattgcactgataaaacaaaaacaaaagtatgttttaaatgctttgaagactgatacactcaaccatctatattcatgagctctcaatttcatggcaggccatagttctacttatctgagaagcaaatccctgtggagactataccactattttttctgagattaatgtactcttggagcccgctactgtcgttattgatcacatctgtgtgaagccaaagccccgtggttgcccatgagaagtgtccttgttcattttcacccaaatgaagtgtgaacgtgatgttttcggatgcaaactcagctcagggattcattttgtgtcttagttttatatgcatccttatttttaatacacctgcttcacgtccctatgttgggaagtccatatttgtctgcttttcttgcagcatcatttccttacaatactgtccggtggacaaaatgacaattgatatgtttttctgatataattactttagctgcactaacagtacaatgcttgttaatggttaatataggcagggcgaatactactttgtaacttttaaagtcttaaacttttcaataaaattgagtgagacttataggcccaaagaa

SEQ ID NO: 507 - DNA, 2506 bp, Homo sapiens
  source 1..2506: mol_type = genomic DNA
aaatcgaaactaaacgtaagcttcagaaaccgaaacttaatagaagagctcaagagccgcggccagacgtttgcggagtccagggtctttcggagttgaatttgcagctgggctccttcactttggtctcggcttttatctgcctccctgataggtttttggtcttggtgacttcaagaatgaagctgcggactctcgctgtgagtgctacagttgttaaagatggcgtgtctggagtttgttcctttcgatgttcagatgtgtctggagttcttccttctggtcccaaaccagttgtcttcctgcaacatggcttgctggcagattctagtaactgggtcacaaaccttgccaacagcagcctgggcttcattcttgctgatgctggttttgacgtgtggatgggcaacagcagaggaaatacctggtctcggaaacataagacactctcagtttctcaggatgaattctgggctttcagttatgatgagatggcaaaatatgacctaccagcttccattaacttcattctgaataaaactggccaagaacaagtgtattatgtgggtcattctcaaggcaccactataggttttatagcattttcacagatccctgagctggctaaaaggattaaaatgttttttgccctgggtcctgtggcttccgtcgccttctgtactagccctatggccaaattaggacgattaccagatcatctcattaaggacttatttggagacaaagaatttcttccccagagtgcgtttttgaagtggctgggtacccacgtttgcactcatgtcatactgaaggagctctgtggaaatctctgttttcttctgtgtggatttaatgagagaaatttaaatatgtctagagtggatgtatatacaacacattctcctgctggaacttctgtgcaaaacatgttacactggagccaggctgttaaattccaaaagtttcaagcctttgactggggaagcagtgccaagaattattttcattacaaccagagttatcctcccacatacaatgtgaaggacatgcttgtgccgactgcagtctggagcgggggtcacgactggcttgcagatgtctacgacgtcaatatcttactgactcagatcaccaacttggtgttccatgagagcattccggaatgggagcatcttgacttcatttggggcctggatgccccttggaggctttataataaaattattaatctaatgaggaaatatcagtgaaagctggacttgagctgtgtaccaccaagtcaatgattatgtcatgtgaaaatgtgtttgcttcatttctgtaaaacacttgtttttctttcccaggtcttttgtttttttatatccaagaaaatgataactttgaagatgcccagttcactctagtttcaattagaaacatactagctattttttctttaattagggctggaataggaagccagtgtctcaaccatagtattgtctctttaagtcttttaaatatcactgatgtgtaaaaaggtcattatatccattctgtttttaaaatttaaaatatattgactttttgcccttcataggacaaagtaatatatgtgttggaattttaaaattgtgttgtcattggtaaatctgtcactgacttaagcgaggtataaaagtacgcagttttcatgtccttgccttaaagagctctctagtctaacggtcttgtagttagagatctaaatgacattttatcatgttttcctgcagcaggtgcatagtcaaatccagaaatatcacagctgtgccagtaataaggatgctaacaattaattttatcaaacctaactgtgacagctgtgatttgacacgttttaattgctcaggttaaatgaaatagttttccggcgtcttcaaaaacaaattgcactgataaaacaaaaacaaaagtatgttttaaatgctttgaagactgatacactcaaccatctatattcatgagctctcaatttcatggcaggccatagttctacttatctgagaagcaaatccctgtggagactataccactattttttctgagattaatgtactcttggagcccgctactgtcgttattgatcacatctgtgtgaagccaaagccccgtggttgcccatgagaagtgtccttgttcattttcacccaaatgaagtgtgaacgtgatgttttcggatgcaaactcagctcagggattcattttgtgtcttagttttatatgcatccttatttttaatacacctgcttcacgtccctatgttgggaagtccatatttgtctgcttttcttgcagcatcatttccttacaatactgtccggtggacaaaatgacaattgatatgtttttctgatataattactttagctgcactaacagtacaatgcttgttaatggttaatataggcagggcgaatactactttgtaacttttaaagtcttaaacttttcaataaaattgagtgagacttataggccc

SEQ ID NO: 508 - DNA, 3131 bp, Homo sapiens
  source 1..3131: mol_type = genomic DNA
ttttgattgtcagctcctgattctgcagaaaacacgaaactgagctgtacaaagatgctgatgaggggctgcagcatgcaattcacttcaccagcagtcactaaggtctgatctcttttctaaccatacctggaagatggaatgctggacccaggaaggctttgacatatcaatgcaccagggatcttaccaaactaaattttaagcacttatagctcaagattctccctctgagatgaaacatacttccaccctgtcatgtgtcagcttcagaagatatcaattgctcaagaaagtgttggacaagcagaaaagcacactgaacatttctggacttgtgaaagagctctgaatatggatctctcagggatattccatccccaccaatgctttaccaatgcgagagctggccaggctgagacatttaatgataacatggaacaatttattcaggaagatagtcaactactcatgtggctttatgattataaaacccactgaaaattgggtcccttgattctcttgatttttcctaagccttactccctaaagtctccaatttgatgaggtatttgatacttgatctctccttgaagtaaaatttggagcaaaatatattggactggaaggcctgagacctcgataagaagaaacatgaaccccagagccacagaatgaaaatgcggttcttggggttggtggtctgtttggttctctggaccctgcattctgaggggtctggagggaaactgacagctgtggatcctgaaacaaacatgaatgtgagtgaaattatctcttactggggattccctagtgaggaatacctagttgagacagaagatggatatattctgtgccttaaccgaattcctcatgggaggaagaaccattctgacaaaggtcccaaaccagttgtcttcctgcaacatggcttgctggcagattctagtaactgggtcacaaaccttgccaacagcagcctgggcttcattcttgctgatgctggttttgacgtgtggatgggcaacagcagaggaaatacctggtctcggaaacataagacactctcagtttctcaggatgaattctgggctttcagttatgatgagatggcaaaatatgacctaccagcttccattaacttcattctgaataaaactggccaagaacaagtgtattatgtgggtcattctcaaggcaccactataggttttatagcattttcacagatccctgagctggctaaaaggattaaaatgttttttgccctgggtcctgtggcttccgtcgccttctgtactagccctatggccaaattaggacgattaccagatcatctcattaaggacttatttggagacaaagaatttcttccccagagtgcgtttttgaagtggctgggtacccacgtttgcactcatgtcatactgaaggagctctgtggaaatctctgttttcttctgtgtggatttaatgagagaaatttaaatatgtctagagtggatgtatatacaacacattctcctgctggaacttctgtgcaaaacatgttacactggagccaggctgttaaattccaaaagtttcaagcctttgactggggaagcagtgccaagaattattttcattacaaccagagttatcctcccacatacaatgtgaaggacatgcttgtgccgactgcagtctggagcgggggtcacgactggcttgcagatgtctacgacgtcaatatcttactgactcagatcaccaacttggtgttccatgagagcattccggaatgggagcatcttgacttcatttggggcctggatgccccttggaggctttataataaaattattaatctaatgaggaaatatcagtgaaagctggacttgagctgtgtaccaccaagtcaatgattatgtcatgtgaaaatgtgtttgcttcatttctgtaaaacacttgtttttctttcccaggtcttttgtttttttatatccaagaaaatgataactttgaagatgcccagttcactctagtttcaattagaaacatactagctattttttctttaattagggctggaataggaagccagtgtctcaaccatagtattgtctctttaagtcttttaaatatcactgatgtgtaaaaaggtcattatatccattctgtttttaaaatttaaaatatattgactttttgcccttcataggacaaagtaatatatgtgttggaattttaaaattgtgttgtcattggtaaatctgtcactgacttaagcgaggtataaaagtacgcagttttcatgtccttgccttaaagagctctctagtctaacggtcttgtagttagagatctaaatgacattttatcatgttttcctgcagcaggtgcatagtcaaatccagaaatatcacagctgtgccagtaataaggatgctaacaattaattttatcaaacctaactgtgacagctgtgatttgacacgttttaattgctcaggttaaatgaaatagttttccggcgtcttcaaaaacaaattgcactgataaaacaaaaacaaaagtatgttttaaatgctttgaagactgatacactcaaccatctatattcatgagctctcaatttcatggcaggccatagttctacttatctgagaagcaaatccctgtggagactataccactattttttctgagattaatgtactcttggagcccgctactgtcgttattgatcacatctgtgtgaagccaaagccccgtggttgcccatgagaagtgtccttgttcattttcacccaaatgaagtgtgaacgtgatgttttcggatgcaaactcagctcagggattcattttgtgtcttagttttatatgcatccttatttttaatacacctgcttcacgtccctatgttgggaagtccatatttgtctgcttttcttgcagcatcatttccttacaatactgtccggtggacaaaatgacaattgatatgtttttctgatataattactttagctgcactaacagtacaatgcttgttaatggttaatataggcagggcgaatactactttgtaacttttaaagtcttaaacttttcaataaaattgagtgagacttataggcccaaag

SEQ ID NO: 509 - DNA, 2513 bp, Homo sapiens
  source 1..2513: mol_type = genomic DNA
aaatcgaaactaaacgtaagcttcagaaaccgaaacttaatagaagagctcaagagccgcggccagacgtttgcggagtccagggtctttcggagttgaatttgcagctgggctccttcactttggtctcggcttttatctgcctccctgataggtttttggtcttggtgacttcaagaatgaagctgcggactctcgctgtgagtgctacagttgttaaagatggcgtgtctggagtttgttcctttcgatgttcagatgtgtctggagtttcttccttctggtcccaaaccagttgtcttcctgcaacatggcttgctggcagattctagtaactgggtcacaaaccttgccaacagcagcctgggcttcattcttgctgatgctggttttgacgtgtggatgggcaacagcagaggaaatacctggtctcggaaacataagacactctcagtttctcaggatgaattctgggctttcagttatgatgagatggcaaaatatgacctaccagcttccattaacttcattctgaataaaactggccaagaacaagtgtattatgtgggtcattctcaaggcaccactataggttttatagcattttcacagatccctgagctggctaaaaggattaaaatgttttttgccctgggtcctgtggcttccgtcgccttctgtactagccctatggccaaattaggacgattaccagatcatctcattaaggacttatttggagacaaagaatttcttccccagagtgcgtttttgaagtggctgggtacccacgtttgcactcatgtcatactgaaggagctctgtggaaatctctgttttcttctgtgtggatttaatgagagaaatttaaatatgtctagagtggatgtatatacaacacattctcctgctggaacttctgtgcaaaacatgttacactggagccaggctgttaaattccaaaagtttcaagcctttgactggggaagcagtgccaagaattattttcattacaaccagagttatcctcccacatacaatgtgaaggacatgcttgtgccgactgcagtctggagcgggggtcacgactggcttgcagatgtctacgacgtcaatatcttactgactcagatcaccaacttggtgttccatgagagcattccggaatgggagcatcttgacttcatttggggcctggatgccccttggaggctttataataaaattattaatctaatgaggaaatatcagtgaaagctggacttgagctgtgtaccaccaagtcaatgattatgtcatgtgaaaatgtgtttgcttcatttctgtaaaacacttgtttttctttcccaggtcttttgtttttttatatccaagaaaatgataactttgaagatgcccagttcactctagtttcaattagaaacatactagctattttttctttaattagggctggaataggaagccagtgtctcaaccatagtattgtctctttaagtcttttaaatatcactgatgtgtaaaaaggtcattatatccattctgtttttaaaatttaaaatatattgactttttgcccttcataggacaaagtaatatatgtgttggaattttaaaattgtgttgtcattggtaaatctgtcactgacttaagcgaggtataaaagtacgcagttttcatgtccttgccttaaagagctctctagtctaacggtcttgtagttagagatctaaatgacattttatcatgttttcctgcagcaggtgcatagtcaaatccagaaatatcacagctgtgccagtaataaggatgctaacaattaattttatcaaacctaactgtgacagctgtgatttgacacgttttaattgctcaggttaaatgaaatagttttccggcgtcttcaaaaacaaattgcactgataaaacaaaaacaaaagtatgttttaaatgctttgaagactgatacactcaaccatctatattcatgagctctcaatttcatggcaggccatagttctacttatctgagaagcaaatccctgtggagactataccactattttttctgagattaatgtactcttggagcccgctactgtcgttattgatcacatctgtgtgaagccaaagccccgtggttgcccatgagaagtgtccttgttcattttcacccaaatgaagtgtgaacgtgatgttttcggatgcaaactcagctcagggattcattttgtgtcttagttttatatgcatccttatttttaatacacctgcttcacgtccctatgttgggaagtccatatttgtctgcttttcttgcagcatcatttccttacaatactgtccggtggacaaaatgacaattgatatgtttttctgatataattactttagctgcactaacagtacaatgcttgttaatggttaatataggcagggcgaatactactttgtaacttttaaagtcttaaacttttcaataaaattgagtgagacttataggcccaaagaa

SEQ ID NO: 510 - DNA, 2743 bp, Homo sapiens
  source 1..2743: mol_type = genomic DNA
cagccccagcaagaacaggaaactggagattgaatcagatgccgagcgctcagaaactgaaacttaagaaatcgaaactaaacgtaagcttcagaaaccgaaacttaatagaagagctcaagagccgcggccagacgtttgcggagtccagggtctttcggagttgaatttgcagctgggctccttcactttggtctcggcttttatctgcctccctgataggtttttggtcttggtgacttcaagaatgaagctgcggactctcgctgtgagtgctacagttgttaaagatggcgtgtctggagtttgttcctttcgatgttcagatgtgtctggagtttcttccttctggtgagttcgtggtcttgctgacttcaggagtgcagctgcagaccttcacagtgagtgttacagatcttaaaggtggcgcgtccggagttgttcgttcctcccggtgggttcgtggtttcactgacttcaggagtaaagccgtagacctttgtggtcccaaaccagttgtcttcctgcaacatggcttgctggcagattctagtaactgggtcacaaaccttgccaacagcagcctgggcttcattcttgctgatgctggttttgacgtgtggatgggcaacagcagaggaaatacctggtctcggaaacataagacactctcagtttctcaggatgaattctgggctttcagagttcctttcttggattacagttatgatgagatggcaaaatatgacctaccagcttccattaacttcattctgaataaaactggccaagaacaagtgtattatgtgggtcattctcaaggcaccactataggttttatagcattttcacagatccctgagctggctaaaaggattaaaatgttttttgccctgggtcctgtggcttccgtcgccttctgtactagccctatggccaaattaggacgattaccagatcatctcattaaggacttatttggagacaaagaatttcttccccagagtgcgtttttgaagtggctgggtacccacgtttgcactcatgtcatactgaaggagctctgtggaaatctctgttttcttctgtgtggatttaatgagagaaatttaaatatgtctagagtggatgtatatacaacacattctcctgctggaacttctgtgcaaaacatgttacactggagccaggctgttaaattccaaaagtttcaagcctttgactggggaagcagtgccaagaattattttcattacaaccagagttatcctcccacatacaatgtgaaggacatgcttgtgccgactgcagtctggagcgggggtcacgactggcttgcagatgtctacgacgtcaatatcttactgactcagatcaccaacttggtgttccatgagagcattccggaatgggagcatcttgacttcatttggggcctggatgccccttggaggctttataataaaattattaatctaatgaggaaatatcagtgaaagctggacttgagctgtgtaccaccaagtcaatgattatgtcatgtgaaaatgtgtttgcttcatttctgtaaaacacttgtttttctttcccaggtcttttgtttttttatatccaagaaaatgataactttgaagatgcccagttcactctagtttcaattagaaacatactagctattttttctttaattagggctggaataggaagccagtgtctcaaccatagtattgtctctttaagtcttttaaatatcactgatgtgtaaaaaggtcattatatccattctgtttttaaaatttaaaatatattgactttttgcccttcataggacaaagtaatatatgtgttggaattttaaaattgtgttgtcattggtaaatctgtcactgacttaagcgaggtataaaagtacgcagttttcatgtccttgccttaaagagctctctagtctaacggtcttgtagttagagatctaaatgacattttatcatgttttcctgcagcaggtgcatagtcaaatccagaaatatcacagctgtgccagtaataaggatgctaacaattaattttatcaaacctaactgtgacagctgtgatttgacacgttttaattgctcaggttaaatgaaatagttttccggcgtcttcaaaaacaaattgcactgataaaacaaaaacaaaagtatgttttaaatgctttgaagactgatacactcaaccatctatattcatgagctctcaatttcatggcaggccatagttctacttatctgagaagcaaatccctgtggagactataccactattttttctgagattaatgtactcttggagcccgctactgtcgttattgatcacatctgtgtgaagccaaagccccgtggttgcccatgagaagtgtccttgttcattttcacccaaatgaagtgtgaacgtgatgttttcggatgcaaactcagctcagggattcattttgtgtcttagttttatatgcatccttatttttaatacacctgcttcacgtccctatgttgggaagtccatatttgtctgcttttcttgcagcatcatttccttacaatactgtccggtggacaaaatgacaattgatatgtttttctgatataattactttagctgcactaacagtacaatgcttgttaatggttaatataggcagggcgaatactactttgtaacttttaaagtcttaaacttttcaataaaattgagtgagacttat

SEQ ID NO: 511 - DNA, 1055 bp, Homo sapiens
  source 1..1055: mol_type = genomic DNA
taaaatttaaaaattccttattctcctttcagatatggctggagtcatttgtttcatattttcctttcaccttttacttgccctaaatctggttcagaactttttgtgggagcattaagttaccagaatatttttgtgtagtaaaattcaagcaaataataatagactgttttattatacagaatgaaaatgcggttcttggggttggtggtctgtttggttctctggaccctgcattctgaggggtctggagggaaactgacagctgtggatcctgaaacaaacatgaatgtgagtgaaattatctcttactggggattccctagtgaggaatacctagttgagacagaagatggatatattctgtgccttaaccgaattcctcatgggaggaagaaccattctgacaaaggtcccaaaccagttgtcttcctgcaacatggcttgctggcagattctagtaactgggtcacaaaccttgccaacagcagcctgggcttcattcttgctgatgctggttttgacgtgtggatgggcaacagcagaggaaatacctggtctcggaaacataagacactctcagtttctcaggatgaattctgggctttcagttatgatgagatggcaaaatatgacctaccagcttccattaacttcattctgaataaaactggccaagaacaagtgtattatgtgggtcattctcaaggcaccactataggttttatagcattttcacagatccctgagctggctaaaaggattaaaatgttttttgccctgggtcctgtggcttccgtcgccttctgtactagccctatggccaaattaggacgattaccagatcatctcattaaggacttatttggagacaaagaatttcttccccagagtgcgtttttgaagtggctgggtacccacgtttgcactcatgtcatactgaaggagctctgtggaaatctctgttttcttctgtgtggatttaatgagagaaatttaaatatgtctagagtggatgtatatacaacacattctcctgctggaacttctgtgca

SEQ ID NO: 512 - DNA, 2651 bp, Homo sapiens
  source 1..2651: mol_type = genomic DNA
ttcccggtggctggctgctctgattggctgaacaaatagtccgagggtggtgggcatccgccctcccgacaaggcagaccaggccccctgcaggtcccctatccgcaccccggcccctgagagctggcactgcgactcgagacagcggcccggcaggacagctccaggtgagagtgccggcgccgcggcgctgccagaatgaaaatgcggttcttggggttggtggtctgtttggttctctggaccctgcattctgaggggtctggagggaaactgacagctgtggatcctgaaacaaacatgaatgtgagtgaaattatctcttactggggattccctagtgaggaatacctagttgagacagaagatggatatattctgtgccttaaccgaattcctcatgggaggaagaaccattctgacaaaggtcccaaaccagttgtcttcctgcaacatggcttgctggcagattctagtaactgggtcacaaaccttgccaacagcagcctgggcttcattcttgctgatgctggttttgacgtgtggatgggcaacagcagaggaaatacctggtctcggaaacataagacactctcagtttctcaggatgaattctgggctttcagttatgatgagatggcaaaatatgacctaccagcttccattaacttcattctgaataaaactggccaagaacaagtgtattatgtgggtcattctcaaggcaccactataggttttatagcattttcacagatccctgagctggctaaaaggattaaaatgttttttgccctgggtcctgtggcttccgtcgccttctgtactagccctatggccaaattaggacgattaccagatcatctcattaaggacttatttggagacaaagaatttcttccccagagtgcgtttttgaagtggctgggtacccacgtttgcactcatgtcatactgaaggagctctgtggaaatctctgttttcttctgtgtggatttaatgagagaaatttaaatatgtctagagtggatgtatatacaacacattctcctgctggaacttctgtgcaaaacatgttacactggagccaggctgttaaattccaaaagtttcaagcctttgactggggaagcagtgccaagaattattttcattacaaccagagttatcctcccacatacaatgtgaaggacatgcttgtgccgactgcagtctggagcgggggtcacgactggcttgcagatgtctacgacgtcaatatcttactgactcagatcaccaacttggtgttccatgagagcattccggaatgggagcatcttgacttcatttggggcctggatgccccttggaggctttataataaaattattaatctaatgaggaaatatcagtgaaagctggacttgagctgtgtaccaccaagtcaatgattatgtcatgtgaaaatgtgtttgcttcatttctgtaaaacacttgtttttctttcccaggtcttttgtttttttatatccaagaaaatgataactttgaagatgcccagttcactctagtttcaattagaaacatactagctattttttctttaattagggctggaataggaagccagtgtctcaaccatagtattgtctctttaagtcttttaaatatcactgatgtgtaaaaaggtcattatatccattctgtttttaaaatttaaaatatattgactttttgcccttcataggacaaagtaatatatgtgttggaattttaaaattgtgttgtcattggtaaatctgtcactgacttaagcgaggtataaaagtacgcagttttcatgtccttgccttaaagagctctctagtctaacggtcttgtagttagagatctaaatgacattttatcatgttttcctgcagcaggtgcatagtcaaatccagaaatatcacagctgtgccagtaataaggatgctaacaattaattttatcaaacctaactgtgacagctgtgatttgacacgttttaattgctcaggttaaatgaaatagttttccggcgtcttcaaaaacaaattgcactgataaaacaaaaacaaaagtatgttttaaatgctttgaagactgatacactcaaccatctatattcatgagctctcaatttcatggcaggccatagttctacttatctgagaagcaaatccctgtggagactataccactattttttctgagattaatgtactcttggagcccgctactgtcgttattgatcacatctgtgtgaagccaaagccccgtggttgcccatgagaagtgtccttgttcattttcacccaaatgaagtgtgaacgtgatgttttcggatgcaaactcagctcagggattcattttgtgtcttagttttatatgcatccttatttttaatacacctgcttcacgtccctatgttgggaagtccatatttgtctgcttttcttgcagcatcatttccttacaatactgtccggtggacaaaatgacaattgatatgtttttctgatataattactttagctgcactaacagtacaatgcttgttaatggttaatataggcagggcgaatactactttgtaacttttaaagtcttaaacttttcaataaaattgagtgagacttataggccc

SEQ ID NO: 513 - DNA, 84 bp, Homo sapiens
  source 1..84: mol_type = genomic DNA
ctctgttttcttctgtgtggatttaatgagagaaatttaaatatggctgttaaattccaaaagtttcaagcctttgactgggga

SEQ ID NO: 514 - DNA, 2834 bp, Homo sapiens
  source 1..2834: mol_type = genomic DNA
tggagggcagaaggctttgacatatcaatgcaccagggatcttaccaaactaaattttaagcacttatagctcaagattctccctctgagatgaaacatacttccaccctgtcatgtgtcagcttcagaagatatcaattgctcaagaaagtgttggacaagcagaaaagcacactgaacatttctggacttgtgaaagagctctgaatatggatctctcagggatattccatccccaccaatgctttaccaatgcgagagctggccaggctgagacatttaatgataacatggaacaatttattcaggaagatagtcaactactcatgtggctttatgattataaaacccactgaaaattgggtcccttgattctcttgatttttcctaagccttactccctaaagtctccaatttgatgaggtatttgatacttgatctctccttgaagtaaaatttggagcaaaatatattggactggaaggcctgagacctcgataagaagaaacatgaaccccagagccacagaatgaaaatgcggttcttggggttggtggtctgtttggttctctggaccctgcattctgaggggtctggagggaaactgacagctgtggatcctgaaacaaacatgaatgtgagtgaaattatctcttactggggattccctagtgaggaatacctagttgagacagaagatggatatattctgtgccttaaccgaattcctcatgggaggaagaaccattctgacaaaggtcccaaaccagttgtcttcctgcaacatggcttgctggcagattctagtaactgggtcacaaaccttgccaacagcagcctgggcttcattcttgctgatgctggttttgacgtgtggatgggcaacagcagaggaaatacctggtctcggaaacataagacactctcagtttctcaggatgaattctgggctttcagttatgatgagatggcaaaatatgacctaccagcttccattaacttcattctgaataaaactggccaagaacaagtgtattatgtgggtcattctcaaggcaccactataggttttatagcattttcacagatccctgagctggctaaaaggattaaaatgttttttgccctgggtcctgtggcttccgtcgccttctgtactagccctatggccaaattaggacgattaccagatcatctcattaaggacttatttggagacaaagaatttcttccccagagtgcgtttttgaagtggctgggtacccacgtttgcactcatgtcatactgaaggagctctgtggaaatctctgttttcttctgtgtggatttaatgagagaaatttaaatatgtctagagtggatgtatatacaacacattctcctgctggaacttctgtgcaaaacatgttacactggagccaggctgttaaattccaaaagtttcaagcctttgactggggaagcagtgccaagaattattttcattacaaccagagttatcctcccacatacaatgtgaaggacatgcttgtgccgactgcagtctggagcgggggtcacgactggcttgcagatgtctacgacgtcaatatcttactgactcagatcaccaacttggtgttccatgagagcattccggaatgggagcatcttgacttcatttggggcctggatgccccttggaggctttataataaaattattaatctaatgaggaaatatcagtgaaagctggacttgagctgtgtaccaccaagtcaatgattatgtcatgtgaaaatgtgtttgcttcatttctgtaaaacacttgtttttctttcccaggtcttttgtttttttatatccaagaaaatgataactttgaagatgcccagttcactctagtttcaattagaaacatactagctattttttctttaattagggctggaattttaaaattgtgttgtcattggtaaatctgtcactgacttaagcgaggtataaaagtacgcagttttcatgtccttgccttaaagagctctctagtctaacggtcttgtagttagagatctaaatgacattttatcatgttttcctgcagcaggtgcatagtcaaatccagaaatatcacagctgtgccagtaataaggatgctaacaattaattttatcaaacctaactgtgacagctgtgatttgacacgttttaattgctcaggttaaatgaaatagttttccggcgtcttcaaaaacaaattgcactgataaaacaaaaacaaaagtatgttttaaatgctttgaagactgatacactcaaccatctatattcatgagctctcaatttcatggcaggccatagttctacttatctgagaagcaaatccctgtggagactataccactattttttctgagattaatgtactcttggagcccgctactgtcgttattgatcacatctgtgtgaagccaaagccccgtggttgcccatgagaagtgtccttgttcattttcacccaaatgaagtgtgaacgtgatgttttcggatgcaaactcagctcagggattcattttgtgtcttagttttatatgcatccttatttttaatacacctgcttcacgtccctatgttgggaagtccatatttgtctgcttttcttgcagcatcatttccttacaatactgtccggtggacaaaatgacaattgatatgtttttctgatataattactttagctgcactaacagtacaatgcttgttaatggttaatataggcagggcgaatactactttgtaacttttaaagtcttaaacttttcaataaaattgagtgagacttataggcccaaag

SEQ ID NO: 515 - DNA, 936 bp, Homo sapiens
  source 1..936: mol_type = genomic DNA
actgcgactcgagacagcggcccggcaggacagctccaggtgagagtgccggcgccgcggcgctgccagaatgaaaatgcggttcttggggttggtggtctgtttggttctctggaccctgcattctgaggggtctggagggaaactgacagctgtggatcctgaaacaaacatgaatgtgagtgaaattatctcttactggggattccctagtgaggaatacctagttgagacagaagatggatatattctgtgccttaaccgaattcctcatgggaggaagaaccattctgacaaaggtcccaaaccagttgtcttcctgcaacatggcttgctggcagattctagtaactgggtcacaaaccttgccaacagcagcctgggcttcattcttgctgatgctggttttgacgtgtggatgggcaacagcagaggaaatacctggtctcggaaacatgttacactggagccaggctgttaaattccaaaagtttcaagcctttgactggggaagcagtgccaagaattattttcattacaaccagagttatcctcccacatacaatgtgaaggacatgcttgtgccgactgcagtctggagcgggggtcacgactggcttgcagatgtctacgacgtcaatatcttactgactcagatcaccaacttggtgttccatgagagcattccggaatgggagcatcttgacttcatttggggcctggatgccccttggaggctttataataaaattattaatctaatgaggaaatatcagtgaaagctggacttgagctgtgtaccaccaagtcaatgattatgtcatgtgaaaatgtgtttgcttcatttctgtaaaacacttgtttttctttcccaggtcttttgtttttttatatccaagaaaatgataactttgaagatgcccagttcactctagt

SEQ ID NO: 516 - DNA, 3846 bp, Homo sapiens
  source 1..3846: mol_type = genomic DNA
tttaacgtgaatcgatgtaaacctgtgtttggtgcttagacagggggcccccgggtagagtggaaccccttaagctaagcgaacaggagcctaacaaagcaaatttttccgtctgccctttccccctcttctcgttggcagggttgatcctcattactgtttgctcaaacgtttagaagtgaatttaggtccctccccccaacttatgattttatagccaataggtgatgaggtttatttgcatatttccagtcacataagcagccttggcgtgaaaacagtgtcagactcgattccccctcttcctcctcctcaagggaaagctgcccacttctagctgccctgccatcccctttaaagggcgacttgctcagcgccaaaccgcggctccagccctctccagcctccggctcagccggctcatcagtcggtccgcgccttgcagctcctccagagggacgcgccccgagatggagagcaaagccctgctcgtgctgactctggccgtgtggctccagagtctgaccgcctcccgcggaggggtggccgccgccgaccaaagaagagattttatcgacatcgaaagtaaatttgccctaaggacccctgaagacacagctgaggacacttgccacctcattcccggagtagcagagtccgtggctacctgtcatttcaatcacagcagcaaaaccttcatggtgatccatggctggacggtaacaggaatgtatgagagttgggtgccaaaacttgtggccgccctgtacaagagagaaccagactccaatgtcattgtggtggactggctgtcacgggctcaggagcattacccagtgtccgcgggctacaccaaactggtgggacaggatgtggcccggtttatcaactggatggaggaggagtttaactaccctctggacaatgtccatctcttgggatacagccttggagcccatgctgctggcattgcaggaagtctgaccaataagaaagtcaacagaattactggcctcgatccagctggacctaactttgagtatgcagaagccccgagtcgtctttctcctgatgatgcagattttgtagacgtcttacacacattcaccagagggtcccctggtcgaagcattggaatccagaaaccagttgggcatgttgacatttacccgaatggaggtacttttcagccaggatgtaacattggagaagctatccgcgtgattgcagagagaggacttggagatgtggaccagctagtgaagtgctcccacgagcgctccattcatctcttcatcgactctctgttgaatgaagaaaatccaagtaaggcctacaggtgcagttccaaggaagcctttgagaaagggctctgcttgagttgtagaaagaaccgctgcaacaatctgggctatgagatcaataaagtcagagccaaaagaagcagcaaaatgtacctgaagactcgttctcagatgccctacaaagtcttccattaccaagtaaagattcatttttctgggactgagagtgaaacccataccaatcaggcctttgagatttctctgtatggcaccgtggccgagagtgagaacatcccattcactctgcctgaagtttccacaaataagacctactccttcctaatttacacagaggtagatattggagaactactcatgttgaagctcaaatggaagagtgattcatactttagctggtcagactggtggagcagtcccggcttcgccattcagaagatcagagtaaaagcaggagagactcagaaaaaggtgatcttctgttctagggagaaagtgtctcatttgcagaaaggaaaggcacctgcggtatttgtgaaatgccatgacaagtctctgaataagaagtcaggctgaaactgggcgaatctacagaacaaagaacggcatgtgaattctgtgaagaatgaagtggaggaagtaacttttacaaaacatacccagtgtttggggtgtttcaaaagtggattttcctgaatattaatcccagccctacccttgttagttattttaggagacagtctcaagcactaaaaagtggctaattcaatttatggggtatagtggccaaatagcacatcctccaacgttaaaagacagtggatcatgaaaagtgctgttttgtcctttgagaaagaaataattgtttgagcgcagagtaaaataaggctccttcatgtggcgtattgggccatagcctataattggttagaacctcctattttaattggaattctggatctttcggactgaggccttctcaaactttactctaagtctccaagaatacagaaaatgcttttccgcggcacgaatcagactcatctacacagcagtatgaatgatgttttagaatgattccctcttgctattggaatgtggtccagacgtcaaccaggaacatgtaacttggagagggacgaagaaagggtctgataaacacagaggttttaaacagtccctaccattggcctgcatcatgacaaagttacaaattcaaggagatataaaatctagatcaattaattcttaataggctttatcgtttattgcttaatccctctctcccccttcttttttgtctcaagattatattataataatgttctctgggtaggtgttgaaaatgagcctgtaatcctcagctgacacataatttgaatggtgcagaaaaaaaaaaagaaaccgtaattttattattagattctccaaatgattttcatcaatttaaaatcattcaatatctgacagttactcttcagttttaggcttaccttggtcatgcttcagttgtacttccagtgcgtctcttttgttcctggctttgacatgaaaagataggtttgagttcaaattttgcattgtgtgagcttctacagattttagacaaggaccgtttttactaagtaaaagggtggagaggttcctggggtggattcctaagcagtgcttgtaaaccatcgcgtgcaatgagccagatggagtaccatgagggttgctatttgttgtttttaacaactaatcaagagtgagtgaacaactatttataaactagatctcctatttttcagaatgctcttctacgtataaatatgaaatgataaagatgtcaaatatctcagaggctatagctgggaacccgactgtgaaagtatgtgatatctgaacacatactagaaagctctgcatgtgtgttgtccttcagcataattcggaagggaaaacagtcgatcaagggatgtattggaacatgtcggagtagaaattgttcctgatgtgccagaacttcgaccctttctctgagagagatgatcgtgcctataaatagtaggaccaatgttgtgattaacatcatcaggcttggaatgaattctctctaaaaataaaatgatgtatgatttgttgttggcatcccctttattaattcattaaatttctggatttgggttgtgacccagggtgcattaacttaaaagattcactaaagcagcacatagcactgggaactctggctccgaaaaactttgttatatatatcaaggatgttctggctttacattttatttattagctgtaaatacatgtgtggatgtgtaaatggagcttgtacatattggaaaggtcattgtggctatctgcatttataaatgtgtggtgctaactgtatgtgtctttatcagtgatggtctcacagagccaactcactcttatgaaatgggctttaacaaaacaagaaagaaacgtacttaactgtgtgaagaaatggaatcagcttttaataaaattgacaacattttattaccac

SEQ ID NO: 517 - DNA, 560 bp, Homo sapiens
  source 1..560: mol_type = genomic DNA
aacagtttgtatgctggaagagttctgaaaagatctctgagggctggaagtgctaaggacaatttcataaagaagaaagaagagattttatcgacatcgaaagtaaatttgccctaaggacccctgaagacacagctgaggacacttgccacctcattcccggagtagcagagtccgtggctacctgtcatttcaatcacagcagcaaaaccttcatggtgatccatggctggacggtaacaggaatgtatgagagttgggtgccaaaacttgtggccgccctgtacaagagagaaccagactccaatgtcattgtggtggactggctgtcacgggctcaggagcattacccagtgtccgcgggctacaccaaactggtgggacaggatgtggcccggtttatcaactggatggaggaggagtttaactaccctctggacaatgtccatctcttgggatacagccttggagcccatgctgctggcattgcaggaagtctgaccaataagaaagtcaacagaattactggcctcgatccagctggacctaactttgagtat

SEQ ID NO: 518 - DNA, 559 bp, Homo sapiens
  source 1..559: mol_type = genomic DNA
aaactttccctccttggaaaacagtcacataagcagccttggcgtgaaaacagtgtcagactcgattccccctcttcctcctcctcaagggaaagctgcccacttctagctgccctgccatcccctttaaagggcgacttgctcagcgccaaaccgcggctccagccctctccagcctccggctcagccggctcatcagtcggtccgcgccttgcagctcctccagagggacgcgccccgagatggagagcaaagccctgctcgtgctgactctggccgtgtggctccagagtctgaccgcctcccgcggaggggtggccgccgccgaccaaagaagagattttatcgacatcgaaagtaaatttgccctaaggacccctgaagacacagctgaggacacttgccacctcattcccggagtagcagagtccgtggctacctgtcatttcaatcacagcagcaaaaccttcatggtgatccatggctggacggtaacaggaatgtatgagagttgggtgccaaaacttgtggccgccctgtacaagagagaaccagactc

SEQ ID NO: 519 - DNA, 629 bp, Homo sapiens
  source 1..629: mol_type = genomic DNA
gacaaacaggattcgtcaaaagagaggtgtattaaagtgccgatcaaatgtaatttaacagctaaactttccctccttggaaaacagggaaagctgcccacttctagctgccctgccatcccctttaaagggcgacttgctcagcgccaaaccgcggctccagccctctccagcctccggctcagccggctcatcagtcggtccgcgccttgcagctcctccagagggacgcgccccgagatggagagcaaagccctgctcgtgctgactctggccgtgtggctccagagtctgaccgcctcccgcggaggggtggccgccgccgaccaaagaagagattttatcgacatcgaaagtaaatttgccctaaggacccctgaagacacagctgaggacacttgccacctcattcccggagtagcagagtccgtggctacctgtcatttcaatcacagcagcaaaaccttcatggtgatccatggctggacggtaacaggaatgtatgagagttgggtgccaaaacttgtggccgccctgtacaagagagaaccagactccaatgtcattgtggtggactggctgtcacgggctcaggagcattacccagtgtccgcgggctacaccaaact

SEQ ID NO: 520 - DNA, 3335 bp, Homo sapiens
  source 1..3335: mol_type = genomic DNA
atggagagcaaagccctgctcgtgctgactctggccgccgccgaccaaagaagagattttatcgacatcgaaagtaaatttgccctaaggacccctgaagacacagctgaggacacttgccacctcattcccggagtagcagagtccgtggctacctgtcatttcaatcacagcagcaaaaccttcatggtgatccatggctggacggtaacaggaatgtatgagagttgggtgccaaaacttgtggccgccctgtacaagagagaaccagactccaatgtcattgtggtggactggctgtcacgggctcaggagcattacccagtgtccgcgggctacaccaaactggtgggacaggatgtggcccggtttatcaactggatggaggaggagtttaactaccctctggacaatgtccatctcttgggatacagccttggagcccatgctgctggcattgcaggaagtctgaccaataagaaagtcaacagaattactggcctcgatccagctggacctaactttgagtatgcagaagccccgagtcgtctttctcctgatgatgcagattttgtagacgtcttacacacattcaccagagggtcccctggtcgaagcattggaatccagaaaccagttgggcatgttgacatttacccgaatggaggtacttttcagccaggatgtaacattggagaagctatccgcgtgattgcagagagaggacttggagatgtggaccagctagtgaagtgctcccacgagcgctccattcatctcttcatcgactctctgttgaatgaagaaaatccaagtaaggcctacaggtgcagttccaaggaagcctttgagaaagggctctgcttgagttgtagaaagaaccgctgcaacaatctgggctatgagatcaataaagtcagagccaaaagaagcagcaaaatgtacctgaagactcgttctcagatgccctacaaagtcttccattaccaagtaaagattcatttttctgggactgagagtgaaacccataccaatcaggcctttgagatttctctgtatggcaccgtggccgagagtgagaacatcccattcactctgcctgaagtttccacaaataagacctactccttcctaatttacacagaggtagatattggagaactactcatgttgaagctcaaatggaagagtgattcatactttagctggtcagactggtggagcagtcccggcttcgccattcagaagatcagagtaaaagcaggagagactcagaaaaaggtgatcttctgttctagggagaaagtgtctcatttgcagaaaggaaaggcacctgcggtatttgtgaaatgccatgacaagtctctgaataagaagtcaggctgaaactgggcgaatctacagaacaaagaacggcatgtgaattctgtgaagaatgaagtggaggaagtaacttttacaaaacatacccagtgtttggggtgtttcaaaagtggattttcctgaatattaatcccagccctacccttgttagttattttaggagacagtctcaagcactaaaaagtggctaattcaatttatggggtatagtggccaaatagcacatcctccaacgttaaaagacagtggatcatgaaaagtgctgttttgtcctttgagaaagaaataattgtttgagcgcagagtaaaataaggctccttcatgtggcgtattgggccatagcctataattggttagaacctcctattttaattggaattctggatctttcggactgaggccttctcaaactttactctaagtctccaagaatacagaaaatgcttttccgcggcacgaatcagactcatctacacagcagtatgaatgatgttttagaatgattccctcttgctattggaatgtggtccagacgtcaaccaggaacatgtaacttggagagggacgaagaaagggtctgataaacacagaggttttaaacagtccctaccattggcctgcatcatgacaaagttacaaattcaaggagatataaaatctagatcaattaattcttaataggctttatcgtttattgcttaatccctctctcccccttcttttttgtctcaagattatattataataatgttctctgggtaggtgttgaaaatgagcctgtaatcctcagctgacacataatttgaatggtgcagaaaaaaaaaaagaaaccgtaattttattattagattctccaaatgattttcatcaatttaaaatcattcaatatctgacagttactcttcagttttaggcttaccttggtcatgcttcagttgtacttccagtgcgtctcttttgttcctggctttgacatgaaaagataggtttgagttcaaattttgcattgtgtgagcttctacagattttagacaaggaccgtttttactaagtaaaagggtggagaggttcctggggtggattcctaagcagtgcttgtaaaccatcgcgtgcaatgagccagatggagtaccatgagggttgctatttgttgtttttaacaactaatcaagagtgagtgaacaactatttataaactagatctcctatttttcagaatgctcttctacgtataaatatgaaatgataaagatgtcaaatatctcagaggctatagctgggaacccgactgtgaaagtatgtgatatctgaacacatactagaaagctctgcatgtgtgttgtccttcagcataattcggaagggaaaacagtcgatcaagggatgtattggaacatgtcggagtagaaattgttcctgatgtgccagaacttcgaccctttctctgagagagatgatcgtgcctataaatagtaggaccaatgttgtgattaacatcatcaggcttggaatgaattctctctaaaaataaaatgatgtatgatttgttgttggcatcccctttattaattcattaaatttctggatttgggttgtgacccagggtgcattaacttaaaagattcactaaagcagcacatagcactgggaactctggctccgaaaaactttgttatatatatcaaggatgttctggctttacattttatttattagctgtaaatacatgtgtggatgtgtaaatggagcttgtacatattggaaaggtcattgtggctatctgcatttataaatgtgtggtgctaactgtatgtgtctttatcagtgatggtctcacagagccaactcactcttatgaaatgggctttaacaaaacaagaaagaaacgtacttaactgtgtgaagaaatggaatcagcttttaataaaattgacaacattttattaccaca

SEQ ID NO: 521 - DNA, 3737 bp, Homo sapiens
  source 1..3737: mol_type = genomic DNA
ccgtctgccctttccccctcttctcgttggcagggttgatcctcattactgtttgctcaaacgtttagaagtgaatttaggtccctccccccaacttatgattttatagccaataggtgatgaggtttatttgcatatttccagtcacataagcagccttggcgtgaaaacagtgtcagactcgattccccctcttcctcctcctcaagggaaagctgcccacttctagctgccctgccatcccctttaaagggcgacttgctcagcgccaaaccgcggctccagccctctccagcctccggctcagccggctcatcagtcggtccgcgccttgcagctcctccagagggacgcgccccgagatggagagcaaagccctgctcgtgctgactctggccgtgtggctccagagtctgaccgcctcccgcggaggggtggccgccgccgaccaaagaagagattttatcgacatcgaaagtaaatttgccctaaggacccctgaagacacagctgaggacacttgccacctcattcccggagtagcagagtccgtggctacctgtcatttcaatcacagcagcaaaaccttcatggtgatccatggctggacggtaacaggaatgtatgagagttgggtgccaaaacttgtggccgccctgtacaagagagaaccagactccaatgtcattgtggtggactggctgtcacgggctcaggagcattacccagtgtccgcgggctacaccaaactggtgggacaggatgtggcccggtttatcaactggatggaggaggagtttaactaccctctggacaatgtccatctcttgggatacagccttggagcccatgctgctggcattgcaggaagtctgaccaataagaaagtcaacagaattactggcctcgatccagctggacctaactttgagtatgcagaagccccgagtcgtctttctcctgatgatgcagattttgtagacgtcttacacacattcaccagagggtcccctggtcgaagcattggaatccagaaaccagttgggcatgttgacatttacccgaatggaggtacttttcagccaggatgtaacattggagaagctatccgcgtgattgcagagagaggacttggagatgtggaccagctagtgaagtgctcccacgagcgctccattcatctcttcatcgactctctgttgaatgaagaaaatccaagtaaggcctacaggtgcagttccaaggaagcctttgagaaagggctctgcttgagttgtagaaagaaccgctgcaacaatctgggctatgagatcaataaagtcagagccaaaagaagcagcaaaatgtacgaagactcgttctcagatgccctacaaagtcttccattaccaagtaaagattcatttttctgggactgagagtgaaacccataccaatcaggcctttgagatttctctgtatggcaccgtggccgagagtgagaacatcccattcactctgcctgaagtttccacaaataagacctactccttcctaatttacacagaggtagatattggagaactactcatgttgaagctcaaatggaagagtgattcatactttagctggtcagactggtggagcagtcccggcttcgccattcagaagatcagagtaaaagcaggagagactcagaaaaaggtgatcttctgttctagggagaaagtgtctcatttgcagaaaggaaaggcacctgcggtatttgtgaaatgccatgacaagtctctgaataagaagtcaggctgaaactgggcgaatctacagaacaaagaacggcatgtgaattctgtgaagaatgaagtggaggaagtaacttttacaaaacatacccagtgtttggggtgtttcaaaagtggattttcctgaatattaatcccagccctacccttgttagttattttaggagacagtctcaagcactaaaaagtggctaattcaatttatggggtatagtggccaaatagcacatcctccaacgttaaaagacagtggatcatgaaaagtgctgttttgtcctttgagaaagaaataattgtttgagcgcagagtaaaataaggctccttcatgtggcgtattgggccatagcctataattggttagaacctcctattttaattggaattctggatctttcggactgaggccttctcaaactttactctaagtctccaagaatacagaaaatgcttttccgcggcacgaatcagactcatctacacagcagtatgaatgatgttttagaatgattccctcttgctattggaatgtggtccagacgtcaaccaggaacatgtaacttggagagggacgaagaaagggtctgataaacacagaggttttaaacagtccctaccattggcctgcatcatgacaaagttacaaattcaaggagatataaaatctagatcaattaattcttaataggctttatcgtttattgcttaatccctctctcccccttcttttttgtctcaagattatattataataatgttctctgggtaggtgttgaaaatgagcctgtaatcctcagctgacacataatttgaatggtgcagaaaaaaaaaaagaaaccgtaattttattattagattctccaaatgattttcatcaatttaaaatcattcaatatctgacagttactcttcagttttaggcttaccttggtcatgcttcagttgtacttccagtgcgtctcttttgttcctggctttgacatgaaaagataggtttgagttcaaattttgcattgtgtgagcttctacagattttagacaaggaccgtttttactaagtaaaagggtggagaggttcctggggtggattcctaagcagtgcttgtaaaccatcgcgtgcaatgagccagatggagtaccatgagggttgctatttgttgtttttaacaactaatcaagagtgagtgaacaactatttataaactagatctcctatttttcagaatgctcttctacgtataaatatgaaatgataaagatgtcaaatatctcagaggctatagctgggaacccgactgtgaaagtatgtgatatctgaacacatactagaaagctctgcatgtgtgttgtccttcagcataattcggaagggaaaacagtcgatcaagggatgtattggaacatgtcggagtagaaattgttcctgatgtgccagaacttcgaccctttctctgagagagatgatcgtgcctataaatagtaggaccaatgttgtgattaacatcatcaggcttggaatgaattctctctaaaaataaaatgatgtatgatttgttgttggcatcccctttattaattcattaaatttctggatttgggttgtgacccagggtgcattaacttaaaagattcactaaagcagcacatagcactgggaactctggctccgaaaaactttgttatatatatcaaggatgttctggctttacattttatttattagctgtaaatacatgtgtggatgtgtaaatggagcttgtacatattggaaaggtcattgtggctatctgcatttataaatgtgtggtgctaactgtatgtgtctttatcagtgatggtctcacagagccaactcactcttatgaaatgggctttaacaaaacaagaaagaaacgtacttaactgtgtgaagaaatggaatcagcttttaataaaattgacaacattttattaccaca

SEQ ID NO: 522 - DNA, 2333 bp, Homo sapiens
  source 1..2333: mol_type = genomic DNA
gtgcaatcgcgggaagccagggtttccagctaggacacagcaggtcgtgatccgggtcgggacactgcctggcagaggctgcgagcatggggccctggggctggaaattgcgctggaccgtcgccttgctcctcgccgcggcggggactgcagtgggcgacagatgcgaaagaaacgagttccagtgccaagacgggaaatgcatctcctacaagtgggtctgcgatggcagcgctgagtgccaggatggctctgatgagtcccaggagacgtgcttgtctgtcacctgcaaatccggggacttcagctgtgggggccgtgtcaaccgctgcattcctcagttctggaggtgcgatggccaagtggactgcgacaacggctcagacgagcaaggctgtctgacactctgcgagggacccaacaagttcaagtgtcacagcggcgaatgcatcaccctggacaaagtctgcaacatggctagagactgccgggactggtcagatgaacccatcaaagagtgcgggaccaacgaatgcttggacaacaacggcggctgttcccacgtctgcaatgaccttaagatcggctacgagtgcctgtgccccgacggcttccagctggtggcccagcgaagatgcgaagatatcgatgagtgtcaggatcccgacacctgcagccagctctgcgtgaacctggagggtggctacaagtgccagtgtgaggaaggcttccagctggacccccacacgaaggcctgcaaggctgtgggctccatcgcctacctcttcttcaccaaccggcacgaggtcaggaagatgacgctggaccggagcgagtacaccagcctcatccccaacctgaggaacgtggtcgctctggacacggaggtggccagcaatagaatctactggtctgacctgtcccagagaatgatctgcagcacccagcttgacagagcccacggcgtctcttcctatgacaccgtcatcagcagagacatccaggcccccgacgggctggctgtggactggatccacagcaacatctactggaccgactctgtcctgggcactgtctctgttgcggataccaagggcgtgaagaggaaaacgttattcagggagaacggctccaagccaagggccatcgtggtggatcctgttcatggcttcatgtactggactgactggggaactcccgccaagatcaagaaagggggcctgaatggtgtggacatctactcgctggtgactgaaaacattcagtggcccaatggcatcaccctagatctcctcagtggccgcctctactgggttgactccaaacttcactccatctcaagcatcgatgtcaacgggggcaaccggaagaccatcttggaggatgaaaagaggctggcccaccccttctccttggccgtctttgaggacaaagtattttggacagatatcatcaacgaagccattttcagtgccaaccgcctcacaggttccgatgtcaacttgttggctgaaaacctactgtccccagaggatatggttctcttccacaacctcacccagccaagaggagtgaactggtgtgagaggaccaccctgagcaatggcggctgccagtatctgtgcctccctgccccgcagatcaacccccactcgcccaagtttacctgcgcctgcccggacggcatgctgctggccagggacatgaggagctgcctcacagaggctgaggctgcagtggccacccaggagacatccaccgtcaggctaaaggtcagctccacagccgtaaggacacagcacacaaccacccgacctgttcccgacacctcccggctgcctggggccacccctgggctcaccacggtggagatagtgacaatgtctcaccaagctctgggcgacgttgctggcagaggaaatgagaagaagcccagtagcgtgagggctctgtccattgtcctccccatcgtgctcctcgtcttcctttgcctgggggtcttccttctatggaagaactggcggcttaagaacatcaacagcatcaactttgacaaccccgtctatcagaagaccacagaggatgaggtccacatttgccacaaccaggacggctacagctacccctcgagacagatggtcagtctggaggatgacgtggcgtgaacatctgcctggagtcccgtccctgcccagaacccttcctgagacctcgccggccttgttttattcaaagacagagaagaccaaagcattgcctgccagagctttgttttatatatttattcatctgggaggcagaacaggcttcggacagtgcccatgcaatggctt

SEQ ID NO: 523 - DNA, 2768 bp, Homo sapiens
  source 1..2768: mol_type = genomic DNA
gtgcaatcgcgggaagccagggtttccagctaggacacagcaggtcgtgatccgggtcgggacactgcctggcagaggctgcgagcatggggccctggggctggaaattgcgctggaccgtcgccttgctcctcgccgcggcggggactgcagtgggcgacagatgcgaaagaaacgagttccagtgccaagacgggaaatgcatctcctacaagtgggtctgcgatggcagcgctgagtgccaggatggctctgatgagtcccaggagacgtgctcccccaagacgtgctcccaggacgagtttcgctgccacgatgggaagtgcatctctcggcagttcgtctgtgactcagaccgggactgcttggacggctcagacgaggcctcctgcccggtgctcacctgtggtcccgccagcttccagtgcaacagctccacctgcatcccccagctgtgggcctgcgacaacgaccccgactgcgaagatggctcggatgagtggccgcagcgctgtaggggtctttacgtgttccaaggggacagtagcccctgctcggccttcgagttccactgcctaagtggcgagtgcatccactccagctggcgctgtgatggtggccccgactgcaaggacaaatctgacgaggaaaactgcgctgtggccacctgtcgccctgacgaattccagtgctctgatggaaactgcatccatggcagccggcagtgtgaccgggaatatgactgcaaggacatgagcgatgaagttggctgcgttaatgtgacactctgcgagggacccaacaagttcaagtgtcacagcggcgaatgcatcaccctggacaaagtctgcaacatggctagagactgccgggactggtcagatgaacccatcaaagagtgcgggaccaacgaatgcttggacaacaacggcggctgttcccacgtctgcaatgaccttaagatcggctacgagtgcctgtgccccgacggcttccagctggtggcccagcgaagatgcgaagatatcgatgagtgtcaggatcccgacacctgcagccagctctgcgtgaacctggagggtggctacaagtgccagtgtgaggaaggcttccagctggacccccacacgaaggcctgcaaggctgtgggctccatcgcctacctcttcttcaccaaccggcacgaggtcaggaagatgacgctggaccggagcgagtacaccagcctcatccccaacctgaggaacgtggtcgctctggacacggaggtggccagcaatagaatctactggtctgacctgtcccagagaatgatctgcagcacccagcttgacagagcccacggcgtctcttcctatgacaccgtcatcagcagagacatccaggcccccgacgggctggctgtggactggatccacagcaacatctactggaccgactctgtcctgggcactgtctctgttgcggataccaagggcgtgaagaggaaaacgttattcagggagaacggctccaagccaagggccatcgtggtggatcctgttcatggcttcatgtactggactgactggggaactcccgccaagatcaagaaagggggcctgaatggtgtggacatctactcgctggtgactgaaaacattcagtggcccaatggcatcaccctagatctcctcagtggccgcctctactgggttgactccaaacttcactccatctcaagcatcgatgtcaacgggggcaaccggaagaccatcttggaggatgaaaagaggctggcccaccccttctccttggccgtctttgaggacaaagtattttggacagatatcatcaacgaagccattttcagtgccaaccgcctcacaggttccgatgtcaacttgttggctgaaaacctactgtccccagaggatatggttctcttccacaacctcacccagccaagaggagtgaactggtgtgagaggaccaccctgagcaatggcggctgccagtatctgtgcctccctgccccgcagatcaacccccactcgcccaagtttacctgcgcctgcccggacggcatgctgctggccagggacatgaggagctgcctcacagaggctgaggctgcagtggccacccaggagacatccaccgtcaggctaaaggtcagctccacagccgtaaggacacagcacacaaccacccgacctgttcccgacacctcccggctgcctggggccacccctgggctcaccacggtggagatagtgacaatgtctcaccaagctctgggcgacgttgctggcagaggaaatgagaagaagcccagtagcgtgagggctctgtccattgtcctccccatcgtgctcctcgtcttcctttgcctgggggtcttccttctatggaagaactggcggcttaagaacatcaacagcatcaactttgacaaccccgtctatcagaagaccacagaggatgaggtccacatttgccacaaccaggacggctacagctacccctcgagacagatggtcagtctggaggatgacgtggcgtgaacatctgcctggagtcccgtccctgcccagaacccttcctgagacctcgccggccttgttttattcaaagacagagaagaccaaagcattgcctgccagagctttgttttatatatttattcatctgggaggcagaacaggcttcggacagtgcccatgcaatggcttgggttgggattttggtttcttcctttcctcgtgaaggataagagaaacaggccc

SEQ ID NO: 524 - DNA, 2429 bp, Homo sapiens
  source 1..2429: mol_type = genomic DNA
gtgcaatcgcgggaagccagggtttccagctaggacacagcaggtcgtgatccgggtcgggacactgcctggcagaggctgcgagcatggggccctggggctggaaattgcgctggaccgtcgccttgctcctcgccgcggcggggactgcagtgggcgacagatgcgaaagaaacgagttccagtgccaagacgggaaatgcatctcctacaagtgggtctgcgatggcagcgctgagtgccaggatggctctgatgagtcccaggagacgtgcttgtctgtcacctgcaaatccggggacttcagctgtgggggccgtgtcaaccgctgcattcctcagttctggaggtgcgatggccaagtggactgcgacaacggctcagacgagcaaggctgtcctgtggccacctgtcgccctgacgaattccagtgctctgatggaaactgcatccatggcagccggcagtgtgaccgggaatatgactgcaaggacatgagcgatgaagttggctgcgttaatgtgacactctgcgagggacccaacaagttcaagtgtcacagcggcgaatgcatcaccctggacaaagtctgcaacatggctagagactgccgggactggtcagatgaacccatcaaagagtgcgggaccaacgaatgcttggacaacaacggcggctgttcccacgtctgcaatgaccttaagatcggctacgagtgcctgtgccccgacggcttccagctggtggcccagcgaagatgcgaagatatcgatgagtgtcaggatcccgacacctgcagccagctctgcgtgaacctggagggtggctacaagtgccagtgtgaggaaggcttccagctggacccccacacgaaggcctgcaaggctgtgggctccatcgcctacctcttcttcaccaaccggcacgaggtcaggaagatgacgctggaccggagcgagtacaccagcctcatccccaacctgaggaacgtggtcgctctggacacggaggtggccagcaatagaatctactggtctgacctgtcccagagaatgatctgcagcacccagcttgacagagcccacggcgtctcttcctatgacaccgtcatcagcagagacatccaggcccccgacgggctggctgtggactggatccacagcaacatctactggaccgactctgtcctgggcactgtctctgttgcggataccaagggcgtgaagaggaaaacgttattcagggagaacggctccaagccaagggccatcgtggtggatcctgttcatggcttcatgtactggactgactggggaactcccgccaagatcaagaaagggggcctgaatggtgtggacatctactcgctggtgactgaaaacattcagtggcccaatggcatcaccctagatctcctcagtggccgcctctactgggttgactccaaacttcactccatctcaagcatcgatgtcaacgggggcaaccggaagaccatcttggaggatgaaaagaggctggcccaccccttctccttggccgtctttgaggacaaagtattttggacagatatcatcaacgaagccattttcagtgccaaccgcctcacaggttccgatgtcaacttgttggctgaaaacctactgtccccagaggatatggttctcttccacaacctcacccagccaagagaggctgaggctgcagtggccacccaggagacatccaccgtcaggctaaaggtcagctccacagccgtaaggacacagcacacaaccacccgacctgttcccgacacctcccggctgcctggggccacccctgggctcaccacggtggagatagtgacaatgtctcaccaagctctgggcgacgttgctggcagaggaaatgagaagaagcccagtagcgtgagggctctgtccattgtcctccccatcgtgctcctcgtcttcctttgcctgggggtcttccttctatggaagaactggcggcttaagaacatcaacagcatcaactttgacaaccccgtctatcagaagaccacagaggatgaggtccacatttgccacaaccaggacggctacagctacccctcgagacagatggtcagtctggaggatgacgtggcgtgaacatctgcctggagtcccgtccctgcccagaacccttcctgagacctcgccggccttgttttattcaaagacagagaagaccaaagcattgcctgccagagctttgttttatatatttattcatctgggaggcagaacaggcttcggacagtgcccatgcaatggcttgggttgggattttggtttcttcctttcctcgtgaaggataagagaaacaggcccggggggaccaggatgacacctccatttctctccaggaagttttgagtttctctccaccgtgacacaatcctc

SEQ ID NO: 525 - DNA, 3144 bp, Homo sapiens
  source 1..3144: mol_type = genomic DNA
gccagggtttccagctaggacacagcaggtcgtgatccgggtcgggacactgcctggcagaggctgcgagcatggggccctggggctggaaattgcgctggaccgtcgccttgctcctcgccgcggcggggactgcagtgggcgacagatgcgaaagaaacgagttccagtgccaagacgggaaatgcatctcctacaagtgggtctgcgatggcagcgctgagtgccaggatggctctgatgagtcccaggagacgtgcttgtctgtcacctgcaaatccggggacttcagctgtgggggccgtgtcaaccgctgcattcctcagttctggaggtgcgatggccaagtggactgcgacaacggctcagacgagcaaggctgtccccccaagacgtgctcccaggacgagtttcgctgccacgatgggaagtgcatctctcggcagttcgtctgtgactcagaccgggactgcttggacggctcagacgaggcctcctgcccggtgctcacctgtggtcccgccagcttccagtgcaacagctccacctgcatcccccagctgtgggcctgcgacaacgaccccgactgcgaagatggctcggatgagtggccgcagcgctgtaggggtctttacgtgttccaaggggacagtagcccctgctcggccttcgagttccactgcctaagtggcgagtgcatccactccagctggcgctgtgatggtggccccgactgcaaggacaaatctgacgaggaaaactgcgctgtggccacctgtcgccctgacgaattccagtgctctgatggaaactgcatccatggcagccggcagtgtgaccgggaatatgactgcaaggacatgagcgatgaagttggctgcgttaatgtgacactctgcgagggacccaacaagttcaagtgtcacagcggcgaatgcatcaccctggacaaagtctgcaacatggctagagactgccgggactggtcagatgaacccatcaaagagtgcgggaccaacgaatgcttggacaacaacggcggctgttcccacgtctgcaatgaccttaagatcggctacgagtgcctgtgccccgacggcttccagctggtggcccagcgaagatgcgaagatatcgatgagtgtcaggatcccgacacctgcagccagctctgcgtgaacctggagggtggctacaagtgccagtgtgaggaaggcttccagctggacccccacacgaaggcctgcaaggctgtgggctccatcgcctacctcttcttcaccaaccggcacgaggtcaggaagatgacgctggaccggagcgagtacaccagcctcatccccaacctgaggaacgtggtcgctctggacacggaggtggccagcaatagaatctactggtctgacctgtcccagagaatgatctgcagcacccagcttgacagagcccacggcgtctcttcctatgacaccgtcatcagcagagacatccaggcccccgacgggctggctgtggactggatccacagcaacatctactggaccgactctgtcctgggcactgtctctgttgcggataccaagggcgtgaagaggaaaacgttattcagggagaacggctccaagccaagggccatcgtggtggatcctgttcatggcttcatgtactggactgactggggaactcccgccaagatcaagaaagggggcctgaatggtgtggacatctactcgctggtgactgaaaacattcagtggcccaatggcatcaccctagatctcctcagtggccgcctctactgggttgactccaaacttcactccatctcaagcatcgatgtcaacgggggcaaccggaagaccatcttggaggatgaaaagaggctggcccaccccttctccttggccgtctttgaggacaaagtattttggacagatatcatcaacgaagccattttcagtgccaaccgcctcacaggttccgatgtcaacttgttggctgaaaacctactgtccccagaggatatggttctcttccacaacctcacccagccaagaggagtgaactggtgtgagaggaccaccctgagcaatggcggctgccagtatctgtgcctccctgccccgcagatcaacccccactcgcccaagtttacctgcgcctgcccggacggcatgctgctggccagggacatgaggagctgcctcacagaggctgaggctgcagtggccacccaggagacatccaccgtcaggctaaaggtcagctccacagccgtaaggacacagcacacaaccacccgacctgttcccgacacctcccggctgcctggggccacccctgggctcaccacggtggagatagtgacaatgtctcaccaagctctgggcgacgttgctggcagaggaaatgagaagaagcccagtagcgtgagggctctgtccattgtcctccccatcgtgctcctcgtcttcctttgcctgggggtcttccttctatggaagaactggcggcttaagaacatcaacagcatcaactttgacaaccccgtctatcagaagaccacagaggatgaggtccacatttgccacaaccaggacggctacagctacccctcgatggtcagtctggaggatgacgtggcgtgaacatctgcctggagtcccgtccctgcccagaacccttcctgagacctcgccggccttgttttattcaaagacagagaagaccaaagcattgcctgccagagctttgttttatatatttattcatctgggaggcagaacaggcttcggacagtgcccatgcaatggcttgggttgggattttggtttcttcctttcctcgtgaaggataagagaaacaggcccggggggaccaggatgacacctccatttctctccaggaagttttgagtttctctccaccgtgacacaatcctcaaacatggaagatgaaaggggaggggatgtcaggcccagagaagcaagtggctttcaacacacaacagcagatggcaccaacgggaccccctggccctgcctcatccaccaatctctaagccaaacccctaaactcaggagtcaacgtgtttacctcttctatgcaagccttgctagacagccaggttagcctttgccctgt

SEQ ID NO: 526 - DNA, 3617 bp, Homo sapiens
  source 1..3617: mol_type = genomic DNA
ctcttgcagtgaggtgaagacatttgaaaatcaccccactgcaaactcctccccctgctagaaacctcacattgaaatgctgtaaatgacgtgggccccgagtgcaatcgcgggaagccagggtttccagctaggacacagcaggtcgtgatccgggtcgggacactgcctggcagaggctgcgagcatggggccctggggctggaaattgcgctggaccgtcgccttgctcctcgccgcggcggggactgcagtgggcgacagatgcgaaagaaacgagttccagtgccaagacgggaaatgcatctcctacaagtgggtctgcgatggcagcgctgagtgccaggatggctctgatgagtcccaggagacgtgcttgtctgtcacctgcaaatccggggacttcagctgtgggggccgtgtcaaccgctgcattcctcagttctggaggtgcgatggccaagtggactgcgacaacggctcagacgagcaaggctgtccccccaagacgtgctcccaggacgagtttcgctgccacgatgggaagtgcatctctcggcagttcgtctgtgactcagaccgggactgcttggacggctcagacgaggcctcctgcccggtgctcacctgtggtcccgccagcttccagtgcaacagctccacctgcatcccccagctgtgggcctgcgacaacgaccccgactgcgaagatggctcggatgagtggccgcagcgctgtaggggtctttacgtgttccaaggggacagtagcccctgctcggccttcgagttccactgcctaagtggcgagtgcatccactccagctggcgctgtgatggtggccccgactgcaaggacaaatctgacgaggaaaactgcgctgtggccacctgtcgccctgacgaattccagtgctctgatggaaactgcatccatggcagccggcagtgtgaccgggaatatgactgcaaggacatgagcgatgaagttggctgcgttaatgtgacactctgcgagggacccaacaagttcaagtgtcacagcggcgaatgcatcaccctggacaaagtctgcaacatggctagagactgccgggactggtcagatgaacccatcaaagagtgcgggaccaacgaatgcttggacaacaacggcggctgttcccacgtctgcaatgaccttaagatcggctacgagtgcctgtgccccgacggcttccagctggtggcccagcgaagatgcgaagatatcgatgagtgtcaggatcccgacacctgcagccagctctgcgtgaacctggagggtggctacaagtgccagtgtgaggaaggcttccagctggacccccacacgaaggcctgcaaggctgtgggctccatcgcctacctcttcttcaccaaccggcacgaggtcaggaagatgacgctggaccggagcgagtacaccagcctcatccccaacctgaggaacgtggtcgctctggacacggaggtggccagcaatagaatctactggtctgacctgtcccagagaatgatctgcagcacccagcttgacagagcccacggcgtctcttcctatgacaccgtcatcagcagagacatccaggcccccgacgggctggctgtggactggatccacagcaacatctactggaccgactctgtcctgggcactgtctctgttgcggataccaagggcgtgaagaggaaaacgttattcagggagaacggctccaagccaagggccatcgtggtggatcctgttcatggcttcatgtactggactgactggggaactcccgccaagatcaagaaagggggcctgaatggtgtggacatctactcgctggtgactgaaaacattcagtggcccaatggcatcaccctagatctcctcagtggccgcctctactgggttgactccaaacttcactccatctcaagcatcgatgtcaacgggggcaaccggaagaccatcttggaggatgaaaagaggctggcccaccccttctccttggccgtctttgaggacaaagtattttggacagatatcatcaacgaagccattttcagtgccaaccgcctcacaggttccgatgtcaacttgttggctgaaaacctactgtccccagaggatatggttctcttccacaacctcacccagccaagaggagtgaactggtgtgagaggaccaccctgagcaatggcggctgccagtatctgtgcctccctgccccgcagatcaacccccactcgcccaagtttacctgcgcctgcccggacggcatgctgctggccagggacatgaggagctgcctcacagaggctgaggctgcagtggccacccaggagacatccaccgtcaggctaaaggtcagctccacagccgtaaggacacagcacacaaccacccgacctgttcccgacacctcccggctgcctggggccacccctgggctcaccacggtggagatagtgacaatgtctcaccaagctctgggcgacgttgctggcagaggaaatgagaagaagcccagtagcgtgagggctctgtccattgtcctccccatcgtgctcctcgtcttcctttgcctgggggtcttccttctatggaagaactggcggcttaagaacatcaacagcatcaactttgacaaccccgtctatcagaagaccacagaggatgaggtccacatttgccacaaccaggacggctacagctacccctcgagacagatggtcagtctggaggatgacgtggcgtgaacatctgcctggagtcccgtccctgcccagaacccttcctgagacctcgccggccttgttttattcaaagacagagaagaccaaagcattgcctgccagagctttgttttatatatttattcatctgggaggcagaacaggcttcggacagtgcccatgcaatggcttgggttgggattttggtttcttcctttcctcgtgaaggataagagaaacaggcccggggggaccaggatgacacctccatttctctccaggaagttttgagtttctctccaccgtgacacaatcctcaaacatggaagatgaaaggggaggggatgtcaggcccagagaagcaagtggctttcaacacacaacagcagatggcaccaacgggaccccctggccctgcctcatccaccaatctctaagccaaacccctaaactcaggagtcaacgtgtttacctcttctatgcaagccttgctagacagccaggttagcctttgccctgtcacccccgaatcatgacccacccagtgtctttcgaggtgggtttgtaccttccttaagccaggaaagggattcatggcgtcggaaatgatctggctgaatccgtggtggcaccgagaccaaactcattcaccaaatgatgccacttcccagaggcagagcctgagtcactggtcacccttaatatttattaagtgcctgagacacccggttaccttggccgtgaggacacgtggcctgcacccaggtgtggctgtcaggacaccagcctggtgcccatcctcccgacccctacccacttccattcccgtggtctccttgcactttctcagttcagagttgtacactgtgta

SEQ ID NO: 527 - DNA, 2656 bp, Homo sapiens
  source 1..2656: mol_type = genomic DNA
gtgcaatcgcgggaagccagggtttccagctaggacacagcaggtcgtgatccgggtcgggacactgcctggcagaggctgcgagcatggggccctggggctggaaattgcgctggaccgtcgccttgctcctcgccgcggcggggactgcagtgggcgacagatgcgaaagaaacgacttccagtgcaacagctccacctgcatcccccagctgtgggcctgcgacaacgaccccgactgcgaagatggctcggatgagtggccgcagcgctgtaggggtctttacgtgttccaaggggacagtagcccctgctcggccttcgagttccactgcctaagtggcgagtgcatccactccagctggcgctgtgatggtggccccgactgcaaggacaaatctgacgaggaaaactgcgctgtggccacctgtcgccctgacgaattccagtgctctgatggaaactgcatccatggcagccggcagtgtgaccgggaatatgactgcaaggacatgagcgatgaagttggctgcgttaatgtgacactctgcgagggacccaacaagttcaagtgtcacagcggcgaatgcatcaccctggacaaagtctgcaacatggctagagactgccgggactggtcagatgaacccatcaaagagtgcgggaccaacgaatgcttggacaacaacggcggctgttcccacgtctgcaatgaccttaagatcggctacgagtgcctgtgccccgacggcttccagctggtggcccagcgaagatgcgaagatatcgatgagtgtcaggatcccgacacctgcagccagctctgcgtgaacctggagggtggctacaagtgccagtgtgaggaaggcttccagctggacccccacacgaaggcctgcaaggctgtgggctccatcgcctacctcttcttcaccaaccggcacgaggtcaggaagatgacgctggaccggagcgagtacaccagcctcatccccaacctgaggaacgtggtcgctctggacacggaggtggccagcaatagaatctactggtctgacctgtcccagagaatgatctgcagcacccagcttgacagagcccacggcgtctcttcctatgacaccgtcatcagcagagacatccaggcccccgacgggctggctgtggactggatccacagcaacatctactggaccgactctgtcctgggcactgtctctgttgcggataccaagggcgtgaagaggaaaacgttattcagggagaacggctccaagccaagggccatcgtggtggatcctgttcatggcttcatgtactggactgactggggaactcccgccaagatcaagaaagggggcctgaatggtgtggacatctactcgctggtgactgaaaacattcagtggcccaatggcatcaccctagatctcctcagtggccgcctctactgggttgactccaaacttcactccatctcaagcatcgatgtcaacgggggcaaccggaagaccatcttggaggatgaaaagaggctggcccaccccttctccttggccgtctttgaggacaaagtattttggacagatatcatcaacgaagccattttcagtgccaaccgcctcacaggttccgatgtcaacttgttggctgaaaacctactgtccccagaggatatggttctcttccacaacctcacccagccaagaggagtgaactggtgtgagaggaccaccctgagcaatggcggctgccagtatctgtgcctccctgccccgcagatcaacccccactcgcccaagtttacctgcgcctgcccggacggcatgctgctggccagggacatgaggagctgcctcacagaggctgaggctgcagtggccacccaggagacatccaccgtcaggctaaaggtcagctccacagccgtaaggacacagcacacaaccacccgacctgttcccgacacctcccggctgcctggggccacccctgggctcaccacggtggagatagtgacaatgtctcaccaagctctgggcgacgttgctggcagaggaaatgagaagaagcccagtagcgtgagggctctgtccattgtcctccccatcgtgctcctcgtcttcctttgcctgggggtcttccttctatggaagaactggcggcttaagaacatcaacagcatcaactttgacaaccccgtctatcagaagaccacagaggatgaggtccacatttgccacaaccaggacggctacagctacccctcgagacagatggtcagtctggaggatgacgtggcgtgaacatctgcctggagtcccgtccctgcccagaacccttcctgagacctcgccggccttgttttattcaaagacagagaagaccaaagcattgcctgccagagctttgttttatatatttattcatctgggaggcagaacaggcttcggacagtgcccatgcaatggcttgggttgggattttggtttcttcctttcctcgtgaaggataagagaaacaggcccggggggaccaggatgacacctccatttctctccaggaagttttgagtttctctccaccgtgacacaatcctcaaacatggaagatgaaaggggaggggatgtcaggcccagagaagcaagtggctttc

SEQ ID NO: 528 - DNA, 5337 bp, Homo sapiens
  source 1..5337: mol_type = genomic DNA
aggggaggcctggcgttcctccgcggttcctgtcacaaaggcgacgacaagtcccgggtccccggagccgcctccgcgacatacacgagtcgccctccgttatcctgggccctcctggcgaagtccccggtttccgctgtgctctgtggcgacacctccgtccccaccttgtcctggggggcgccctcgccccaccagccccgatcaagttcacagaggggcccccggccaccctcaaggcctcggttccttacgaggttgaaacgttgcctcagaatctccccgcccctccttggtctgcagccgagatcttcagccacgtgggcgacagatgcgaaagaaacgagttccagtgccaagacgggaaatgcatctcctacaagtgggtctgcgatggcagcgctgagtgccaggatggctctgatgagtcccaggagacgtgcttgtctgtcacctgcaaatccggggacttcagctgtgggggccgtgtcaaccgctgcattcctcagttctggaggtgcgatggccaagtggactgcgacaacggctcagacgagcaaggctgtccccccaagacgtgctcccaggacgagtttcgctgccacgatgggaagtgcatctctcggcagttcgtctgtgactcagaccgggactgcttggacggctcagacgaggcctcctgcccggtgctcacctgtggtcccgccagcttccagtgcaacagctccacctgcatcccccagctgtgggcctgcgacaacgaccccgactgcgaagatggctcggatgagtggccgcagcgctgtaggggtctttacgtgttccaaggggacagtagcccctgctcggccttcgagttccactgcctaagtggcgagtgcatccactccagctggcgctgtgatggtggccccgactgcaaggacaaatctgacgaggaaaactgcgctgtggccacctgtcgccctgacgaattccagtgctctgatggaaactgcatccatggcagccggcagtgtgaccgggaatatgactgcaaggacatgagcgatgaagttggctgcgttaatgtgacactctgcgagggacccaacaagttcaagtgtcacagcggcgaatgcatcaccctggacaaagtctgcaacatggctagagactgccgggactggtcagatgaacccatcaaagagtgcgggaccaacgaatgcttggacaacaacggcggctgttcccacgtctgcaatgaccttaagatcggctacgagtgcctgtgccccgacggcttccagctggtggcccagcgaagatgcgaagatatcgatgagtgtcaggatcccgacacctgcagccagctctgcgtgaacctggagggtggctacaagtgccagtgtgaggaaggcttccagctggacccccacacgaaggcctgcaaggctgtgggctccatcgcctacctcttcttcaccaaccggcacgaggtcaggaagatgacgctggaccggagcgagtacaccagcctcatccccaacctgaggaacgtggtcgctctggacacggaggtggccagcaatagaatctactggtctgacctgtcccagagaatgatctgcagcacccagcttgacagagcccacggcgtctcttcctatgacaccgtcatcagcagagacatccaggcccccgacgggctggctgtggactggatccacagcaacatctactggaccgactctgtcctgggcactgtctctgttgcggataccaagggcgtgaagaggaaaacgttattcagggagaacggctccaagccaagggccatcgtggtggatcctgttcatggcttcatgtactggactgactggggaactcccgccaagatcaagaaagggggcctgaatggtgtggacatctactcgctggtgactgaaaacattcagtggcccaatggcatcaccctagatctcctcagtggccgcctctactgggttgactccaaacttcactccatctcaagcatcgatgtcaacgggggcaaccggaagaccatcttggaggatgaaaagaggctggcccaccccttctccttggccgtctttgaggacaaagtattttggacagatatcatcaacgaagccattttcagtgccaaccgcctcacaggttccgatgtcaacttgttggctgaaaacctactgtccccagaggatatggttctcttccacaacctcacccagccaagaggagtgaactggtgtgagaggaccaccctgagcaatggcggctgccagtatctgtgcctccctgccccgcagatcaacccccactcgcccaagtttacctgcgcctgcccggacggcatgctgctggccagggacatgaggagctgcctcacagaggctgaggctgcagtggccacccaggagacatccaccgtcaggctaaaggtcagctccacagccgtaaggacacagcacacaaccacccgacctgttcccgacacctcccggctgcctggggccacccctgggctcaccacggtggagatagtgacaatgtctcaccaagctctgggcgacgttgctggcagaggaaatgagaagaagcccagtagcgtgagggctctgtccattgtcctccccatcgtgctcctcgtcttcctttgcctgggggtcttccttctatggaagaactggcggcttaagaacatcaacagcatcaactttgacaaccccgtctatcagaagaccacagaggatgaggtccacatttgccacaaccaggacggctacagctacccctcgagacagatggtcagtctggaggatgacgtggcgtgaacatctgcctggagtcccgtccctgcccagaacccttcctgagacctcgccggccttgttttattcaaagacagagaagaccaaagcattgcctgccagagctttgttttatatatttattcatctgggaggcagaacaggcttcggacagtgcccatgcaatggcttgggttgggattttggtttcttcctttcctcgtgaaggataagagaaacaggcccggggggaccaggatgacacctccatttctctccaggaagttttgagtttctctccaccgtgacacaatcctcaaacatggaagatgaaaggggaggggatgtcaggcccagagaagcaagtggctttcaacacacaacagcagatggcaccaacgggaccccctggccctgcctcatccaccaatctctaagccaaacccctaaactcaggagtcaacgtgtttacctcttctatgcaagccttgctagacagccaggttagcctttgccctgtcacccccgaatcatgacccacccagtgtctttcgaggtgggtttgtaccttccttaagccaggaaagggattcatggcgtcggaaatgatctggctgaatccgtggtggcaccgagaccaaactcattcaccaaatgatgccacttcccagaggcagagcctgagtcactggtcacccttaatatttattaagtgcctgagacacccggttaccttggccgtgaggacacgtggcctgcacccaggtgtggctgtcaggacaccagcctggtgcccatcctcccgacccctacccacttccattcccgtggtctccttgcactttctcagttcagagttgtacactgtgtacatttggcatttgtgttattattttgcactgttttctgtcgtgtgtgttgggatgggatcccaggccagggaaagcccgtgtcaatgaatgccggggacagagaggggcaggttgaccgggacttcaaagccgtgatcgtgaatatcgagaactgccattgtcgtctttatgtccgcccacctagtgcttccacttctatgcaaatgcctccaagccattcacttccccaatcttgtcgttgatgggtatgtgtttaaaacatgcacggtgaggccgggcgcagtggctcacgcctgtaatcccagcactttgggaggccgaggcgggtggatcatgaggtcaggagatcgagaccatcctggctaacacgtgaaaccccgtctctactaaaaatacaaaaaattagccgggcgtggtggcgggcacctgtagtcccagctactcgggaggctgaggcaggagaatggtgtgaacccgggaagcggagcttgcagtgagccgagattgcgccactgcagtccgcagtctggcctgggcgacagagcgagactccgtctcaaaaaaaaaaaacaaaaaaaaaccatgcatggtgcatcagcagcccatggcctctggccaggcatggcgaggctgaggtgggaggatggtttgagctcaggcatttgaggctgtcgtgagctatgattatgccactgctttccagcctgggcaacatagtaagaccccatctcttaaaaaatgaatttggccagacacaggtgcctcacgcctgtaatcccagcactttgggaggctgagctggatcacttgagttcaggagttggagaccaggcctgagcaacaaagcgagatcccatctctacaaaaaccaaaaagttaaaaatcagctgggtacggtggcacgtgcctgtgatcccagctacttgggaggctgaggcaggaggatcgcctgagcccaggaggtggaggttgcagtgagccatgatcgagccactgcactccagcctgggcaacagatgaagaccctatttcagaaatacaactataaaaaaataaataaatcctccagtctggatcgtttgacgggacttcaggttctttctgaaatcgccgtgttactgttgcactgatgtccggagagacagtgacagcctccgtcagactcccgcgtgaagatgtcacaagggattggcaattgtccccagggacaaaacactgtgtcccccccagtgcagggaaccgtgataagcctttctggtttcggagcacgtaaatgcgtccctgtacagatagtggggattttttgttatgtttgcactttgtatattggttgaaactgttatcacttatatatatatatatacacacatatatataaaatctatttatttttgcaaaccctggttgctgtatttgttcagtgactattctcggggccctgtgtagggggttattgcctctgaaatgcctcttctttatgtacaaagattatttgcacgaactggactgtgtgcaacgctttttgggagaatgatgtccccgttgtatgtatgagtggcttctgggagatgggtgtcactttttaaaccactgtatagaaggtttttgtagcctgaatgtcttactgtgatcaattaaatttcttaaatgaa

SEQ ID NO: 529 - DNA, 523 bp, Homo sapiens
  source 1..523: mol_type = genomic DNA
gcaccaaggatggagatgctccaggggctgctgctgttgctgctgctgagcatgggcggggcatgggcatccagggagccgcttcggccatggtgccaccccatcaatgccatcctggctgtcgagaaggagggctgcccagtgtgcatcaccgtcaacaccaccatctgtgccggctactgccccaccatgatgcgcgtgctgcaggcggtcctgccgcccctgcctcaggtggtgtgcacctaccgtgatgtgcgcttcgagtccatccggctccctggctgcccgcgtggtgtggaccccgtggtctccttccctgtggctctcagctgtcgctgtggaccctgccgccgcagcacctctgactgtgggggtcccaaagaccaccccttgacctgtgaccacccccaactctcaggcctcctcttcctctaaagaccctccccgcagccttccaagtccatcccgactcctggagccctgacaccccgatcctcccacaataaaggcttctcaatccgca

SEQ ID NO: 530 - DNA, 583 bp, Homo sapiens
  source 1..583: mol_type = genomic DNA
cgggaagggtctctgggtctttgtgggtggtgtaccacgcgggatgggaaggccaggactcggggctgcggtctcagacctgggtgaagcagtgtccttgtcccaggggctgctgctgttgctgctgctgagcatgggcggggcatgggcatccagggagccgcttcggccatggtgccaccccatcaatgccatcctggctgtcgagaaggagggctgcccagtgtgcatcaccgtcaacaccaccatctgtgccggctactgccccaccatgatgcgcgtgctgcaggcggtcctgccgcccctgcctcaggtggtgtgcacctaccgtgatgtgcgcttcgagtccatccggctccctggctgcccgcgtggtgtggaccccgtggtctccttccctgtggctctcagctgtcgctgtggaccctgccgccgcagcacctctgactgtgggggtcccaaagaccaccccttgacctgtgaccacccccaacaggcctcctcttcctctaaagaccctccccgcagccttccaagtccatcccgactcctggagcccgacaccccgatcctcccacaataa

SEQ ID NO: 531 - DNA, 599 bp, Homo sapiens
  source 1..599: mol_type = genomic DNA
cggccagggcgccgacagcccgacctcaccaggagaacatgcagctcggcactgggctcctgctggccgccgtcctgagcctgcagctggctgcagccgaagccatatggtgtcaccagtgcacgggcttcggagggtgctcccatggatccagatgcctgagggactccacccactgtgtcaccactgccacccgggtcctcagcaacaccgaggatttgcctctggtcaccaagatgtgccacataggctgccccgatatccccagcctgggcctgggcccctacgtatccatcgcttgctgccagaccagcctctgcaaccatgactgacggctgccctcctccaggcccccggacgctcagcccccacagcccccacagcctggcgccagggctcacagctgcccctccctcgagactggccagcccacctctcccggcctctgcagccaccgtccagcaccgcttgtcctagggaagtcctgcgtggagtcttgcctcaatctgctgccgtccaagcctggggcccatcgtgcctgccgccccttcaggtcccgacctccccacaataaaatgtgattggatcgtgtggtacaa

SEQ ID NO: 532 - DNA, 3170 bp, Homo sapiens
  source 1..3170: mol_type = genomic DNA
ggccggggaaccccaggaggaagctgctgagccatgggcgcctacgcgcgggcttcgggggtctgcgctcgcggctgcctggactcagcaggcccctggaccatgtcccgcgccctgcggccaccgctcccgcctctctgctttttccttttgttgctggcggctgccggtgctcgggccgggggatacgagacatgccccacagtgcagccgaacatgctgaacgtgcacctgctgcctcacacacatgatgacgtgggctggctcaaaaccgtggaccagtacttttatggaatcaagaatgacatccagcacgccggtgtgcagtacatcctggactcggtcatctctgccttgctggcagatcccacccgtcgcttcatttacgtggagattgccttcttctcccgttggtggcaccagcagacaaatgccacacaggaagtcgtgcgagaccttgtgcgccaggggcgcctggagttcgccaatggtggctgggtgatgaacgatgaggcagccacccactacggtgccatcgtggaccagatgacacttgggctgcgctttctggaggacacatttggcaatgatgggcgaccccgtgtggcctggcacattgaccccttcggccactctcgggagcaggcctcgctgtttgcgcagatgggcttcgacggcttcttctttgggcgccttgattatcaagataagtgggtacggatgcagaagctggagatggagcaggtgtggcgggccagcaccagcctgaagcccccgaccgcggacctcttcactggtgtgcttcccaatggttacaacccgccaaggaatctgtgctgggatgtgctgtgtgtcgatcagccgctggtggaggaccctcgcagccccgagtacaacgccaaggagctggtcgattacttcctaaatgtggccactgcccagggccggtattaccgcaccaaccacactgtgatgaccatgggctcggacttccaatatgagaatgccaacatgtggttcaagaaccttgacaagctcatccggctggtaaatgcgcaggcaaaaggaagcagtgtccatgttctctactccacccccgcttgttacctctgggagctgaacaaggccaacctcacctggtcagtgaaacatgacgacttcttcccttacgcggatggcccccaccagttctggaccggttacttttccagtcggccggccctcaaacgctacgagcgcctcagctacaacttcctgcaggtgtgcaaccagctggaggcgctggtgggcctggcggccaacgtgggaccctatggctccggagacagtgcacccctcaatgaggcgatggctgtgctccagcatcacgacgccgtcagcggcacctcccgccagcacgtggccaacgactacgcgcgccagcttgcggcaggctgggggccttgcgaggttcttctgagcaacgcgctggcgcggctcagaggcttcaaagatcacttcaccttttgccaacagctaaacatcagcatctgcccgctcagccagacggcggcgcgcttccaggtcatcgtttataatcccctggggcggaaggtgaattggatggtacggctgccggtcagcgaaggcgttttcgttgtgaaggaccccaatggcaggacagtgcccagcgatgtggtaatatttcccagctcagacagccaggcgcaccctccggagctgctgttctcagcctcactgcccgccctgggcttcagcacctattcagtagcccaggtgcctcgctggaagccccaggcccgcgcaccacagcccatccccagaagatcctggtcccctgctttaaccatcgaaaatgagcacatccgggcaacgtttgatcctgacacagggctgttgatggagattatgaacatgaatcagcaactcctgctgcctgttcgccagaccttcttctggtacaacgccagtataggtgacaacgaaagtgaccaggcctcaggtgcctacatcttcagacccaaccaacagaaaccgctgcctgtgagccgctgggctcagatccacctggtgaagacacccttggtgcaggaggtgcaccagaacttctcagcttggtgttcccaggtggttcgcctgtacccaggacagcggcacctggagctagagtggtcggtggggccgatacctgtgggcgacacctgggggaaggaggtcatcagccgttttgacacaccgctggagacaaagggacgcttctacacagacagcaatggccgggagatcctggagaggaggcgggattatcgacccacctggaaactgaaccagacggagcccgtggcaggaaactactatccagtcaacacccggatttacatcacggatggaaacatgcagctgactgtgctgactgaccgctcccaggggggcagcagcctgagagatggctcgctggagctcatggtgcaccgaaggctgctgaaggacgatggacgcggagtatcggagccactaatggagaacgggtcgggggcgtgggtgcgagggcgccacctggtgctgctggacacagcccaggctgcagccgccggacaccggctcctggcggagcaggaggtcctggcccctcaggtggtgctggccccgggtggcggcgccgcctacaatctcggggctcctccgcgcacgcagttctcagggctgcgcagggacctgccgccctcggtgcacctgctcacgctggccagctggggccccgaaatggtgctgctgcgcttggagcaccagtttgccgtaggagaggattccggacgtaacctgagcgcccccgttaccttgaacttgagggacctgttctccaccttcaccatcacccgcctgcaggagaccacgctggtggccaaccagctccgcgaggcagcctccaggctcaagtggacaacaaacacaggccccacaccccaccaaactccgtaccagctggacccggccaacatcacgctggaacccatggaaatccgcactttcctggcctcagttcaatggaaggaggtggatggttaggtctgctgggatgggccctccaagcccaagcctcctgctccgggggcagaccagactctgactctcctcttggggctgctgccattaaaacgctactactaaga

SEQ ID NO: 533 - DNA, 560 bp, Homo sapiens
  source 1..560: mol_type = genomic DNA
aagaggaggcggagacagctatggggttcttctgagcaacgcgctggcgcggctcagaggcttcaaagatcacttcaccttttgccaacagctaaacatcagcatctgcccgctcagccagacggcggcgcgcttccaggtcatcgtttataatcccctggggcggaaggtgaattggatggtacggctgccggtcagcgaaggcgttttcgttgtgaaggaccccaatggcaggacagtgcccagcgatgtggtaatatttcccagctcagacagccaggcgcaccctccggagctgctgttctcagcctcactgcccgccctgggcttcagcacctattcagtagcccaggtgcctcgctggaagccccaggcccgcgcaccacagcccatccccagaagatcctggtcccctgctttaaccatcgaaaatgagcacatccgggcaacgtttgatcctgacacagggctgttgatggagattatgaacatgaatcagcaactcctgctgcctgttcgccagaccttcttctggtacaacgccagtataggtgacaacg

SEQ ID NO: 534 - DNA, 3184 bp, Homo sapiens
  source 1..3184: mol_type = genomic DNA
ctttccagggccggggaaccccaggaggaagctgctgagccatgggcgcctacgcgcgggcttcgggggtctgcgctcgcggctgcctggactcagcaggcccctggaccatgtcccgcgccctgcggccaccgctcccgcctctctgctttttccttttgttgctggcggctgccggtgctcgggccgggggatacgagacatgccccacagtgcagccgaacatgctgaacgtgcacctgctgcctcacacacatgatgacgtgggctggctcaaaaccgtggaccagtacttttatggaatcaagaatgacatccagcacgccggtgtgcagtacatcctggactcggtcatctctgccttgctggcagatcccacccgtcgcttcatttacgtggagattgccttcttctcccgttggtggcaccagcagacaaatgccacacaggaagtcgtgcgagaccttgtgcgccaggggcgcctggagttcgccaatggtggctgggtgatgaacgatgaggcagccacccactacggtgccatcgtggaccagatgacacttgggctgcgctttctggaggacacatttggcaatgatgggcgaccccgtgtggcctggcacattgaccccttcggccactctcgggagcaggcctcgctgtttgcgcagatgggcttcgacggcttcttctttgggcgccttgattatcaagataagtgggtacggatgcagaagctggagatggagcaggtgtggcgggccagcaccagcctgaagcccccgaccgcggacctcttcactggtgtgcttcccaatggttacaacccgccaaggaatctgtgctgggatgtgctgtgtgtcgatcagccgctggtggaggaccctcgcagccccgagtacaacgccaaggagctggtcgattacttcctaaatgtggccactgcccagggccggtattaccgcaccaaccacactgtgatgaccatgggctcggacttccaatatgagaatgccaacatgtggttcaagaaccttgacaagctcatccggctggtaaatgcgcagcaggcaaaaggaagcagtgtccatgttctctactccacccccgcttgttacctctgggagctgaacaaggccaacctcacctggtcagtgaaacatgacgacttcttcccttacgcggatggcccccaccagttctggaccggttacttttccagtcggccggccctcaaacgctacgagcgcctcagctacaacttcctgcaggtgtgcaaccagctggaggcgctggtgggcctggcggccaacgtgggaccctatggctccggagacagtgcacccctcaatgaggcgatggctgtgctccagcatcacgacgccgtcagcggcacctcccgccagcacgtggccaacgactacgcgcgccagcttgcggcaggctgggggccttgcgaggttcttctgagcaacgcgctggcgcggctcagaggcttcaaagatcacttcaccttttgccaacagctaaacatcagcatctgcccgctcagccagacggcggcgcgcttccaggtcatcgtttataatcccctggggcggaaggtgaattggatggtacggctgccggtcagcgaaggcgttttcgttgtgaaggaccccaatggcaggacagtgcccagcgatgtggtaatatttcccagctcagacagccaggcgcaccctccggagctgctgttctcagcctcactgcccgccctgggcttcagcacctattcagtagcccaggtgcctcgctggaagccccaggcccgcgcaccacagcccatccccagaagatcctggtcccctgctttaaccatcgaaaatgagcacatccgggcaacgtttgatcctgacacagggctgttgatggagattatgaacatgaatcagcaactcctgctgcctgttcgccagaccttcttctggtacaacgccagtataggtgacaacgaaagtgaccaggcctcaggtgcctacatcttcagacccaaccaacagaaaccgctgcctgtgagccgctgggctcagatccacctggtgaagacacccttggtgcaggaggtgcaccagaacttctcagcttggtgttcccaggtggttcgcctgtacccaggacagcggcacctggagctagagtggtcggtggggccgatacctgtgggcgacacctgggggaaggaggtcatcagccgttttgacacaccgctggagacaaagggacgcttctacacagacagcaatggccgggagatcctggagaggaggcgggattatcgacccacctggaaactgaaccagacggagcccgtggcaggaaactactatccagtcaacacccggatttacatcacggatggaaacatgcagctgactgtgctgactgaccgctcccaggggggcagcagcctgagagatggctcgctggagctcatggtgcaccgaaggctgctgaaggacgatggacgcggagtatcggagccactaatggagaacgggtcgggggcgtgggtgcgagggcgccacctggtgctgctggacacagcccaggctgcagccgccggacaccggctcctggcggagcaggaggtcctggcccctcaggtggtgctggccccgggtggcggcgccgcctacaatctcggggctcctccgcgcacgcagttctcagggctgcgcagggacctgccgccctcggtgcacctgctcacgctggccagctggggccccgaaatggtgctgctgcgcttggagcaccagtttgccgtaggagaggattccggacgtaacctgagcgcccccgttaccttgaacttgagggacctgttctccaccttcaccatcacccgcctgcaggagaccacgctggtggccaaccagctccgcgaggcagcctccaggctcaagtggacaacaaacacaggccccacaccccaccaaactccgtaccagctggacccggccaacatcacgctggaacccatggaaatccgcactttcctggcctcagttcaatggaaggaggtggatggttaggtctgctgggatgggccctccaagcccaagcctcctgctccgggggcagaccagactctgactctcctcttggggctgctgccattaaaacgctactactaagactc

SEQ ID NO: 535 - DNA, 3147 bp, Homo sapiens
  source 1..3147: mol_type = genomic DNA
ctttccagggccggggaaccccaggaggaagctgctgagccatgggcgcctacgcgcgggcttcgggggtctgcgctcgcggctgcctggactcagcaggcccctggaccatgtcccgcgccctgcggccaccgctcccgcctctctggccgggggatacgagacatgccccacagtgcagccgaacatgctgaacgtgcacctgctgcctcacacacatgatgacgtgggctggctcaaaaccgtggaccagtacttttatggaatcaagaatgacatccagcacgccggtgtgcagtacatcctggactcggtcatctctgccttgctggcagatcccacccgtcgcttcatttacgtggagattgccttcttctcccgttggtggcaccagcagacaaatgccacacaggaagtcgtgcgagaccttgtgcgccaggggcgcctggagttcgccaatggtggctgggtgatgaacgatgaggcagccacccactacggtgccatcgtggaccagatgacacttgggctgcgctttctggaggacacatttggcaatgatgggcgaccccgtgtggcctggcacattgaccccttcggccactctcgggagcaggcctcgctgtttgcgcagatgggcttcgacggcttcttctttgggcgccttgattatcaagataagtgggtacggatgcagaagctggagatggagcaggtgtggcgggccagcaccagcctgaagcccccgaccgcggacctcttcactggtgtgcttcccaatggttacaacccgccaaggaatctgtgctgggatgtgctgtgtgtcgatcagccgctggtggaggaccctcgcagccccgagtacaacgccaaggagctggtcgattacttcctaaatgtggccactgcccagggccggtattaccgcaccaaccacactgtgatgaccatgggctcggacttccaatatgagaatgccaacatgtggttcaagaaccttgacaagctcatccggctggtaaatgcgcagcaggcaaaaggaagcagtgtccatgttctctactccacccccgcttgttacctctgggagctgaacaaggccaacctcacctggtcagtgaaacatgacgacttcttcccttacgcggatggcccccaccagttctggaccggttacttttccagtcggccggccctcaaacgctacgagcgcctcagctacaacttcctgcaggtgtgcaaccagctggaggcgctggtgggcctggcggccaacgtgggaccctatggctccggagacagtgcacccctcaatgaggcgatggctgtgctccagcatcacgacgccgtcagcggcacctcccgccagcacgtggccaacgactacgcgcgccagcttgcggcaggctgggggccttgcgaggttcttctgagcaacgcgctggcgcggctcagaggcttcaaagatcacttcaccttttgccaacagctaaacatcagcatctgcccgctcagccagacggcggcgcgcttccaggtcatcgtttataatcccctggggcggaaggtgaattggatggtacggctgccggtcagcgaaggcgttttcgttgtgaaggaccccaatggcaggacagtgcccagcgatgtggtaatatttcccagctcagacagccaggcgcaccctccggagctgctgttctcagcctcactgcccgccctgggcttcagcacctattcagtagcccaggtgcctcgctggaagccccaggcccgcgcaccacagcccatccccagaagatcctggtcccctgctttaaccatcgaaaatgagcacatccgggcaacgtttgatcctgacacagggctgttgatggagattatgaacatgaatcagcaactcctgctgcctgttcgccagaccttcttctggtacaacgccagtataggtgacaacgaaagtgaccaggcctcaggtgcctacatcttcagacccaaccaacagaaaccgctgcctgtgagccgctgggctcagatccacctggtgaagacacccttggtgcaggaggtgcaccagaacttctcagcttggtgttcccaggtggttcgcctgtacccaggacagcggcacctggagctagagtggtcggtggggccgatacctgtgggcgacacctgggggaaggaggtcatcagccgttttgacacaccgctggagacaaagggacgcttctacacagacagcaatggccgggagatcctggagaggaggcgggattatcgacccacctggaaactgaaccagacggagcccgtggcaggaaactactatccagtcaacacccggatttacatcacggatggaaacatgcagctgactgtgctgactgaccgctcccaggggggcagcagcctgagagatggctcgctggagctcatggtgcaccgaaggctgctgaaggacgatggacgcggagtatcggagccactaatggagaacgggtcgggggcgtgggtgcgagggcgccacctggtgctgctggacacagcccaggctgcagccgccggacaccggctcctggcggagcaggaggtcctggcccctcaggtggtgctggccccgggtggcggcgccgcctacaatctcggggctcctccgcgcacgcagttctcagggctgcgcagggacctgccgccctcggtgcacctgctcacgctggccagctggggccccgaaatggtgctgctgcgcttggagcaccagtttgccgtaggagaggattccggacgtaacctgagcgcccccgttaccttgaacttgagggacctgttctccaccttcaccatcacccgcctgcaggagaccacgctggtggccaaccagctccgcgaggcagcctccaggctcaagtggacaacaaacacaggccccacaccccaccaaactccgtaccagctggacccggccaacatcacgctggaacccatggaaatccgcactttcctggcctcagttcaatggaaggaggtggatggttaggtctgctgggatgggccctccaagcccaagcctcctgctccgggggcagaccagactctgactctcctcttggggctgctgccattaaaacgctactactaagactc

SEQ ID NO: 536 - DNA, 3169 bp, Homo sapiens
  source 1..3169: mol_type = genomic DNA
tccaaggcggccccggcgctggggctgcgcggcaggcggagcggccgcgggcttgggggcttcgccggggccgggcggccggcgcccccggctgctcccgccgccgcccggacccgcgccccgccggggcagcggtggtgagagccccgactccccggacgccgcccgccgtgccatggggttcccggccgcggcgctgctctgcgcgctgtgctgcggcctcctggccccggctgcccgcgccggctactccgaggagcgctgcagctggaggggcagcggcctcacccaggagcccggcagcgtggggcagctggccctggcctgtgcggagggcgcggttgagtggctgtacccggctggggcgctgcgcctgaccctgggcggccccgatcccagagcgcggcccggcatcgcctgtctgcggccggtgcggcccttcgcgggcgcccaggtcttcgcggagcgcgcagggggcgccctggagctgctgctggccgagggcccgggcccggcagggggccgctgcgtgcgctggggtccccgcgagcgccgggccctcttcctgcaggccacgccgcaccaggacatcagccgccgcgtggccgccttccgctttgagctgcgcgaggacgggcgccccgagctgcccccgcaggcccacggtctcggcgtagacggtgcctgcaggccctgcagcgacgctgagctgctcctggccgcatgcaccagcgacttcgtaattcacgggatcatccatggggtcacccatgacgtggagctgcaggagtctgtcatcactgtggtggccgcccgtgtcctccgccagacaccgccgctgttccaggcggggcgatccggggaccaggggctgacctccattcgtaccccactgcgctgtggcgtccacccgggcccaggcaccttcctcttcatgggctggagccgctttggggaggcccggctgggctgtgccccacgattccaggagttccgccgtgcctacgaggctgcccgtgctgcccacctccacccctgcgaggtggcgctgcactgaggggctgggtgctggggaggggctggtaggagggagggtgggcccactgctttggaggtgatgggactatcaataagaactctgttcacgcaagctgctgtggacctggtctcctgtgtccagcccagccttgggcctgcctcgcagctgtgaggatggctccaattcctgcctcctggcgggagactgaggctcaggggaatggtatcttgttcaagaccatttggcaactgagagggagagcagatgtcaggaggagctacacccacattccggggaggggccgctgctgggtggggggcacgtggggacctgcactcatgcaagcttctgctctgctgcacccaccagccccgtccttgcccgcacccttgcctgcttccctggctggctcccacttgcctcccgtgccaggtgcttctggggctcagcaggagaggaaaggggcagaggggcatagggtccctcgggtacggtgggggcaggcgggcgcacagcgctccggctctgagccaggcctgtgagggaaggggctgcaggctggcagggtgccgacttcccccatggctgctgtgagcccgcagagtcatccttggccccgtcccgcccttggggaagaatgggcccctctgtcctcaggccccttcgacgtgctgagcatccagacgtggcgaggagcccgaagggtgtggggtcccctctgcagggtcctgcttgttgcctgtttccggcgggcggggtgcacaatggggtctctaaggaccgtttcccgccactggccccattgtcactgtctccgccttcctcctcggcctttcagccgcataaagggccagtgaggtttgggacagccacagcccaaggctccgaggctaaaagcccctgggtgggggtgttccaggacacctggccctgtgtgagctgcctcctctcaccccaacccctcggatcctgggaaagagacagccatggctcaagggccagggacccctgggctgagccccagaaatggctttccattctcgcctgggccggggtgggggtggaggccagaggccctgcccaggcagatgaagcccccagctttcaagggggaaactgaggctgtgtgagggacacagctgtgcagggcccacaaacacggtcctttctctaggttagcggatgcagatgcctgatgagtgccatgccctctgtggacacctggggaggggggtcacctccagcgccgccctgggacttccactgcacgtgcaagagacttaccctttcacacagatcacctgcctgccgcagggctgatgaggatgggtgaggagcgcagccactgggtgtcatgcactgtgggggttctcccaccttctgcccctcctcaggttccttgctgcttctctcctctcccaactgtggcacgctgagggctcaggcacaggaccgctcctctggggcagcctccaataacccttggacaacctccactttttcatcttcagccctgaccactccctggggcccatagccttacatccatctgcccccagcccaaacacttctgcaaacactagaaaaggaggtagcccgtgtgccctcctgcaccgcctcctccactcctgtcttggagaggctttcccgtgggccgagcaacccccttacctttggcacttgccctgattctctggccagcttcctacaacctctccttttcagccacacccaagtccacctgttcacaaacaccctgggctgggccctggccgaaccctggcttctacctacctgtctcaggaagtgcctgagccttgcacctacagaccctcccagagaaagccctggctttgcaaccagctgtcttctcatgagacacagggccacaggagcaccacggtgcccaaatgggtcttggagcattagaccaggggcttcatgcctgccctggggacaggtggccaaagtggcatgggagatagggagacagtgtgggtgagcaggtgggcaggagctacaggagcctggggcctgtggatcacagacaccgccaggcaagtgccagttcacacaggtacaggtggctgcagagtgcccaaaggccaagcagcagagtgcctggtgtgg

SEQ ID NO: 537 - DNA, 1103 bp, Homo sapiens
  source 1..1103: mol_type = genomic DNA
cgggcttgggggcttcgccggggccgggcggccggcgcccccggctgctcccgccgccgcccggacccgcgccccgccggggcagcggtggtgagagccccgactccccggacgccgcccgccgtgccatggggttcccggccgcggcgctgctctgcgcgctgtgctgcggcctcctggccccggctgcccgcgccggctactccgaggagcgctgcagctggaggggcagcggcctcacccaggagcccggcagcgtggggcagctggccctggcctgtgcggagggcgcggttgagtggctgtacccggctggggcgctgcgcctgaccctgggcggccccgatcccagagcgcggcccggcatcgcctgtctgcggccggtgcggcccttcgcgggcgcccaggtcttcgcggagcgcgcagggggcgccctggagctgctgctggccgagggcccgggcccggcagggggccgctgcgtgcgctggggtccccgcgagcgccgggccctcttcctgcaggccacgccgcaccaggacatcagccgccgcgtggccgccttccgctttgagctgcgcgaggacgggcgccccgagctgcccccgcaggcccacggtctcggcgtagacggtgcctgcaggccctgcagcgacgctgagctgctcctggccgcatgcaccagcgacttcgtaattcacgggatcatccatggggtcacccatgacgtggagctgcaggagtctgtcatcactgtggtggccgcccgtgtcctccgccagacaccgccgctgttccaggcggggcgatccggggaccaggggctgacctccattcgtaccccactgcgctgtggcgtccacccgggcccaggcaccttcctcttcatgggctggagccgctttggggaggcccggctgggctgtgccccacgattccaggagttccgccgtgcctacgaggctgcccgtgctgcccacctccacccctgcgaggtggcgctgcactgaggggctgggtgctggggaggggctggtaggagggagggtgggcccactgctttggaggtgatgggactatcaataagaactctgttcacgcaa

SEQ ID NO: 538 - DNA, 3749 bp, Homo sapiens
  source 1..3749: mol_type = genomic DNA
cctggctgtgtggatgtctgacaggtgaggcgggggacgcagaagtgcagccgccctctcccacagcggagtccaaaacaggcctaccagtcagttcttatttctattgggtgtttccatgctccaccatgttaagagctaagaatcagctttttttactttcacctcattacctgaggcaggtaaaagaatcatcaggctccaggctcatacagcaacgacttctacaccagcaacagccccttcacccagaatgggctgccctggctaaaaagcagctgaaaggcaaaaacccagaagacctaatatggcacaccccggaagggatctctataaaacccttgtattccaagagagatactatggacttacctgaagaacttccaggagtgaagccattcacacgtggaccatatcctaccatgtatacctttaggccctggaccatccgccagtatgctggttttagtactgtggaagaaagcaataagttctataaggacaacattaaggctggtcagcagggattatcagttgcctttgatctggcgacacatcgtggctatgattcagacaaccctcgagttcgtggtgatgttggaatggctggagttgctattgacactgtggaagataccaaaattctttttgatggaattcctttagaaaaaatgtcagtttccatgactatgaatggagcagttattccagttcttgcaaattttatagtaactggagaagaacaaggtgtacctaaagagaagcttactggtaccatccaaaatgatatactaaaggaatttatggttcgaaatacatacatttttcctccagaaccatccatgaaaattattgctgacatatttgaatatacagcaaagcacatgccaaaatttaattcaatttcaattagtggataccatatgcaggaagcaggggctgatgccattctggagctggcctatactttagcagatggattggagtactctagaactggactccaggctggcctgacaattgatgaatttgcaccaaggttgtctttcttctggggaattggaatgaatttctatatggaaatagcaaagatgagagctggtagaagactctgggctcacttaatagagaaaatgtttcagcctaaaaactcaaaatctcttcttctaagagcacactgtcagacatctggatggtcacttactgagcaggatccctacaataatattgtccgtactgcaatagaagcaatggcagcagtatttggagggactcagtctttgcacacaaattcttttgatgaagctttgggtttgccaactgtgaaaagtgctcgaattgccaggaacacacaaatcatcattcaagaagaatctgggattcccaaagtggctgatccttggggaggttcttacatgatggaatgtctcacaaatgatgtttatgatgctgctttaaagctcattaatgaaattgaagaaatgggtggaatggccaaagctgtagctgagggaatacctaaacttcgaattgaagaatgtgctgcccgaagacaagctagaatagattctggttctgaagtaattgttggagtaaataagtaccagttggaaaaagaagacgctgtagaagttctggcaattgataatacttcagtgcgaaacaggcagattgaaaaacttaagaagatcaaatccagcagggatcaagctttggctgaacgttgtcttgctgcactaaccgaatgtgctgctagcggagatggaaatatcctggctcttgcagtggatgcatctcgggcaagatgtacagtgggagaaatcacagatgccctgaaaaaggtatttggtgaacataaagcgaatgatcgaatggtgagtggagcatatcgccaggaatttggagaaagtaaagagataacatctgctatcaagagggttcataaattcatggaacgtgaaggtcgcagacctcgtcttcttgtagcaaaaatgggacaagatggccatgacagaggagcaaaagttattgctacaggatttgctgatcttggttttgatgtggacataggccctcttttccagactcctcgtgaagtggcccagcaggctgtggatgcggatgtgcatgctgtgggcataagcaccctcgctgctggtcataaaaccctagttcctgaactcatcaaagaacttaactcccttggacggccagatattcttgtcatgtgtggaggggtgataccacctcaggattatgaatttctgtttgaagttggtgtttccaatgtatttggtcctgggactcgaattccaaaggctgccgttcaggtgcttgatgatattgagaagtgtttggaaaagaagcagcaatctgtataatatcctctttttgttttagcttttgtctaaaatattattttagttatgatcaaagaagagagtaaagctatgtcttcaatttaatttcaatacctgatttgtactttccttgaaagctttactttaaaataccttacttataggcctggtgtcatgctataagtatgtacatacagtttcacttcaaaaataaaaaaaaaatccctaaaaactctctatactctctataacaatactttatcaagaactctggacaatggtattatttttaaaaatcatggtgatgtatttattagaatgtttcttataaatctgtttactttttatattaagaattaaactgtacctaaaaaaactctgactattcccatttgtcagtttagcattacattgtcttgagcaccagaaaataaaatccatatattaataaaaacctatcttgaaaaactagtggagtgtatttacgtggcaaaagagattttgggaggagtcctcagccaaattctaccagaatcaccttaataaaagaagtattaaaatcaagcacagcaggttggaatatggggaatttgacagtatatttcttcaagtctgagtttactttcttcctgatcatgaccatctgaccttgttatttctgggcttggctcaagaccaaggagagtggatgttgatgaacattcctttaaataaaagtgcttaggttgtagttatggctttgtctagaatggtgatgtcaactgtgagtgtaggtctgtgatatagaaagaattcaactttccagatctagaaagatgctaccttgcatagatttgctccttaaacataaattgcaaaaataaaaatatcacagagaacacctgtactttgcttactgaaagatttgctcactaaagaaggaaagttgccatttacctgtttaacaaatctgcacatcctgcacatgttccccagaatgtaaaataaaaaaagtttaaataaaaaaggaaagttgtcctttattgttaacatgatccattacatgaatataacataaataattatcttttttaataaatttctattgtattagatcagagagcagtcttttggaaagtattatagatacattactgtagaatttacaaactcattgtaatacaatgtatttaattttcagaatatgattatctgaatggtattgtcatgattattgttcccattttcagatgaacactgacttcaagtccaatgatatattcactatgccattttattgacttttccttgtaaagcaatgcacactaatttagtaagtatttggtttctgtgatgtgttcagttgcgtgctgggtgacatgtgaaataaactcatccttgaggaattta

SEQ ID NO: 539 - DNA, 1962 bp, Homo sapiens
  source 1..1962: mol_type = genomic DNA
acacgatatttggcaagatgtacagtgggagaaatcacagatgccctgaaaaaggtatttggtgaacataaagcgaatgatcgaatggtgagtggagcatatcgccaggaatttggagaaagtaaagagataacatctgctatcaagagggttcataaattcatggaacgtgaaggtcgcagacctcgtcttcttgtagcaaaaatgggacaagatggccatgacagaggagcaaaagttattgctacaggatttgctgatcttggttttgatgtggacataggccctcttttccagactcctcgtgaagtggcccagcaggctgtggatgcggatgtgcatgctgtgggcataagcaccctcgctgctggtcataaaaccctagttcctgaactcatcaaagaacttaactcccttggacggccagatattcttgtcatgtgtggaggggtgataccacctcaggattatgaatttctgtttgaagttggtgtttccaatgtatttggtcctgggactcgaattccaaaggctgccgttcaggtgcttgatgatattgagaagtgtttggaaaagaagcagcaatctgtataatatcctctttttgttttagcttttgtctaaaatattattttagttatgatcaaagaagagagtaaagctatgtcttcaatttaatttcaatacctgatttgtactttccttgaaagctttactttaaaataccttacttataggcctggtgtcatgctataagtatgtacatacagtttcacttcaaaaataaaaaaaaaatccctaaaaactctctatactctctataacaatactttatcaagaactctggacaatggtattatttttaaaaatcatggtgatgtatttattagaatgtttcttataaatctgtttactttttatattaagaattaaactgtacctaaaaaaactctgactattcccatttgtcagtttagcattacattgtcttgagcaccagaaaataaaatccatatattaataaaaacctatcttgaaaaactagtggagtgtatttacgtggcaaaagagattttgggaggagtcctcagccaaattctaccagaatcaccttaataaaagaagtattaaaatcaagcacagcaggttggaatatggggaatttgacagtatatttcttcaagtctgagtttactttcttcctgatcatgaccatctgaccttgttatttctgggcttggctcaagaccaaggagagtggatgttgatgaacattcctttaaataaaagtgcttaggttgtagttatggctttgtctagaatggtgatgtcaactgtgagtgtaggtctgtgatatagaaagaattcaactttccagatctagaaagatgctaccttgcatagatttgctccttaaacataaattgcaaaaataaaaatatcacagagaacacctgtactttgcttactgaaagatttgctcactaaagaaggaaagttgccatttacctgtttaacaaatctgcacatcctgcacatgttccccagaatgtaaaataaaaaaagtttaaataaaaaaggaaagttgtcctttattgttaacatgatccattacatgaatataacataaataattatcttttttaataaatttctattgtattagatcagagagcagtcttttggaaagtattatagatacattactgtagaatttacaaactcattgtaatacaatgtatttaattttcagaatatgattatctgaatggtattgtcatgattattgttcccattttcagatgaacactgacttcaagtccaatgatatattcactatgccattttattgacttttccttgtaaagcaatgcacactaatttagtaagtatttggtttctgtgatgtgttcagttgcgtgctgggtgacatgtgaaataaactcatccttgaggaattta

SEQ ID NO: 540 - DNA, 4037 bp, Homo sapiens
  source 1..4037: mol_type = genomic DNA
acctacgtttaatcattaatagtgagcccttcagtgaacttaggtcctgattttggagtttggagtctgacctttccccaaagataaacatgattgttgcaggttctgaagagggtcactccctcactggctgccattgaaagagtccacttctcagtgactcctagctgggcactggatgcagttgaggattgctggtcaatatgattcttcttgctgtgctttttctctgcttcatttcctcatattcagcttctgttaaaggtcacacaactggtctctcattaaataatgaccggctgtacaagctcacgtactccactgaagttcttcttgatcggggcaaaggaaaactgcaagacagcgtgggctaccgcatttcctccaacgtggatgtggccttactatggaggaatcctgatggtgatgatgaccagttgatccaaataacgatgaaggatgtaaatgttgaaaatgtgaatcagcagagaggagagaagagcatcttcaaaggaaaaagcccatctaaaataatgggaaaggaaaacttggaagctctgcaaagacctacgctccttcatctaatccatggaaaggtcaaagagttctactcatatcaaaatgaggcagtggccatagaaaatatcaagagaggtctggctagcctatttcagacacagttaagctctggaaccaccaatgaggtagatatctctggaaattgtaaagtgacctaccaggctcatcaagacaaagtgatcaaaattaaggccttggattcatgcaaaatagcgaggtctggatttacgaccccaaatcaggtcttgggtgtcagttcaaaagctacatctgtcaccacctataagatagaagacagctttgttatagctgtgcttgctgaagaaacacacaattttggactgaatttcctacaaaccattaaggggaaaatagtatcgaagcagaaattagagctgaagacaaccgaagcaggcccaagattgatgtctggaaagcaggctgcagccataatcaaagcagttgattcaaagtacacggccattcccattgtggggcaggtcttccagagccactgtaaaggatgtccttctctctcggagctctggcggtccaccaggaaatacctgcagcctgacaacctttccaaggctgaggctgtcagaaacttcctggccttcattcagcacctcaggactgcgaagaaagaagagatccttcaaatactaaagatggaaaataaggaagtattacctcagctggtggatgctgtcacctctgctcagacctcagactcattagaagccattttggactttttggatttcaaaagtgacagcagcattatcctccaggagaggtttctctatgcctgtggatttgcttctcatcccaatgaagaactcctgagagccctcattagtaagttcaaaggttctattggtagcagtgacatcagagaaactgttatgatcatcactgggacacttgtcagaaagttgtgtcagaatgaaggctgcaaactcaaagcagtagtggaagctaagaagttaatcctgggaggacttgaaaaagcagagaaaaaagaggacaccaggatgtatctgctggctttgaagaatgccctgcttccagaaggcatcccaagtcttctgaagtatgcagaagcaggagaagggcccatcagccacctggctaccactgctctccagagatatgatctccctttcataactgatgaggtgaagaagaccttaaacagaatataccaccaaaaccgtaaagttcatgaaaagactgtgcgcactgctgcagctgctatcattttaaataacaatccatcctacatggacgtcaagaacatcctgctgtctattggggagcttccccaagaaatgaataaatacatgctcgccattgttcaagacatcctacgttttgaaatgcctgcaagcaaaattgtccgtcgagttctgaaggaaatggtcgctcacaattatgaccgtttctccaggagtggatcttcttctgcctacactggctacatagaacgtagtccccgttcggcatctacttacagcctagacattctctactcgggttctggcattctaaggagaagtaacctgaacatctttcagtacattgggaaggctggtcttcacggtagccaggtggttattgaagcccaaggactggaagccttaatcgcagccacccctgacgagggggaggagaaccttgactcctatgctggtatgtcagccatcctctttgatgttcagctcagacctgtcacctttttcaacggatacagtgatttgatgtccaaaatgctgtcagcatctggcgaccctatcagtgtggtgaaaggacttattctgctaatagatcattctcaggaacttcagttacaatctggactaaaagccaatatagaggtccagggtggtctagctattgatatttcaggtgcaatggagtttagcttgtggtatcgtgagtctaaaacccgagtgaaaaatagggtgactgtggtaataaccactgacatcacagtggactcctcttttgtgaaagctggcctggaaaccagtacagaaacagaagcaggcttggagtttatctccacagtgcagttttctcagtacccattcttagtttgcatgcagatggacaaggatgaagctccattcaggcaatttgagaaaaagtacgaaaggctgtccacaggcagaggttatgtctctcagaaaagaaaagaaagcgtattagcaggatgtgaattcccgctccatcaagagaactcagagatgtgcaaagtggtgtttgcccctcagccggatagtacttccagcggatggttttgaaactgacctgtgatattttacttgaatttgtctccccgaaagggacacaatgtggcatgactaagtacttgctctctgagagcacagcgtttacatatttacctgtatttaagatttttgtaaaaagctacaaaaaactgcagtttgatcaaatttgggtatatgcagtatgctacccacagcgtcattttgaatcatcatgtgacgctttcaacaacgttcttagtttacttatacctctctcaaatctcatttggtacagtcagaatagttattctctaagaggaaactagtgtttgttaaaaacaaaaataaaaacaaaaccacacaaggagaacccaattttgtttcaacaatttttgatcaatgtatatgaagctcttgataggacttccttaagcatgacgggaaaaccaaacacgttccctaatcaggaaaaaaaaaaaaaaaaaaagtaagacacaaacaaaccattttttttctctttttttggagttgggggcccagggagaagggacaagacttttaaaagacttgttagccaacttcaagaattaatatttatgtctctgttattgttagttttaagccttaaggtagaaggcacatagaaataacatctcatctttctgctgaccattttagtgaggttgttccaaagacattcaggtctctacctccagccctgcaaaaatattggacctagcacagaggaatcaggaaaattaatttcagaaactccatttgatttttcttttgctgtgtctttttgagactgtaatatggtacactgtcctctaagggacatcctcattttatctcacctttttgggggtgagagctctagttcatttaactgtactctgcacaatagctaggatgactaagagaacattgcttcaagaaactggtggatttggatttccaaaatatgaaataaggaaaaaaatgtttttatttgtatgaattaaaagatccatgttgaacatttgcaaatatttattaataaacagatgtggtgataaacccaaaacaaatgacaggtccttattttccactaaacacagacacatgaaatgaaagtttagctagcccactatttgttgtaaattgaaaacgaagtgtgataaaataaatatgtagaaatca

SEQ ID NO: 541 - DNA, 4092 bp, Homo sapiens
  source 1..4092: mol_type = genomic DNA
tttcgaacccgcaatggaagaaaggggaggggtttatgcggggcggggtctggagttagtgttttgggagtgggaggtagttacagtgatgtctgttttttcccgttcaagaattaagtgtgtacctgcagacgtgtattcattcatatattcttgttctgaagagggtcactccctcactggctgccattgaaagagtccacttctcagtgactcctagctgggcactggatgcagttgaggattgctggtcaatatgattcttcttgctgtgctttttctctgcttcatttcctcatattcagcttctgttaaaggtcacacaactggtctctcattaaataatgaccggctgtacaagctcacgtactccactgaagttcttcttgatcggggcaaaggaaaactgcaagacagcgtgggctaccgcatttcctccaacgtggatgtggccttactatggaggaatcctgatggtgatgatgaccagttgatccaaataacgatgaaggatgtaaatgttgaaaatgtgaatcagcagagaggagagaagagcatcttcaaaggaaaaagcccatctaaaataatgggaaaggaaaacttggaagctctgcaaagacctacgctccttcatctaatccatggaaaggtcaaagagttctactcatatcaaaatgaggcagtggccatagaaaatatcaagagaggtctggctagcctatttcagacacagttaagctctggaaccaccaatgaggtagatatctctggaaattgtaaagtgacctaccaggctcatcaagacaaagtgatcaaaattaaggccttggattcatgcaaaatagcgaggtctggatttacgaccccaaatcaggtcttgggtgtcagttcaaaagctacatctgtcaccacctataagatagaagacagctttgttatagctgtgcttgctgaagaaacacacaattttggactgaatttcctacaaaccattaaggggaaaatagtatcgaagcagaaattagagctgaagacaaccgaagcaggcccaagattgatgtctggaaagcaggctgcagccataatcaaagcagttgattcaaagtacacggccattcccattgtggggcaggtcttccagagccactgtaaaggatgtccttctctctcggagctctggcggtccaccaggaaatacctgcagcctgacaacctttccaaggctgaggctgtcagaaacttcctggccttcattcagcacctcaggactgcgaagaaagaagagatccttcaaatactaaagatggaaaataaggaagtattacctcagctggtggatgctgtcacctctgctcagacctcagactcattagaagccattttggactttttggatttcaaaagtgacagcagcattatcctccaggagaggtttctctatgcctgtggatttgcttctcatcccaatgaagaactcctgagagccctcattagtaagttcaaaggttctattggtagcagtgacatcagagaaactgttatgatcatcactgggacacttgtcagaaagttgtgtcagaatgaaggctgcaaactcaaagcagtagtggaagctaagaagttaatcctgggaggacttgaaaaagcagagaaaaaagaggacaccaggatgtatctgctggctttgaagaatgccctgcttccagaaggcatcccaagtcttctgaagtatgcagaagcaggagaagggcccatcagccacctggctaccactgctctccagagatatgatctccctttcataactgatgaggtgaagaagaccttaaacagaatataccaccaaaaccgtaaagttcatgaaaagactgtgcgcactgctgcagctgctatcattttaaataacaatccatcctacatggacgtcaagaacatcctgctgtctattggggagcttccccaagaaatgaataaatacatgctcgccattgttcaagacatcctacgttttgaaatgcctgcaagcaaaattgtccgtcgagttctgaaggaaatggtcgctcacaattatgaccgtttctccaggagtggatcttcttctgcctacactggctacatagaacgtagtccccgttcggcatctacttacagcctagacattctctactcgggttctggcattctaaggagaagtaacctgaacatctttcagtacattgggaaggctggtcttcacggtagccaggtggttattgaagcccaaggactggaagccttaatcgcagccacccctgacgagggggaggagaaccttgactcctatgctggtatgtcagccatcctctttgatgttcagctcagacctgtcacctttttcaacggatacagtgatttgatgtccaaaatgctgtcagcatctggcgaccctatcagtgtggtgaaaggacttattctgctaatagatcattctcaggaacttcagttacaatctggactaaaagccaatatagaggtccagggtggtctagctattgatatttcaggtgcaatggagtttagcttgtggtatcgtgagtctaaaacccgagtgaaaaatagggtgactgtggtaataaccactgacatcacagtggactcctcttttgtgaaagctggcctggaaaccagtacagaaacagaagcaggcttggagtttatctccacagtgcagttttctcagtacccattcttagtttgcatgcagatggacaaggatgaagctccattcaggcaatttgagaaaaagtacgaaaggctgtccacaggcagaggttatgtctctcagaaaagaaaagaaagcgtattagcaggatgtgaattcccgctccatcaagagaactcagagatgtgcaaagtggtgtttgcccctcagccggatagtacttccagcggatggttttgaaactgacctgtgatattttacttgaatttgtctccccgaaagggacacaatgtggcatgactaagtacttgctctctgagagcacagcgtttacatatttacctgtatttaagatttttgtaaaaagctacaaaaaactgcagtttgatcaaatttgggtatatgcagtatgctacccacagcgtcattttgaatcatcatgtgacgctttcaacaacgttcttagtttacttatacctctctcaaatctcatttggtacagtcagaatagttattctctaagaggaaactagtgtttgttaaaaacaaaaataaaaacaaaaccacacaaggagaacccaattttgtttcaacaatttttgatcaatgtatatgaagctcttgataggacttccttaagcatgacgggaaaaccaaacacgttccctaatcaggaaaaaaaaaaaaaaaaaaagtaagacacaaacaaaccattttttttctctttttttggagttgggggcccagggagaagggacaagacttttaaaagacttgttagccaacttcaagaattaatatttatgtctctgttattgttagttttaagccttaaggtagaaggcacatagaaataacatctcatctttctgctgaccattttagtgaggttgttccaaagacattcaggtctctacctccagccctgcaaaaatattggacctagcacagaggaatcaggaaaattaatttcagaaactccatttgatttttcttttgctgtgtctttttgagactgtaatatggtacactgtcctctaagggacatcctcattttatctcacctttttgggggtgagagctctagttcatttaactgtactctgcacaatagctaggatgactaagagaacattgcttcaagaaactggtggatttggatttccaaaatatgaaataaggaaaaaaatgtttttatttgtatgaattaaaagatccatgttgaacatttgcaaatatttattaataaacagatgtggtgataaacccaaaacaaatgacaggtccttattttccactaaacacagacacatgaaatgaaagtttagctagcccactatttgttgtaaattgaaaacgaagtgtgataaaataaatatgtagaaatcata

SEQ ID NO: 542 - DNA, 549 bp, Homo sapiens
  source 1..549: mol_type = genomic DNA
agtagggggctgcatggcacgcgcccctttgcgtccagagaataccatagtgcgggggagcgccaaccagtgccaggacacttaccgagctgaagagttgacaggtcacacaactggtctctcattaaataatgaccggctgtacaagctcacgtactccactgaagttcttcttgatcggggcaaaggaaaactgcaagacagcgtgggctaccgcatttcctccaacgtggatgtggccttactatggaggaatcctgatggtgatgatgaccagttgatccaaataacgatgaaggatgtaaatgttgaaaatgtgaatcagcagagaggagagaagagcatcttcaaaggaaaaagcccatctaaaataatgggaaaggaaaacttggaagctctgcaaagacctacgctccttcatctaatccatggaaaggtcaaagagttctactcatatcaaaatgaggcagtggccatagaaaatatcaagagaggtctggctagcctatttcagacacagttaagctctggaaccaccaatgaggtaga

SEQ ID NO: 543 - DNA, 3855 bp, Homo sapiens
  source 1..3855: mol_type = genomic DNA
tgcagttgaggattgctggtcaatatgattcttcttgctgtgctttttctctgcttcatttcctcatattcagcttctgttaaaggtcacacaactggtctctcattaaataatgaccggctgtacaagctcacgtactccactgaagttcttcttgatcggggcaaaggaaaactgcaagacagcgtgggctaccgcatttcctccaacgtggatgtggccttactatggaggaatcctgatggtgatgatgaccagttgatccaaataacgatgaaggatgtaaatgttgaaaatgtgaatcagcagagaggagagaagagcatcttcaaaggaaaaagcccatctaaaataatgggaaaggaaaacttggaagctctgcaaagacctacgctccttcatctaatccatggaaaggtcaaagagttctactcatatcaaaatgaggcagtggccatagaaaatatcaagagaggtctggctagcctatttcagacacagttaagctctggaaccaccaatgaggtagatatctctggaaattgtaaagtgacctaccaggctcatcaagacaaagtgatcaaaattaaggccttggattcatgcaaaatagcgaggtctggatttacgaccccaaatcaggtcttgggtgtcagttcaaaagctacatctgtcaccacctataagatagaagacagctttgttatagctgtgcttgctgaagaaacacacaattttggactgaatttcctacaaaccattaaggggaaaatagtatcgaagcagaaattagagctgaagacaaccgaagcaggcccaagattgatgtctggaaagcaggctgcagccataatcaaagcagttgattcaaagtacacggccattcccattgtggggcaggtcttccagagccactgtaaaggatgtccttctctctcggagctctggcggtccaccaggaaatacctgcagcctgacaacctttccaaggctgaggctgtcagaaacttcctggccttcattcagcacctcaggactgcgaagaaagaagagatccttcaaatactaaagatggaaaataaggaagtattacctcagctggtggatgctgtcacctctgctcagacctcagactcattagaagccattttggactttttggatttcaaaagtgacagcagcattatcctccaggagaggtttctctatgcctgtggatttgcttctcatcccaatgaagaactcctgagagccctcattagtaagttcaaaggttctattggtagcagtgacatcagagaaactgttatgatcatcactgggacacttgtcagaaagttgtgtcagaatgaaggctgcaaactcaaagcagtagtggaagctaagaagttaatcctgggaggacttgaaaaagcagagaaaaaagaggacaccaggatgtatctgctggctttgaagaatgccctgcttccagaaggcatcccaagtcttctgaagtatgcagaagcaggagaagggcccatcagccacctggctaccactgctctccagagatatgatctctttcataactgatgaggtgaagaagaccttaaacagaatataccaccaaaaccgtaaagttcatgaaaagactgtgcgcactgctgcagctgctatcattttaaataacaatccatcctacatggacgtcaagaacatcctgctgtctattggggagcttccccaagaaatgaataaatacatgctcgccattgttcaagacatcctacgttttgaaatgcctgcaagcaaaattgtccgtcgagttctgaaggaaatggtcgctcacaattatgaccgtttctccaggagtggatcttcttctgcctacactggctacatagaacgtagtccccgttcggcatctacttacagcctagacattctctactcgggttctggcattctaaggagaagtaacctgaacatctttcagtacattgggaaggctggtcttcacggtagccaggtggttattgaagcccaaggactggaagccttaatcgcagccacccctgacgagggggaggagaaccttgactcctatgctggtatgtcagccatcctctttgatgttcagctcagacctgtcacctttttcaacggatacagtgatttgatgtccaaaatgctgtcagcatctggcgaccctatcagtgtggtgaaaggacttattctgctaatagatcattctcaggaacttcagttacaatctggactaaaagccaatatagaggtccagggtggtctagctattgatatttcaggtgcaatggagtttagcttgtggtatcgtgagtctaaaacccgagtgaaaaatagggtgactgtggtaataaccactgacatcacagtggactcctcttttgtgaaagctggcctggaaaccagtacagaaacagaagcaggcttggagtttatctccacagtgcagttttctcagtacccattcttagtttgcatgcagatggacaaggatgaagctccattcaggcaatttgagaaaaagtacgaaaggctgtccacaggcagaggttatgtctctcagaaaagaaaagaaagcgtattagcaggatgtgaattcccgctccatcaagagaactcagagatgtgcaaagtggtgtttgcccctcagccggatagtacttccagcggatggttttgaaactgacctgtgatattttacttgaatttgtctccccgaaagggacacaatgtggcatgactaagtacttgctctctgagagcacagcgtttacatatttacctgtatttaagatttttgtaaaaagctacaaaaaactgcagtttgatcaaatttgggtatatgcagtatgctacccacagcgtcattttgaatcatcatgtgacgctttcaacaacgttcttagtttacttatacctctctcaaatctcatttggtacagtcagaatagttattctctaagaggaaactagtgtttgttaaaaacaaaaataaaaacaaaaccacacaaggagaacccaattttgtttcaacaatttttgatcaatgtatatgaagctcttgataggacttccttaagcatgacgggaaaaccaaacacgttccctaatcaggaaaaaaaaaaaaaaaaaaagtaagacacaaacaaaccattttttttctctttttttggagttgggggcccagggagaagggacaagacttttaaaagacttgttagccaacttcaagaattaatatttatgtctctgttattgttagttttaagccttaaggtagaaggcacatagaaataacatctcatctttctgctgaccattttagtgaggttgttccaaagacattcaggtctctacctccagccctgcaaaaatattggacctagcacagaggaatcaggaaaattaatttcagaaactccatttgatttttcttttgctgtgtctttttgagactgtaatatggtacactgtcctctaagggacatcctcattttatctcacctttttgggggtgagagctctagttcatttaactgtactctgcacaatagctaggatgactaagagaacattgcttcaagaaactggtggatttggatttccaaaatatgaaataaggaaaaaaatgtttttatttgtatgaattaaaagatccatgttgaacatttgcaaatatttattaataaacagatgtggtgataaacccaaaacaaatgacaggtccttattttccactaaacacagacacatgaaatgaaagtttagctagcccactatttgttgtaaattgaaaacgaagtgtgataaaataaatatgtagaaatc

SEQ ID NO: 544 - DNA, 5701 bp, Homo sapiens
  source 1..5701: mol_type = genomic DNA
agacccgggcggcgccggccgcctcgccggccgcaggtccgcctccgccgcgccgagggcgtgggctcccggctcccggaagcggcggccgcggcgcggagccgagcgggcgtccgtcgccggagctgcaatgagcggcgcccggaggctgtgacctgcgcgcggcggcccgaccggggcccctgaatggcggctcgctgaggcggcggcggcggcggcggcggctcaggctcctcggggcgtggcgtggcggtgaaggggtgatgctgttcaagctcctgcagagacagacctatacctgcctgtcccacaggtatgggctctacgtgtgcttcttgggcgtcgttgtcaccatcgtctccgccttccagttcggagaggtggttctggaatggagccgagatcaataccatgttttgtttgattcctatagagacaatattgctggaaagtcctttcagaatcggctttgtctgcccatgccgattgacgttgtttacacctgggtgaatggcacagatcttgaactactgaaggaactacagcaggtcagagaacagatggaggaggagcagaaagcaatgagagaaatccttgggaaaaacacaacggaacctactaagaagagtgagaagcagttagagtgtttgctaacacactgcattaaggtgccaatgcttgtcctggacccagccctgccagccaacatcaccctgaaggacctgccatctctttatccttcttttcattctgccagtgacattttcaatgttgcaaaaccaaaaaacccttctaccaatgtctcagttgttgtttttgacagtactaaggatgttgaagatgcccactctggactgcttaaaggaaatagcagacagacagtatggaggggctacttgacaacagataaagaagtccctggattagtgctaatgcaagatttggctttcctgagtggatttccaccaacattcaaggaaacaaatcaactaaaaacaaaattgccagaaaatctttcctctaaagtcaaactgttgcagttgtattcagaggccagtgtagcgcttctaaaactgaataaccccaaggattttcaagaattgaataagcaaactaagaagaacatgaccattgatggaaaagaactgaccataagtcctgcatatttattatgggatctgagcgccatcagccagtctaagcaggatgaagacatctctgccagtcgttttgaagataacgaagaactgaggtactcattgcgatctatcgagaggcatgcaccatgggttcggaatattttcattgtcaccaacgggcagattccatcctggctgaaccttgacaatcctcgagtgacaatagtaacacaccaggatgtttttcgaaatttgagccacttgcctacctttagttcacctgctattgaaagtcacattcatcgcatcgaagggctgtcccagaagtttatttacctaaatgatgatgtcatgtttgggaaggatgtctggccagatgatttttacagtcactccaaaggccagaaggtttatttgacatggcctgtgccaaactgtgccgagggctgcccaggttcctggattaaggatggctattgtgacaaggcttgtaataattcagcctgcgattgggatggtggggattgctctggaaacagtggagggagtcgctatattgcaggaggtggaggtactgggagtattggagttggacagccctggcagtttggtggaggaataaacagtgtctcttactgtaatcagggatgtgcgaattcctggctcgctgataagttctgtgaccaagcatgcaatgtcttgtcctgtgggtttgatgctggcgactgtgggcaagatcattttcatgaattgtataaagtgatccttctcccaaaccagactcactatattattccaaaaggtgaatgcctgccttatttcagctttgcagaagtagccaaaagaggagttgaaggtgcctatagtgacaatccaataattcgacatgcttctattgccaacaagtggaaaaccatccacctcataatgcacagtggaatgaatgccaccacaatacattttaatctcacgtttcaaaatacaaacgatgaagagttcaaaatgcagataacagtggaggtggacacaagggagggaccaaaactgaattctacagcccagaagggttacgaaaatttagttagtcccataacacttcttccagaggcggaaatcctttttgaggatattcccaaagaaaaacgcttcccgaagtttaagagacatgatgttaactcaacaaggagagcccaggaagaggtgaaaattcccctggtaaatatttcactccttccaaaagacgcccagttgagtctcaataccttggatttgcaactggaacatggagacatcactttgaaaggatacaatttgtccaagtcagccttgctgagatcatttctgatgaactcacagcatgctaaaataaaaaatcaagctataataacagatgaaacaaatgacagtttggtggctccacaggaaaaacaggttcataaaagcatcttgccaaacagcttaggagtgtctgaaagattgcagaggttgacttttcctgcagtgagtgtaaaagtgaatggtcatgaccagggtcagaatccacccctggacttggagaccacagcaagatttagagtggaaactcacacccaaaaaaccataggcggaaatgtgacaaaagaaaagcccccatctctgattgttccactggaaagccagatgacaaaagaaaagaaaatcacagggaaagaaaaagagaacagtagaatggaggaaaatgctgaaaatcacataggcgttactgaagtgttacttggaagaaagctgcagcattacacagatagttacttgggctttttgccatgggagaaaaaaaagtatttccaagatcttctcgacgaagaagagtcattgaagacacaattggcatacttcactgatagcaaaaatactgggaggcaactaaaagatacatttgcagattccctcagatatgtaaataaaattctaaatagcaagtttggattcacatcgcggaaagtccctgctcacatgcctcacatgattgaccggattgttatgcaagaactgcaagatatgttccctgaagaatttgacaagacgtcatttcacaaagtgcgccattctgaggatatgcagtttgccttctcttatttttattatctcatgagtgcagtgcagccactgaatatatctcaagtctttgatgaagttgatacagatcaatctggtgtcttgtctgacagagaaatccgaacactggctaccagaattcacgaactgccgttaagtttgcaggatttgacaggtctggaacacatgctaataaattgctcaaaaatgcttcctgctgatatcacgcagctaaataatattccaccaactcaggaatcctactatgatcccaacctgccaccggtcactaaaagtctagtaacaaactgtaaaccagtaactgacaaaatccacaaagcatataaggacaaaaacaaatataggtttgaaatcatgggagaagaagaaatcgcttttaaaatgattcgtaccaacgtttctcatgtggttggccagttggatgacataagaaaaaaccctaggaagtttgtttgcctgaatgacaacattgaccacaatcataaagatgctcagacagtgaaggctgttctcagggacttctatgaatccatgttccccataccttcccaatttgaactgccaagagagtatcgaaaccgtttccttcatatgcatgagctgcaggaatggagggcttatcgagacaaattgaagttttggacccattgtgtactagcaacattgattatgtttactatattctcattttttgctgagcagttaattgcacttaagcggaagatatttcccagaaggaggatacacaaagaagctagtcccaatcgaatcagagtatagaagatcttcatttgaaaaccatctacctcagcatttactgagcattttaaaactcagcttcacagagatgtctttgtgatgtgatgcttagcagtttggcccgaagaaggaaaatatccagtaccatgctgttttgtggcatgaatatagcccactgaccaggaattatttaaccaacccactgaaaacttgtgtgttgagcagctctgaactgattttacttttaaagaatttgctcatggacctgtcatcctttttataaaaaggctcactgacaagagacagctgttaatttcccacagcaatcattgcagactaactttattaggagaagcctatgccagctgggagtgattgctaagaggctccagtctttgcattccaaagccttttgctaaagttttgcactttttttttttcatttcccatttttaagtagttactaagttaactagttattcttgcttctgagtataacgaattgggatgtctaaacctatttttatagatgttatttaaataatgcagcaatatcacctcttattgacaatacctaaattatgagttttattaatatttaagactgtaaatggtcttaaaccactaactactgaagagctcaatgattgacatctgaaatgctttgtaattattgacttcagcccctaagaatgctatgatttcacgtgcaggtctaatttcaaagggctagagttagtactacttaccagatgtaattatgttttggaaatgtacatattcaaacagaagtgcctcattttagaaatgagtagtgctgatggcactggcacattacagtggtgtcttgtttaatactcattggtatattccagtagctatctctctcagttggtttttgatagaacagaggccagcaaactttctttgtaaaaggctggttagtaaattattgcaggccacctgtgtctttgtcatacattcttcttgctgttgtttagtttgttttttttcaaacaaccctctaaaaatgtaaaaaccatgtttagcttgcagctgtacaaaaactgcccaccagccagatgtgaccctcaggccatcatttgccaatcactgagaattagtttttgttgttgttgttgttgttgtttttgagacagagtctctctctgttgcccaggctggagtgcagtggcgcaatctcagctcactgcaacctccgcctcccgggttcaagcagttctgtctcagccttctgagtagctgggactacaggtgcatgccaccacaccctgctaatttttgtatttttagtagagacgggggttccaccatattggtcaggcttatcttgaactcctgacctcaggtgatccacctgcctctgcctcccaaagtgctgagattacaggcataagccagtgcacccagccgagaattagtatttttatgtatggttaaaccttggcgtctagccatattttatgtcataatacaatggatttgtgaagagcagattccatgagtaactctgacaggtattttagatcatgatctcaacaatattcttccaaaatggcatacatcttttgtacaaagaacttgaaatgtaaatactgtgtttgtgctgtaagagttgtgtatttcaaaaactgaaatctcataaaaagttaaatttttgtctgaca

SEQ ID NO: 545 - DNA, 1678 bp, Homo sapiens
  source 1..1678: mol_type = genomic DNA
cggagctgcaatgagcggcgcccggaggctgtgacctgcgcgcggcggcccgaccggggcccctgaatggcggctcgctgaggcggcggcggcggcggcggcggctcaggctcctcggggcgtggcgtggcggtgaaggggtgatgctgttcaagctcctgcagagacagacctatacctgcctgtcccacaggtatgggctctacgtgtgcttcttgggcgtcgttgtcaccatcgtctccgccttccagttcggagaggtggttctggaatggagccgagatcaataccatgttttgtttgattcctatagagacaatattgctggaaagtcctttcagaatcggctttgtctgcccatgccgattgacgttgtttacacctgggtgaatggcacagatcttgaactactgaaggaactacagcaggtcagagaacagatggaggaggagcagaaagcaatgagagaaatccttgggaaaaacacaacggaacctactaagaagagtgagaagcagttagagtgtttgctaacacactgcattaaggtgccaatgcttgtcctggacccagccctgccagccaacatcaccctgaaggacctgccatctctttatccttcttttcattctgccagtgacattttcaatgttgcaaaaccaaaaaacccttctaccaatgtctcagttgttgtttttgacagtactaaggatgttgaagatgcccactctggactgcttaaaggaaatagcagacagacagtatggaggggctacttgacaacagataaagaagtccctggattagtgctaatgcaagatttggctttcctgagtggatttccaccaacattcaaggaaacaaatcaactaaaaacaaaattgccagaaaatctttcctctaaagtcaaactgttgcagttgtattcagaggccagtgtagcgcttctaaaactgaataaccccaaggattttcaagaattgaataagcaaactaagaagaacatgaccattgatggaaaagaactgaccataagtcctgcatatttattatgggatctgagcgccatcagccagtctaagcaggatgaagacatctctgccagtcgttttgaagataacgaagaactgaggtactcattgcgatctatcgagaggcatgcaccatgggttcggaatattttcattgtcaccaacgggcagattccatcctggctgaaccttgacaatcctcgagtgacaatagtaacacaccaggatgtttttcgaaatttgagccacttgcctacctttagttcacctgctattgaaagtcacattcatcgcatcgaagggctgtcccagaagtttatttacctaaatgatgatgtcatgtttgggaaggatgtctggccagatgatttttacagtcactccaaaggccagaaggtttatttgacatggcctgtgccaaactgtgccgagggctgcccaggttcctggattaaggatggctattgtgacaaggcttgtaataattcagcctgcgattgggatggtggggattgctctggtaaggatgtgttaaactgtaattcgttcatttttatggaatattttcttcttaatcattattgaacatgtgctatagacttaaccaaacattctttatgtattaataaagaatcagtaatgctggg

SEQ ID NO: 546 - DNA, 2069 bp, Homo sapiens
  source 1..2069: mol_type = genomic DNA
atggcgacggcgctgatggctgtggttctgcgggcagctgctgtagccccgaggctgagaggccggggaggcactgggggcgcccgaaggctgagctgtggcgcgcggcggcgggcggcgaggggcaccagcccggggcgccggctcagcaccgcctggtcgcagccccagcccccgcccgaggagtacgcgggcgcggacgacgtctcccagtcgcccgtcgccgaggagccgtcgtgggtgccgagtcccaggcccccggtgccccacgagtccccagagcctccttcgggccgctcgctggtgcagcgggacatccaggccttcctgaaccagtgcggggccagccctggggaggcgcgccactggctcacgcagttccagacctgccatcactccgcggacaagcccttcgccgtcatcgaggtggacgaggaggtgctcaagtgccagcagggcgtatccagtctggcctttgccctggccttcttgcagcgcatggacatgaagccgctggtggtcctggggctgccggcccctacggctccctcgggctgtctttccttctgggaggccaaggcgcagctggccaagagctgcaaggtgctggtagacgcgcttcgacacaacgccgccgctgctgtgccattttttggcggcgggtctgtgctacgcgctgccgagccggctccccatgccagctacggcggcatcgtctcggtggagacagacctgctgcagtggtgcctggagtcgggcagcatccccatcctgtgccccatcggggagacggccgcgcgccgctccgtgcttctcgactccctggaggtgaccgcgtcgctggccaaggcgctgcggcccaccaaaatcatcttcctcaataacacaggcggcctgcgcgacagcagtcataaggtcctgagtaacgtgaacctgcccgccgacctggacctggtgtgcaacgccgagtgggtgagcacaaaagaacggcagcagatgcggctcatcgtggacgtgctcagccgcctgccccaccactcctcggccgtcatcaccgccgctagcacgctgctcactgagctctttagcaacaaggggtccgggaccctgttcaagaacgccgagcgaatgctacgggtgcgcagcctggacaagctggaccagggccgtctagtggacctggtcaacgccagcttcggcaagaagctcagggacgactacctggcctcgctgcgcccgcggctgcactccatctacgtctccgaggggtacaacgccgccgccattctgaccatggagcccgtcctggggggcaccccgtacctggacaaatttgtggtgagctccagccgccagggccaaggctccggccagatgctgtgggagtgcctgcggcgggaccttcagacacttttctggcgctcccgggtcaccaaccccatcaatccctggtacttcaaacacagtgatggcagcttctccaacaagcagtggatcttcttctggtttggcctggctgatatccgggactcctatgagttggtcaaccacgccaagggactgccagactcctttcacaagccagcttctgacccaggcagctgaccctcaccatggacactacaggccctggaatggccagggtggaccaaaagccatgccagctgggcatgaccccaggcagccagccacaggctgaagggggcttgttggctgagtgatctgcagaggagaaagcagccccagctctgcccagaggaggcgctgaagtgggacaagcacaggaaagaaggggaccagtctaggaccccaactcgactcactctaaagctacaaccaaatggccttcgattttcaacctggggattaggggaggggagggtgccttccagggctctactcaggactaaccctaagggtgagctagtttctgtgcctctgtgctatgttttgaggctcccttacccaaaataatacccctgcctgcgtgatattctaccattcattttaattcctttgggtcttgcagtttttcaggaggccttgattaaaatgcaaatacttgtctg

SEQ ID NO: 547 - DNA, 1388 bp, Homo sapiens
  source 1..1388: mol_type = genomic DNA
catggcgacggcgctgatggctgtggttctgcgggcagctgctgtagccccacgagtccccagagcctccttcgggccgctcgctggtgcagcgggacatccaggccttcctgaaccagtgcggggccagccctggggaggcgcgccactggctcacgcagttccagacctgccatcactccgcggacaagcccttcgccgtcatcgaggtggacgaggaggtgctcaagtgccagcagggcgtatccagtctggcctttgccctggccttcttgcagcgcatggacatgaagccgctggtggtcctggggctgccggcccctacggctccctcgggctgtctttccttctgggaggccaaggcgcagctggccaagagctgcaaggtgctggtagacgcgcttcgacacaacgccgccgctgctgtgccattttttggcggcgggtctgtgctacgcgctgccgagccggctccccatgccagctacggcggcatcgtctcggtggagacagacctgctgcagtggtgcctggagtcgggcagcatccccatcctgtgccccatcggggagacggccgcgcgccgctccgtgcttctcgactccctggaggtgaccgcgtcgctggccaaggcgctgcggcccaccaaaatcatcttcctcaataacacaggcggcctgcgcgacagcagtcataaggtcctgagtaacgtgaacctgcccgccgacctggacctggtgtgcaacgccgagtgggtgagcacaaaagaacggcagcagatgcggctcatcgtggacgtgctcagccgcctgccccaccactcctcggccgtcatcaccgccgctagcacgctgctcactgagctctttagcaacaaggggtccgggaccctgttcaagaacgccgagcgaatgctacgggtgcgcagcctggacaagctggaccagggccgtctagtggacctggtcaacgccagcttcggcaagaagctcagggacgactacctggcctcgctgcgcccgcggctgcactccatctacgtctccgaggggtacaacgccgccgccattctgaccatggagcccgtcctggggggcaccccgtacctggacaaatttgtggtgagctccagccgccagggccaaggctccggccagatgctgtgggagtgcctgcggcgggaccttcagacacttttctggcgctcccgggtcaccaaccccatcaatccctggtacttcaaacacagtgatggcagcttctccaacaagcagtggatcttcttctggtttggcctggctgatatccgggactcctatgagttggtcaaccacgccaagggactgccagactcctttcacaagccagcttctgacccaggcagctga

SEQ ID NO: 548 - DNA, 2609 bp, Homo sapiens
  source 1..2609: mol_type = genomic DNA
ggctcggtccgactattgcccgcggtgggggagggggatggatcacgccacgcgccaaaggcgatcgcgactctccttctgcaggtagcctggaaggctctctctctttctctacgccacccttttcgtggcactgaaaagccccgtcctctcctcccagtcccgcctcctccgagcgttccccctactgcctggaatggtgcggtcccaggtcgcgggtcacgcggcggagggggcgtggcctgcccccggcccagccggctcttctttgcctctgctggagtccggggagtggcgttggctgctagagcgatgccgggccggagttgcgtcgccttagtcctcctggctgccgccgtcagctgtgccgtcgcgcagcacgcgccgccgtggacagaggactgcagaaaatcaacctatcctccttcaggaccaacgtacagaggtgcagttccatggtacaccataaatcttgacttaccaccctacaaaagatggcatgaattgatgcttgacaaggcaccagtgctaaaggttatagtgaattctctgaagaatatgataaatacattcgtgccaagtggaaaaattatgcaggtggtggatgaaaaattgcctggcctacttggcaactttcctggcccttttgaagaggaaatgaagggtattgccgctgttactgatatacctttaggagagattatttcattcaatattttttatgaattatttaccatttgtacttcaatagtagcagaagacaaaaaaggtcatctaatacatgggagaaacatggattttggagtatttcttgggtggaacataaataatgatacctgggtcataactgagcaactaaaacctttaacagtgaatttggatttccaaagaaacaacaaaactgtcttcaaggcttcaagctttgctggctatgtgggcatgttaacaggattcaaaccaggactgttcagtcttacactgaatgaacgtttcagtataaatggtggttatctgggtattctagaatggattctgggaaagaaagatgtcatgtggatagggttcctcactagaacagttctggaaaatagcacaagttatgaagaagccaagaatttattgaccaagaccaagatattggccccagcctactttatcctgggaggcaaccagtctggggaaggttgtgtgattacacgagacagaaaggaatcattggatgtatatgaactcgatgctaagcagggtagatggtatgtggtacaaacaaattatgaccgttggaaacatcccttcttccttgatgatcgcagaacgcctgcaaagatgtgtctgaaccgcaccagccaagagaatatctcatttgaaaccatgtatgatgtcctgtcaacaaaacctgtcctcaacaagctgaccgtatacacaaccttgatagatgttaccaaaggtcaattcgaaacttacctgcgggactgccctgacccttgtataggttggtgagcacacgtctggcctacagaatgcggcctctgagacatgaagacaccatctccatgtgaccgaacactgcagctgtctgaccttccaaagactaagactcgcggcaggttctctttgagtcaatagcttgtcttcgtccatctgttgacaaatgacagatcttttttttttccccctatcagttgatttttcttatttacagataacttctttaggggaagtaaaacagtcatctagaattcactgagttttgtttcactttgacatttggggatctggtgggcagtcgaaccatggtgaactccacctccgtggaataaatggagattcagcgtgggtgttgaatccagcacgtctgtgtgagtaacgggacagtaaacactccacattcttcagtttttcacttctacctacatatttgtatgtttttctgtataacagccttttccttctggttctaactgctgttaaaattaatatatcattatctttgctgttattgacagcgatataattttattacatatgattagagggatgagacagacattcacctgtatatttcttttaatgggcacaaaatgggcccttgcctctaaatagcactttttggggttcaagaagtaatcagtatgcaaagcaatcttttatacaataattgaagtgttccctttttcataattactctacttcccagtaaccctaaggaagttgctaacttaaaaaactgcatcccacgttctgttaatttagtaaataaacaagtcaaagacttgtggaaaataggaagtgaacccatattttaaattctcataagtagcattcatgtaataaacaggtttttagtttgttcttcagattgatagggagttttaaagaaattttagtagttactaaaattatgttactgtatttttcagaaatcaaactgcttatgaaaagtactaatagaacttgttaacctttctaaccttcacgattaactgtgaaatgtacgtcatttgtgcaagaccgtttgtccacttcattttgtataatcacagttgtgttcctgacactcaataaacagtcactggaaagagtgccagtcagcagtcatgcacgctgat

SEQ ID NO: 549 - DNA, 1690 bp, Homo sapiens
  source 1..1690: mol_type = genomic DNA
gggcaggatttcctgctggactttgaaatccaacccggtcacctacccgcgcgactgtgtccacggatggcacgaaagccaagcgagtccccctgccgagctactcgcgtccgcctcctcccaagctgagctctgctccgcccacctgagtccttcgccagttaggaggaaacacagccgcttaatgaactgctgcatcgggctgggagagaaagctcgcgggtcccaccgggcctcctacccaagtctcagcgcgcttttcaccgaggcctcaattctgggatttggcagctttgctgtgaaagcccaatggacagaggactgcagaaaatcaacctatcctccttcaggaccaactgtcttccctgctgttataaggtacagaggtgcagttccatggtacaccataaatcttgacttaccaccctacaaaagatggcatgaattgatgcttgacaaggcaccagtgcctggcctacttggcaactttcctggcccttttgaagaggaaatgaagggtattgccgctgttactgatatacctttaggagagattatttcattcaatattttttatgaattatttaccatttgtacttcaatagtagcagaagacaaaaaaggtcatctaatacatgggagaaacatggattttggagtatttcttgggtggaacataaataatgatacctgggtcataactgagcaactaaaacctttaacagtgaatttggatttccaaagaaacaacaaaactgtcttcaaggcttcaagctttgctggctatgtgggcatgttaacaggattcaaaccaggactgttcagtcttacactgaatgaacgtttcagtataaatggtggttatctgggtattctagaatggattctgggaaagaaagatgtcatgtggatagggttcctcactagaacagttctggaaaatagcacaagttatgaagaagccaagaatttattgaccaagaccaagatattggccccagcctactttatcctgggaggcaaccagtctggggaaggttgtgtgattacacgagacagaaaggaatcattggatgtatatgaactcgatgctaagcagggtagatggtatgtggtacaaacaaattatgaccgttggaaacatcccttcttccttgatgatcgcagaacgcctgcaaagatgtgtctgaaccgcaccagccaagagaatatctcatttgaaaccatgtatgatgtcctgtcaacaaaacctgtcctcaacaagctgaccgtatacacaaccttgatagatgttaccaaaggtcaattcgaaacttacctgcgggactgccctgacccttgtataggttggtgagcacacgtctggcctacagaatgcggcctctgagacatgaagacaccatctccatgtgaccgaacactgcagctgtctgaccttccaaagactaagactcgcggcaggttctctttgagtcaatagcttgtcttcgtccatctgttgacaaatgacagatcttttttttttccccctatcagttgatttttcttatttacagataacttctttaggggaagtaaaacagtcatctagaattcactgagttttgtttcactttgacatttggggatctggtgggcagtcgaaccatggtgaactccacctccgtggaataaatggagattcagcgtg

SEQ ID NO: 550 - DNA, 2511 bp, Homo sapiens
  source 1..2511: mol_type = genomic DNA
ggactttgaaatccaacccggtcacctacccgcgcgactgtgtccacggatggcacgaaagccaagcgagtccccctgccgagctactcgcgtccgcctcctcccaagctgagctctgctccgcccacctgagtccttcgccagttaggaggaaacacagccgcttaatgaactgctgcatcgggctgggagagaaagctcgcgggtcccaccgggcctcctacccaagtctcagcgcgcttttcaccgaggcctcaattctgggatttggcagctttgctgtgaaagcccaatggacagaggactgcagaaaatcaacctatcctccttcaggaccaacgtacagaggtgcagttccatggtacaccataaatcttgacttaccaccctacaaaagatggcatgaattgatgcttgacaaggcaccagtgctaaaggttatagtgaattctctgaagaatatgataaatacattcgtgccaagtggaaaaattatgcaggtggtggatgaaaaattgcctggcctacttggcaactttcctggcccttttgaagaggaaatgaagggtattgccgctgttactgatatacctttaggagagattatttcattcaatattttttatgaattatttaccatttgtacttcaatagtagcagaagacaaaaaaggtcatctaatacatgggagaaacatggattttggagtatttcttgggtggaacataaataatgatacctgggtcataactgagcaactaaaacctttaacagtgaatttggatttccaaagaaacaacaaaactgtcttcaaggcttcaagctttgctggctatgtgggcatgttaacaggattcaaaccaggactgttcagtcttacactgaatgaacgtttcagtataaatggtggttatctgggtattctagaatggattctgggaaagaaagatgtcatgtggatagggttcctcactagaacagttctggaaaatagcacaagttatgaagaagccaagaatttattgaccaagaccaagatattggccccagcctactttatcctgggaggcaaccagtctggggaaggttgtgtgattacacgagacagaaaggaatcattggatgtatatgaactcgatgctaagcagggtagatggtatgtggtacaaacaaattatgaccgttggaaacatcccttcttccttgatgatcgcagaacgcctgcaaagatgtgtctgaaccgcaccagccaagagaatatctcatttgaaaccatgtatgatgtcctgtcaacaaaacctgtcctcaacaagctgaccgtatacacaaccttgatagatgttaccaaaggtcaattcgaaacttacctgcgggactgccctgacccttgtataggttggtgagcacacgtctggcctacagaatgcggcctctgagacatgaagacaccatctccatgtgaccgaacactgcagctgtctgaccttccaaagactaagactcgcggcaggttctctttgagtcaatagcttgtcttcgtccatctgttgacaaatgacagatcttttttttttccccctatcagttgatttttcttatttacagataacttctttaggggaagtaaaacagtcatctagaattcactgagttttgtttcactttgacatttggggatctggtgggcagtcgaaccatggtgaactccacctccgtggaataaatggagattcagcgtgggtgttgaatccagcacgtctgtgtgagtaacgggacagtaaacactccacattcttcagtttttcacttctacctacatatttgtatgtttttctgtataacagccttttccttctggttctaactgctgttaaaattaatatatcattatctttgctgttattgacagcgatataattttattacatatgattagagggatgagacagacattcacctgtatatttcttttaatgggcacaaaatgggcccttgcctctaaatagcactttttggggttcaagaagtaatcagtatgcaaagcaatcttttatacaataattgaagtgttccctttttcataattactctacttcccagtaaccctaaggaagttgctaacttaaaaaactgcatcccacgttctgttaatttagtaaataaacaagtcaaagacttgtggaaaataggaagtgaacccatattttaaattctcataagtagcattcatgtaataaacaggtttttagtttgttcttcagattgatagggagttttaaagaaattttagtagttactaaaattatgttactgtatttttcagaaatcaaactgcttatgaaaagtactaatagaacttgttaacctttctaaccttcacgattaactgtgaaatgtacgtcatttgtgcaagaccgtttgtccacttcattttgtataatcacagttgtgttcctgacactcaataaacagtcactggaaagagtgccagtcagcagtcatgcacgctga

SEQ ID NO: 551 - DNA, 2231 bp, Homo sapiens
  source 1..2231: mol_type = genomic DNA
gctggagtccggggagtggcgttggctgctagagcgatgccgggccggagttgcgtcgccttagtcctcctggctgccgccgtcagctgtgccgtcgcgcagcacgcgccgccgtggacagaggactgcagaaaatcaacctatcctccttcaggaccaacgtacagaggtgcagttccatggtacaccataaatcttgacttaccaccctacaaaagatggcatgaattgatgcttgacaaggcaccagtgctaaaggttatagtgaattctctgaagaatatgataaatacattcgtgccaagtggaaaaattatgcaggtggtggatgaaaaattgcctggcctacttggcaactttcctggcccttttgaagaggaaatgaagggtattgccgctgttactgatatacctttaggtcatctaatacatgggagaaacatggattttggagtatttcttgggtggaacataaataatgatacctgggtcataactgagcaactaaaacctttaacagtgaatttggatttccaaagaaacaacaaaactgtcttcaaggcttcaagctttgctggctatgtgggcatgttaacaggattcaaaccaggactgttcagtcttacactgaatgaacgtttcagtataaatggtggttatctgggtattctagaatggattctgggaaagaaagatgtcatgtggatagggttcctcactagaacagttctggaaaatagcacaagttatgaagaagccaagaatttattgaccaagaccaagatattggccccagcctactttatcctgggaggcaaccagtctggggaaggttgtgtgattacacgagacagaaaggaatcattggatgtatatgaactcgatgctaagcagggtagatggtatgtggtacaaacaaattatgaccgttggaaacatcccttcttccttgatgatcgcagaacgcctgcaaagatgtgtctgaaccgcaccagccaagagaatatctcatttgaaaccatgtatgatgtcctgtcaacaaaacctgtcctcaacaagctgaccgtatacacaaccttgatagatgttaccaaaggtcaattcgaaacttacctgcgggactgccctgacccttgtataggttggtgagcacacgtctggcctacagaatgcggcctctgagacatgaagacaccatctccatgtgaccgaacactgcagctgtctgaccttccaaagactaagactcgcggcaggttctctttgagtcaatagcttgtcttcgtccatctgttgacaaatgacagatcttttttttttccccctatcagttgatttttcttatttacagataacttctttaggggaagtaaaacagtcatctagaattcactgagttttgtttcactttgacatttggggatctggtgggcagtcgaaccatggtgaactccacctccgtggaataaatggagattcagcgtgggtgttgaatccagcacgtctgtgtgagtaacgggacagtaaacactccacattcttcagtttttcacttctacctacatatttgtatgtttttctgtataacagccttttccttctggttctaactgctgttaaaattaatatatcattatctttgctgttattgacagcgatataattttattacatatgattagagggatgagacagacattcacctgtatatttcttttaatgggcacaaaatgggcccttgcctctaaatagcactttttggggttcaagaagtaatcagtatgcaaagcaatcttttatacaataattgaagtgttccctttttcataattactctacttcccagtaaccctaaggaagttgctaacttaaaaaactgcatcccacgttctgttaatttagtaaataaacaagtcaaagacttgtggaaaataggaagtgaacccatattttaaattctcataagtagcattcatgtaataaacaggtttttagtttgttcttcagattgatagggagttttaaagaaattttagtagttactaaaattatgttactgtatttttcagaaatcaaactgcttatgaaaagtactaatagaacttgttaacctttctaaccttcacgattaactgtgaaatgtacgtcatttgtgcaagaccgtttgtccacttcattttgtataatcacagttgtgttcctgacactcaataaacagtcactggaaagag

SEQ ID NO: 552 - DNA, 2507 bp, Homo sapiens
  source 1..2507: mol_type = genomic DNA
ggctcggtccgactattgcccgcggtgggggagggggatggatcacgccacgcgccaaaggcgatcgcgactctccttctgcaggtagcctggaaggctctctctctttctctacgccacccttttcgtggcactgaaaagccccgtcctctcctcccagtcccgcctcctccgagcgttccccctactgcctggaatggtgcggtcccaggtcgcgggtcacgcggcggagggggcgtggcctgcccccggcccagccggctcttctttgcctctgctggagtccggggagtggcgttggctgctagagcgatgccgggccggagttgcgtcgccttagtcctcctggctgccgccgtcagctgtgccgtcgcgcagcacgcgccgccgtggacagaggactgcagaaaatcaacctatcctccttcaggaccaacgtacagaggtgcagttccatggtacaccataaatcttgacttaccaccctacaaaagatggcatgaattgatgcttgacaaggcaccagtgctaaaggttatagtgaattctctgaagaatatgataaatacattcgtgccaagtggaaaaattatgcaggtggtggatgaaaaattgcctggcctacttggcaactttcctggcccttttgaagaggaaatgaagggtattgccgctgttactgatatacctttaggtcatctaatacatgggagaaacatggattttggagtatttcttgggtggaacataaataatgatacctgggtcataactgagcaactaaaacctttaacagtgaatttggatttccaaagaaacaacaaaactgtcttcaaggcttcaagctttgctggctatgtgggcatgttaacaggattcaaaccaggactgttcagtcttacactgaatgaacgtttcagtataaatggtggttatctgggtattctagaatggattctgggaaagaaagatgtcatgtggatagggttcctcactagaacagttctggaaaatagcacaagttatgaagaagccaagaatttattgaccaagaccaagatattggccccagcctactttatcctgggaggcaaccagtctggggaaggttgtgtgattacacgagacagaaaggaatcattggatgtatatgaactcgatgctaagcagggtagatggtatgtggtacaaacaaattatgaccgttggaaacatcccttcttccttgatgatcgcagaacgcctgcaaagatgtgtctgaaccgcaccagccaagagaatatctcatttgaaaccatgtatgatgtcctgtcaacaaaacctgtcctcaacaagctgaccgtatacacaaccttgatagatgttaccaaaggtcaattcgaaacttacctgcgggactgccctgacccttgtataggttggtgagcacacgtctggcctacagaatgcggcctctgagacatgaagacaccatctccatgtgaccgaacactgcagctgtctgaccttccaaagactaagactcgcggcaggttctctttgagtcaatagcttgtcttcgtccatctgttgacaaatgacagatcttttttttttccccctatcagttgatttttcttatttacagataacttctttaggggaagtaaaacagtcatctagaattcactgagttttgtttcactttgacatttggggatctggtgggcagtcgaaccatggtgaactccacctccgtggaataaatggagattcagcgtgggtgttgaatccagcacgtctgtgtgagtaacgggacagtaaacactccacattcttcagtttttcacttctacctacatatttgtatgtttttctgtataacagccttttccttctggttctaactgctgttaaaattaatatatcattatctttgctgttattgacagcgatataattttattacatatgattagagggatgagacagacattcacctgtatatttcttttaatgggcacaaaatgggcccttgcctctaaatagcactttttggggttcaagaagtaatcagtatgcaaagcaatcttttatacaataattgaagtgttccctttttcataattactctacttcccagtaaccctaaggaagttgctaacttaaaaaactgcatcccacgttctgttaatttagtaaataaacaagtcaaagacttgtggaaaataggaagtgaacccatattttaaattctcataagtagcattcatgtaataaacaggtttttagtttgttcttcagattgatagggagttttaaagaaattttagtagttactaaaattatgttactgtatttttcagaaatcaaactgcttatgaaaagtactaatagaacttgttaacctttctaaccttcacgattaactgtgaaatgtacgtcatttgtgcaagaccgtttgtccacttcattttgtataatcacagttgtgttcctgacactcaataaacagtcactggaaagag

SEQ ID NO: 553 - DNA, 694 bp, Homo sapiens
  source 1..694: mol_type = genomic DNA
gcaggctgagggcaggtgggaagcaaacccggacgcatcgcagcagcagcagcagcagcagaagcagcagcagcagcctccgcagtccctccagagacatggatccccagacagcaccttcccgggcgctcctgctcctgctcttcttgcatctggctttcctgggaggtcgttcccacccgctgggcagccccggttcagcctcggacttggaaacgtccgggttacaggagcagcgcaaccatttgcagggcaaactgtcggagctgcaggtggagcagacatccctggagcccctccaggagagcccccgtcccacaggtgtctggaagtcccgggaggtagccaccgagggcatccgtgggcaccgcaaaatggtcctctacaccctgcgggcaccacgaagccccaagatggtgcaagggtctggctgctttgggaggaagatggaccggatcagctcctccagtggcctgggctgcaaagtgctgaggcggcattaagaggaagtcctggctgcagacacctgcttctgattccacaaggggctttttcctcaaccctgtggccgcctttgaagtgactcatttttttaatgtatttatgtatttatttgattgttttatataagatggtttcttacctttgagcacaaaatttccacggtgaaataaagtcaacattataagcttta

SEQ ID NO: 554 - DNA, 1047 bp, Homo sapiens
  source 1..1047: mol_type = genomic DNA
agagagcgctgggagccggaggggagcgcagcgagttttggccagtggtcgtgcagtccaaggggctggatggcatgctggacccaagctcagctcagcgtccggacccaataacagttttaccaagggagcagctttctatcctggccacactgaggtgcatagcgtaatgtccatgttgttctacactctgatcacagcttttctgatcggcatacaggcggaaccacactcagagagcaatgtccctgcaggacacaccatcccccaagcccactggactaaacttcagcattcccttgacactgcccttcgcagagcccgcagcgccccggcagcggcgatagctgcacgcgtggcggggcagacccgcaacattactgtggaccccaggctgtttaaaaagcggcgactccgttcaccccgtgtgctgtttagcacccagcctccccgtgaagctgcagacactcaggatctggacttcgaggtcggtggtgctgcccccttcaacaggactcacaggagcaagcggtcatcatcccatcccatcttccacaggggcgaattctcggtgtgtgacagtgtcagcgtgtgggttggggataagaccaccgccacagacatcaagggcaaggaggtgatggtgttgggagaggtgaacattaacaacagtgtattcaaacagtacttttttgagaccaagtgccgggacccaaatcccgttgacagcgggtgccggggcattgactcaaagcactggaactcatattgtaccacgactcacacctttgtcaaggcgctgaccatggatggcaagcaggctgcctggcggtttatccggatagatacggcctgtgtgtgtgtgctcagcaggaaggctgtgagaagagcctgacctgccgacacgctccctccccctgccccttctacactctcctgggcccctccctacctcaacctgtaaattattttaaattataaggactgcatggtaatttatagtttatacagttttaaagaatcattatttattaaatttttggaagc

SEQ ID NO: 555 - DNA, 3068 bp, Homo sapiens
  source 1..3068: mol_type = genomic DNA
gaggccaggggagggtgcgaaggaggcgcctgcctccaacctgcgggcgggaggtgggtggctgcggggcaattgaaaaagagccggcgaggagttccccgaaacttgttggaactccgggctcgcgcggaggccaggagctgagcggcggcggctgccggacgatgggagcgtgagcaggacggtgataacctctccccgatcgggttgcgagggcgccgggcagaggccaggacgcgagccgccagcggtgggacccatcgacgacttcccggggcgacaggagcagccccgagagccagggcgagcgcccgttccaggtggccggaccgcccgccgcgtccgcgccgcgctccctgcaggcaacgggagacgcccccgcgcagcgcgagcgcctcagcgcggccgctcgctctccccctcgagggacaaacttttcccaaacccgatccgagcccttggaccaaactcgcctgcgccgagagccgtccgcgtagagcgctccgtctccggcgagatgtccgagcgcaaagaaggcagaggcaaagggaagggcaagaagaaggagcgaggctccggcaagaagccggagtccgcggcgggcagccagagcccagccttgcctccccgattgaaagagatgaaaagccaggaatcggctgcaggttccaaactagtccttcggtgtgaaaccagttctgaatactcctctctcagattcaagtggttcaagaatgggaatgaattgaatcgaaaaaacaaaccacaaaatatcaagatacaaaaaaagccagggaagtcagaacttcgcattaacaaagcatcactggctgattctggagagtatatgtgcaaagtgatcagcaaattaggaaatgacagtgcctctgccaatatcaccatcgtggaatcaaacgagatcatcactggtatgccagcctcaactgaaggagcatatgtgtcttcagagtctcccattagaatatcagtatccacagaaggagcaaatacttcttcatctacatctacatccaccactgggacaagccatcttgtaaaatgtgcggagaaggagaaaactttctgtgtgaatggaggggagtgcttcatggtgaaagacctttcaaacccctcgagatacttgtgcaagtgccaacctggattcactggagcaagatgtactgagaatgtgcccatgaaagtccaaaaccaagaaaaggcggaggagctgtaccagaagagagtgctgaccataaccggcatctgcatcgccctccttgtggtcggcatcatgtgtgtggtggcctactgcaaaaccaagaaacagcggaaaaagctgcatgaccgtcttcggcagagccttcggtctgaacgaaacaatatgatgaacattgccaatgggcctcaccatcctaacccaccccccgagaatgtccagctggtgaatcaatacgtatctaaaaacgtcatctccagtgagcatattgttgagagagaagcagagacatccttttccaccagtcactatacttccacagcccatcactccactactgtcacccagactcctagccacagctggagcaacggacacactgaaagcatcctttccgaaagccactctgtaatcgtgatgtcatccgtagaaaacagtaggcacagcagcccaactgggggcccaagaggacgtcttaatggcacaggaggccctcgtgaatgtaacagcttcctcaggcatgccagagaaacccctgattcctaccgagactctcctcatagtgaaaggtatgtgtcagccatgaccaccccggctcgtatgtcacctgtagatttccacacgccaagctcccccaaatcgcccccttcggaaatgtctccacccgtgtccagcatgacggtgtccatgccttccatggcggtcagccccttcatggaagaagagagacctctacttctcgtgacaccaccaaggctgcgggagaagaagtttgaccatcaccctcagcagttcagctccttccaccacaaccccgcgcatgacagtaacagcctccctgctagccccttgaggatagtggaggatgaggagtatgaaacgacccaagagtacgagccagcccaagagcctgttaagaaactcgccaatagccggcgggccaaaagaaccaagcccaatggccacattgctaacagattggaagtggacagcaacacaagctcccagagcagtaactcagagagtgaaacagaagatgaaagagtaggtgaagatacgcctttcctgggcatacagaaccccctggcagccagtcttgaggcaacacctgccttccgcctggctgacagcaggactaacccagcaggccgcttctcgacacaggaagaaatccaggccaggctgtctagtgtaattgctaaccaagaccctattgctgtataaaacctaaataaacacatagattcacctgtaaaactttattttatataataaagtattccaccttaaattaaacaatttattttattttagcagttctgcaaatagaaaacaggaaaaaaacttttataaattaaatatatgtatgtaaaaatgtgttatgtgccatatgtagcaattttttacagtatttcaaaacgagaaagatatcaatggtgcctttatgttatgttatgtcgagagcaagttttgtacagttacagtgattgcttttccacagtatttctgcaaaacctctcatagattcagtttttgctggcttcttgtgcattgcattatgatgttgactggatgtatgatttgcaagacttgcaactgtccctctgtttgcttgtagtagcacccgatcagtatgtcttgtaatggcacatccatccagatatgcctctcttgtgtatgaagttttctttgctttcagaatatgaaatgagttgtgtctactctgccagccaaaggtttgcctcattgggctctgagataatagtagatccaacagcatgctactattaaatacagcaagaaactgcattaagtaatgttaaatattaggaagaaagtaatactgtgattt

SEQ ID NO: 556 - DNA, 2483 bp, Homo sapiens
  source 1..2483: mol_type = genomic DNA
gtggctgcggggcaattgaaaaagagccggcgaggagttccccgaaacttgttggaactccgggctcgcgcggaggccaggagctgagcggcggcggctgccggacgatgggagcgtgagcaggacggtgataacctctccccgatcgggttgcgagggcgccgggcagaggccaggacgcgagccgccagcggtgggacccatcgacgacttcccggggcgacaggagcagccccgagagccagggcgagcgcccgttccaggtggccggaccgcccgccgcgtccgcgccgcgctccctgcaggcaacgggagacgcccccgcgcagcgcgagcgcctcagcgcggccgctcgctctccccctcgagggacaaacttttcccaaacccgatccgagcccttggaccaaactcgcctgcgccgagagccgtccgcgtagagcgctccgtctccggcgagatgtccgagcgcaaagaaggcagaggcaaagggaagggcaagaagaaggagcgaggctccggcaagaagccggagtccgcggcgggcagccagagcccagccttgcctccccgattgaaagagatgaaaagccaggaatcggctgcaggttccaaactagtccttcggtgtgaaaccagttctgaatactcctctctcagattcaagtggttcaagaatgggaatgaattgaatcgaaaaaacaaaccacaaaatatcaagatacaaaaaaagccagggaagtcagaacttcgcattaacaaagcatcactggctgattctggagagtatatgtgcaaagtgatcagcaaattaggaaatgacagtgcctctgccaatatcaccatcgtggaatcaaacgagatcatcactggtatgccagcctcaactgaaggagcatatgtgtcttcagagtctcccattagaatatcagtatccacagaaggagcaaatacttcttcatctacatctacatccaccactgggacaagccatcttgtaaaatgtgcggagaaggagaaaactttctgtgtgaatggaggggagtgcttcatggtgaaagacctttcaaacccctcgagatacttgtgcaagtgcccaaatgagtttactggtgatcgctgccaaaactacgtaatggccagcttctacaaggcggaggagctgtaccagaagagagtgctgaccataaccggcatctgcatcgccctccttgtggtcggcatcatgtgtgtggtggcctactgcaaaaccaagaaacagcggaaaaagctgcatgaccgtcttcggcagagccttcggtctgaacgaaacaatatgatgaacattgccaatgggcctcaccatcctaacccaccccccgagaatgtccagctggtgaatcaatacgtatctaaaaacgtcatctccagtgagcatattgttgagagagaagcagagacatccttttccaccagtcactatacttccacagcccatcactccactactgtcacccagactcctagccacagctggagcaacggacacactgaaagcatcctttccgaaagccactctgtaatcgtgatgtcatccgtagaaaacagtaggcacagcagcccaactgggggcccaagaggacgtcttaatggcacaggaggccctcgtgaatgtaacagcttcctcaggcatgccagagaaacccctgattcctaccgagactctcctcatagtgaaaggtatgtgtcagccatgaccaccccggctcgtatgtcacctgtagatttccacacgccaagctcccccaaatcgcccccttcggaaatgtctccacccgtgtccagcatgacggtgtccatgccttccatggcggtcagccccttcatggaagaagagagacctctacttctcgtgacaccaccaaggctgcgggagaagaagtttgaccatcaccctcagcagttcagctccttccaccacaaccccgcgcatgacagtaacagcctccctgctagccccttgaggatagtggaggatgaggagtatgaaacgacccaagagtacgagccagcccaagagcctgttaagaaactcgccaatagccggcgggccaaaagaaccaagcccaatggccacattgctaacagattggaagtggacagcaacacaagctcccagagcagtaactcagagagtgaaacagaagatgaaagagtaggtgaagatacgcctttcctgggcatacagaaccccctggcagccagtcttgaggcaacacctgccttccgcctggctgacagcaggactaacccagcaggccgcttctcgacacaggaagaaatccaggccaggctgtctagtgtaattgctaaccaagaccctattgctgtataaaacctaaataaacacatagattcacctgtaaaactttattttatataataaagtattccaccttaaattaaacaatttattttattttagcagttctgcaaatagaaaa

SEQ ID NO: 557 - DNA, 2981 bp, Homo sapiens
  source 1..2981: mol_type = genomic DNA
gaggccaggggagggtgcgaaggaggcgcctgcctccaacctgcgggcgggaggtgggtggctgcggggcaattgaaaaagagccggcgaggagttccccgaaacttgttggaactccgggctcgcgcggaggccaggagctgagcggcggcggctgccggacgatgggagcgtgagcaggacggtgataacctctccccgatcgggttgcgagggcgccgggcagaggccaggacgcgagccgccagcggtgggacccatcgacgacttcccggggcgacaggagcagccccgagagccagggcgagcgcccgttccaggtggccggaccgcccgccgcgtccgcgccgcgctccctgcaggcaacgggagacgcccccgcgcagcgcgagcgcctcagcgcggccgctcgctctccccctcgagggacaaacttttcccaaacccgatccgagcccttggaccaaactcgcctgcgccgagagccgtccgcgtagagcgctccgtctccggcgagatgtccgagcgcaaagaaggcagaggcaaagggaagggcaagaagaaggagcgaggctccggcaagaagccggagtccgcggcgggcagccagagcccagccttgcctccccgattgaaagagatgaaaagccaggaatcggctgcaggttccaaactagtccttcggtgtgaaaccagttctgaatactcctctctcagattcaagtggttcaagaatgggaatgaattgaatcgaaaaaacaaaccacaaaatatcaagatacaaaaaaagccagggaagtcagaacttcgcattaacaaagcatcactggctgattctggagagtatatgtgcaaagtgatcagcaaattaggaaatgacagtgcctctgccaatatcaccatcgtggaatcaaacgctacatctacatccaccactgggacaagccatcttgtaaaatgtgcggagaaggagaaaactttctgtgtgaatggaggggagtgcttcatggtgaaagacctttcaaacccctcgagatacttgtgcaagtgcccaaatgagtttactggtgatcgctgccaaaactacgtaatggccagcttctacaagcatcttgggattgaatttatggaggcggaggagctgtaccagaagagagtgctgaccataaccggcatctgcatcgccctccttgtggtcggcatcatgtgtgtggtggcctactgcaaaaccaagaaacagcggaaaaagctgcatgaccgtcttcggcagagccttcggtctgaacgaaacaatatgatgaacattgccaatgggcctcaccatcctaacccaccccccgagaatgtccagctggtgaatcaatacgtatctaaaaacgtcatctccagtgagcatattgttgagagagaagcagagacatccttttccaccagtcactatacttccacagcccatcactccactactgtcacccagactcctagccacagctggagcaacggacacactgaaagcatcctttccgaaagccactctgtaatcgtgatgtcatccgtagaaaacagtaggcacagcagcccaactgggggcccaagaggacgtcttaatggcacaggaggccctcgtgaatgtaacagcttcctcaggcatgccagagaaacccctgattcctaccgagactctcctcatagtgaaaggtatgtgtcagccatgaccaccccggctcgtatgtcacctgtagatttccacacgccaagctcccccaaatcgcccccttcggaaatgtctccacccgtgtccagcatgacggtgtccatgccttccatggcggtcagccccttcatggaagaagagagacctctacttctcgtgacaccaccaaggctgcgggagaagaagtttgaccatcaccctcagcagttcagctccttccaccacaaccccgcgcatgacagtaacagcctccctgctagccccttgaggatagtggaggatgaggagtatgaaacgacccaagagtacgagccagcccaagagcctgttaagaaactcgccaatagccggcgggccaaaagaaccaagcccaatggccacattgctaacagattggaagtggacagcaacacaagctcccagagcagtaactcagagagtgaaacagaagatgaaagagtaggtgaagatacgcctttcctgggcatacagaaccccctggcagccagtcttgaggcaacacctgccttccgcctggctgacagcaggactaacccagcaggccgcttctcgacacaggaagaaatccaggccaggctgtctagtgtaattgctaaccaagaccctattgctgtataaaacctaaataaacacatagattcacctgtaaaactttattttatataataaagtattccaccttaaattaaacaatttattttattttagcagttctgcaaatagaaaacaggaaaaaaacttttataaattaaatatatgtatgtaaaaatgtgttatgtgccatatgtagcaattttttacagtatttcaaaacgagaaagatatcaatggtgcctttatgttatgttatgtcgagagcaagttttgtacagttacagtgattgcttttccacagtatttctgcaaaacctctcatagattcagtttttgctggcttcttgtgcattgcattatgatgttgactggatgtatgatttgcaagacttgcaactgtccctctgtttgcttgtagtagcacccgatcagtatgtcttgtaatggcacatccatccagatatgcctctcttgtgtatgaagttttctttgctttcagaatatgaaatgagttgtgtctactctgccagccaaaggtttgcctcattgggctctgagataatagtagatccaacagcatgctactattaaatacagcaagaaactgcattaagtaatgttaaatattaggaagaaagtaatactgtgattt

SEQ ID NO: 558 - DNA, 3092 bp, Homo sapiens
  source 1..3092: mol_type = genomic DNA
gaggccaggggagggtgcgaaggaggcgcctgcctccaacctgcgggcgggaggtgggtggctgcggggcaattgaaaaagagccggcgaggagttccccgaaacttgttggaactccgggctcgcgcggaggccaggagctgagcggcggcggctgccggacgatgggagcgtgagcaggacggtgataacctctccccgatcgggttgcgagggcgccgggcagaggccaggacgcgagccgccagcggtgggacccatcgacgacttcccggggcgacaggagcagccccgagagccagggcgagcgcccgttccaggtggccggaccgcccgccgcgtccgcgccgcgctccctgcaggcaacgggagacgcccccgcgcagcgcgagcgcctcagcgcggccgctcgctctccccctcgagggacaaacttttcccaaacccgatccgagcccttggaccaaactcgcctgcgccgagagccgtccgcgtagagcgctccgtctccggcgagatgtccgagcgcaaagaaggcagaggcaaagggaagggcaagaagaaggagcgaggctccggcaagaagccggagtccgcggcgggcagccagagcccagccttgcctccccgattgaaagagatgaaaagccaggaatcggctgcaggttccaaactagtccttcggtgtgaaaccagttctgaatactcctctctcagattcaagtggttcaagaatgggaatgaattgaatcgaaaaaacaaaccacaaaatatcaagatacaaaaaaagccagggaagtcagaacttcgcattaacaaagcatcactggctgattctggagagtatatgtgcaaagtgatcagcaaattaggaaatgacagtgcctctgccaatatcaccatcgtggaatcaaacgagatcatcactggtatgccagcctcaactgaaggagcatatgtgtcttcagagtctcccattagaatatcagtatccacagaaggagcaaatacttcttcatctacatctacatccaccactgggacaagccatcttgtaaaatgtgcggagaaggagaaaactttctgtgtgaatggaggggagtgcttcatggtgaaagacctttcaaacccctcgagatacttgtgcaagtgccaacctggattcactggagcaagatgtactgagaatgtgcccatgaaagtccaaaaccaagaaaagcattctggagaaccctttccagaggcggaggagctgtaccagaagagagtgctgaccataaccggcatctgcatcgccctccttgtggtcggcatcatgtgtgtggtggcctactgcaaaaccaagaaacagcggaaaaagctgcatgaccgtcttcggcagagccttcggtctgaacgaaacaatatgatgaacattgccaatgggcctcaccatcctaacccaccccccgagaatgtccagctggtgaatcaatacgtatctaaaaacgtcatctccagtgagcatattgttgagagagaagcagagacatccttttccaccagtcactatacttccacagcccatcactccactactgtcacccagactcctagccacagctggagcaacggacacactgaaagcatcctttccgaaagccactctgtaatcgtgatgtcatccgtagaaaacagtaggcacagcagcccaactgggggcccaagaggacgtcttaatggcacaggaggccctcgtgaatgtaacagcttcctcaggcatgccagagaaacccctgattcctaccgagactctcctcatagtgaaaggtatgtgtcagccatgaccaccccggctcgtatgtcacctgtagatttccacacgccaagctcccccaaatcgcccccttcggaaatgtctccacccgtgtccagcatgacggtgtccatgccttccatggcggtcagccccttcatggaagaagagagacctctacttctcgtgacaccaccaaggctgcgggagaagaagtttgaccatcaccctcagcagttcagctccttccaccacaaccccgcgcatgacagtaacagcctccctgctagccccttgaggatagtggaggatgaggagtatgaaacgacccaagagtacgagccagcccaagagcctgttaagaaactcgccaatagccggcgggccaaaagaaccaagcccaatggccacattgctaacagattggaagtggacagcaacacaagctcccagagcagtaactcagagagtgaaacagaagatgaaagagtaggtgaagatacgcctttcctgggcatacagaaccccctggcagccagtcttgaggcaacacctgccttccgcctggctgacagcaggactaacccagcaggccgcttctcgacacaggaagaaatccaggccaggctgtctagtgtaattgctaaccaagaccctattgctgtataaaacctaaataaacacatagattcacctgtaaaactttattttatataataaagtattccaccttaaattaaacaatttattttattttagcagttctgcaaatagaaaacaggaaaaaaacttttataaattaaatatatgtatgtaaaaatgtgttatgtgccatatgtagcaattttttacagtatttcaaaacgagaaagatatcaatggtgcctttatgttatgttatgtcgagagcaagttttgtacagttacagtgattgcttttccacagtatttctgcaaaacctctcatagattcagtttttgctggcttcttgtgcattgcattatgatgttgactggatgtatgatttgcaagacttgcaactgtccctctgtttgcttgtagtagcacccgatcagtatgtcttgtaatggcacatccatccagatatgcctctcttgtgtatgaagttttctttgctttcagaatatgaaatgagttgtgtctactctgccagccaaaggtttgcctcattgggctctgagataatagtagatccaacagcatgctactattaaatacagcaagaaactgcattaagtaatgttaaatattaggaagaaagtaatactgtgattt

SEQ ID NO: 559 - DNA, 3127 bp, Homo sapiens
  source 1..3127: mol_type = genomic DNA
gaggccaggggagggtgcgaaggaggcgcctgcctccaacctgcgggcgggaggtgggtggctgcggggcaattgaaaaagagccggcgaggagttccccgaaacttgttggaactccgggctcgcgcggaggccaggagctgagcggcggcggctgccggacgatgggagcgtgagcaggacggtgataacctctccccgatcgggttgcgagggcgccgggcagaggccaggacgcgagccgccagcggtgggacccatcgacgacttcccggggcgacaggagcagccccgagagccagggcgagcgcccgttccaggtggccggaccgcccgccgcgtccgcgccgcgctccctgcaggcaacgggagacgcccccgcgcagcgcgagcgcctcagcgcggccgctcgctctccccctcgagggacaaacttttcccaaacccgatccgagcccttggaccaaactcgcctgcgccgagagccgtccgcgtagagcgctccgtctccggcgagatgtccgagcgcaaagaaggcagaggcaaagggaagggcaagaagaaggagcgaggctccggcaagaagccggagtccgcggcgggcagccagagcccagccttgcctccccgattgaaagagatgaaaagccaggaatcggctgcaggttccaaactagtccttcggtgtgaaaccagttctgaatactcctctctcagattcaagtggttcaagaatgggaatgaattgaatcgaaaaaacaaaccacaaaatatcaagatacaaaaaaagccagggaagtcagaacttcgcattaacaaagcatcactggctgattctggagagtatatgtgcaaagtgatcagcaaattaggaaatgacagtgcctctgccaatatcaccatcgtggaatcaaacgagatcatcactggtatgccagcctcaactgaaggagcatatgtgtcttcagagtctcccattagaatatcagtatccacagaaggagcaaatacttcttcatctacatctacatccaccactgggacaagccatcttgtaaaatgtgcggagaaggagaaaactttctgtgtgaatggaggggagtgcttcatggtgaaagacctttcaaacccctcgagatacttgtgcaagtgccaacctggattcactggagcaagatgtactgagaatgtgcccatgaaagtccaaaaccaagaaagtgcccaaatgagtttactggtgatcgctgccaaaactacgtaatggccagcttctacaaggcggaggagctgtaccagaagagagtgctgaccataaccggcatctgcatcgccctccttgtggtcggcatcatgtgtgtggtggcctactgcaaaaccaagaaacagcggaaaaagctgcatgaccgtcttcggcagagccttcggtctgaacgaaacaatatgatgaacattgccaatgggcctcaccatcctaacccaccccccgagaatgtccagctggtgaatcaatacgtatctaaaaacgtcatctccagtgagcatattgttgagagagaagcagagacatccttttccaccagtcactatacttccacagcccatcactccactactgtcacccagactcctagccacagctggagcaacggacacactgaaagcatcctttccgaaagccactctgtaatcgtgatgtcatccgtagaaaacagtaggcacagcagcccaactgggggcccaagaggacgtcttaatggcacaggaggccctcgtgaatgtaacagcttcctcaggcatgccagagaaacccctgattcctaccgagactctcctcatagtgaaaggtatgtgtcagccatgaccaccccggctcgtatgtcacctgtagatttccacacgccaagctcccccaaatcgcccccttcggaaatgtctccacccgtgtccagcatgacggtgtccatgccttccatggcggtcagccccttcatggaagaagagagacctctacttctcgtgacaccaccaaggctgcgggagaagaagtttgaccatcaccctcagcagttcagctccttccaccacaaccccgcgcatgacagtaacagcctccctgctagccccttgaggatagtggaggatgaggagtatgaaacgacccaagagtacgagccagcccaagagcctgttaagaaactcgccaatagccggcgggccaaaagaaccaagcccaatggccacattgctaacagattggaagtggacagcaacacaagctcccagagcagtaactcagagagtgaaacagaagatgaaagagtaggtgaagatacgcctttcctgggcatacagaaccccctggcagccagtcttgaggcaacacctgccttccgcctggctgacagcaggactaacccagcaggccgcttctcgacacaggaagaaatccaggccaggctgtctagtgtaattgctaaccaagaccctattgctgtataaaacctaaataaacacatagattcacctgtaaaactttattttatataataaagtattccaccttaaattaaacaatttattttattttagcagttctgcaaatagaaaacaggaaaaaaacttttataaattaaatatatgtatgtaaaaatgtgttatgtgccatatgtagcaattttttacagtatttcaaaacgagaaagatatcaatggtgcctttatgttatgttatgtcgagagcaagttttgtacagttacagtgattgcttttccacagtatttctgcaaaacctctcatagattcagtttttgctggcttcttgtgcattgcattatgatgttgactggatgtatgatttgcaagacttgcaactgtccctctgtttgcttgtagtagcacccgatcagtatgtcttgtaatggcacatccatccagatatgcctctcttgtgtatgaagttttctttgctttcagaatatgaaatgagttgtgtctactctgccagccaaaggtttgcctcattgggctctgagataatagtagatccaacagcatgctactattaaatacagcaagaaactgcattaagtaatgttaaatattaggaagaaagtaatactgtgattt

SEQ ID NO: 560 - DNA, 3083 bp, Homo sapiens
  source 1..3083: mol_type = genomic DNA
gaggccaggggagggtgcgaaggaggcgcctgcctccaacctgcgggcgggaggtgggtggctgcggggcaattgaaaaagagccggcgaggagttccccgaaacttgttggaactccgggctcgcgcggaggccaggagctgagcggcggcggctgccggacgatgggagcgtgagcaggacggtgataacctctccccgatcgggttgcgagggcgccgggcagaggccaggacgcgagccgccagcggtgggacccatcgacgacttcccggggcgacaggagcagccccgagagccagggcgagcgcccgttccaggtggccggaccgcccgccgcgtccgcgccgcgctccctgcaggcaacgggagacgcccccgcgcagcgcgagcgcctcagcgcggccgctcgctctccccctcgagggacaaacttttcccaaacccgatccgagcccttggaccaaactcgcctgcgccgagagccgtccgcgtagagcgctccgtctccggcgagatgtccgagcgcaaagaaggcagaggcaaagggaagggcaagaagaaggagcgaggctccggcaagaagccggagtccgcggcgggcagccagagcccagccttgcctccccgattgaaagagatgaaaagccaggaatcggctgcaggttccaaactagtccttcggtgtgaaaccagttctgaatactcctctctcagattcaagtggttcaagaatgggaatgaattgaatcgaaaaaacaaaccacaaaatatcaagatacaaaaaaagccagggaagtcagaacttcgcattaacaaagcatcactggctgattctggagagtatatgtgcaaagtgatcagcaaattaggaaatgacagtgcctctgccaatatcaccatcgtggaatcaaacgagatcatcactggtatgccagcctcaactgaaggagcatatgtgtcttcagagtctcccattagaatatcagtatccacagaaggagcaaatacttcttcatctacatctacatccaccactgggacaagccatcttgtaaaatgtgcggagaaggagaaaactttctgtgtgaatggaggggagtgcttcatggtgaaagacctttcaaacccctcgagatacttgtgcaagtgcccaaatgagtttactggtgatcgctgccaaaactacgtaatggccagcttctacaagcatcttgggattgaatttatggaggcggaggagctgtaccagaagagagtgctgaccataaccggcatctgcatcgccctccttgtggtcggcatcatgtgtgtggtggcctactgcaaaaccaagaaacagcggaaaaagctgcatgaccgtcttcggcagagccttcggtctgaacgaaacaatatgatgaacattgccaatgggcctcaccatcctaacccaccccccgagaatgtccagctggtgaatcaatacgtatctaaaaacgtcatctccagtgagcatattgttgagagagaagcagagacatccttttccaccagtcactatacttccacagcccatcactccactactgtcacccagactcctagccacagctggagcaacggacacactgaaagcatcctttccgaaagccactctgtaatcgtgatgtcatccgtagaaaacagtaggcacagcagcccaactgggggcccaagaggacgtcttaatggcacaggaggccctcgtgaatgtaacagcttcctcaggcatgccagagaaacccctgattcctaccgagactctcctcatagtgaaaggtatgtgtcagccatgaccaccccggctcgtatgtcacctgtagatttccacacgccaagctcccccaaatcgcccccttcggaaatgtctccacccgtgtccagcatgacggtgtccatgccttccatggcggtcagccccttcatggaagaagagagacctctacttctcgtgacaccaccaaggctgcgggagaagaagtttgaccatcaccctcagcagttcagctccttccaccacaaccccgcgcatgacagtaacagcctccctgctagccccttgaggatagtggaggatgaggagtatgaaacgacccaagagtacgagccagcccaagagcctgttaagaaactcgccaatagccggcgggccaaaagaaccaagcccaatggccacattgctaacagattggaagtggacagcaacacaagctcccagagcagtaactcagagagtgaaacagaagatgaaagagtaggtgaagatacgcctttcctgggcatacagaaccccctggcagccagtcttgaggcaacacctgccttccgcctggctgacagcaggactaacccagcaggccgcttctcgacacaggaagaaatccaggccaggctgtctagtgtaattgctaaccaagaccctattgctgtataaaacctaaataaacacatagattcacctgtaaaactttattttatataataaagtattccaccttaaattaaacaatttattttattttagcagttctgcaaatagaaaacaggaaaaaaacttttataaattaaatatatgtatgtaaaaatgtgttatgtgccatatgtagcaattttttacagtatttcaaaacgagaaagatatcaatggtgcctttatgttatgttatgtcgagagcaagttttgtacagttacagtgattgcttttccacagtatttctgcaaaacctctcatagattcagtttttgctggcttcttgtgcattgcattatgatgttgactggatgtatgatttgcaagacttgcaactgtccctctgtttgcttgtagtagcacccgatcagtatgtcttgtaatggcacatccatccagatatgcctctcttgtgtatgaagttttctttgctttcagaatatgaaatgagttgtgtctactctgccagccaaaggtttgcctcattgggctctgagataatagtagatccaacagcatgctactattaaatacagcaagaaactgcattaagtaatgttaaatattaggaagaaagtaatactgtgattt

SEQ ID NO: 561 - DNA, 2354 bp, Homo sapiens
  source 1..2354: mol_type = genomic DNA
aaacttgttggaactccgggctcgcgcggaggccaggagctgagcggcggcggctgccggacgatgggagcgtgagcaggacggtgataacctctccccgatcgggttgcgagggcgccgggcagaggccaggacgcgagccgccagcggtgggacccatcgacgacttcccggggcgacaggagcagccccgagagccagggcgagcgcccgttccaggtggccggaccgcgcgagcgcctcagcgcggccgctcgctctccccctcgagggacaaacttttcccaaacccgatccgagcccttggaccaaactcgcctgcgccgagagccgtccgcgtagagcgctccgtctccggcgagatgtccgagcgcaaagaaggcagaggcaaagggaagggcaagaagaaggagcgaggctccggcaagaagccggagtccgcggcgggcagccagagcccagccttgcctccccgattgaaagagatgaaaagccaggaatcggctgcaggttccaaactagtccttcggtgtgaaaccagttctgaatactcctctctcagattcaagtggttcaagaatgggaatgaattgaatcgaaaaaacaaaccacaaaatatcaagatacaaaaaaagccagggaagtcagaacttcgcattaacaaagcatcactggctgattctggagagtatatgtgcaaagtgatcagcaaattaggaaatgacagtgcctctgccaatatcaccatcgtggaatcaaacgagatcatcactggtatgccagcctcaactgaaggagcatatgtgtcttcagagtctcccattagaatatcagtatccacagaaggagcaaatacttcttcatctacatctacatccaccactgggacaagccatcttgtaaaatgtgcggagaaggagaaaactttctgtgtgaatggaggggagtgcttcatggtgaaagacctttcaaacccctcgagatacttgtgcaagtgccaacctggattcactggagcaagatgtactgagaatgtgcccatgaaagtccaaaaccaagaaaaggcggaggagctgtaccagaagagagtgctgaccataaccggcatctgcatcgccctccttgtggtcggcatcatgtgtgtggtggcctactgcaaaaccaagaaacagcggaaaaagctgcatgaccgtcttcggcagagccttcggtctgaacgaaacaatatgatgaacattgccaatgggcctcaccatcctaacccaccccccgagaatgtccagctggtgaatcaatacgtatctaaaaacgtcatctccagtgagcatattgttgagagagaagcagagacatccttttccaccagtcactatacttccacagcccatcactccactactgtcacccagactcctagccacagctggagcaacggacacactgaaagcatcctttccgaaagccactctgtaatcgtgatgtcatccgtagaaaacagtaggcacagcagcccaactgggggcccaagaggacgtcttaatggcacaggaggccctcgtgaatgtaacagcttcctcaggcatgccagagaaacccctgattcctaccgagactctcctcatagtgaaaggtatgtgtcagccatgaccaccccggctcgtatgtcacctgtagatttccacacgccaagctcccccaaatcgcccccttcggaaatgtctccacccgtgtccagcatgacggtgtccatgccttccatggcggtcagccccttcatggaagaagagagacctctacttctcgtgacaccaccaaggctgcgggagaagaagtttgaccatcaccctcagcagttcagctccttccaccacaaccccgcgcatgacagtaacagcctccctgctagccccttgaggatagtggaggatgaggagtatgaaacgacccaagagtacgagccagcccaagagcctgttaagaaactcgccaatagccggcgggccaaaagaaccaagcccaatggccacattgctaacagattggaagtggacagcaacacaagctcccagagcagtaactcagagagtgaaacagaagatgaaagagtaggtgaagatacgcctttcctgggcatacagaaccccctggcagccagtcttgaggcaacacctgccttccgcctggctgacagcaggactaacccagcaggccgcttctcgacacaggaagaaatccaggccaggctgtctagtgtaattgctaaccaagaccctattgctgtataaaacctaaataaacacatagattcacctgtaaaactttattttatataataaagtattccaccttaaatt

SEQ ID NO: 562 - DNA, 1785 bp, Homo sapiens
  source 1..1785: mol_type = genomic DNA
ggcagcagcatggggaaaggacgcgcgggccgagttggcaccacagccttgcctccccgattgaaagagatgaaaagccaggaatcggctgcaggttccaaactagtccttcggtgtgaaaccagttctgaatactcctctctcagattcaagtggttcaagaatgggaatgaattgaatcgaaaaaacaaaccacaaaatatcaagatacaaaaaaagccagggaagtcagaacttcgcattaacaaagcatcactggctgattctggagagtatatgtgcaaagtgatcagcaaattaggaaatgacagtgcctctgccaatatcaccatcgtggaatcaaacgctacatctacatccaccactgggacaagccatcttgtaaaatgtgcggagaaggagaaaactttctgtgtgaatggaggggagtgcttcatggtgaaagacctttcaaacccctcgagatacttgtgcaagtgcccaaatgagtttactggtgatcgctgccaaaactacgtaatggccagcttctacaagcatcttgggattgaatttatggaggcggaggagctgtaccagaagagagtgctgaccataaccggcatctgcatcgccctccttgtggtcggcatcatgtgtgtggtggcctactgcaaaaccaagaaacagcggaaaaagctgcatgaccgtcttcggcagagccttcggtctgaacgaaacaatatgatgaacattgccaatgggcctcaccatcctaacccaccccccgagaatgtccagctggtgaatcaatacgtatctaaaaacgtcatctccagtgagcatattgttgagagagaagcagagacatccttttccaccagtcactatacttccacagcccatcactccactactgtcacccagactcctagccacagctggagcaacggacacactgaaagcatcctttccgaaagccactctgtaatcgtgatgtcatccgtagaaaacagtaggcacagcagcccaactgggggcccaagaggacgtcttaatggcacaggaggccctcgtgaatgtaacagcttcctcaggcatgccagagaaacccctgattcctaccgagactctcctcatagtgaaaggtatgtgtcagccatgaccaccccggctcgtatgtcacctgtagatttccacacgccaagctcccccaaatcgcccccttcggaaatgtctccacccgtgtccagcatgacggtgtccatgccttccatggcggtcagccccttcatggaagaagagagacctctacttctcgtgacaccaccaaggctgcgggagaagaagtttgaccatcaccctcagcagttcagctccttccaccacaaccccgcgcatgacagtaacagcctccctgctagccccttgaggatagtggaggatgaggagtatgaaacgacccaagagtacgagccagcccaagagcctgttaagaaactcgccaatagccggcgggccaaaagaaccaagcccaatggccacattgctaacagattggaagtggacagcaacacaagctcccagagcagtaactcagagagtgaaacagaagatgaaagagtaggtgaagatacgcctttcctgggcatacagaaccccctggcagccagtcttgaggcaacacctgccttccgcctggctgacagcaggactaacccagcaggccgcttctcgacacaggaagaaatccaggccaggctgtctagtgtaattgctaaccaagaccctattgctgtataaaac

SEQ ID NO: 563 - DNA, 1955 bp, Homo sapiens
  source 1..1955: mol_type = genomic DNA
ttttttttgcccttatacctcttcgcctttctgtggttccatccacttcttccccctcctcctcccataaacaactctcctacccctgcacccccaataaataaataaaaggaggagggcaaggggggaggaggaggagtggtgctgcgaggggaaggaaaagggaggcagcgcgagagagccgggcagagtccgaaccgacagccagaagcccgcacgcacctcgcaccatgagatggcgacgcgccccgcgccgctccgggcgtcccggcccccgggcccagcgccccggctccgccgcccgctcgtcgccgccgctgccgctgctgccactactgctgctgctggggaccgcggccctggcgccgggggcggcggccggcaacgaggcggctcccgcgggggcctcggtgtgctactcgtccccgcccagcgtgggatcggtgcaggagctagctcagcgcgccgcggtggtgatcgagggaaaggtgcacccgcagcggcggcagcagggggcactcgacaggaaggcggcggcggcggcgggcgaggcaggggcgtggggcggcgatcgcgagccgccagccgcgggcccacgggcgctggggccgcccgccgaggagccgctgctcgccgccaacgggaccgtgccctcttggcccaccgccccggtgcccagcgccggcgagcccggggaggaggcgccctatctggtgaaggtgcaccaggtgtgggcggtgaaagccgggggcttgaagaaggactcgctgctcaccgtgcgcctggggacctggggccaccccgccttcccctcctgcgggaggctcaaggaggacagcaggtacatcttcttcatggagcccgacgccaacagcaccagccgcgcgccggccgccttccgagcctctttcccccctctggagacgggccggaacctcaagaaggaggtcagccgggtgctgtgcaagcggtgcgccttgcctccccgattgaaagagatgaaaagccaggaatcggctgcaggttccaaactagtccttcggtgtgaaaccagttctgaatactcctctctcagattcaagtggttcaagaatgggaatgaattgaatcgaaaaaacaaaccacaaaatatcaagatacaaaaaaagccagggaagtcagaacttcgcattaacaaagcatcactggctgattctggagagtatatgtgcaaagtgatcagcaaattaggaaatgacagtgcctctgccaatatcaccatcgtggaatcaaacgctacatctacatccaccactgggacaagccatcttgtaaaatgtgcggagaaggagaaaactttctgtgtgaatggaggggagtgcttcatggtgaaagacctttcaaacccctcgagatacttgtgcaagtgcccaaatgagtttactggtgatcgctgccaaaactacgtaatggccagcttctacagtacgtccactccctttctgtctctgcctgaataggagcatgctcagttggtgctgctttcttgttgctgcatctcccctcagattccacctagagctagatgtgtcttaccagatctaatattgactgcctctgcctgtcgcatgagaacattaacaaaagcaattgtattacttcctctgttcgcgactagttggctctgagatactaataggtgtgtgaggctccggatgtttctggaattgatattgaatgatgtgatacaaattgatagtcaatatcaagcagtgaaatatgataataaaggcatttcaaagtctcacttttattgataaaataaaaatcattctactgaacagtccatcttctttatacaatgaccacatcctgaaaagggtgttgctaagctgtaaccgatatgcacttgaaatgatggtaagttaattttgattcagaatgtgttatttgtcacaaataaacataataaaagg

SEQ ID NO: 564 - DNA, 1330 bp, Homo sapiens
  source 1..1330: mol_type = genomic DNA
atggagatttattccccagacatgtctgaggtcgccgccgagaggtcctccagcccctccactcagctgagtgcagacccatctcttgatgggcttccggcagcagaagacatgccagagccccagactgaagatgggagaacccctggactcgtgggcctggccgtgccctgctgtgcgtgcctagaagctgagcgcctgagaggttgcctcaactcagagaaaatctgcattgtccccatcctggcttgcctggtcagcctctgcctctgcatcgccggcctcaagtgggtatttgtggacaagatctttgaatatgactctcctactcaccttgaccctggggggttaggccaggaccctattatttctctggacgcaactgctgcctcagctgtgtgggtgtcgtctgaggcatacacttcacctgtctctagggctcaatctgaaagtgaggttcaagttacagtgcaaggtgacaaggctgttgtctcctttgaaccatcagcggcaccgacaccgaagaatcgtatttttgccttttctttcttgccgtccactgcgccatccttcccttcacccacccggaaccctgaggtgagaacgcccaagtcagcaactcagccacaaacaacagaaactaatctccaaactgctcctaaactttctacatctacatccaccactgggacaagccatcttgtaaaatgtgcggagaaggagaaaactttctgtgtgaatggaggggagtgcttcatggtgaaagacctttcaaacccctcgagatacttgtgcaagtgcccaaatgagtttactggtgatcgctgccaaaactacgtaatggccagcttctacagtacgtccactccctttctgtctctgcctgaataggagcatgctcagttggtgctgctttcttgttgctgcatctcccctcagattccacctagagctagatgtgtcttaccagatctaatattgactgcctctgcctgtcgcatgagaacattaacaaaagcaattgtattacttcctctgttcgcgactagttggctctgagatactaataggtgtgtgaggctccggatgtttctggaattgatattgaatgatgtgatacaaattgatagtcaatatcaagcagtgaaatatgataataaaggcatttcaaagtctcacttttattgataaaataaaaatcattctactgaacagtccatcttctttatacaatgaccacatcctgaaaagggtgttgctaagctgtaaccgatatgcacttgaaatgatggtaagttaattttgattcagaatgtgttatttgtcacaa

SEQ ID NO: 565 - DNA, 1769 bp, Homo sapiens
  source 1..1769: mol_type = genomic DNA
tcgctctccccctcgagggacaaacttttcccaaacccgatccgagcccttggaccaaactcgcctgcgccgagagccgtccgcgtagagcgctccgtctccggcgagatgtccgagcgcaaagaaggcagaggcaaagggaagggcaagaagaaggagcgaggctccggcaagaagccggagtccgcggcgggcagccagagcccagccttgcctccccgattgaaagagatgaaaagccaggaatcggctgcaggttccaaactagtccttcggtgtgaaaccagttctgaatactcctctctcagattcaagtggttcaagaatgggaatgaattgaatcgaaaaaacaaaccacaaaatatcaagatacaaaaaaagccagggaagtcagaacttcgcattaacaaagcatcactggctgattctggagagtatatgtgcaaagtgatcagcaaattaggaaatgacagtgcctctgccaatatcaccatcgtggaatcaaacgagatcatcactggtatgccagcctcaactgaaggagcatatgtgtcttcagagtctcccattagaatatcagtatccacagaaggagcaaatacttcttcatctacatctacatccaccactgggacaagccatcttgtaaaatgtgcggagaaggagaaaactttctgtgtgaatggaggggagtgcttcatggtgaaagacctttcaaacccctcgagatacttgtgcaagtgccaacctggattcactggagcaagatgtactgagaatgtgcccatgaaagtccaaaaccaagaaaaggcggaggagctgtaccagaagagagtgctgaccataaccggcatctgcatcgccctccttgtggtcggcatcatgtgtgtggtggcctactgcaaaaccaagaaacagcggaaaaagctgcatgaccgtcttcggcagagccttcggtctgaacgaaacaatatgatgaacattgccaatgggcctcaccatcctaacccaccccccgagaatgtccagctggtgaatcaatacgtatctaaaaacgtcatctccagtgagcatattgttgagagagaagcagagacatccttttccaccagtcactatacttccacagcccatcactccactactgtcacccagactcctagccacagctggagcaacggacacactgaaagcatcctttccgaaagccactctgtaatcgtgatgtcatccgtagaaaacagtaggcacagcagcccaactgggggcccaagaggacgtcttaatggcacaggaggccctcgtgaatgtaacagcttcctcaggcatgccagagaaacccctgattcctaccgagactctcctcatagtgaaagacataaccttatagctgagctaaggagaaacaaggcacacagatccaaatgcatgcagatccagctatcagcaactcatcttagatcttcttccattccccatttgggcttcattctctaagaccccttggcctttaggaaggtatgtgtcagccatgaccaccccggctcgtatgtcacctgtagatttccacacgccaagctcccccaaatcgcccccttcggaaatgtctccacccgtgtccagcatgacggtgtccatgccttccatggcggtcagccccttcatggaagaagagagacctctacttctcgtgacaccaccaaggctgcgggagaagaagtttgaccatcaccctcagcagttcagctccttccaccacaaccccgcgc

SEQ ID NO: 566 - DNA, 1716 bp, Homo sapiens
  source 1..1716: mol_type = genomic DNA
agcttctgctccagagcttcatcttcaggaaccacctaagcatttttttccccagtaggagttcagtctgctcattatacctaattgcaaaggagctatattcagagcaagaataataatttcagattttttaactggacttcaaagagcaggaaagtatgcagattcctaaacacataagcattgaagatattacagctacatctacatccaccactgggacaagccatcttgtaaaatgtgcggagaaggagaaaactttctgtgtgaatggaggggagtgcttcatggtgaaagacctttcaaacccctcgagatacttgtgcaagtgcccaaatgagtttactggtgatcgctgccaaaactacgtaatggccagcttctacaaggcggaggagctgtaccagaagagagtgctgaccataaccggcatctgcatcgccctccttgtggtcggcatcatgtgtgtggtggcctactgcaaaaccaagaaacagcggaaaaagctgcatgaccgtcttcggcagagccttcggtctgaacgaaacaatatgatgaacattgccaatgggcctcaccatcctaacccaccccccgagaatgtccagctggtgaatcaatacgtatctaaaaacgtcatctccagtgagcatattgttgagagagaagcagagacatccttttccaccagtcactatacttccacagcccatcactccactactgtcacccagactcctagccacagctggagcaacggacacactgaaagcatcctttccgaaagccactctgtaatcgtgatgtcatccgtagaaaacagtaggcacagcagcccaactgggggcccaagaggacgtcttaatggcacaggaggccctcgtgaatgtaacagcttcctcaggcatgccagagaaacccctgattcctaccgagactctcctcatagtgaaaggtatgtgtcagccatgaccaccccggctcgtatgtcacctgtagatttccacacgccaagctcccccaaatcgcccccttcggaaatgtctccacccgtgtccagcatgacggtgtccatgccttccatggcggtcagccccttcatggaagaagagagacctctacttctcgtgacaccaccaaggctgcgggagaagaagtttgaccatcaccctcagcagttcagctccttccaccacaaccccgcgcatgacagtaacagcctccctgctagccccttgaggatagtggaggatgaggagtatgaaacgacccaagagtacgagccagcccaagagcctgttaagaaactcgccaatagccggcgggccaaaagaaccaagcccaatggccacattgctaacagattggaagtggacagcaacacaagctcccagagcagtaactcagagagtgaaacagaagatgaaagagtaggtgaagatacgcctttcctgggcatacagaaccccctggcagccagtcttgaggcaacacctgccttccgcctggctgacagcaggactaacccagcaggccgcttctcgacacaggaagaaatccaggccaggctgtctagtgtaattgctaaccaagaccctattgctgtataaaacctaaataaacacatagattcacctgtaaaactttattttatataataaagtattccaccttaaattaaacaatttattttattttagcagttctgcaaataga

SEQ ID NO: 567 - DNA, 2359 bp, Homo sapiens
  source 1..2359: mol_type = genomic DNA
gaggccaggggagggtgcgaaggaggcgcctgcctccaacctgcgggcgggaggtgggtggctgcggggcaattgaaaaagagccggcgaggagttccccgaaacttgttggaactccgggctcgcgcggaggccaggagctgagcggcggcggctgccggacgatgggagcgtgagcaggacggtgataacctctccccgatcgggttgcgagggcgccgggcagaggccaggacgcgagccgccagcggtgggacccatcgacgacttcccggggcgacaggagcagccccgagagccagggcgagcgcccgttccaggtggccggaccgcccgccgcgtccgcgccgcgctccctgcaggcaacgggagacgcccccgcgcagcgcgagcgcctcagcgcggccgctcgctctccccctcgagggacaaacttttcccaaacccgatccgagcccttggaccaaactcgcctgcgccgagagccgtccgcgtagagcgctccgtctccggcgagatgtccgagcgcaaagaaggcagaggcaaagggaagggcaagaagaaggagcgaggctccggcaagaagccggagtccgcggcgggcagccagagcccagccttgcctccccgattgaaagagatgaaaagccaggaatcggctgcaggttccaaactagtccttcggtgtgaaaccagttctgaatactcctctctcagattcaagtggttcaagaatgggaatgaattgaatcgaaaaaacaaaccacaaaatatcaagatacaaaaaaagccagggaagtcagaacttcgcattaacaaagcatcactggctgattctggagagtatatgtgcaaagtgatcagcaaattaggaaatgacagtgcctctgccaatatcaccatcgtggaatcaaacgagatcatcactggtatgccagcctcaactgaaggagcatatgtgtcttcagagtctcccattagaatatcagtatccacagaaggagcaaatacttcttcatctacatctacatccaccactgggacaagccatcttgtaaaatgtgcggagaaggagaaaactttctgtgtgaatggaggggagtgcttcatggtgaaagacctttcaaacccctcgagatacttgtgcaagtgcccaaatgagtttactggtgatcgctgccaaaactacgtaatggccagcttctacaaggcggaggagctgtaccagaagagagtgctgaccataaccggcatctgcatcgccctccttgtggtcggcatcatgtgtgtggtggcctactgcaaaaccaagaaacagcggaaaaagctgcatgaccgtcttcggcagagccttcggtctgaacgaaacaatatgatgaacattgccaatgggcctcaccatcctaacccaccccccgagaatgtccagctggtgaatcaatacgtatctaaaaacgtcatctccagtgagcatattgttgagagagaagcagagacatccttttccaccagtcactatacttccacagcccatcactccactactgtcacccagactcctagccacagctggagcaacggacacactgaaagcatcctttccgaaagccactctgtaatcgtgatgtcatccgtagaaaacagtaggcacagcagcccaactgggggcccaagaggacgtcttaatggcacaggaggccctcgtgaatgtaacagcttcctcaggcatgccagagaaacccctgattcctaccgagactctcctcatagtgaaaggtaaaaccgaagggcaaagctactgcagaggagaaactcagtcagagaatccctgtgagcacctgcggtctcacctcaggaaatctactctaatcagaataaggggcggcagttacctgttctaggagtgctcctagttgatgaagtcatctctttgtttgacggaacttatttcttctgagcttctctcgtcgtcccagtgactgacaggcaacagactcttaaagagctgggatgctttgatgcggaaggtgcagcacatggagtttccagctctggccatgggctcagacccactcggggtctcagtgtcctcagttgtaacattagagagatggcatcaatgcttgataaggacccttctataattccaattgccagttatccaaactctgattcggtggtcgagctggcctcgtgttcttatctgctaaccctgtcttaccttccagcctcagttaagtcaaatcaagggctatgtcattgctgaatgtcatggggggcaactgcttgccctccaccctatagtatctattttatgaaattccaagaagggatgaataaataaatctcttggatgctg

SEQ ID NO: 568 - DNA, 1585 bp, Homo sapiens
  source 1..1585: mol_type = genomic DNA
aggggactttgataaggaagctgaagggtgatattacctttgctccctcactgcaactgaacacatttcttagtttttaggtggcccccgctggctaacttgctgtggagttttcaagggcatagaatcgtcctttacacaattaaaagaagatgctgtttaatctgaggatcctgttaaacaatgcagcttttagaaatggtcacaacttcatggttcgaaattttcggtgtggacaaccactacaaaataaagtgcagctgaagggccgtgaccttctcactctaaaaaactttaccggagaagaaattaaatatatgctatggctatcagcagatctgaaatttaggataaaacagaaaggagagtatttgcctttattgcaagggaagtccttaggcatgatttttgagaaaagaagtactcgaacaagattgtctacagaaacaggctttgcacttctgggaggacatccttgttttcttaccacacaagatattcatttgggtgtgaatgaaagtctcacggacacggcccgtgtattgtctagcatggcagatgcagtattggctcgagtgtataaacaatcagatttggacaccctggctaaagaagcatccatcccaattatcaatgggctgtcagatttgtaccatcctatccagatcctggctgattacctcacgctccaggaacactatagctctctgaaaggtcttaccctcagctggatcggggatgggaacaatatcctgcactccatcatgatgagcgcagcgaaattcggaatgcaccttcaggcagctactccaaagggttatgagccggatgctagtgtaaccaagttggcagagcagtatgccaaagagaatggtaccaagctgttgctgacaaatgatccattggaagcagcgcatggaggcaatgtattaattacagacacttggataagcatgggacaagaagaggagaagaaaaagcggctccaggctttccaaggttaccaggttacaatgaagactgctaaagttgctgcctctgactggacatttttacactgcttgcccagaaagccagaagaagtggatgatgaagtcttttattctcctcgatcactagtgttcccagaggcagaaaacagaaagtggacaatcatggctgtcatggtgtccctgctgacagattactcacctcagctccagaagcctaaattttgatgttgtgttacttgtcaagaaagaagcaatgttcttcagtaacagaatgagttggtttatggggaaaagagaagagaatctaaaaaataaacaaatccctaacacgtggtatgggtgaaccgtatgatatgctttgccattgtgaaactttccttaagcctttaatttaagtgctgatgcactgtaatacgtgcttaactttgcttaaactctctaattcccaatttctgagttacatttagatatcatattaattatcatatacatttacttcaacataaaatactgtgttcataatgtataatgtctaagccattaagtgtaatctatgcttattacctaaataaattatcacccatgctaattta

SEQ ID NO: 569 - DNA, 813 bp, Homo sapiens
  source 1..813: mol_type = genomic DNA
aaaagtcaccatttaaggggtctgcagtccaattcatcagttgtctttagtttactcagcatcagctactaacatacctgaacgaagatcttgttctaagacattgtatgtgaagatgatacctgcaaaagacatggctaaagttatgattgtcatgttggcaatttgttttcttacaaaatcggatgggaaatctgttaagaagagatctgtgagtgaaatacagcttatgcataacctgggaaaacatctgaactcgatggagagagtagaatggctgcgtaagaagctgcaggatgtgcacaattttgttgcccttggagctcctctagctcccagagatgctggttcccagaggccccgaaaaaaggaagacaatgtcttggttgagagccatgaaaaaagtcttggagaggcagacaaagctgatgtgaatgtattaactaaagctaaatcccagtgaaaatgaaaacagatattgtcagagttctgctctagacagtgtagggcaacaatacatgctgctaattcaaagctctattaagatttccaagtgccaatatttctgatataacaaactacatgtaatccatcactagccatgataactgcaattttaattgattattctgattccacttttattcatttgagttattttaattatcttttctattgtttattctttttaaagtatgttattgcataatttataaaagaataaaattgcacttttaaacctctcttctaccttaaaatgtaaaacaaaaatgtaatgatcataagtctaaataaatgaagtatttctcactc

SEQ ID NO: 570 - DNA, 799 bp, Homo sapiens
  source 1..799: mol_type = genomic DNA
ccttttagtatccaattatctgaaacttaagaagagtgtgcaccgcccaatgggtgtgtgtatgtgctgctttgaacctatagttgagatccagagaattgggagtgacatcatctgtaacaataaaagagcctctcttgtgaagatgatacctgcaaaagacatggctaaagttatgattgtcatgttggcaatttgttttcttacaaaatcggatgggaaatctgttaagaagagatctgtgagtgaaatacagcttatgcataacctgggaaaacatctgaactcgatggagagagtagaatggctgcgtaagaagctgcaggatgtgcacaattttgttgcccttggagctcctctagctcccagagatgctggttcccagaggccccgaaaaaaggaagacaatgtcttggttgagagccatgaaaaaagtcttggagaggcagacaaagctgatgtgaatgtattaactaaagctaaatcccagtgaaaatgaaaacagatattgtcagagttctgctctagacagtgtagggcaacaatacatgctgctaattcaaagctctattaagatttccaagtgccaatatttctgatataacaaactacatgtaatccatcactagccatgataactgcaattttaattgattattctgattccacttttattcatttgagttattttaattatcttttctattgtttattctttttaaagtatgttattgcataatttataaaagaataaaattgcacttttaaacctctcttctaccttaaaatgtaaaacaaa

SEQ ID NO: 571 - DNA, 705 bp, Homo sapiens
  source 1..705: mol_type = genomic DNA
tgagtgcgtcctggcgagtctcagcccccaagcgggtggaacgcaccaagggtctcatccgcgaggaagggctttaacgctcagggtcaggaacctctgagagctcttggggacttgcgcgcccttggatgctcttgcgttcaacagggctaggagactaccggctggggcgaggaatgcaggcgcctagagccttggagctcctgaaacgttcctgccgcctccggaaagcaagggcagtttaccgaagtgactgagtgcgaggttaaaaccttcagccccacgtgctgtttgcaaacctgcctgtacctgaggccctaaaaagccagagacctcactcccggggagccagcatgtccactgcggtcctggaaaacccaggcttgggcaggaaactctctgactttggacaggaaacaagctatattgaagacaactgcaatcaaaatggtgccatatcactgatcttctcactcaaagaagaagttggtgcattggccaaagtattgcgcttatttgaggagaatgatgtaaacctgacccacattgaatctagaccttctcgtttaaagaaagatgagtatgaatttttcacccatttggataaacgtagcctgcctgctctgacaaacatcatcaagatcttgaggcatgacattggtgccactgtccatgagctttcacgagataagaagaaagacacag

SEQ ID NO: 572 - DNA, 675 bp, Homo sapiens
  source 1..675: mol_type = genomic DNA
gcggccgccgcggctgcggccgtggcaaagaaacaggctgcgggcggcaggaagggctgctggggctgcggctggggctgctggccggcgccgccgctctccatcttggcagagctttccatgcgcagcggcggccaaggagtcgcggaatcagagcgatccgggacgcgagtgcgaggttaaaaccttcagccccacgtgctgtttgcaaacctgcctgtacctgaggccctaaaaagccagagacctcactcccggggagccagcatgtccactgcggtcctggaaaacccaggcttgggcaggaaactctctgactttggacaggaaacaagctatattgaagacaactgcaatcaaaatggtgccatatcactgatcttctcactcaaagaagaagttggtgcattggccaaagtattgcgcttatttgaggagaatgatgtaaacctgacccacattgaatctagaccttctcgtttaaagaaagatgagtatgaatttttcacccatttggataaacgtagcctgcctgctctgacaaacatcatcaagatcttgaggcatgacattggtgccactgtccatgagctttcacgagataagaagaaagacacagtgccctggttcccaagaaccattcaagagctggacagatttgccaatcagattctc

SEQ ID NO: 573 - DNA, 4122 bp, Homo sapiens
  source 1..4122: mol_type = genomic DNA
cagctgggggtaaggggggcggattattcatataattgttataccagacggtcgcaggcttagtccaattgcagagaactcgcttcccaggcttctgagagtcccggaagtgcctaaacctgtctaatcgacggggcttgggtggcccgtcgctccctggcttcttccctttacccagggcgggcagcgaagtggtgcctcctgcgtcccccacaccctccctcagcccctcccctccggcccgtcctgggcaggtgacctggagcatccggcaggctgccctggcctcctgcgtcaggacaacgcccacgaggggcgttactgtgcggagatgcaccacgcaagagacaccctttgtaactctcttctcctccctagtgcgaggttaaaaccttcagccccacgtgctgtttgcaaacctgcctgtacctgaggccctaaaaagccagagacctcactcccggggagccagcatgtccactgcggtcctggaaaacccaggcttgggcaggaaactctctgactttggacaggaaacaagctatattgaagacaactgcaatcaaaatggtgccatatcactgatcttctcactcaaagaagaagttggtgcattggccaaagtattgcgcttatttgaggagaatgatgtaaacctgacccacattgaatctagaccttctcgtttaaagaaagatgagtatgaatttttcacccatttggataaacgtagcctgcctgctctgacaaacatcatcaagatcttgaggcatgacattggtgccactgtccatgagctttcacgagataagaagaaagacacagtgccctggttcccaagaaccattcaagagctggacagatttgccaatcagattctcagctatggagcggaactggatgctgaccaccctggttttaaagatcctgtgtaccgtgcaagacggaagcagtttgctgacattgcctacaactaccgccatgggcagcccatccctcgagtggaatacatggaggaagaaaagaaaacatggggcacagtgttcaagactctgaagtccttgtataaaacccatgcttgctatgagtacaatcacatttttccacttcttgaaaagtactgtggcttccatgaagataacattccccagctggaagacgtttctcagttcctgcagacttgcactggtttccgcctccgacctgtggctggcctgctttcctctcgggatttcttgggtggcctggccttccgagtcttccactgcacacagtacatcagacatggatccaagcccatgtatacccccgaacctgacatctgccatgagctgttgggacatgtgcccttgttttcagatcgcagctttgcccagttttcccaggaaattggccttgcctctctgggtgcacctgatgaatacattgaaaagctcgccacaatttactggtttactgtggagtttgggctctgcaaacaaggagactccataaaggcatatggtgctgggctcctgtcatcctttggtgaattacagtactgcttatcagagaagccaaagcttctccccctggagctggagaagacagccatccaaaattacactgtcacggagttccagcccctctattacgtggcagagagttttaatgatgccaaggagaaagtaaggaactttgctgccacaatacctcggcccttctcagttcgctacgacccatacacccaaaggattgaggtcttggacaatacccagcagcttaagattttggctgattccattaacagtgaaattggaatcctttgcagtgccctccagaaaataaagtaaagccatggacagaatgtggtctgtcagctgtgaatctgttgatggagatccaactatttctttcatcagaaaaagtccgaaaagcaaaccttaatttgaaataacagccttaaatcctttacaagatggagaaacaacaaataagtcaaaataatctgaaatgacaggatatgagtacatactcaagagcataatggtaaatcttttggggtcatctttgatttagagatgataatcccatactctcaattgagttaaatcagtaatctgtcgcatttcatcaagattaattaaaatttgggacctgcttcattcaagcttcatatatgctttgcagagaactcataaaggagcatataaggctaaatgtaaaacacaagactgtcattagaattgaattattgggcttaatataaatcgtaacctatgaagtttattttctattttagttaactatgattccaattactactttgttattgtacctaagtaaattttctttaagtcagaagcccattaaaatagttacaagcattgaacttctttagtattatattaatataaaaacatttttgtatgttttattgtaatcataaatactgctgtataaggtaataaaactctgcacctaatccccataacttccagtatcattttccaattaattatcaagtctgttttgggaaacactttgaggacatttatgatgcagcagatgttgactaaaggcttggttggtagatattcaggaaatgttcactgaataaataagtaaatacattattgaaaagcaaatctgtataaatgtgaaatttttatttgtattagtaataaaacattagtagtttaaacaatttcactgtttcagttatttcctggaatgaaatattcctctcactgccttagaaatacattagctagatagttttgtaacatgagaaaatggccagaggctcatatctccaaccctttgcaggggctccttgtgacactcaaagtcatgcctggacagtcaacggactttgacttttgttgattgtgtgtttgccatgaaaacatgaatatctgagaagcagtggggagaaaaaaaacaatatctttgtagctatgatttgaaattctcatactactttacattttattttggaaatagttaagtcttaaagaatttgcatagtgtttctttgagtttagttctcagaacagctgtagtatcatcaacagcaaattctgggtaccttcccagctccacccaatttgaatctctgaagataaggcccagagacctgtatttttaagtaccccatttttttaattattcatagccaaattctatcaggtacattcagtttgagaaaacctgatttgtggtggtcagtctgccactgccaatgatgtcaatgtggataagctgtttcccttctttagacctcagtgtcactctaacaatgagggagttaaactttataaaccaaggtccattgcagccttgaaatatgattcaagtgttcatatgtgtctttatatagctatgcctgatccactgatggggtgttacaatacctgcttatatatgccagctgggaggaaagaggaatttactgaatgtgtctgaagtttcattgttttgaagttggaattttatgcctgtatctatgtttatgcctttgtaaaacccactgattttaaaagtgaaaaaggacttttttctctgcttttactctaaacaccaaacaatccctgcaaagggattattctgatgtttcttcatttcacatgaaaagttaattattgactctggaacttaaatattagataatatttttgacaatattgaagagtgagttttagtccagtaaagatgttttaatgagcttgaaggtaaagtttcggttaagttatgattttcacaggaagttacatactgaatgaaagataatatttgtatttttggtaatgtgctactcagttcttagctcttttttatccagatataaaagcccagtctatagctatgggatttaataaatttccaatatgtaagtgtttttatttgtttaatttctagtaaatgagcaatattttagaaacagtatcagtctttactgacagatgatcttgctgagtacaatcaaaataaatacataaaaaattctaagcatgtggcattgatgtttaataagtttctgaaagtaggaatctgaattttaactgtaggtttctaagttatataatttagttgtgtttcaaaaaatccaccaataaaatgtcagctttataaaaacagaaa

SEQ ID NO: 574 - DNA, 3829 bp, Homo sapiens
  source 1..3829: mol_type = genomic DNA
cggcattgctgacaggcggccccgggggcggtggccaaggcggcgaccggagcgcgatggcgggggcggcgggactcacggcagaagtgagctggaaggtcttggagcgaagagctcggaccaagcgctcagttttaaaattgctatagcttagcctgcgacgcttatgattagagccaacaatttgaaatggcctgctcacctgatgcagtcgtctctccgtcttccgctttcttaaggtctggctcagtttatgaacctcttaaaagcattaatcttccaagacctgataatgaaactctctgggataagttggaccattattacagaattgtcaagtcaacattgctgctgtatcaaagtccaactaccggtctctttcccactaaaacatgcggtggtgaccagaaggccaagatccaggacagcctatactgcgctgctggggcctgggctttggctcttgcatacaggcgaattgatgatgacaagggaaggacccatgagctggagcactcagctataaaatgcatgagaggaattctctactgctatatgcgtcaggccgataaggtccagcagtttaagcaggatccacgcccaacaacatgtcttcactctgttttcaatgtgcatacaggagatgagttgctttcctatgaggaatatggtcatcttcagataaatgcagtgtcactttatctcctttaccttgtggaaatgatttcctcaggactccagattatctacaacactgatgaggtctcttttattcaaaaccttgtattttgtgtggaaagagtttaccgtgtgcctgactttggtgtctgggaaagaggaagcaaatataataatggcagcacagagctacattcgagctcggttggtttagcaaaagcagctctagaagcaattaatggattcaacctttttggcaaccagggctgttcgtggtcagttatatttgtggatctcgatgctcacaatcgcaacaggcaaactttgtgctcgctgttacccagagaatcaagatcacataatacagatgctgccctgctcccctgcatcagttatcctgcatttgccctggatgatgaagttctttttagccagacacttgataaagtggttagaaaattaaaaggaaaatatggatttaaacgtttcttgagagatgggtatagaacatcattggaagatcccaacagatgctactacaagccagctgaaattaagctatttgatggcattgaatgtgaatttcccatatttttcctttatatgatgattgatggagtttttagaggcaatcctaagcaagtacaggaatatcaggatcttttgactccagtacttcatcataccacagaaggatatcctgttgtaccaaagtactattatgtgccagctgactttgtagaatatgaaaaaaataaccctggtagtcaaaaacgatttcctagcaactgtggccgtgatggaaaactgtttctttggggacaagcactttatatcatcgcaaaactcctggctgatgaacttattagtcctaaagacattgatcctgtccagcgctatgtcccactaaaggatcaacgtaacgtgagcatgaggttttccaatcagggcccactggaaaatgacttggtagttcatgtggcacttatagcagaaagccaaagacttcaagtttttctgaacacatatggtattcaaactcaaactcctcaacaagtagaacccattcagatatggcctcagcaggagcttgtgaaagcttatttgcagctgggtatcaatgaaaagttaggactctctggaaggccagacaggcccattggctgcctcgggacatcaaagatttatcgcattctaggaaagactgtggtttgttacccgattattttcgacctaagtgatttctacatgtctcaggatgttttcctgctgatagatgacataaagaatgcgctgcagttcattaaacaatattggaaaatgcatggacgtccacttttccttgttctcatccgggaagacaatataagaggtagccggttcaaccccatattagatatgctggcagcccttaaaaaaggaataattggaggagtcaaagttcatgtggatcgtctacagacactaatatctggagctgtggtagaacaacttgatttcctacgaatcagtgacacagaagagcttccagaatttaagagttttgaggaactagaacctcccaaacattcaaaagtcaaacggcaaagcagcacccctagtgctcctgaactgggacagcagccggatgtcaacattagtgaatggaaggacaaacccacccacgaaattcttcaaaaactgaatgattgcagttgtctggctagccaagccatcctgctgggtatactgctcaaaagagaaggccccaacttcatcacaaaggaaggtaccgtttctgatcacattgagagagtctatagaagagctggcagccaaaaactttggtcggttgtacgccgtgcagcaagtcttttaagtaaagtagtggacagcctggccccatccattactaatgttttagtgcagggcaaacaggtaactctgggtgcctttgggcatgaagaagaagttatctctaatcctttgtctccaagagtgattcaaaacatcatctattataagtgtaacacccatgatgagagggaagcggtcattcagcaagaactggtcatccatattggctggatcatctccaataaccctgagttattcagtggcatgctgaaaatacgaatcgggtggatcatccatgccatggagtatgaacttcagatccgtggcggagacaagccagccttggacttgtatcagctgtcacctagtgaagttaaacagcttctgctggatattctgcagcctcaacagaatggaagatgttggctgaacaggcgtcagatcgatgggtctttgaatagaactcccaccgggttctatgaccgagtgtggcagattctggagcgcacgcccaatgggatcattgttgctgggaagcatttgcctcagcaaccaaccctgtcagatatgaccatgtatgagatgaatttctctctccttgttgaagacacgttgggaaatattgaccagccacagtacagacagatcgttgtagagttacttatggttgtatccattgtactggaaagaaaccccgagctagaatttcaagacaaagtagatctagacagactggtcaaagaagcatttaatgaatttcaaaaagatcagagtcggctaaaggaaattgaaaaacaagatgacatgacttccttttacaacactcctcccctgggaaaaagaggaacatgcagctatttgacaaaggcggtgatgaatctgctgctggaaggagaagtcaagccaaacaatgatgacccgtgtctgattagctagtggggaaggtgtaggaagctctgttgagacacatgttctgaagtgtgttgtgtttcatgttcaagcttaatcaaggcagccattaatatacgaactgagcatgctggggaggtgaatgccacatccttggcggggttatggacctcttgcatgtcatagccaatctaacggtaatggtaaatgcttttaatcaagcaggaaaaagttctcatgattatgccaactataatagtaatcctcactgagtgataaaaatagtttatgaattgaaaatttgccgctgcatgttgtatgatcaaatagttcatcaaaatgaatctttgctctttggactgaattcttaccatactgccattaaaataaatttgccaactagtaa

SEQ ID NO: 575 - DNA, 5532 bp, Homo sapiens
  source 1..5532: mol_type = genomic DNA
agccgagcgccgactcacgccccagccccaattgggcggccggtttccaattggaagggcttctgagcctcagtcttcgggcggcgctgaccattggcgggcaggatggaggcggagccttgggttgtcgcccgccgccgggggttaaggtgagcgactgcaggcaaacccggcgacagcgcagctcgcgtcgaccctggctcctctgcctgccccctcaggcccccgcctccttcaggatgacgctggacgtggggccggaggatgagctgcccgactgggccgccgccaaagagttttaccagaagtacgaccctaaggacgtcatcggcagaggagtgagctctgtggtccgccgttgtgttcatcgagctactggccacgagtttgcggtgaagattatggaagtgacagctgagcggctgagtcctgagcagctggaggaggtgcgggaagccacacggcgagagacacacatccttcgccaggtcgccggccacccccacatcatcaccctcatcgattcctacgagtcttctagcttcatgttcctggtgtttgacctgatgcggaagggagagctgtttgactatctcacagagaaggtggccctctctgaaaaggaaaccaggtccatcatgcggtctctgctggaagcagtgagctttctccatgccaacaacattgtgcatcgagatctgaagcccgagaatattctcctagatgacaatatgcagatccgactttcagatttcgggttctcctgccacttggaacctggcgagaagcttcgagagttgtgtgggaccccagggtatctagcgccagagatccttaaatgctccatggatgaaacccacccaggctatggcaaggaggtcgacctctgggcctgtggggtgatcttgttcacactcctggctggctcgccacccttctggcaccggcggcagatcctgatgttacgcatgatcatggagggccagtaccagttcagttcccccgagtgggatgaccgttccagcactgtcaaagacctgatctccaggctgctgcaggtggatcctgaggcacgcctgacagctgagcaggccctacagcaccccttctttgagcgttgtgaaggcagccaaccctggaacctcaccccccgccagcggttccgggtggcagtgtggacagtgctggctgctggacgagtggccctaagcacccatcgtgtacggccactgaccaagaatgcactgttgagggacccttatgcgctgcggtcagtgcggcacctcatcgacaactgtgccttccggctctacgggcactgggtaaagaaaggggagcagcagaaccgggcggctctctttcagcaccggccccctgggccttttcccatcatgggccctgaagaggagggagactctgctgctataactgaggatgaggccgtgcttgtgctgggctaggacctcaaccccagggattcccaggaagcagaactctccagaagaagggttttgatcattccagctcctctgggctctggcctctggcctcaggcccactaatgatcctgctaccctcttgaagaccagcccggtacctctctccccactggccaggactctgagatcagagctggggtggaagggagccattctgaacgccacgcctggcccggtcagtgctgcatgcactgcatatgaaataaaatctgctacacgccagggagaacaggtgtcctgtgtctgtctggcttgggcaggaaagcccagaaggtgctcagcagggtgcagggatggtgccattctggcccagacctttattggggaaaatgttgggggtcacttggtcttgctcttgcctttacccggaggtagctggaagggccgctctagtgcagtcaacttgctgctgagcctttcctcgctggccttgagccgctcctccaccagcccctggagctgctccagctctttgttcacttgggtcttgatgtaggctcggaggacgtggatgtggcctgcaggggcagggaagaaggggcagggtgaggagagatgctgtctggcaatggggggatggtccctagttgggcaaacagtccccaaatttcccctggtggggatatagaggtagcaatgttgtttccctttaggaaatgttagcaagcccttgtgtgagaggtagttgggtagggtggctatgctggactttgcagcttcaaattctgatccctactcagtagctgtgtgaccttaggcaggttatttaacctatctgtgcctcagtttccttgtatgaaatgtggatagtgatacctagcacataggattgagggaggattaaatgagttaatttatgtaaaatgcttagagcagggcatgcactgcacacctattgccaagtatgtgctggctgttattgtcattggctttctctttttttttttttttttgagatggagtcttgctttatcccccaggctggagtgcagtggcagcgatctcagctcactgcaagctctgcctcccaggttcatgccattctcctgcctcagcctcccagtagctgggactacaggcacccgccaccacgcccggctaactttttgtatttttagtagagacggggtttcacagtgttagccaggatggactcgatctcctgacctcgtgatccgcctgcctcagcctcccaaagtgctgggattacagttgtgagccactgcacctggcctgttctttgtttttttttaactcttaagttctgggatacgagcagaacatgcaggtttgctacgtaggtatacatgggccatggtggtttgctttacccatcaacccatcatataggttttaagccaccgtcattggctttctaatgatcatttctctggagccacttcagctgtgctttttgtttgtttgtttgtttgttttgagacagagtcttgctctgttgcccaggctggagtgcagtggccagatcttggctcactgcagtctccacctcctgggttcatgcagttctcctgcctcagcctcctgagtagctgggactacaagcgcgcaccaccatgcctggctattttttgtattttagtagatagggggtttcacggtgttgcccaggctggtcgcgaactcctgagctcaggcaatccgcctgcctcagattgtgctgggattacaggtgtgagccaccacgcctggcctgcagctgtgcttttatctgtcatcttggacttctgcataagggatcatttagagaaaggactctgactaaaaacaaaaagtctgaagtcctgatgtcatccaaacccttcattctacacctgctcagagggacagggcagcctgccctctccagatcctcacttggctctggctctggtggggccactgtctctagttcctctttctgcggggtaactgcctgctcctccatctccttgctttcttctttctctgcaaaccagaagcaggaagagactgtggccccaggcctggcccagcccagccctgccctggcactctcccttacccgtctcactctctggccacagtttgggtggctgtagccccatgtaagtcaaagacagatccagccgcacctgggaagcaaggcagagggaggctgaaaggagtgcacctgtgctgaggggaggggcggttgagggtggctcctcatggtccaccaccccctacctggggtgtgaagacgtatttatagagcttgaagtggcggaagtaagtgttgaccacgtagtcttccaaggccagcagctgttcctctttgaagaggtcgatgctgaaaggaggccgctgtggtggtgactcggaattagaaccctgactaccttccggagccctggctttgcctccaaaagcccagcaacaggagcaaggagagcccactggggtcttcacaagaagataagggtgatgaatgtgagagagactgggtgagaccttgtctggggatgggtaaagtttccagaatgttccaggggaactgaccctgactccatggcaaaaaaggacactggtgaagtagcggtagcactcctccacgttgcccaagggggttgctggtagggaaagcaagatgcagcagtgaggccctctctggtatccattcattcacttcactcaacagctgtttatgaccatgagcttcagaagcagacagatctgggtttcagcactggcttgtttccttaactcatgtaacaaatactgaatacccactatatgcccactgtatggttttcggcactgaacaagacagacaaggtcctgcccttacgaagcttatattctaggggaataaaccaagaaatagatcatttcagctattaaacattctgaagcaagagctattaaacattctaaagcaggtgttattgtgcactatgcatatatttgcatatattatttctcagaacagtcctgtaaaatgtgtgctgtatccttaatttctagataaggaagcagtggattggaaagctgatggcttgtgtatgatgatgctactaataatgacatattccaggcagaaatcccctgcttctgcttcccatggtcacttgtgccaggcccggttcctcttctccctggggctcaaacctggtagctgccccctctcaccaatacaagccttgtgaagatcctggagcagggcacaagccgctgacgtctgctccagtgagaagccctgctggcggcagaaaatgagcgcgtggcagaagaggtccagggtgatggcgtccctcaggctctgctcaggacaccctagctccagcagctcagccagcacccttgggagggagagaggagtgagtgacaactgggcctcctttcatcaccctacacccaccacatgctttggagtcagccattcctcatgttttcccaacctgacccctcagcctttgccaagagctcttcccacgcccccctcagtccctactccctcatctcagcattggtggtcttctccagctggtgcatggaatggacgtccaggtacttcctgttatagtaaaagaaaaagagtattggtggccgttacctatcatgacaaggctgtgacagctagtgcgtgagactgggagttggccaccggcgtgaagctgggctcttttgccagcttgctgtgtgactatgcaaatcgttaactctctgggcctaaatgaactcttatgagcctctccatttctaaagcctagggttaggaatcttgaattcttttttctgctctgccactaccttgtatgaccttggtcaagtactccctgtggccctcagtgtccccctctgtacaatactccttagcggccatgagactccatttacattctgtctttggctctttttttctcacactgcctcctctttggactggagaggctggaaagccaacttccagtcacctggagtaattgcatctccaggcctcagtctcatctgtaaaatggggatgccctggccacagacaggactgttggggagacaataaagaacgcaaatattc

SEQ ID NO: 576 - DNA, 5559 bp, Homo sapiens
  source 1..5559: mol_type = genomic DNA
cggagggcgggtccaaggcgcccaggtggccgcggcagaagggcctgtttctctggccttggctgtggttggcagccggccggggagagaagggactcagggaggcaacctggttcccgcccgttgctgatttcgcagcggctctcccgggccgcccccttttccttcctcctcaggccgcgacttggagggttccgctccgcggcgggggcagagccaggggcggggctgagcgcggcctgggcgatctccccggcggctggggtgggctggcgtcttcttcgcgcccgggggacctcctcgcgaccgccgggacgtaaaaggggcttggcaggggcgtcctcgccccactcccggaacctggtttcccgctgctcccgcgagcgtcgggagcccagcaggcctggccgaggcgggaccttcgtcgctccagcccccgtccccgcccccgcgcctccccgccgcgcggagctctggttggcttgctttccaaccggactttggggctagcgtttagaaaagtctcgacctcctccggcccggtcccatcccaagaaccgactaaggctgtgagtgtccgggaaccagacccgcttggaggccacagccccgacgtcccgcgcccacgcggcagatcgggcgctgcggcctgggagcctcggggagatgcggagcaggagcaattccggggtccgcttggacgggtacgcgcggctggtgcagcaaaccatcctgtgttaccagaatcccgtcacggggctgctgtcagccagccatgagcagaaggatgcctgggtgcgggataacatctacagtatcctggccgtgtggggcctgggcatggcctaccgtaagaatgcagaccgcgatgaggacaaggccaaggcctacgagctggagcagaacgtggtgaagctgatgcgaggtcttctccagtgcatgatgagacaggtggccaaagtggagaagttcaaacacactcagagcaccaaggacagcctgcacgccaagtacaacaccgccacctgtggcacggtggtgggcgacgaccagtggggccacctccaggtggatgccacctctctcttcctcctgttcctggcccagatgaccgcctcaggcttacgtatcattttcactctcgatgaggtggccttcatacagaatcttgtcttttacatagaagctgcatataaagtcgctgattatggaatgtgggagcgtggagataagactaatcagggcatcccggaattgaatgcaagctccgtaggaatggccaaggcagctcttgaggcaattgatgaactggacctttttggagcccatggaggacgcaagtcagtgattcatgttctgccagatgaggtcgagcactgccagtctattctgttctccatgctgccaagagcgtcgacatctaaagaaattgatgctggacttctttccattatttccttcccggcctttgcagtggaagatgtaaaccttgtaaatgtgaccaaaaatgaaattatttctaagctccaggggcgttatggatgctgtcgcttccttcgagatggttataaaactccaagagaggaccctaatcgactgcattatgaccctgctgaactcaagctcttcgaaaacattgaatgtgagtggcctgtgttttggacatattttataatagatggagtcttcagtggtgatgctgttcaggtccaagaataccgagaggccctggagggaatactcatcagaggcaagaatgggatccgcctggtgcctgaactctacgctgtcccgcctaacaaggtagatgaagagtacaagaatcctcacacagtagaccgagttcctatggggaaggtgcctcatctgtggggccaatccttgtacatcctcagctcgctgttggcagagggattccttgccgctggtgaaatcgatcccttaaatagaagattttccacttcagtcaaacctgatgttgtagtacaagttactgttttggcagaaaacaatcacattaaggacttattgaggaaacacggggtgaacgtccagagtatcgcggacattcatccaattcaagtccagccgggccggattcttagtcacatatatgccaagcttggacggaataagaatatgaatttgagtgggcgaccgtatcgacatattggtgtccttggaacctctaaactatatgtgattaggaaccaaatctttacttttacaccccagttcaccgaccagcatcacttctacctggccctcgacaatgagatgatcgtggagatgctaaggatcgagctggcctacctgtgcacctgctggaggatgacgggcagacccacactcaccttccccatcagtcgcaccatgctcacaaatgatggctcagacattcattctgctgtgctctccacaattagaaaactagaggatggatattttggaggagccagagtaaaattagggaacctttcggaatttctcaccacatcgttctacacatatctgacttttctggatccagactgtgatgagaagttgtttgacaatgccagcgaagggactttcagtcctgatagtgattcagatttggtaggatatctggaagacacctgtaatcaagaaagccaagacgaacttgaccattatatcaaccaccttctgcaaagcacatcgttgaggtcctatctgcctcctctttgtaagaacacagaagaccgccatgtcttcagtgctatccactccacgcgggacatactttctgtgatggcaaaagcaaagggtttggaagttccatttgttcccatgactttgccgactaaagttctaagtgcccaccgtaaatcactgaatcttgttgattctcctcagccactcctagaaaaggttcctgaaagtgactttcagtggcccagagatgaccatggtgacgtggactgtgagaagctggttgagcagctaaaagattgttcgaacctacaggaccaagcagacattctgtacattctttatgtcataaagggtcccagctgggacacaaatctctctggacagcacggggtcaccgttcaaaaccttcttggtgagctctatgggaaagccggcttgaaccaggagtggggtctgattcgctacatctcaggccttctcaggaagaaagtggaggtcctggctgaggcctgcacagacctgctttcgcaccagaagcagctcaccgtgggcctgccgcccgagccccgggagaagatcatctctgcgccccttcccccagaggagctcacaaaactcatctacgaggccagtgggcaggacatcagcattgccgtcctcacgcaggagattgtggtttacctggccatgtatgtcagggcgcagcccagcctctttgtggagatgctgagactccggattggactgatcattcaggtgatggccacggagctggcacggagcctgaactgctcaggagaagaggcttctgaaagtttgatgaacctcagccctttcgatatgaaaaatctcctgcaccatattctaagtgggaaagagtttggcgttgaaagaagtgtgcgccctatccactcctccacatccagccctaccatctccatccacgaggtgggccataccggagtcaccaaaactgagaggagtggcattaacagactgaggagtgaaatgaaacagatgactaggcggtttagtgctgatgaacagttcttttctgtgggccaggccgcgtccagcagtgcgcattcctccaagtctgcgaggtccagcaccccatcctcgcccactggcacgtcatcctcagactcgggaggacatcacatcggctggggtgagcggcagggccagtggctgcgcaggagaaggctggatggggccatcaacagggtccccgtgggattctaccagagggtgtggaagatcctccagaagtgccacggtctctccatcgatggttatgtcctcccatcctcgacgacccgagagatgaccccgcatgagatcaagtttgctgtccatgtcgaatcggtgctgaaccgcgtgccgcagcccgagtaccggcagctgctggtggaagccatcatggtgctgacgctgctctcggacacggagatgaccagcatcgggggcatcatccacgtggaccagatcgtgcagatggccagtcagctgttcttgcaggaccaggtgtcaattggtgccatggacaccctggagaaagaccaagccacaggaatctgccacttcttttatgacagcgctccgagtggggcttatgggacgatgacctacctaacaagagcagtggcttcttatttgcaggaattgttgcccaattcgggctgccagatgcaatagggtctcacctggaaacatgatcacactctcaatctgtcacgtgccccctagccttactgggaaccttctgtcccccaagatcccctgtgctatcaggaaagcatgtcccatcagaaacactctcggggggcaatggtagcactcaccctgaaactgatgtatgttaaagccacagagatagagctgaggagtcctgtgttcccccgcaaggagcaccccgggatcattttctaggttcatttctctggaacatttgctgtagcatctggtctcacggactctgaggaggaattggaaattggtctcttttgagtgcagagggaactgagacgccagcttaaattggctcttgcagagagttacagaaatagtttcgatgagctagtgacacatcctaaagatgcaaagatcctcctggcggcagtagccttgacaagggccacctcttcacaggatgcagtctgtctgtgcaccaaactcttcaccaaatagaacacttgtgtctctctgtggaatgggggttttcttgtgccttgcttgctttcatagccttccattttattggcatggctgccttgatgtaacataattctctgtccccaagatttagaaaattcctcttcgttcaccttggctcatggtcttccagggtttttatcctggctgtctatgaactagggttttctcctgccttaggaaaaatactgcatcttctggaatctagaaaaaaaaaaaaaaaaagacaaggctcctcttatagccaggcaagcagttgtttagggctagacctgttgtccccgctcgcgtggggtgaacgccccgcagtggatactgtcctcctgtgctctgggcgaggcgtcatagggtgagcacaagtcagcagtgccatggaagtgaacaggcatgtccccgcagaaacaatgcttccctctgaaaaatagagccaggctaggaacctgtaccctcttggtagaagcactttggtcttcactctcttgggtgggtgcagttggaggcaccgattggaggagagcaaggttgagtcaggtgtcagggtctggcaaatcttttgccaatgccctagcaatggagtttctctccgggcattgtcttaccttgggggaaggaaacaaaaccaatgggaaaacagtttctgtaaataataaaccttgaaagacaaatgct

SEQ ID NO: 577 - DNA, 5603 bp, Homo sapiens
  source 1..5603: mol_type = genomic DNA
attgctgacaggcggccccgggggcggtggccaaggcggcgaccggagcgcgatggcgggggcggcgggactcacggcagaagtgagctggaaggtcttggagcgaagagctcggaccaagcgctcagttttaaaattgctatagcttagcctgcgacgcttatgattagagccaacaatttgaaatggcctgctcacctgatgcagtcgtctctccgtcttccgctttcttaaggtctggctcagtttatgaacctcttaaaagcattaatcttccaagacctgataatgaaactctctgggataagttggaccattattacagaattgtcaagtcaacattgctgctgtatcaaagtccaactaccggtctctttcccactaaaacatgcggtggtgaccagaaggccaagatccaggacagcctatactgcgctgctggggcctgggctttggctcttgcatacaggcgaattgatgatgacaagggaaggacccatgagctggagcactcagctataaaatgcatgagaggaattctctactgctatatgcgtcaggccgataaggtccagcagtttaagcaggatccacgcccaacaacatgtcttcactctgttttcaatgtgcatacaggagatgagttgctttcctatgaggaatatggtcatcttcagataaatgcagtgtcactttatctcctttaccttgtggaaatgatttcctcaggactccagattatctacaacactgatgaggtctcttttattcaaaaccttgtattttgtgtggaaagagtttaccgtgtgcctgactttggtgtctgggaaagaggaagcaaatataataatggcagcacagagctacattcgagctcggttggtttagcaaaagcagctctagaagcaattaatggattcaacctttttggcaaccagggctgttcgtggtcagttatatttgtggatctcgatgctcacaatcgcaacaggcaaactttgtgctcgctgttacccagagaatcaagatcacataatacagatgctgccctgctcccctgcatcagttatcctgcatttgccctggatgatgaagttctttttagccagacacttgataaagtggttagaaaattaaaaggaaaatatggatttaaacgtttcttgagagatgggtatagaacatcattggaagatcccaacagatgctactacaagccagctgaaattaagctatttgatggcattgaatgtgaatttcccatatttttcctttatatgatgattgatggagtttttagaggcaatcctaagcaagtacaggaatatcaggatcttttgactccagtacttcatcataccacagaaggatatcctgttgtaccaaagtactattatgtgccagctgactttgtagaatatgaaaaaaataaccctggtagtcaaaaacgatttcctagcaactgtggccgtgatggaaaactgtttctttggggacaagcactttatatcatcgcaaaactcctggctgatgaacttattagtcctaaagacattgatcctgtccagcgctatgtcccactaaaggatcaacgtaacgtgagcatgaggttttccaatcagggcccactggaaaatgacttggtagttcatgtggcacttatagcagaaagccaaagacttcaagtttttctgaacacatatggtattcaaactcaaactcctcaacaagtagaacccattcagatatggcctcagcaggagcttgtgaaagcttatttgcagctgggtatcaatgaaaagttaggactctctggaaggccagacaggcccattggctgcctcgggacatcaaagatttatcgcattctaggaaagactgtggtttgttacccgattattttcgacctaagtgatttctacatgtctcaggatgttttcctgctgatagatgacataaagaatgcgctgcagttcattaaacaatattggaaaatgcatggacgtccacttttccttgttctcatccgggaagacaatataagaggtagccggttcaaccccatattagatatgctggcagcccttaaaaaaggaataattggaggagtcaaagttcatgtggatcgtctacagacactaatatctggagctgtggtagaacaacttgatttcctacgaatcagtgacacagaagagcttccagaatttaagagttttgaggaactagaacctcccaaacattcaaaagtcaaacggcaaagcagcacccctagtgctcctgaactgggacagcagccggatgtcaacattagtgaatggaaggacaaacccacccacgaaattcttcaaaaactgaatgattgcagttgtctggctagccaagccatcctgctgggtatactgctcaaaagagaaggccccaacttcatcacaaaggaaggtaccgtttctgatcacattgagagagtctatagaagagctggcagccaaaaactttggtcggttgtacgccgtgcagcaagtcttttaagtaaagtagtggacagcctggccccatccattactaatgttttagtgcagggcaaacaggtaactctgggtgcctttgggcatgaagaagaagttatctctaatcctttgtctccaagagtgattcaaaacatcatctattataagtgtaacacccatgatgagagggaagcggtcattcagcaagaactggtcatccatattggctggatcatctccaataaccctgagttattcagtggcatgctgaaaatacgaatcgggtggatcatccatgccatggagtatgaacttcagatccgtggcggagacaagccagccttggacttgtatcagctgtcacctagtgaagttaaacagcttctgctggatattctgcagcctcaacagaatggaagatgttggctgaacaggcgtcagatcgatgggtctttgaatagaactcccaccgggttctatgaccgagtgtggcagattctggagcgcacgcccaatgggatcattgttgctgggaagcatttgcctcagcaaccaaccctgtcagatatgaccatgtatgagatgaatttctctctccttgttgaagacacgttgggaaatattgaccagccacagtacagacagatcgttgtagagttacttatggttgtatccattgtactggaaagaaaccccgagctagaatttcaagacaaagtagatctagacagactggtcaaagaagcatttaatgaatttcaaaaagatcagagtcggctaaaggaaattgaaaaacaagatgacatgacttccttttacaacactcctcccctgggaaaaagaggaacatgcagctatttgacaaaggcggtgatgaatctgctgctggaaggagaagtcaagccaaacaatgatgacccgtgtctgattagctagtggggaaggtgtaggaagctctgttgagacacatgttctgaagtgtgttgtgtttcatgttcaagcttaatcaaggcagccattaatatacgaactgagcatgctggggaggtgaatgccacatccttggcggggttatggacctcttgcatgtcatagccaatctaacggtaatggtaaatgcttttaatcaagcaggaaaaagttctcatgattatgccaactataatagtaatcctcactgagtgataaaaatagtttatgaattgaaaatttgccgctgcatgttgtatgatcaaatagttcatcaaaatgaatctttgctctttggactgaattcttaccatactgccattaaaataaatttgccaactagtaatgcatactggaaatcaaaagatactgaaagaatggtgaacttctcttagtggtattgtcatgctaaaagatgttaatatacatcataaaagcaaagtcagccagctgatattttggttctcaaaaactgcattattaataatattttagtatacagagctattctacagtttttacattgtaaacatgactgtggttttgtatttgctaaatataggggttggactaaaatataataaatctgtaccttatcaaacattttctttgagctcctgctaaaaataggacatgtctatgattgttcaaaaatatgttaaatttaggctcagcacagtagctcacacctgaaatcttagcacttcgggaggctgaggcaggtggatcacttgaggttaggagttcaagaccagcccagccaacatggtgaaaaccctgtctctactaaaaatacaaaaattagccaggcatgatggtgcatgcctttaaacccagctactgaggaggctgaggcatgagaattgcttgaaccaggagacggaggttgcagtgagctgaaatcctgccactgcacaccagcctgggtgacagagcgagactccatctcaaaaaaaaaaaaaaaaaagaaaaagaaaaaaatatgttaaatttaaggactgttaacctacgttctactagtaaaaacaacattaagggtcattaaattttatttctgaattaatgaacatatctggacattttttgttcctaggttcacaagattgagcttcaaactcccgagtgttttcatttaattgatttagaggtagaatggaagagaatctgtggtacctaccattatacacatttagttgcccagtttacttaaactttaatgaaagtagaaagtagattaaacatttaaattttatttctttcctaaatagaaaaaaaaaaggcccatgagtttgagcccttgccccaaagagagttgtttttctgatcaatcttactggagtttcacctgagaagatagatttgtcacataaaaaatgcagcttatttgtagtgttttgaaaggatgtaagaaaggatgagtggcttcagtattgagtcaatcgatatcaaatgaatggatgtgtgagcacatggaaaaatctgctgtcagtcacatttctcataacattgaggtacagtgccgagatcttgcataagaaattgtatggatattagttggcaaaattgaaatgaatgagacacagttgggccctaaagaactaaggagggggattgacaaagaatagaattaaactacttgactcaatatgttaagagagtttatgaaaagatagtcgtgaagggtgaagctaatttgtaaaactaatgcctgaaaaaaacgtaagcatgaagtccatggagagggaattgagagctgacacttcataactggagaaactggaaattaaagaaagggaaacaaaagacttaaaatttttgtttgccgaaatttttacgaaagtaaactgtgttgtagttttaagaatttttttaaaaaatctgattagctgagcaaagttaccagaaaactgctatcctagttgaaatcaaacattacttgcaaatgtgttttctgagtgttagcttcctgcttaaatgttacatatgcaaaattctgaagttttcctgtgctactcctgaaagcattcagaatctgtgacacgtattgacttcatgctttgagattcaaaatttattgttctgaaagttatatttagaatcagtaaatcttgatattcaccttta

SEQ ID NO: 578 - DNA, 5463 bp, Homo sapiens
  source 1..5463: mol_type = genomic DNA
ggccaaggcggcgaccggagcgcgatggcgggggcggcgggactcacggcagaagtgagctggaaggtcttggagcgaagagctcggaccaagcgctcaggctcagtttatgaacctcttaaaagcattaatcttccaagacctgataatgaaactctctgggataagttggaccattattacagaattgtcaagtcaacattgctgctgtatcaaagtccaactaccggtctctttcccactaaaacatgcggtggtgaccagaaggccaagatccaggacagcctatactgcgctgctggggcctgggctttggctcttgcatacaggcgaattgatgatgacaagggaaggacccatgagctggagcactcagctataaaatgcatgagaggaattctctactgctatatgcgtcaggccgataaggtccagcagtttaagcaggatccacgcccaacaacatgtcttcactctgttttcaatgtgcatacaggagatgagttgctttcctatgaggaatatggtcatcttcagataaatgcagtgtcactttatctcctttaccttgtggaaatgatttcctcaggactccagattatctacaacactgatgaggtctcttttattcaaaaccttgtattttgtgtggaaagagtttaccgtgtgcctgactttggtgtctgggaaagaggaagcaaatataataatggcagcacagagctacattcgagctcggttggtttagcaaaagcagctctagaagcaattaatggattcaacctttttggcaaccagggctgttcgtggtcagttatatttgtggatctcgatgctcacaatcgcaacaggcaaactttgtgctcgctgttacccagagaatcaagatcacataatacagatgctgccctgctcccctgcatcagttatcctgcatttgccctggatgatgaagttctttttagccagacacttgataaagtggttagaaaattaaaaggaaaatatggatttaaacgtttcttgagagatgggtatagaacatcattggaagatcccaacagatgctactacaagccagctgaaattaagctatttgatggcattgaatgtgaatttcccatatttttcctttatatgatgattgatggagtttttagaggcaatcctaagcaagtacaggaatatcaggatcttttgactccagtacttcatcataccacagaaggatatcctgttgtaccaaagtactattatgtgccagctgactttgtagaatatgaaaaaaataaccctggtagtcaaaaacgatttcctagcaactgtggccgtgatggaaaactgtttctttggggacaagcactttatatcatcgcaaaactcctggctgatgaacttattagtcctaaagacattgatcctgtccagcgctatgtcccactaaaggatcaacgtaacgtgagcatgaggttttccaatcagggcccactggaaaatgacttggtagttcatgtggcacttatagcagaaagccaaagacttcaagtttttctgaacacatatggtattcaaactcaaactcctcaacaagtagaacccattcagatatggcctcagcaggagcttgtgaaagcttatttgcagctgggtatcaatgaaaagttaggactctctggaaggccagacaggcccattggctgcctcgggacatcaaagatttatcgcattctaggaaagactgtggtttgttacccgattattttcgacctaagtgatttctacatgtctcaggatgttttcctgctgatagatgacataaagaatgcgctgcagttcattaaacaatattggaaaatgcatggacgtccacttttccttgttctcatccgggaagacaatataagaggtagccggttcaaccccatattagatatgctggcagcccttaaaaaaggaataattggaggagtcaaagttcatgtggatcgtctacagacactaatatctggagctgtggtagaacaacttgatttcctacgaatcagtgacacagaagagcttccagaatttaagagttttgaggaactagaacctcccaaacattcaaaagtcaaacggcaaagcagcacccctagtgctcctgaactgggacagcagccggatgtcaacattagtgaatggaaggacaaacccacccacgaaattcttcaaaaactgaatgattgcagttgtctggctagccaagccatcctgctgggtatactgctcaaaagagaaggccccaacttcatcacaaaggaaggtaccgtttctgatcacattgagagagtctatagaagagctggcagccaaaaactttggttggcggtgcgctacggggctgcatttacccagaaattttcttcctctatagccccacacattactacttttctggtacatgggaaacaggtaactctgggtgcctttgggcatgaagaagaagttatctctaatcctttgtctccaagagtgattcaaaacatcatctattataagtgtaacacccatgatgagagggaagcggtcattcagcaagaactggtcatccatattggctggatcatctccaataaccctgagttattcagtggcatgctgaaaatacgaatcgggtggatcatccatgccatggagtatgaacttcagatccgtggcggagacaagccagccttggacttgtatcagctgtcacctagtgaagttaaacagcttctgctggatattctgcagcctcaacagaatggaagatgttggctgaacaggcgtcagatcgatgggtctttgaatagaactcccaccgggttctatgaccgagtgtggcagattctggagcgcacgcccaatgggatcattgttgctgggaagcatttgcctcagcaaccaaccctgtcagatatgaccatgtatgagatgaatttctctctccttgttgaagacacgttgggaaatattgaccagccacagtacagacagatcgttgtagagttacttatggttgtatccattgtactggaaagaaaccccgagctagaatttcaagacaaagtagatctagacagactggtcaaagaagcatttaatgaatttcaaaaagatcagagtcggctaaaggaaattgaaaaacaagatgacatgacttccttttacaacactcctcccctgggaaaaagaggaacatgcagctatttgacaaaggcggtgatgaatctgctgctggaaggagaagtcaagccaaacaatgatgacccgtgtctgattagctagtggggaaggtgtaggaagctctgttgagacacatgttctgaagtgtgttgtgtttcatgttcaagcttaatcaaggcagccattaatatacgaactgagcatgctggggaggtgaatgccacatccttggcggggttatggacctcttgcatgtcatagccaatctaacggtaatggtaaatgcttttaatcaagcaggaaaaagttctcatgattatgccaactataatagtaatcctcactgagtgataaaaatagtttatgaattgaaaatttgccgctgcatgttgtatgatcaaatagttcatcaaaatgaatctttgctctttggactgaattcttaccatactgccattaaaataaatttgccaactagtaatgcatactggaaatcaaaagatactgaaagaatggtgaacttctcttagtggtattgtcatgctaaaagatgttaatatacatcataaaagcaaagtcagccagctgatattttggttctcaaaaactgcattattaataatattttagtatacagagctattctacagtttttacattgtaaacatgactgtggttttgtatttgctaaatataggggttggactaaaatataataaatctgtaccttatcaaacattttctttgagctcctgctaaaaataggacatgtctatgattgttcaaaaatatgttaaatttaggctcagcacagtagctcacacctgaaatcttagcacttcgggaggctgaggcaggtggatcacttgaggttaggagttcaagaccagcccagccaacatggtgaaaaccctgtctctactaaaaatacaaaaattagccaggcatgatggtgcatgcctttaaacccagctactgaggaggctgaggcatgagaattgcttgaaccaggagacggaggttgcagtgagctgaaatcctgccactgcacaccagcctgggtgacagagcgagactccatctcaaaaaaaaaaaaaaaaaagaaaaagaaaaaaatatgttaaatttaaggactgttaacctacgttctactagtaaaaacaacattaagggtcattaaattttatttctgaattaatgaacatatctggacattttttgttcctaggttcacaagattgagcttcaaactcccgagtgttttcatttaattgatttagaggtagaatggaagagaatctgtggtacctaccattatacacatttagttgcccagtttacttaaactttaatgaaagtagaaagtagattaaacatttaaattttatttctttcctaaatagaaaaaaaaaaggcccatgagtttgagcccttgccccaaagagagttgtttttctgatcaatcttactggagtttcacctgagaagatagatttgtcacataaaaaatgcagcttatttgtagtgttttgaaaggatgtaagaaaggatgagtggcttcagtattgagtcaatcgatatcaaatgaatggatgtgtgagcacatggaaaaatctgctgtcagtcacatttctcataacattgaggtacagtgccgagatcttgcataagaaattgtatggatattagttggcaaaattgaaatgaatgagacacagttgggccctaaagaactaaggagggggattgacaaagaatagaattaaactacttgactcaatatgttaagagagtttatgaaaagatagtcgtgaagggtgaagctaatttgtaaaactaatgcctgaaaaaaacgtaagcatgaagtccatggagagggaattgagagctgacacttcataactggagaaactggaaattaaagaaagggaaacaaaagacttaaaatttttgtttgccgaaatttttacgaaagtaaactgtgttgtagttttaagaatttttttaaaaaatctgattagctgagcaaagttaccagaaaactgctatcctagttgaaatcaaacattacttgcaaatgtgttttctgagtgttagcttcctgcttaaatgttacatatgcaaaattctgaagttttcctgtgctactcctgaaagcattcagaatctgtgacacgtattgacttcatgctttgagattcaaaatttattgttctgaaagttatatttagaatcagtaaatcttgatattcaccttta

SEQ ID NO: 579 - DNA, 5603 bp, Homo sapiens
  source 1..5603: mol_type = genomic DNA
attgctgacaggcggccccgggggcggtggccaaggcggcgaccggagcgcgatggcgggggcggcgggactcacggcagaagtgagctggaaggtcttggagcgaagagctcggaccaagcgctcagttttaaaattgctatagcttagcctgcgacgcttatgattagagccaacaatttgaaatggcctgctcacctgatgcagtcgtctctccgtcttccgctttcttaaggtctggctcagtttatgaacctcttaaaagcattaatcttccaagacctgataatgaaactctctgggataagttggaccattattacagaattgtcaagtcaacattgctgctgtatcaaagtccaactaccggtctctttcccactaaaacatgcggtggtgaccagaaggccaagatccaggacagcctatactgcgctgctggggcctgggctttggctcttgcatacaggcgaattgatgatgacaagggaaggacccatgagctggagcactcagctataaaatgcatgagaggaattctctactgctatatgcgtcaggccgataaggtccagcagtttaagcaggatccacgcccaacaacatgtcttcactctgttttcaatgtgcatacaggagatgagttgctttcctatgaggaatatggtcatcttcagataaatgcagtgtcactttatctcctttaccttgtggaaatgatttcctcaggactccagattatctacaacactgatgaggtctcttttattcaaaaccttgtattttgtgtggaaagagtttaccgtgtgcctgactttggtgtctgggaaagaggaagcaaatataataatggcagcacagagctacattcgagctcggttggtttagcaaaagcagctctagaagcaattaatggattcaacctttttggcaaccagggctgttcgtggtcagttatatttgtggatctcgatgctcacaatcgcaacaggcaaactttgtgctcgctgttacccagagaatcaagatcacataatacagatgctgccctgctcccctgcatcagttatcctgcatttgccctggatgatgaagttctttttagccagacacttgataaagtggttagaaaattaaaaggaaaatatggatttaaacgtttcttgagagatgggtatagaacatcattggaagatcccaacagatgctactacaagccagctgaaattaagctatttgatggcattgaatgtgaatttcccatatttttcctttatatgatgattgatggagtttttagaggcaatcctaagcaagtacaggaatatcaggatcttttgactccagtacttcatcataccacagaaggatatcctgttgtaccaaagtactattatgtgccagctgactttgtagaatatgaaaaaaataaccctggtagtcaaaaacgatttcctagcaactgtggccgtgatggaaaactgtttctttggggacaagcactttatatcatcgcaaaactcctggctgatgaacttattagtcctaaagacattgatcctgtccagcgctatgtcccactaaaggatcaacgtaacgtgagcatgaggttttccaatcagggcccactggaaaatgacttggtagttcatgtggcacttatagcagaaagccaaagacttcaagtttttctgaacacatatggtattcaaactcaaactcctcaacaagtagaacccattcagatatggcctcagcaggagcttgtgaaagcttatttgcagctgggtatcaatgaaaagttaggactctctggaaggccagacaggcccattggctgcctcgggacatcaaagatttatcgcattctaggaaagactgtggtttgttacccgattattttcgacctaagtgatttctacatgtctcaggatgttttcctgctgatagatgacataaagaatgcgctgcagttcattaaacaatattggaaaatgcatggacgtccacttttccttgttctcatccgggaagacaatataagaggtagccggttcaaccccatattagatatgctggcagcccttaaaaaaggaataattggaggagtcaaagttcatgtggatcgtctacagacactaatatctggagctgtggtagaacaacttgatttcctacgaatcagtgacacagaagagcttccagaatttaagagttttgaggaactagaacctcccaaacattcaaaagtcaaacggcaaagcagcacccctagtgctcctgaactgggacagcagccggatgtcaacattagtgaatggaaggacaaacccacccacgaaattcttcaaaaactgaatgattgcagttgtctggctagccaagccatcctgctgggtatactgctcaaaagagaaggccccaacttcatcacaaaggaaggtaccgtttctgatcacattgagagagtctatagaagagctggcagccaaaaactttggttggcggtgcgctacggggctgcatttacccagaaattttcttcctctatagccccacacattactacttttctggtacatgggaaacaggtaactctgggtgcctttgggcatgaagaagaagttatctctaatcctttgtctccaagagtgattcaaaacatcatctattataagtgtaacacccatgatgagagggaagcggtcattcagcaagaactggtcatccatattggctggatcatctccaataaccctgagttattcagtggcatgctgaaaatacgaatcgggtggatcatccatgccatggagtatgaacttcagatccgtggcggagacaagccagccttggacttgtatcagctgtcacctagtgaagttaaacagcttctgctggatattctgcagcctcaacagaatggaagatgttggctgaacaggcgtcagatcgatgggtctttgaatagaactcccaccgggttctatgaccgagtgtggcagattctggagcgcacgcccaatgggatcattgttgctgggaagcatttgcctcagcaaccaaccctgtcagatatgaccatgtatgagatgaatttctctctccttgttgaagacacgttgggaaatattgaccagccacagtacagacagatcgttgtagagttacttatggttgtatccattgtactggaaagaaaccccgagctagaatttcaagacaaagtagatctagacagactggtcaaagaagcatttaatgaatttcaaaaagatcagagtcggctaaaggaaattgaaaaacaagatgacatgacttccttttacaacactcctcccctgggaaaaagaggaacatgcagctatttgacaaaggcggtgatgaatctgctgctggaaggagaagtcaagccaaacaatgatgacccgtgtctgattagctagtggggaaggtgtaggaagctctgttgagacacatgttctgaagtgtgttgtgtttcatgttcaagcttaatcaaggcagccattaatatacgaactgagcatgctggggaggtgaatgccacatccttggcggggttatggacctcttgcatgtcatagccaatctaacggtaatggtaaatgcttttaatcaagcaggaaaaagttctcatgattatgccaactataatagtaatcctcactgagtgataaaaatagtttatgaattgaaaatttgccgctgcatgttgtatgatcaaatagttcatcaaaatgaatctttgctctttggactgaattcttaccatactgccattaaaataaatttgccaactagtaatgcatactggaaatcaaaagatactgaaagaatggtgaacttctcttagtggtattgtcatgctaaaagatgttaatatacatcataaaagcaaagtcagccagctgatattttggttctcaaaaactgcattattaataatattttagtatacagagctattctacagtttttacattgtaaacatgactgtggttttgtatttgctaaatataggggttggactaaaatataataaatctgtaccttatcaaacattttctttgagctcctgctaaaaataggacatgtctatgattgttcaaaaatatgttaaatttaggctcagcacagtagctcacacctgaaatcttagcacttcgggaggctgaggcaggtggatcacttgaggttaggagttcaagaccagcccagccaacatggtgaaaaccctgtctctactaaaaatacaaaaattagccaggcatgatggtgcatgcctttaaacccagctactgaggaggctgaggcatgagaattgcttgaaccaggagacggaggttgcagtgagctgaaatcctgccactgcacaccagcctgggtgacagagcgagactccatctcaaaaaaaaaaaaaaaaaagaaaaagaaaaaaatatgttaaatttaaggactgttaacctacgttctactagtaaaaacaacattaagggtcattaaattttatttctgaattaatgaacatatctggacattttttgttcctaggttcacaagattgagcttcaaactcccgagtgttttcatttaattgatttagaggtagaatggaagagaatctgtggtacctaccattatacacatttagttgcccagtttacttaaactttaatgaaagtagaaagtagattaaacatttaaattttatttctttcctaaatagaaaaaaaaaaggcccatgagtttgagcccttgccccaaagagagttgtttttctgatcaatcttactggagtttcacctgagaagatagatttgtcacataaaaaatgcagcttatttgtagtgttttgaaaggatgtaagaaaggatgagtggcttcagtattgagtcaatcgatatcaaatgaatggatgtgtgagcacatggaaaaatctgctgtcagtcacatttctcataacattgaggtacagtgccgagatcttgcataagaaattgtatggatattagttggcaaaattgaaatgaatgagacacagttgggccctaaagaactaaggagggggattgacaaagaatagaattaaactacttgactcaatatgttaagagagtttatgaaaagatagtcgtgaagggtgaagctaatttgtaaaactaatgcctgaaaaaaacgtaagcatgaagtccatggagagggaattgagagctgacacttcataactggagaaactggaaattaaagaaagggaaacaaaagacttaaaatttttgtttgccgaaatttttacgaaagtaaactgtgttgtagttttaagaatttttttaaaaaatctgattagctgagcaaagttaccagaaaactgctatcctagttgaaatcaaacattacttgcaaatgtgttttctgagtgttagcttcctgcttaaatgttacatatgcaaaattctgaagttttcctgtgctactcctgaaagcattcagaatctgtgacacgtattgacttcatgctttgagattcaaaatttattgttctgaaagttatatttagaatcagtaaatcttgatattcaccttta

SEQ ID NO: 580 - DNA, 1728 bp, Homo sapiens
  source 1..1728: mol_type = genomic DNA
agccgagcgccgactcacgccccagccccaattgggcggccggtttccaattggaagggcttctgagcctcagtcttcgggcggcgctgaccattggcgggcaggatggaggcggagccttgggttgtcgcccgccgccgggggttaaggtgagcgactgcaggcaaacccggcgacagcgcagctcgcgtcgaccctggctcctctgcctgccccctcaggcccccgcctccttcaggatgacgctggacgtggggccggaggatgagctgcccgactgggccgccgccaaagagttttaccagaagtacgaccctaaggacgtcatcggcagaggagtgagctctgtggtccgccgttgtgttcatcgagctactggccacgagtttgcggtgaagattatggaagtgacagctgagcggctgagtcctgagcagctggaggaggtgcgggaagccacacggcgagagacacacatccttcgccaggtcgccggccacccccacatcatcaccctcatcgattcctacgagtcttctagcttcatgttcctggtgtttgacctgatgcggaagggagagctgtttgactatctcacagagaaggtggccctctctgaaaaggaaaccaggtccatcatgcggtctctgctggaagcagtgagctttctccatgccaacaacattgtgcatcgagatctgaagcccgagaatattctcctagatgacaatatgcagatccgactttcagatttcgggttctcctgccacttggaacctggcgagaagcttcgagagttgtgtgggaccccagggtatctagcgccagagatccttaaatgctccatggatgaaacccacccaggctatggcaaggaggtcgacctctgggcctgtggggtgatcttgttcacactcctggctggctcgccacccttctggcaccggcggcagatcctgatgttacgcatgatcatggagggccagtaccagttcagttcccccgagtgggatgaccgttccagcactgtcaaagacctgatctccaggctgctgcaggtggatcctgaggcacgcctgacagctgagcaggccctacagcaccccttctttgagcgttgtgaaggcagccaaccctggaacctcaccccccgccagcggttccgggtggcagtgtggacagtgctggctgctggacgagtggccctaagcacccatcgtgtacggccactgaccaagaatgcactgttgagggacccttatgcgctgcggtcagtgcggcacctcatcgacaactgtgccttccggctctacgggcactgggtaaagaaaggggagcagcagaaccgggcggctctctttcagcaccggccccctgggccttttcccatcatgggccctgaagaggagggagactctgctgctataactgaggatgaggccgtgcttgtgctgggctaggacctcaaccccagggattcccaggaagcagaactctccagaagaagggttttgatcattccagctcctctgggctctggcctctggcctcaggcccactaatgatcctgctaccctcttgaagaccagcccggtacctctctccccactggccaggactctgagatcagagctggggtggaagggagccattctgaacgccacgcctggcccggtcagtgctgcatgcactgcatatgaaataaaatctgctacacgccagggagaa

SEQ ID NO: 581 - DNA, 2349 bp, Homo sapiens
  source 1..2349: mol_type = genomic DNA
aattgggcggccggtttccaattggaagggcttctgagcctcagtcttcgggcggcgctgaccattggcgggcaggatggaggcggagccttgggttgtcgcccgccgccgggggttaaggtgagcgactgcaggcaaacccggcgacagcgcagctcgcgtcgaccctggctcctctgcctgccccctcaggcccccgcctccttcaggatgacgctggacgtggggccggaggatgagctgcccgactgggccgccgccaaagagttttaccagaagtacgaccctaaggacgtcatcggcagaggagtgagctctgtggtccgccgttgtgttcatcgagctactggccacgagtttgcggtgaagattatggaagtgacagctgagcggctgagtcctgagcagctggaggaggtgcgggaagccacacggcgagagacacacatccttcgccaggtcgccggccacccccacatcatcaccctcatcgattcctacgagtcttctagcttcatgttcctggtgtttgacctgatgcggaagggagagctgtttgactatctcacagagaaggtggccctctctgaaaaggaaaccaggtccatcatgcggtctctgctggaagcagtgagctttctccatgccaacaacattgtgcatcgagatctgaagcccgagaatattctcctagatgacaatatgcagatccgactttcagatttcgggttctcctgccacttggaacctggcgagaagcttcgagagttgtgtgggaccccagggtatctagcgccagagatccttaaatgctccatggatgaaacccacccaggctatggcaaggaggtcgacctctgggcctgtggggtgatcttgttcacactcctggctggctcgccacccttctggcaccggcggcagatcctgatgttacgcatgatcatggagggccagtaccagttcagttcccccgagtgggatgaccgttccagcactgtcaaagacctgatctccaggctgctgcaggtggatcctgaggcacgcctgacagctgagcaggccctacagcaccccttctttgagcgttgtgaaggcagccaaccctggaacctcaccccccgccagcggttccgggtggcagtgtggacagtgctggctgctggacgagtggccctaagcacccatcgtgtacggccactgaccaagaatgcactgttgagggacccttatgcgctgcggtcagtgcggcacctcatcgacaactgtgccttccggctctacgggcactggataaggaagcagtggattggaaagctgatggcttgtgtatgatgatgctactaataatgacatattccaggcagaaatcccctgcttctgcttcccatggtcacttgtgccaggcccggttcctcttctccctggggctcaaacctggtagctgccccctctcaccaatacaagccttgtgaagatcctggagcagggcacaagccgctgacgtctgctccagtgagaagccctgctggcggcagaaaatgagcgcgtggcagaagaggtccagggtgatggcgtccctcaggctctgctcaggacaccctagctccagcagctcagccagcacccttgggagggagagaggagtgagtgacaactgggcctcctttcatcaccctacacccaccacatgctttggagtcagccattcctcatgttttcccaacctgacccctcagcctttgccaagagctcttcccacgcccccctcagtccctactccctcatctcagcattggtggtcttctccagctggtgcatggaatggacgtccaggtacttcctgttatagtaaaagaaaaagagtattggtggccgttacctatcatgacaaggctgtgacagctagtgcgtgagactgggagttggccaccggcgtgaagctgggctcttttgccagcttgctgtgtgactatgcaaatcgttaactctctgggcctaaatgaactcttatgagcctctccatttctaaagcctagggttaggaatcttgaattcttttttctgctctgccactaccttgtatgaccttggtcaagtactccctgtggccctcagtgtccccctctgtacaatactccttagcggccatgagactccatttacattctgtctttggctctttttttctcacactgcctcctctttggactggagaggctggaaagccaacttccagtcacctggagtaattgcatctccaggcctcagtctcatctgtaaaatggggatgccctggccacagacaggactgttggggagacaataaagaacgcaaatattcagtgt

SEQ ID NO: 582 - DNA, 3048 bp, Homo sapiens
  source 1..3048: mol_type = genomic DNA
ggaaatccggaagggagcctccgagcccaggtcccgggctggcaggggtctcgccggcgcttggacctcgtctcccacccccgagcccactgcggccccagagcctcgggaggggccgggcacttcctctgccctccggcctggggcaggggccgggacgcggtgggagtgcagcggggacggcaccgcccgagggggcgggccccaaactttcgtgcgcgttgaaagctgctggcgcggcggggcggactccacccctgcccggcagcccagcgcctccggccgcacttccagctctctgcgcagcccgccgcgcagcccgccgccccagccatggcgaagcccctgacggaccaggagaagcggcggcagatcagcatccgcggcatcgtgggcgtggagaacgtggcagagctgaagaagagtttcaaccggcacctgcacttcacgctggtcaaggaccgcaacgtggccaccacccgcgactactacttcgcgctggcgcacacggtgcgcgaccacctggtggggcgctggatccgcacgcagcagcactactacgacaagtgccccaagagggtatattacctctctctggaattttacatgggccgaacattacagaacaccatgatcaacctcggtctgcaaaatgcctgtgatgaggccatttaccagcttggattggatatagaagagttagaagaaattgaagaagatgctggacttggcaatggtggtcttgggagacttgctgcctgcttcttggattccatggcaaccctgggacttgcagcctatggatacggcattcggtatgaatatgggattttcaatcagaagatccgagatggatggcaggtagaagaagcagatgattggctcagatatggaaacccttgggagaagtcccgcccagaattcatgctgcctgtgcacttctatggaaaagtagaacacaccaacaccgggaccaagtggattgacactcaagtggtcctggctctgccatatgacacccccgtgcccggctacatgaataacactgtcaacaccatgcgcctctggtctgctcgggcaccaaatgactttaacctcagagactttaatgttggagactacattcaggctgtgctggaccgaaacctggccgagaacatctcccgggtcctctatcccaatgacaatttttttgaagggaaggagctaagattgaagcaggaatactttgtggtggctgcaaccttgcaagatatcatccgccgtttcaaagcctccaagtttggctccacccgtggtgcaggaactgtgtttgatgccttcccggatcaggtggccatccagctgaatgacactcaccctgcactcgcgatccctgagctgatgaggatttttgtggatattgaaaaactgccctggtccaaggcatgggagctcacccagaagaccttcgcctacaccaaccacacagtgctcccggaagccctggagcgctggcccgtggacctggtggagaagctgctccctcgacatttggaaatcatttatgagataaatcagaagcatttagatagaattgtggccttgtttcctaaagatgtggaccgtctgagaaggatgtctctgatagaagaggaaggaagcaaaaggatcaacatggcccatctctgcattgtcggttcccatgctgtgaatggcgtggctaaaatccactcagacatcgtgaagactaaagtattcaaggacttcagtgagctagaacctgacaagtttcagaataaaaccaatgggatcactccaaggcgctggctcctactctgcaacccaggacttgcagagctcatagcagagaaaattggagaagactatgtgaaagacctgagccagctgacgaagctccacagcttcctgggtgatgatgtcttcctccgggaactcgccaaggtgaagcaggagaataagctgaagttttctcagttcctggagacggagtacaaagtgaagatcaacccatcctccatgtttgatgtccaggtgaagaggatacatgagtacaagcgacagctcttgaactgtctgcatgtgatcacgatgtacaaccgcattaagaaagaccctaagaagttattcgtgccaaggacagttatcattggtggtaaagctgccccaggatatcacatggccaaaatgatcataaagctgatcacttcagtggcagatgtggtgaacaatgaccctatggttggaagcaagttgaaagtcatcttcttggagaactacagagtatctcttgctgaaaaagtcattccagccacagatctgtcagagcagatttccactgcaggcaccgaagcctcggggacaggcaatatgaagttcatgctaaatggggccctaactatcgggaccatggatggggccaatgtggaaatggcagaagaagctggggaagagaacctgttcatctttggcatgaggatagatgatgtggctgctttggacaagaaagggtacgaggcaaaagaatactatgaggcacttccagagctgaagctggtcattgatcaaattgacaatggctttttttctcccaagcagcctgacctcttcaaagatatcatcaacatgctattttatcatgacaggtttaaagtctttgcagactacgaagcctatgtcaagtgtcaagataaagtgagtcagctgtacatgaatccaaaggcctggaacacaatggtactcaaaaacatagctgcctcggggaaattctccagtgaccgaacaattaaagaatatgcccaaaacatctggaacgtggaaccttcagatctaaagatttctctatccaatgaatctaacaaagtcaatggaaattgaactctagaattgtctctagaaaacatagcttcttactgaacttgaacatttttacaacattcactggtttttgttttgttagctaataatctataatagttgagtatctctgggaatggggagggaaattatatgtaatagagcttaaaaataaagtgtcaatttccaagg

SEQ ID NO: 583 - DNA, 2743 bp, Homo sapiens
  source 1..2743: mol_type = genomic DNA
aaactttcgtgcgcgttgaaagctgctggcgcggcggggcggactccacccctgcccggcagcccagcgcctccggccgcacttccagctctctgcgcagcccgccgcgcagcccgccgccccagccatggcgaagcccctgacggaccaggagaagcggcggcagatcagcatccgcggcatcgtgggcgtggagaacgtggcagagctgaagaagagtttcaaccggcacctgcacttcacgctggtcaaggaccgcaacgtggccaccacccgcgactactacttcgcgctggcgcacacggtgcgcgaccacctggtggggcgctggatccgcacgcagcagcactactacgacaagtgccccaagcttggattggatatagaagagttagaagaaattgaagaagatgctggacttggcaatggtggtcttgggagacttgctgcctgcttcttggattccatggcaaccctgggacttgcagcctatggatacggcattcggtatgaatatgggattttcaatcagaagatccgagatggatggcaggtagaagaagcagatgattggctcagatatggaaacccttgggagaagtcccgcccagaattcatgctgcctgtgcacttctatggaaaagtagaacacaccaacaccgggaccaagtggattgacactcaagtggtcctggctctgccatatgacacccccgtgcccggctacatgaataacactgtcaacaccatgcgcctctggtctgctcgggcaccaaatgactttaacctcagagactttaatgttggagactacattcaggctgtgctggaccgaaacctggccgagaacatctcccgggtcctctatcccaatgacaatttttttgaagggaaggagctaagattgaagcaggaatactttgtggtggctgcaaccttgcaagatatcatccgccgtttcaaagcctccaagtttggctccacccgtggtgcaggaactgtgtttgatgccttcccggatcaggtggccatccagctgaatgacactcaccctgcactcgcgatccctgagctgatgaggatttttgtggatattgaaaaactgccctggtccaaggcatgggagctcacccagaagaccttcgcctacaccaaccacacagtgctcccggaagccctggagcgctggcccgtggacctggtggagaagctgctccctcgacatttggaaatcatttatgagataaatcagaagcatttagatagaattgtggccttgtttcctaaagatgtggaccgtctgagaaggatgtctctgatagaagaggaaggaagcaaaaggatcaacatggcccatctctgcattgtcggttcccatgctgtgaatggcgtggctaaaatccactcagacatcgtgaagactaaagtattcaaggacttcagtgagctagaacctgacaagtttcagaataaaaccaatgggatcactccaaggcgctggctcctactctgcaacccaggacttgcagagctcatagcagagaaaattggagaagactatgtgaaagacctgagccagctgacgaagctccacagcttcctgggtgatgatgtcttcctccgggaactcgccaaggtgaagcaggagaataagctgaagttttctcagttcctggagacggagtacaaagtgaagatcaacccatcctccatgtttgatgtccaggtgaagaggatacatgagtacaagcgacagctcttgaactgtctgcatgtgatcacgatgtacaaccgcattaagaaagaccctaagaagttattcgtgccaaggacagttatcattggtggtaaagctgccccaggatatcacatggccaaaatgatcataaagctgatcacttcagtggcagatgtggtgaacaatgaccctatggttggaagcaagttgaaagtcatcttcttggagaactacagagtatctcttgctgaaaaagtcattccagccacagatctgtcagagcagatttccactgcaggcaccgaagcctcggggacaggcaatatgaagttcatgctaaatggggccctaactatcgggaccatggatggggccaatgtggaaatggcagaagaagctggggaagagaacctgttcatctttggcatgaggatagatgatgtggctgctttggacaagaaagggtacgaggcaaaagaatactatgaggcacttccagagctgaagctggtcattgatcaaattgacaatggctttttttctcccaagcagcctgacctcttcaaagatatcatcaacatgctattttatcatgacaggtttaaagtctttgcagactacgaagcctatgtcaagtgtcaagataaagtgagtcagctgtacatgaatccaaaggcctggaacacaatggtactcaaaaacatagctgcctcggggaaattctccagtgaccgaacaattaaagaatatgcccaaaacatctggaacgtggaaccttcagatctaaagatttctctatccaatgaatctaacaaagtcaatggaaattgaactctagaattgtctctagaaaacatagcttcttactgaacttgaacatttttacaacattcactggtttttgttttgttagctaataatctataatagttgagtatctctgggaatggggagggaaattatatgtaatagagcttaaaaataaagtgtcaatttccaagggct

SEQ ID NO: 584 - DNA, 2741 bp, Homo sapiens
  source 1..2741: mol_type = genomic DNA
atgtaagtcaacaacatcctgggattgggacccactttctgggcactgctggccagtcccaaaatggaacataaggaagtggttcttctacttcttttatttctgaaatcaggtcaaggagagcctctggatgactatgtgaatacccagggggcttcactgttcagtgtcactaagaagcagctgggagcaggaagtatagaagaatgtgcagcaaaatgtgaggaggacgaagaattcacctgcagggcattccaatatcacagtaaagagcaacaatgtgtgataatggctgaaaacaggaagtcctccataatcattaggatgagagatgtagttttatttgaaaagaaagtgtatctctcagagtgcaagactgggaatggaaagaactacagagggacgatgtccaaaacaaaaaatggcatcacctgtcaaaaatggagttccacttctccccacagacctagattctcacctgctacacacccctcagagggactggaggagaactactgcaggaatccagacaacgatccgcaggggccctggtgctatactactgatccagaaaagagatatgactactgcgacattcttgagtgtgaagaggaatgtatgcattgcagtggagaaaactatgacggcaaaatttccaagaccatgtctggactggaatgccaggcctgggactctcagagcccacacgctcatggatacattccttccaaatttccaaacaagaacctgaagaagaattactgtcgtaaccccgatagggagctgcggccttggtgtttcaccaccgaccccaacaagcgctgggaactttgtgacatcccccgctgcacaacacctccaccatcttctggtcccacctaccagtgtctgaagggaacaggtgaaaactatcgcgggaatgtggctgttaccgtgtccgggcacacctgtcagcactggagtgcacagacccctcacacacataacaggacaccagaaaacttcccctgcaaaaatttggatgaaaactactgccgcaatcctgacggaaaaagggccccatggtgccatacaaccaacagccaagtgcggtgggagtactgtaagataccgtcctgtgactcctccccagtatccacggaacaattggctcccacagcaccacctgagctaacccctgtggtccaggactgctaccatggtgatggacagagctaccgaggcacatcctccaccaccaccacaggaaagaagtgtcagtcttggtcatctatgacaccacaccggcaccagaagaccccagaaaactacccaaatgctggcctgacaatgaactactgcaggaatccagatgccgataaaggcccctggtgttttaccacagaccccagcgtcaggtgggagtactgcaacctgaaaaaatgctcaggaacagaagcgagtgttgtagcacctccgcctgttgtcctgcttccagatgtagagactccttccgaagaagactgtatgtttgggaatgggaaaggataccgaggcaagagggcgaccactgttactgggacgccatgccaggactgggctgcccaggagccccatagacacagcattttcactccagagacaaatccacgggcgggtctggaaaaaaattactgccgtaaccctgatggtgatgtaggtggtccctggtgctacacgacaaatccaagaaaactttacgactactgtgatgtccctcagtgtgcggccccttcatttgattgtgggaagcctcaagtggagccgaagaaatgtcctggaagggttgtaggggggtgtgtggcccacccacattcctggccctggcaagtcagtcttagaacaaggtttggaatgcacttctgtggaggcaccttgatatccccagagtgggtgttgactgctgcccactgcttggagaagtccccaaggccttcatcctacaaggtcatcctgggtgcacaccaagaagtgaatctcgaaccgcatgttcaggaaatagaagtgtctaggctgttcttggagcccacacgaaaagatattgccttgctaaagctaagcagtcctgccgtcatcactgacaaagtaatcccagcttgtctgccatccccaaattatgtggtcgctgaccggaccgaatgtttcatcactggctggggagaaacccaaggtacttttggagctggccttctcaaggaagcccagctccctgtgattgagaataaagtgtgcaatcgctatgagtttctgaatggaagagtccaatccaccgaactctgtgctgggcatttggccggaggcactgacagttgccagggtgacagtggaggtcctctggtttgcttcgagaaggacaaatacattttacaaggagtcacttcttggggtcttggctgtgcacgccccaataagcctggtgtctatgttcgtgtttcaaggtttgttacttggattgagggagtgatgagaaataattaattggacgggagacagagtgacgcactgactcacctagaggctggaacgtgggtagggatttagcatgctggaaataactggcagtaatcaaacgaagacactgtccccagctaccagctacgccaaacctcggcattttttgtgttattttctgactgctggattctgtagtaaggtgacatagctatgacatttgttaaaaataaactctgtacttaactttgatttgagtaaattttggtttt

SEQ ID NO: 585 - DNA, 4618 bp, Homo sapiens
  source 1..4618: mol_type = genomic DNA
cttagagactgcttgttgggttccatcctcattgctctgagactcttgttgggagtatgaggcttggatcaggggaaggggagttgacattagttcttaaagaattggaataacaaatccatgggtatttctgaaaaaaaaaaaaaaaaaaagaaaggaagctacttggaattgtcccatatttaacattctgctgaccaatcaatttgtcctagttacagaaaaccaccctggacttctcctatgcatttgggcttctcctagggacaccaagagggaggaaggaggggttaggatggtatgaaagattctacttggccaatattattgtaatgcggcattgtgatctctggatttagcatgagttgatagctgactttttctgcagaagcatcttggtggcacctctaactcaaagtccctcgatggagtcagttccagttctccacttctggccccatctggtacacaccactgcctctcactgcccgggctctctatccttgacaggctgccttgaagttgagcccagactgattttcttgcctcagaccccactaccgtgcctgggactcatgcacctttgactcccatggaagggaagtgcagtagtttcccaggtgcaattctggtgtcctcacccacattgaggatgtacaagaatcaggttcttagagattggagaaagaaggaagaatgggaacaagatttttcccaaaggactgtgaggtcccccacctaaccttgatgtgagacaagtgaggttaaccccaagcctggtgagaagcgttcccatcagacacttggaaatcctgaggactgtttcatgcagaaggatatggtttattcaggtttgactcgtgcttgagaaagctagagcctctggtggtgaatgattttaataactatttcctttccaccaacatatacagtacaaataataataagcaaaaataaatagaaacattcagttttgttttgaatagtaggagcagggtaccatcatttctgtagttactcttttagtacaacgatgcatgtctactgtatgtaaggcatactagcagaaattgagctcagcactagagaagatgattgcattctatgccttgcttctttttttaaaaaaaggcttccatagatagattctcagaacagcccatggcaaatgtaaagttatttggaaaacccaggttccagattcactagagcatagaatctctggttggttgggaaggaatttcctcttacagttgttactaataattgtatgaacaattatttaaaatattaacatttacatttgtgaagaccttgaagggctggagacaacagagaagcatttttgaataccctctgcagcccctgcactgttgtaggcattggtggatggtaccaaagatgggacactgtccctacctccagagaccctgtgggctggctacagagagaaggcagggaggaggaaaagaagaataaagtcatatgtttaagtcacccccacggccgttggttagtcatgggaggctccccagaggagctgtcctgaagctggctgacagaaggcaacatttcaacttaggacagtaatccttgctacatacaatcacatacacacacacacacacgtgcacacacagagactcacatggaaaaataaacctttgtgcctttcagcagtgatgacaattatggttttcagtaaactttacatggtttagatggtgatggtgatgatgatgattatgggaaggatggcatcatgttctaaacatactgcatggagtcagaataacaatgacaaataaccatttgtcccaatcaaggttttctcagaaaatatctcattctgatgctaaactataccagtctgtttgatcacttctccaacaaaataattacaaagtgcttatattttcttgaaaagagagggtcctgtgttgtctactaccacttttgaaacttagagaaaatgttccaaaagatgatgattttactatttagttcggcctttaagatgtcaaaaactcagtgcttggaatttgtctcgaattacaccacaaaattgctaccttgtctcaaatgggatttctttcccaccttgtgccacagcggccccttcatttgattgtgggaagcctcaagtggagccgaagaaatgtcctggaagggttgtaggggggtgtgtggcccacccacattcctggccctggcaagtcagtcttagaacaaggtaagaacaggcccagaaacgatttatactgtccctccacgtaagccctgcaaaacccttctacatttacataaaatccacacagctgaggcatcagcacctgcctctaagttttctgaaggaggaaaaaagctacaaaaattaatatatgtatatatacatatatatttttataggttctctactgtgaaaatgacaaaaattgctgtctttttcttgatctgggcagctccatcaaaatctgtaggcacagtgatttgcaccaagttccaatattgctggaaaatactgaagatgctctgaggatttctatggatatccattgtctcattgtcagatgaaaagagggggaagtttttagaaatgtgacactttctgggttgggagagcaaggacaaaattatctccagtctatcacaggcacagattctttttctttggacactttcgtgaatcattgaattcaatgcagaggctactcatccattcgcaaacaaaaaaattctaggtcatgatccccataaatgaagagtgatcagtccaatcccagggaacctggacattttgggtattgtttcagtggaacatgcctttcataagttccattttcttgggtatctcttaggaagcaagcataggaaacaggcccatccgtctgcctgttttgcttcctcatctcacttctacacgagggtgcctgtgctcaattgctgttttcccctaaagagactcttttccataagtttgtgaaatgccatcgacaaacctgatcgcattgcatttcactctgctgttgagtcgatttttctttattttatcatttagtaactccttgctctacagagctttcaccttccacatatttcagattcattctttcctaaactatgtggtggtctacgtcctcactgacttatcaacatgctaccatcatgcacttcctatctctattcctcttctttaaatttggttccaaatggctcacaccattattctgagctattacctgcctacgcagtcctagaaagtaagtgattcaggaaacattccccaaaagtaaagtttctcaggtaagatcagaagactcccatgagtcactgctgctcaggatcacatctggctccttgaagagtgattcatcagaccttacatagatcttgtcataaaaatgaaagaggcctcgggggaaggtcttgggctggtggcttctgttggagtcctgggctgtggggtgaaagccgtggctgtagagcttcatgcggagttacttagctttgctctcctgtggacaggccatgcctgtgcctcccccaagcatcggaaaaattggcatagatgggcccttctcaaaaatcccactcctggagcactggccaaaattactaccatcctgatgctgggcttgcagtcctttcctttgggaatatgaacatggtcaaaattaagtgaacgtgtctttctggctttctgtacaatggagcagaacaaagtatcaatttaactaaaatttgaactaaatcctctttccaggtttggaatgcacttctgtggaggcaccttgatatccccagagtgggtgttgactgctgcccactgcttggagaagtccccaaggccttcatcctacaaggtcatcctgggtgcacaccaagaagtgaatctcgaaccgcatgttcaggaaatagaagtgtctaggctgttcttggagcccacacgaaaagatattgccttgctaaagctaagcagtcctgccgtcatcactgacaaagtaatcccagcttgtctgccatccccaaattatgtggtcgctgaccggaccgaatgtttcatcactggctggggagaaacccaaggtacttttggagctggccttctcaaggaagcccagctccctgtgattgagaataaagtgtgcaatcgctatgagtttctgaatggaagagtccaatccaccgaactctgtgctgggcatttggccggaggcactgacagttgccagggtgacagtggaggtcctctggtttgcttcgagaaggacaaatacattttacaaggagtcacttcttggggtcttggctgtgcacgccccaataagcctggtgtctatgttcgtgtttcaaggtttgttacttggattgagggagtgatgagaaataattaattggacgggagacagagtgacgcactgactcacctagaggctggaacgtgggtagggatttagcatgctggaaataactggcagtaatcaaacgaagacactgtccccagctaccagctacgccaaacctcggcattttttgtgttattttctgactgctggattctgtagtaaggtgacatagctatgacatttgttaaaaataaactctgtacttaactttg

SEQ ID NO: 586 - DNA, 1166 bp, Homo sapiens
  source 1..1166: mol_type = genomic DNA
tctcatgtaagtcaacaacatcctgggattgggacccactttctgggcactgctggccagtcccaaaatggaacataaggaagtggttcttctacttcttttatttctgaaatcaggtcaaggagagcctctggatgactatgtgaatacccagggggcttcactgttcagtgtcactaagaagcagctgggagcaggaagtatagaagaatgtgcagcaaaatgtgaggaggacgaagaattcacctgcagggcattccaatatcacagtaaagagcaacaatgtgtgataatggctgaaaacaggaagtcctccataatcattaggatgagagatgtagttttatttgaaaagaaagtgtatctctcagagtgcaagactgggaatggaaagaactacagagggacgatgtccaaaacaaaaaatggcatcacctgtcaaaaatggagttccacttctccccacagacctaggtaagacattccctttcatctttgtgttcatctactgtaaagttgtccctctgtgtctgtgagggattggttccaggacccctgtggctaccaaaatccatgcttctcaagtcccttatataaaatggtgcagtatttgcatataacctacataccttctcttgtataatccctaatataatgtaaatgctatttaatcgttgttatactgtattgtttttatttgtattatgttttattgtcatattgttattttctgtcatctttttcaagtcttttccatccacagttggttgaatttgtggatctggaacccatggatacagagggccaactgtatttaggataatttcatcacttttaattcaaaccacaatatgtgaataagcagatagaaagaatctttttgatgtcgatgttcaactatttttggcaccatagtagaacatggttgctttctattttttcttggatatggaggtttcttgaagacctagaacatagaagaatgcctagtttaaaaaaaatcaatgaaactatgagttttaggccaaatctgagaaaagatcaaagatgactatgtttgggactgaagtaagcatatcaggttagaactctcatcacatgttcgactcaaattgtggagcaaaagagtaaataagatataaaaatgaaaatgaagatacgtgaaa

SEQ ID NO: 587 - DNA, 2706 bp, Homo sapiens
  source 1..2706: mol_type = genomic DNA
gaacttcctccccctgctttataaaaacaggcctgcctcagctccctcatggccctgtccactgagcatcctcccgccacacagaaacccgcccagccggggccaccgaccccaccccctgcctggaaacttaaaggaggccggagctgtggggagctcagagctgagatcctacaggagtccagggctggagagaaaacctctgcgaggaaagggaaggagcaagccgtgaatttaagggacgctgtgaagcaatcatggatgcaatgaagagagggctctgctgtgtgctgctgctgtgtggagcagtcttcgtttcgcccagccaggaaatccatgcccgattcagaagaggagccagatcttaccaagtgatctgcagagatgaaaaaacgcagatgatataccagcaacatcagtcatggctgcgccctgtgctcagaagcaaccgggtggaatattgctggtgcaacagtggcagggcacagtgccactcagtgcctgtcaaaagttgcagcgagccaaggtgtttcaacgggggcacctgccagcaggccctgtacttctcagatttcgtgtgccagtgccccgaaggatttgctgggaagtgctgtgaaatagataccagggccacgtgctacgaggaccagggcatcagctacaggggcacgtggagcacagcggagagtggcgccgagtgcaccaactggaacagcagcgcgttggcccagaagccctacagcgggcggaggccagacgccatcaggctgggcctggggaaccacaactactgcagaaacccagatcgagactcaaagccctggtgctacgtctttaaggcggggaagtacagctcagagttctgcagcacccctgcctgctctgagggaaacagtgactgctactttgggaatgggtcagcctaccgtggcacgcacagcctcaccgagtcgggtgcctcctgcctcccgtggaattccatgatcctgataggcaaggtttacacagcacagaaccccagtgcccaggcactgggcctgggcaaacataattactgccggaatcctgatggggatgccaagccctggtgccacgtgctgaagaaccgcaggctgacgtgggagtactgtgatgtgccctcctgctccacctgcggcctgagacagtacagccagcctcagtttcgcatcaaaggagggctcttcgccgacatcgcctcccacccctggcaggctgccatctttgccaagcacaggaggtcgcccggagagcggttcctgtgcgggggcatactcatcagctcctgctggattctctctgccgcccactgcttccaggagaggtttccgccccaccacctgacggtgatcttgggcagaacataccgggtggtccctggcgaggaggagcagaaatttgaagtcgaaaaatacattgtccataaggaattcgatgatgacacttacgacaatgacattgcgctgctgcagctgaaatcggattcgtcccgctgtgcccaggagagcagcgtggtccgcactgtgtgccttcccccggcggacctgcagctgccggactggacggagtgtgagctctccggctacggcaagcatgaggccttgtctcctttctattcggagcggctgaaggaggctcatgtcagactgtacccatccagccgctgcacatcacaacatttacttaacagaacagtcaccgacaacatgctgtgtgctggagacactcggagcggcgggccccaggcaaacttgcacgacgcctgccagggcgattcgggaggccccctggtgtgtctgaacgatggccgcatgactttggtgggcatcatcagctggggcctgggctgtggacagaaggatgtcccgggtgtgtacaccaaggttaccaactacctagactggattcgtgacaacatgcgaccgtgaccaggaacacccgactcctcaaaagcaaatgagatcccgcctcttcttcttcagaagacactgcaaaggcgcagtgcttctctacagacttctccagacccaccacaccgcagaagcgggacgagaccctacaggagagggaagagtgcattttcccagatacttcccattttggaagttttcaggacttggtctgatttcaggatactctgtcagatgggaagacatgaatgcacactagcctctccaggaatgcctcctccctgggcagaaagtggccatgccaccctgttttcagctaaagcccaacctcctgacctgtcaccgtgagcagctttggaaacaggaccacaaaaatgaaagcatgtctcaatagtaaaagataacaagatctttcaggaaagacggattgcattagaaatagacagtatatttatagtcacaagagcccagcagggcctcaaagttggggcaggctggctggcccgtcatgttcctcaaaagcacccttgacgtcaagtctccttcccctttccccactccctggctctcagaaggtattccttttgtgtacagtgtgtaaagtgtaaatcctttttctttataaactttagagtagcatgagagaattgtatcatttgaacaactaggcttcagcatatttatagcaatccatgttagtttttactttctgttgccacaaccctgttttatactgtacttaataaattcagatatatttttcacagtttttccaaaa

SEQ ID NO: 588 - DNA, 2665 bp, Homo sapiens
  source 1..2665: mol_type = genomic DNA
atggccctgtccactgagcatcctcccgccacacagaaacccgcccagccggggccaccgaccccaccccctgcctggaaacttaaaggaggccggagctgtggggagctcagagctgagatcctacaggagtccagggctggagagaaaacctctgcgaggaaagggaaggagcaagccgtgaatttaagggacgctgtgaagcaatcatggatgcaatgaagagagggctctgctgtgtgctgctgctgtgtggagcagtcttcgtttcgcccagccaggaaatccatgcccgattcagaagaggagccagatcttaccaagtgatctgcagagatgaaaaaacgcagatgatataccagcaacatcagtcatggctgcgccctgtgctcagaagcaaccgggtggaatattgctggtgcaacagtggcagggcacagtgccactcagtgcctgtcaaaagttgcagcgagccaaggtgtttcaacgggggcacctgccagcaggccctgtacttctcagatttcgtgtgccagtgccccgaaggatttgctgggaagtgctgtgaaatagataccagggccacgtgctacgaggaccagggcatcagctacaggggcacgtggagcacagcggagagtggcgccgagtgcaccaactggaacagcagcgcgttggcccagaagccctacagcgggcggaggccagacgccatcaggctgggcctggggaaccacaactactgcagaaacccagatcgagactcaaagccctggtgctacgtctttaaggcggggaagtacagctcagagttctgcagcacccctgcctgctctgagggaaacagtgactgctactttgggaatgggtcagcctaccgtggcacgcacagcctcaccgagtcgggtgcctcctgcctcccgtggaattccatgatcctgataggcaaggtttacacagcacagaaccccagtgcccaggcactgggcctgggcaaacataattactgccgctgccggactggacggagtgtgagctctccggctacggcaagcatgaggccttgtctcctttctattcggagcggctgaaggaggctcatgtcagactgtacccatccagccgctgcacatcacaacatttacttaacagaacagtcaccgacaacatgctgtgtgctggagacactcggagcggcgggccccaggcaaacttgcacgacgcctgccagggcgattcgggaggccccctggtgtgtctgaacgatggccgcatgactttggtgggcatcatcagctggggcctgggctgtggacagaaggatgtcccgggtgtgtacaccaaggttaccaactacctagactggattcgtgacaacatgcgaccgtgaccaggaacacccgactcctcaaaagcaaatgagatcccgcctcttcttcttcagaagacactgcaaaggcgcagtgcttctctacagacttctccagacccaccacaccgcagaagcgggacgagaccctacaggagagggaagagtgcattttcccagatacttcccattttggaagttttcaggacttggtctgatttcaggatactctgtcagatgggaagacatgaatgcacactagcctctccaggaatgcctcctccctgggcagaaagtggccatgccaccctgttttcagctaaagcccaacctcctgacctgtcaccgtgagcagctttggaaacaggaccacaaaaatgaaagcatgtctcaatagtaaaagataacaagatctttcaggaaagacggattgcattagaaatagacagtatatttatagtcacaagagcccagcagggcctcaaagttggggcaggctggctggcccgtcatgttcctcaaaagcacccttgacgtcaagtctccttcccctttccccactccctggctctcagaaggtattccttttgtgtacagtgtgtaaagtgtaaatcctttttctttataaactttagagtagcatgagagaattgtatcatttgaacaactaggcttcagcatatttatagcaatccatgttagtttttactttctgttgccacaaccctgttttatactgtacttaataaattcagatatatttttcacagtttttccaaaatcagagtggaatggttttgttatagatgctgtatcccactctttattcatgttcacattttaaaatcatttggaattctgcttcactcgcttaacatatacacaacacctgtaacatacaaggcaatgggctaggtgctccagaccgggaaaaggagggacaggaatgcttggtctgatgggctaatatggcatttagagaagtaccaaggtacagtggagccggtcacaaaagggcagacttgtagtagaattcagttgcaagagggattggggaatcttaaggaaaaaatagaatcttaaggaaaaaataactgggtgagacgtggactgtggacaggtgtggaaaaggcactctccatggaggtatgaatatgtagagggccaagagaggggagtacagggagaaatgagttgagcttgtctgaagtgaacttcaggaagaggaacataggctggaatttagattatgggggctctgaacaccaaactgagtttggacttaattgacttctg

SEQ ID NO: 589 - DNA, 2516 bp, Homo sapiens
  source 1..2516: mol_type = genomic DNA
atggccctgtccactgagcatcctcccgccacacagaaacccgcccagccggggccaccgaccccaccccctgcctggaaacttaaaggaggccggagctgtggggagctcagagctgagatcctacaggagtccagggctggagagaaaacctctgcgaggaaagggaaggagcaagccgtgaatttaagggacgctgtgaagcaatcatggatgcaatgaagagagggctctgctgtgtgctgctgctgtgtggagcagtcttcgtttcgcccagccaggaaatccatgcccgattcagaagaggagccagatcttaccaaggttgcagcgagccaaggtgtttcaacgggggcacctgccagcaggccctgtacttctcagatttcgtgtgccagtgccccgaaggatttgctgggaagtgctgtgaaatagataccagggccacgtgctacgaggaccagggcatcagctacaggggcacgtggagcacagcggagagtggcgccgagtgcaccaactggaacagcagcgcgttggcccagaagccctacagcgggcggaggccagacgccatcaggctgggcctggggaaccacaactactgcagaaacccagatcgagactcaaagccctggtgctacgtctttaaggcggggaagtacagctcagagttctgcagcacccctgcctgctctgagggaaacagtgactgctactttgggaatgggtcagcctaccgtggcacgcacagcctcaccgagtcgggtgcctcctgcctcccgtggaattccatgatcctgataggcaaggtttacacagcacagaaccccagtgcccaggcactgggcctgggcaaacataattactgccggaatcctgatggggatgccaagccctggtgccacgtgctgaagaaccgcaggctgacgtgggagtactgtgatgtgccctcctgctccacctgcggcctgagacagtacagccagcctcagtttcgcatcaaaggagggctcttcgccgacatcgcctcccacccctggcaggctgccatctttgccaagcacaggaggtcgcccggagagcggttcctgtgcgggggcatactcatcagctcctgctggattctctctgccgcccactgcttccaggagaggtttccgccccaccacctgacggtgatcttgggcagaacataccgggtggtccctggcgaggaggagcagaaatttgaagtcgaaaaatacattgtccataaggaattcgatgatgacacttacgacaatgacattgcgctgctgcagctgaaatcggattcgtcccgctgtgcccaggagagcagcgtggtccgcactgtgtgccttcccccggcggacctgcagctgccggactggacggagtgtgagctctccggctacggcaagcatgaggccttgtctcctttctattcggagcggctgaaggaggctcatgtcagactgtacccatccagccgctgcacatcacaacatttacttaacagaacagtcaccgacaacatgctgtgtgctggagacactcggagcggcgggccccaggcaaacttgcacgacgcctgccagggcgattcgggaggccccctggtgtgtctgaacgatggccgcatgactttggtgggcatcatcagctggggcctgggctgtggacagaaggatgtcccgggtgtgtacaccaaggttaccaactacctagactggattcgtgacaacatgcgaccgtgaccaggaacacccgactcctcaaaagcaaatgagatcccgcctcttcttcttcagaagacactgcaaaggcgcagtgcttctctacagacttctccagacccaccacaccgcagaagcgggacgagaccctacaggagagggaagagtgcattttcccagatacttcccattttggaagttttcaggacttggtctgatttcaggatactctgtcagatgggaagacatgaatgcacactagcctctccaggaatgcctcctccctgggcagaaagtggccatgccaccctgttttcagctaaagcccaacctcctgacctgtcaccgtgagcagctttggaaacaggaccacaaaaatgaaagcatgtctcaatagtaaaagataacaagatctttcaggaaagacggattgcattagaaatagacagtatatttatagtcacaagagcccagcagggcctcaaagttggggcaggctggctggcccgtcatgttcctcaaaagcacccttgacgtcaagtctccttcccctttccccactccctggctctcagaaggtattccttttgtgtacagtgtgtaaagtgtaaatcctttttctttataaactttagagtagcatgagagaattgtatcatttgaacaactaggcttcagcatatttatagcaatccatgttagtttttactttctgttgccacaaccctgttttatactgtacttaataaattcagatatatttttcacagtttttcc

SEQ ID NO: 590 - DNA, 2599 bp, Homo sapiens
  source 1..2599: mol_type = genomic DNA
agagctgagatcctacaggagtccagggctggagagaaaacctctgcgaggaaagggaaggagcaagccgtgggagggagagaggaagggagggagggaagacgaaaacacgccgaggtcccagaatttaagggacgctgtgaagcaatcatggatgcaatgaagagagggctctgctgtgtgctgctgctgtgtggagcagtcttcgtttcgcccagccaggaaatccatgcccgattcagaagaggagccagatcttaccaagtgatctgcagagatgaaaaaacgcagatgatataccagcaacatcagtcatggctgcgccctgtgctcagaagcaaccgggtggaatattgctggtgcaacagtggcagggcacagtgccactcagtgcctgtcaaaagttgcagcgagccaaggtgtttcaacgggggcacctgccagcaggccctgtacttctcagatttcgtgtgccagtgccccgaaggatttgctgggaagtgctgtgaaatagataccagggccacgtgctacgaggaccagggcatcagctacaggggcacgtggagcacagcggagagtggcgccgagtgcaccaactggaacagcagcgcgttggcccagaagccctacagcgggcggaggccagacgccatcaggctgggcctggggaaccacaactactgcagaaacccagatcgagactcaaagccctggtgctacgtctttaaggcggggaagtacagctcagagttctgcagcacccctgcctgctctgagggaaacagtgactgctactttgggaatgggtcagcctaccgtggcacgcacagcctcaccgagtcgggtgcctcctgcctcccgtggaattccatgatcctgataggcaaggtttacacagcacagaaccccagtgcccaggcactgggcctgggcaaacataattactgccggaatcctgatggggatgccaagccctggtgccacgtgctgaagaaccgcaggctgacgtgggagtactgtgatgtgccctcctgctccacctgcggcctgagacagtacagccagcctcagtttcgcatcaaaggagggctcttcgccgacatcgcctcccacccctggcaggctgccatctttgccaagcacaggaggtcgcccggagagcggttcctgtgcgggggcatactcatcagctcctgctggattctctctgccgcccactgcttccaggagaggtttccgccccaccacctgacggtgatcttgggcagaacataccgggtggtccctggcgaggaggagcagaaatttgaagtcgaaaaatacattgtccataaggaattcgatgatgacacttacgacaatgacattgcgctgctgcagctgaaatcggattcgtcccgctgtgcccaggagagcagcgtggtccgcactgtgtgccttcccccggcggacctgcagctgccggactggacggagtgtgagctctccggctacggcaagcatgaggccttgtctcctttctattcggagcggctgaaggaggctcatgtcagactgtacccatccagccgctgcacatcacaacatttacttaacagaacagtcaccgacaacatgctgtgtgctggagacactcggagcggcgggccccaggcaaacttgcacgacgcctgccagggcgattcgggaggccccctggtgtgtctgaacgatggccgcatgactttggtgggcatcatcagctggggcctgggctgtggacagaaggatgtcccgggtgtgtacaccaaggttaccaactacctagactggattcgtgacaacatgcgaccgtgaccaggaacacccgactcctcaaaagcaaatgagatcccgcctcttcttcttcagaagacactgcaaaggcgcagtgcttctctacagacttctccagacccaccacaccgcagaagcgggacgagaccctacaggagagggaagagtgcattttcccagatacttcccattttggaagttttcaggacttggtctgatttcaggatactctgtcagatgggaagacatgaatgcacactagcctctccaggaatgcctcctccctgggcagaaagtggccatgccaccctgttttcagctaaagcccaacctcctgacctgtcaccgtgagcagctttggaaacaggaccacaaaaatgaaagcatgtctcaatagtaaaagataacaagatctttcaggaaagacggattgcattagaaatagacagtatatttatagtcacaagagcccagcagggcctcaaagttggggcaggctggctggcccgtcatgttcctcaaaagcacccttgacgtcaagtctccttcccctttccccactccctggctctcagaaggtattccttttgtgtacagtgtgtaaagtgtaaatcctttttctttataaactttagagtagcatgagagaattgtatcatttgaacaactaggcttcagcatatttatagcaatccatgttagtttttactttctgttgccacaaccctgttttatactgtacttaataaattcagatatatttttcacagtttttccaaaa

SEQ ID NO: 591 - DNA, 1655 bp, Homo sapiens
  source 1..1655: mol_type = genomic DNA
agagctgagatcctacaggagtccagggctggagagaaaacctctgcgaggaaagggaaggagcaagccgtgaatttaagggacgctgtgaagcaatcatggatgcaatgaagagagggctctgctgtgtgctgctgctgtgtggagcagtcttcgtttcgcccagccaggaaatccatgcccgattcagaagaggagccagatcttaccaagtgatctgcagagatgaaaaaacgcagatgatataccagcaacatcagtcatggctgcgccctgtgctcagaagcaaccgggtggaatattgctggtgcaacagtggcagggcacagtgccactcagtgcctgtcaaaagaaacagtgactgctactttgggaatgggtcagcctaccgtggcacgcacagcctcaccgagtcgggtgcctcctgcctcccgtggaattccatgatcctgataggcaaggtttacacagcacagaaccccagtgcccaggcactgggcctgggcaaacataattactgccggaatcctgatggggatgccaagccctggtgccacgtgctgaagaaccgcaggctgacgtgggagtactgtgatgtgccctcctgctccacctgcggcctgagacagtacagccagcctcagtttcgcatcaaaggagggctcttcgccgacatcgcctcccacccctggcaggctgccatctttgccaagcacaggaggtcgcccggagagcggttcctgtgcgggggcatactcatcagctcctgctggattctctctgccgcccactgcttccaggagaggtttccgccccaccacctgacggtgatcttgggcagaacataccgggtggtccctggcgaggaggagcagaaatttgaagtcgaaaaatacattgtccataaggaattcgatgatgacacttacgacaatgacattgcgctgctgcagctgaaatcggattcgtcccgctgtgcccaggagagcagcgtggtccgcactgtgtgccttcccccggcggacctgcagctgccggactggacggagtgtgagctctccggctacggcaagcatgaggccttgtctcctttctattcggagcggctgaaggaggctcatgtcagactgtacccatccagccgctgcacatcacaacatttacttaacagaacagtcaccgacaacatgctgtgtgctggagacactcggagcggcgggccccaggcaaacttgcacgacgcctgccagggcgattcgggaggccccctggtgtgtctgaacgatggccgcatgactttggtgggcatcatcagctggggcctgggctgtggacagaaggatgtcccgggtgtgtacaccaaggttaccaactacctagactggattcgtgacaacatgcgaccgtgaccaggaacacccgactcctcaaaagcaaatgagatcccgcctcttcttcttcagaagacactgcaaaggcgcagtgcttctctacagacttctccagacccaccacaccgcagaagcgggacgagaccctacaggagagggaagagtgcattttcccagatacttcccattttggaagttttcaggacttggtctgatttcaggatactctgtcagatgggaagacatgaatgcacactagcctct

SEQ ID NO: 592 - DNA, 2030 bp, Homo sapiens
  source 1..2030: mol_type = genomic DNA
agagctgagatcctacaggagtccagggctggagagaaaacctctgcgaggaaagggaaggagcaagccgtgaatttaagggacgctgtgaagcaatcatggatgcaatgaagagagggctctgctgtgtgctgctgctgtgtggagcagtcttcgtttcgcccagccaggaaatccatgcccgattcagaagaggagccagatcttaccaagtgatctgcagagatgaaaaaacgcagatgatataccagcaacatcagtcatggctgcgccctgtgctcagaagcaaccgggtggaatattgctggtgcaacagtggcagggcacagtgccactcagtgcctgtcaaaagttgcagcgagccaaggtgtttcaacgggggcacctgccagcaggccctgtacttctcagatttcgtgtgccagtgccccgaaggatttgctgggaagtgctgtgaaatagactcaaagccctggtgctacgtctttaaggcggggaagtacagctcagagttctgcagcacccctgcctgctctgagggaaacagtgactgctactttgggaatgggtcagcctaccgtggcacgcacagcctcaccgagtcgggtgcctcctgcctcccgtggaattccatgatcctgataggcaaggtttacacagcacagaaccccagtgcccaggcactgggcctgggcaaacataattactgccggaatcctgatggggatgccaagccctggtgccacgtgctgaagaaccgcaggctgacgtgggagtactgtgatgtgccctcctgctccacctgcggcctgagacagtacagccagcctcagtttcgcatcaaaggagggctcttcgccgacatcgcctcccacccctggcaggctgccatctttgccaagcacaggaggtcgcccggagagcggttcctgtgcgggggcatactcatcagctcctgctggattctctctgccgcccactgcttccaggagaggtttccgccccaccacctgacggtgatcttgggcagaacataccgggtggtccctggcgaggaggagcagaaatttgaagtcgaaaaatacattgtccataaggaattcgatgatgacacttacgacaatgacattgcgctgctgcagctgaaatcggattcgtcccgctgtgcccaggagagcagcgtggtccgcactgtgtgccttcccccggcggacctgcagctgccggactggacggagtgtgagctctccggctacggcaagcatgaggccttgtctcctttctattcggagcggctgaaggaggctcatgtcagactgtacccatccagccgctgcacatcacaacatttacttaacagaacagtcaccgacaacatgctgtgtgctggagacactcggagcggcgggccccaggcaaacttgcacgacgcctgccagggcgattcgggaggccccctggtgtgtctgaacgatggccgcatgactttggtgggcatcatcagctggggcctgggctgtggacagaaggatgtcccgggtgtgtacaccaaggttaccaactacctagactggattcgtgacaacatgcgaccgtgaccaggaacacccgactcctcaaaagcaaatgagatcccgcctcttcttcttcagaagacactgcaaaggcgcagtgcttctctacagacttctccagacccaccacaccgcagaagcgggacgagaccctacaggagagggaagagtgcattttcccagatacttcccattttggaagttttcaggacttggtctgatttcaggatactctgtcagatgggaagacatgaatgcacactagcctctccaggaatgcctcctccctgggcagaaagtggccatgccaccctgttttcagctaaagcccaacctcctgacctgtcaccgtgagcagctttggaaacaggaccacaaaaatgaaagcatgtctcaatagtaaaagataacaagatctttcaggaaagacggattgcattagaaatagacagtata

SEQ ID NO: 593 - DNA, 670 bp, Homo sapiens
  source 1..670: mol_type = genomic DNA
aaaaaaaaaaaaggacatgctacagcatggatgcaccttgaagacatttgcaaagtgaaacaaaccagtcgcaaaagaagaaacactgtctcattccacttctaggataatttaagggacgctgtgaagcaatcatggatgcaatgaagagagggctctgctgtgtgctgctgctgtgtggagcagtcttcgtttcgcccagccaggaaatccatgcccgattcagaagaggagccagatcttaccaagtgatctgcagagatgaaaaaacgcagatgatataccagcaacatcagtcatggctgcgccctgtgctcagaagcaaccgggtggaatattgctggtgcaacagtggcagggcacagtgccactcagtgcctgtcaaaagttgcagcgagccaaggtgtttcaacgggggcacctgccagcaggccctgtacttctcagatttcgtgtgccagtgccccgaaggatttgctgggaagtgctgtgaaatagataccagggccacgtgctacgaggaccagggcatcagctacaggggcacgtggagcacagcggagagtggcgccgagtgcaccaactggaacagcagcgcgttggcccagaagccctacagcgggcggaggccagacgccatcaggctgggcctggggaaccacaactactg

SEQ ID NO: 594 - DNA, 549 bp, Homo sapiens
  source 1..549: mol_type = genomic DNA
agttttgagaaacaggaaatttgaggaaagctgagaaagagaagatctggaaatttaagggacgctgtgaagcaatcatggatgcaatgaagagagggctctgctgtgtgctgctgctgtgtggagcagtcttcgtttcgcccagccaggaaatccatgcccgattcagaagaggagccagatcttaccaagtgatctgcagagatgaaaaaacgcagatgatataccagcaacatcagtcatggctgcgccctgtgctcagaagcaaccgggtggaatattgctggtgcaacagtggcagggcacagtgccactcagtgcctgtcaaaagttgcagcgagccaaggtgtttcaacgggggcacctgccagcaggccctgtacttctcagatttcgtgtgccagtgccccgaaggatttgctgggaagtgctgtgaaatagataccagggccacgtgctacgaggaccagggcatcagctacaggggcacgtggagcacagcggagagtggcgccgagtgcaccaactggaacagcagcgcgttggccc

SEQ ID NO: 595 - DNA, 1613 bp, Homo sapiens
  source 1..1613: mol_type = genomic DNA
agagctgagatcctacaggagtccagggctggagagaaaacctctgcgaggaaagggaaggagcaagccgtgaatttaagggacgctgtgaagcaatcatggatgcaatgaagagagggctctgctgtgtgctgctgctgtgtggagcagtcttcgtttcgcccagccaggaaatccatgcccgattcagaagaggagccagatcttaccaagtgatctgcagagatgaaaaaacgcagatgatataccagcaacatcagtcatggctgcgccctgtgctcagaagcaaccgggtggaatattgctggtgcaacagtggcagggcacagtgccactcagtgcctgtcaaaagttgcagcgagccaaggtgtttcaacgggggcacctgccagcaggccctgtacttctcagatttcgtgtgccagtgccccgaaggatttgctgggaagtgctgtgaaataggaaacagtgactgctactttgggaatgggtcagcctaccgtggcacgcacagcctcaccgagtcgggtgcctcctgcctcccgtggaattccatgatcctgataggcaaggtttacacagcacagaaccccagtgcccaggcactgggcctgggcaaacataattactgccggaatcctgatggggatgccaagccctggtgccacgtgctgaagaaccgcaggctgacgtgggagtactgtgatgtgccctcctgctccacctgcggcctgagacagtacagccagcctcagtttcgcatcaaaggagggctcttcgccgacatcgcctcccacccctggcaggctgccatctttgccaagcacaggaggtcgcccggagagcggttcctgtgcgggggcatactcatcagctcctgctggattctctctgccgcccactgcttccaggagaggtttccgccccaccacctgacggtgatcttgggcagaacataccgggtggtccctggcgaggaggagcagaaatttgaagtcgaaaaatacattgtccataaggaattcgatgatgacacttacgacaatgacattgcgctgctgcagctgaaatcggattcgtcccgctgtgcccaggagagcagcgtggtccgcactgtgtgccttcccccggcggacctgcagctgccggactggacggagtgtgagctctccggctacggcaagcatgaggccttgtctcctttctattcggagcggctgaaggaggctcatgtcagactgtacccatccagccgctgcacatcacaacatttacttaacagaacagtcaccgacaacatgctgtgtgctggagacactcggagcggcgggccccaggcaaacttgcacgacgcctgccagggcgattcgggaggccccctggtgtgtctgaacgatggccgcatgactttggtgggcatcatcagctggggcctgggctgtggacagaaggatgtcccgggtgtgtacaccaaggttaccaactacctagactggattcgtgacaacatgcgaccgtgaccaggaacacccgactcctcaaaagcaaatgagatcccgcctcttcttcttcagaagacactgcaaaggcgcagtgcttctctacagacttct

SEQ ID NO: 596 - DNA, 3262 bp, Homo sapiens
  source 1..3262: mol_type = genomic DNA
ccttcgcaagccctcatttcaccaggcccccggcttggggcgccttccttccccatggcgggacacctggcttcggatttcgccttctcgccccctccaggtggtggaggtgatgggccaggggggccggagccgggctgggttgatcctcggacctggctaagcttccaaggccctcctggagggccaggaatcgggccgggggttgggccaggctctgaggtgtgggggattcccccatgccccccgccgtatgagttctgtggggggatggcgtactgtgggccccaggttggagtggggctagtgccccaaggcggcttggagacctctcagcctgagggcgaagcaggagtcggggtggagagcaactccgatggggcctccccggagccctgcaccgtcacccctggtgccgtgaagctggagaaggagaagctggagcaaaacccggaggagtcccaggacatcaaagctctgcagaaagaactcgagcaatttgccaagctcctgaagcagaagaggatcaccctgggatatacacaggccgatgtggggctcaccctgggggttctatttgggaaggtattcagccaaacgaccatctgccgctttgaggctctgcagcttagcttcaagaacatgtgtaagctgcggcccttgctgcagaagtgggtggaggaagctgacaacaatgaaaatcttcaggagatatgcaaagcagaaaccctcgtgcaggcccgaaagagaaagcgaaccagtatcgagaaccgagtgagaggcaacctggagaatttgttcctgcagtgcccgaaacccacactgcagcagatcagccacatcgcccagcagcttgggctcgagaaggatgtggtccgagtgtggttctgtaaccggcgccagaagggcaagcgatcaagcagcgactatgcacaacgagaggattttgaggctgctgggtctcctttctcagggggaccagtgtcctttcctctggccccagggccccattttggtaccccaggctatgggagccctcacttcactgcactgtactcctcggtccctttccctgagggggaagcctttccccctgtctccgtcaccactctgggctctcccatgcattcaaactgaggtgcctgcccttctaggaatgggggacagggggaggggaggagctagggaaagaaaacctggagtttgtgccagggtttttgggattaagttcttcattcactaaggaaggaattgggaacacaaagggtgggggcaggggagtttggggcaactggttggagggaaggtgaagttcaatgatgctcttgattttaatcccacatcatgtatcacttttttcttaaataaagaagcctgggacacagtagatagacacacttatcttggtttgtccttcagttactgaggtagggatgggaatatccaatgctcatacccaagtgaccctgaaactaaggtgccatttacactccttaaggtcacacaacatcagagggagagctgggattgcagccaagtttatttgtacagggccctgtgataggctagttcccaaaagcctgtgatgcaagaacttttgcccatagactcagtcaccatgtagctgttacctgttcagagctggctttttgctttcccaccctactctggaattcttaaatggctttatacttagaaatcatcttatttctgttgaacctagatcaccccaaccagaaacttctattaatactttgtgctttcttgataccagggtctatttggtttccacttaaggtttttgcatactctgcccataagtgactcattagttactcaagttttattcctggctctgccactagttcattaggggtctttgccccagagtcatttcttccattttaaaaacttgggctcattaaatctaggtaggaaagggcgggtgtggcaggttttaatagaacaggtcaagataaggctttatttctatagaaatgatgctttgacaatagtttggcttggtgtaaggctcacaaaagaaaatcacatgtaccatgtgtgggttaagcggtttgattcacactgaaccaggccagcccagttgccctctgctgtgtccacccgtggagtggagctgtgtcacagccatcacactggtaaactgctgtagctggtttaccaggctttctcttgccctgacagtacaggtgaagcctgtaaataaatcttctgctatctttgtgaacttaaccaaatcccagttaccttatttaaatggcaatagatctgttttcccttaaactagaaaccttaattacctgtattcctacctccagctcaacccatatatttgcacctttccagtaagcaggtttgtatttccatctctccccttcccctaagattctgaattagttctccagaccttgccaagcacattctccctggaaagcaaggaatatcacagacccacaagaagagtaaatgcccaggagtgaatgaagcggcttgtccttgacttggaaataaaagcaaagctgtgaaaagccaggtcgctacgattttgttggcagcaggactagccacagagtagggaagttttggggccaggccctaggttttcccagaatgccttgggtgatgccaccaagaaccttaagaactccctcttacattttccatcggttgcaggcatggcttttgcaactgataggtgctctgactacagatattctggtgtccatggcaacatggccttatggcttgtaatagtgggaacttccagctcactggcaatttcctggaggtggcaatatctttggcaggaaaccatctcttctgtcttggccaccagggtctgctccaggccctgaatgagtccacatcaatccatccttcttccctgtagtcattccctcctggggagggaagggaaggggggtatttatcagacctatttgctcgctgctgtgtctactcatgggcaggtgtgtccgatggtgccttggcagtggaccttaggtctgaatgccagcccggcaccctgggcatcggaagtcggcctccctggcagcctggatgctgcagccaacacaggccacatggaaccagacgtcacagccatcacactgaacccaggccactgtctcttcctggggcaggcagcaacaaggagctgcacagggctccccgcccccaactgcagggggagccatgggagcgctcactgggtacttccgaggacggccacgtcgatttc

SEQ ID NO: 597 - DNA, 1163 bp, Homo sapiens
  source 1..1163: mol_type = genomic DNA
gtagtcctttgttacatgcatgagtcagtgaacagggaatgggtgaatgacatttgtgggtaggttatttctagaagttaggtgggcagcttggaaggcagatgcacttctacagactattccttggggccacacgtaggttcttgaatcccgaatggaaaggggagattgataactggtgtgtttatgttcttacaagtcttctgccttttaaaatccagtcccaggacatcaaagctctgcagaaagaactcgagcaatttgccaagctcctgaagcagaagaggatcaccctgggatatacacaggccgatgtggggctcaccctgggggttctatttgggaaggtattcagccaaacgaccatctgccgctttgaggctctgcagcttagcttcaagaacatgtgtaagctgcggcccttgctgcagaagtgggtggaggaagctgacaacaatgaaaatcttcaggagatatgcaaagcagaaaccctcgtgcaggcccgaaagagaaagcgaaccagtatcgagaaccgagtgagaggcaacctggagaatttgttcctgcagtgcccgaaacccacactgcagcagatcagccacatcgcccagcagcttgggctcgagaaggatgtggtccgagtgtggttctgtaaccggcgccagaagggcaagcgatcaagcagcgactatgcacaacgagaggattttgaggctgctgggtctcctttctcagggggaccagtgtcctttcctctggccccagggccccattttggtaccccaggctatgggagccctcacttcactgcactgtactcctcggtccctttccctgagggggaagcctttccccctgtctctgtcaccactctgggctctcccatgcattcaaactgaggtgcctgcccttctaggaatgggggacagggggaggggaggagctagggaaagaaaacctggagtttgtgccagggtttttgggattaagttcttcattcactaaggaaggaattgggaacacaaagggtgggggcaggggagtttggggcaactggttggagggaaggtgaagttcaatgatgctcttgattttaatcccacatcatgtatcacttttttcttaaataaagaagcctgggacacagtagatagacacactta

SEQ ID NO: 598 - DNA, 1420 bp, Homo sapiens
  source 1..1420: mol_type = genomic DNA
agagaggggttgagtagtcccttcgcaagccctcatttcaccaggcccccggcttggggcgccttccttccccatggcgggacacctggcttcggatttcgccttctcgccccctccaggtggtggaggtgatgggccaggggggccggagccgggctgggttgatcctcggacctggctaagcttccaaggccctcctggagggccaggaatcgggccgggggttgggccaggctctgaggtgtgggggattcccccatgccccccgccgtatgagttctgtggggggatggcgtactgtgggccccaggttggagtggggctagtgccccaaggcggcttggagacctctcagcctgagggcgaagcaggagtcggggtggagagcaactccgatggggcctccccggagccctgcaccgtcacccctggtgccgtgaagctggagaaggagaagctggagcaaaacccggaggagtcccaggacatcaaagctctgcagaaagaactcgagcaatttgccaagctcctgaagcagaagaggatcaccctgggatatacacaggccgatgtggggctcaccctgggggttctatttgggaaggtattcagccaaacgaccatctgccgctttgaggctctgcagcttagcttcaagaacatgtgtaagctgcggcccttgctgcagaagtgggtggaggaagctgacaacaatgaaaatcttcaggagatatgcaaagcagaaaccctcgtgcaggcccgaaagagaaagcgaaccagtatcgagaaccgagtgagaggcaacctggagaatttgttcctgcagtgcccgaaacccacactgcagcagatcagccacatcgcccagcagcttgggctcgagaaggatgtggtccgagtgtggttctgtaaccggcgccagaagggcaagcgatcaagcagcgactatgcacaacgagaggattttgaggctgctgggtctcctttctcagggggaccagtgtcctttcctctggccccagggccccattttggtaccccaggctatgggagccctcacttcactgcactgtactcctcggtccctttccctgagggggaagcctttccccctgtctctgtcaccactctgggctctcccatgcattcaaactgaggtgcctgcccttctaggaatgggggacagggggaggggaggagctagggaaagaaaacctggagtttgtgccagggtttttgggattaagttcttcattcactaaggaaggaattgggaacacaaagggtgggggcaggggagtttggggcaactggttggagggaaggtgaagttcaatgatgctcttgattttaatcccacatcatgtatcacttttttcttaaataaagaagcctgggacacagtagatagacacactta

SEQ ID NO: 599 - DNA, 1163 bp, Homo sapiens
  source 1..1163: mol_type = genomic DNA
gtagtcctttgttacatgcatgagtcagtgaacagggaatgggtgaatgacatttgtgggtaggttatttctagaagttaggtgggcagcttggaaggcagatgcacttctacagactattccttggggccacacgtaggttcttgaatcccgaatggaaaggggagattgataactggtgtgtttatgttcttacaagtcttctgccttttaaaatccagtcccaggacatcaaagctctgcagaaagaactcgagcaatttgccaagctcctgaagcagaagaggatcaccctgggatatacacaggccgatgtggggctcaccctgggggttctatttgggaaggtattcagccaaacgaccatctgccgctttgaggctctgcagcttagcttcaagaacatgtgtaagctgcggcccttgctgcagaagtgggtggaggaagctgacaacaatgaaaatcttcaggagatatgcaaagcagaaaccctcgtgcaggcccgaaagagaaagcgaaccagtatcgagaaccgagtgagaggcaacctggagaatttgttcctgcagtgcccgaaacccacactgcagcagatcagccacatcgcccagcagcttgggctcgagaaggatgtggtccgagtgtggttctgtaaccggcgccagaagggcaagcgatcaagcagcgactatgcacaacgagaggattttgaggctgctgggtctcctttctcagggggaccagtgtcctttcctctggccccagggccccattttggtaccccaggctatgggagccctcacttcactgcactgtactcctcggtccctttccctgagggggaagcctttccccctgtctctgtcaccactctgggctctcccatgcattcaaactgaggtgcctgcccttctaggaatgggggacagggggaggggaggagctagggaaagaaaacctggagtttgtgccagggtttttgggattaagttcttcattcactaaggaaggaattgggaacacaaagggtgggggcaggggagtttggggcaactggttggagggaaggtgaagttcaatgatgctcttgattttaatcccacatcatgtatcacttttttcttaaataaagaagcttgggacacagtagatagacacactta

SEQ ID NO: 600 - DNA, 1163 bp, Homo sapiens; identical to SEQ ID NO: 599
  source 1..1163: mol_type = genomic DNA

SEQ ID NO: 601 - DNA, 1420 bp, Homo sapiens
  source 1..1420: mol_type = genomic DNA
agagaggggttgagtagtcccttcgcaagccctcatttcaccaggcccccggcttggggcgccttccttccccatggcgggacacctggcttcagatttcgccttctcgccccctccaggtggtggaggtgatgggccaggggggccggagccgggctgggttgatcctcggacctggctaagcttccaaggccctcctggagggccaggaatcgggccgggggttgggccaggctctgaggtgtgggggattcccccatgccccccgccgtatgagttctgtggggggatggcgtactgtgggccccaggttggagtggggctagtgccccaaggcggcttggagacctctcagcctgagggtgaagcaggagtcggggtggagagcaactccgatggggcctccccggagccctgcaccgtcacccctggtgccgtgaagctggagaaggagaagctggagcaaaacccggaggagtcccaggacatcaaagctctgcagaaagaactcgagcaatttgccaagctcctgaagcagaagaggatcaccctgggatatacacaggccgatgtggggctcaccctgggggttctatttgggaaggtattcagccaaacgaccatctgccgctttgaggctctgcagcttagcttcaagaacatgtgtaagctgcggcccttgctgcagaagtgggtggaggaagctgacaacaatgaaaatcttcaggagatatgcaaagcagaaaccctcgtgcaggcccgaaagagaaagcgaaccagtatcgagaaccgagtgagaggcaacctggagaatttgttcctgcagtgcccgaaacccacactgcagcagatcagccacatcgcccagcagcttgggctcgagaaggatgtggtccgagtgtggttctgtaaccggcgccagaagggcaagcgatcaagcagcgactatgcacaacgagaggattttgaggctgctgggtctcctttctcagggggaccagtgtcctttcctctggccccagggccccattttggtaccccaggctatgggagccctcacttcactgcactgtactcctcggtccctttccctgagggggaagcctttccccctgtctctgtcaccactctgggctctcccatgcattcaaactgaggtgcctgcccttctaggaatgggggacagggggaggggaggagctagggaaagaaaacctggagtttgtgccagggtttttgggattaagttcttcattcactaaggaaggaattgggaacacaaagggtgggggcaggggagtttggggcaactggttggagggaaggtgaagttcaatgatgctcttgattttaatcccacatcatgtatcacttttttcttaaataaagaagcttgggacacagtagatagacacactta

SEQ ID NO: 602 - DNA, 1420 bp, Homo sapiens
  source 1..1420: mol_type = genomic DNA
agagaggggttgagtagtcccttcgcaagccctcatttcaccaggcccccggcttggggcgccttccttccccatggcgggacacctggcttcagattttgccttctcgccccctccaggtggtggaggtgatgggccaggggggccggagccgggctgggttgatcctcggacctggctaagcttccaaggccctcctggagggccaggaatcgggccgggggttgggccaggctctgaggtgtgggggattcccccatgccccccgccgtatgagttctgtggggggatggcgtactgtgggccccaggttggagtggggctagtgccccaaggcggcttggagacctctcagcctgagggcgaagcaggagtcggggtggagagcaactccgatggggcctccccggagccctgcaccgtcacccctggtgccgtgaagctggagaaggagaagctggagcaaaacccggaggagtcccaggacatcaaagctctgcagaaagaactcgagcaatttgccaagctcctgaagcagaagaggatcaccctgggatatacacaggccgatgtggggctcaccctgggggttctatttgggaaggtattcagccaaacgaccatctgccgctttgaggctctgcagcttagcttcaagaacatgtgtaagctgcggcccttgctgcagaagtgggtggaggaagctgacaacaatgaaaatcttcaggagatatgcaaagcagaaaccctcgtgcaggcccgaaagagaaagcgaaccagtatcgagaaccgagtgagaggcaacctggagaatttgttcctgcagtgcccgaaacccacactgcagcagatcagccacatcgcccagcagcttgggctcgagaaggatgtggtccgagtgtggttctgtaaccggcgccagaagggcaagcgatcaagcagcgactatgcacaacgagaggattttgaggctgctgggtctcctttctcagggggaccagtgtcctttcctctggccccagggccccattttggtaccccaggctatgggagccctcacttcactgcactgtactcctcggtccctttccctgagggggaagcctttccccctgtctctgtcaccactctgggctctcccatgcattcaaactgaggtgcctgcccttctaggaatgggggacagggggaggggaggagctagggaaagaaaacctggagtttgtgccagggtttttgggattaagttcttcattcactaaggaaggaattgggaacacaaagggtgggggcaggggagtttggggcaactggttggagggaaggtgaagttcaatgatgctcttgattttaatcccacatcatgtatcacttttttcttaaataaagaagcttgggacacagtagatagacacactta

SEQ ID NO: 603 - DNA, 1163 bp, Homo sapiens; identical to SEQ ID NO: 599
  source 1..1163: mol_type = genomic DNA

SEQ ID NO: 604 - DNA, 1420 bp, Homo sapiens; identical to SEQ ID NO: 601
  source 1..1420: mol_type = genomic DNA

SEQ ID NO: 605 - DNA, 911 bp, Homo sapiens
  source 1..911: mol_type = genomic DNA
atggcgggacacctggcttcggatttcgccttctcgccccctccaggtggtggaggtgatgggccaggggggccggagccgggctgggttgatcctcggacctggctaagcttccaaggccctcctggagggccaggaatcgggccgggggttgggccaggctctgaggtgtgggggattcccccatgccccccgccgtatgagttctgtggggggatggcgtactgtgggccccaggttggagtggggctagtgccccaaggcggcttggagacctctcagcctgagggcgaagcaggaggtggagagcaactccgatggggcctccccggagccctgcaccgtcacccctggtgccgtgaagctggagaaggagaagctggagcaaaacccggaggagtcccaggacatcaaagctctgcagaaagaactcgagcaatttgccaagctcctgaagcagaagaggatcaccctgggatatacacaggccgatgtggggctcaccctgggggttctatttgggaaggtattcagccaaacgaccatctgccgctttgaggctctgcagcttagcttcaagaacatgtgtaagctgcggcccttgctgcagaagtgggtggaggaagctgacaacaatgaaaatcttcaggagatatgcaaagcagaaaccctcgtgcaggcccgaaagagaaagcgaaccagtatcgagaaccgagtgagaggcaacctggagaatttgttcctgcagtgcccgaaacccacactgcagcagatcagccacatcgcccagcagcttgggctcgagaaggatgtggtccgagtgtggttctgtaaccggcgccagaagggcaagcgatcaagcagcgactatgcacaacgagaggattttgaggctgctgggtctcctttct

SEQ ID NO: 606 - DNA, 1163 bp, Homo sapiens; identical to SEQ ID NO: 599
  source 1..1163: mol_type = genomic DNA

SEQ ID NO: 607 - DNA, 1420 bp, Homo sapiens; identical to SEQ ID NO: 602
  source 1..1420: mol_type = genomic DNA

SEQ ID NO: 608 - DNA, 369 bp, Homo sapiens
  source 1..369: mol_type = genomic DNA
atggcgggacacctggcttcagattttgccttctcgccccctccaggtggtggaggtgatgggccaggggggccggagccgggctgggttgatcctcggacctggctaagcttccaaggccctcctggagggccaggaatcgggccgggggttgggccaggctctgaggtgtgggggattcccccatgccccccgccgtatgagttctgtggggggatggcgtactgtgggccccaggttggagtggggctagtgccccaaggcggcttggagacctctcagcctgagggcgaagcaggagtcggggtggagactccgatggggcctccccggagccctgcaccgcatccatttcctttcccactcctg

SEQ ID NO: 609 - DNA, 1395 bp, Homo sapiens
  source 1..1395: mol_type = genomic DNA
ccttcgcaagccctcatttcaccaggcccccggcttggggcgccttccttccccatggcgggacacctggcttcagatttcgccttctcgccccctccaggtggtggaggtgatgggccaggggggccggagccgggctgggttgatcctcggacctggctaagcttccaaggccctcctggagggccaggaatcgggccgggggttgggccaggctctgaggtgtgggggattcccccatgccccccgccgtatgagttctgtggggggatggcgtactgtgggccccaggttggagtggggctagtgccccaaggcggcttggagacctctcagcctgagggtgaagcaggagtcggggtggagagcaactccgatggggcctccccggagccctgcaccgtcacccctggtgccgtgaagctggagaaggagaagctggagcaaaacccggaggagtcccaggacatcaaagctctgcagaaagaactcgagcaatttgccaagctcctgaagcagaagaggatcaccctgggatatacacaggccgatgtgcaccctgggggttctatttgggaaggtattcagccaaacgaccatctgccgctttgaggctctgcagcttagcttcaagaacatgtgtaagctgcggcccttgctgcagaagtgggtggaggaagctgacaacaatgaaaatcttcaggagatatgcaaagcagaaaccctcgtgcaggcccgaaagagaaagcgaaccagtatcgagaaccgagtgagaggcaacctggagaatttgttcctgcagtgcccgaaacccacactgcagcagatcagccacatcgcccagcagcttgggctcgagaaggatgtggtccgagtgtggttctgtaaccggcgccagaagggcaagcgatcaagcagcgactatgcacaacgagaggattttgaggctgctgggtctcctttctcagggggaccagtgtcctttcctctggccccagggccccattttggtaccccaggctatgggagccctcacttcactgcactgtactcctcggtccctttccctgagggggaagcctttccccctgtctctgtcaccactctgggctctcccatgcattcaaactgaggtgcctgcccttctaggaatgggggacagggggaggggaggagctagggaaagaaaacctggagtttgtgccagggtttttgggattaagttcttcattcactaaggaaggaattgggaacacaaagggtgggggcaggggagtttggggcaactggttggagggaaggtgaagttcaatgatgctcttgattttaatcccacatcatgtatcacttttttcttaaataaagaagcttgggacacagtagatagacacactt

SEQ ID NO: 610 - DNA, 369 bp, Homo sapiens
  source 1..369: mol_type = genomic DNA
atggcgggacacctggcttcagatttcgccttctcgccccctccaggtggtggaggtgatgggccaggggggccggagccgggctgggttgatcctcggacctggctaagcttccaaggccctcctggagggccaggaatcgggccgggggttgggccaggctctgaggtgtgggggattcccccatgccccccgccgtatgagttctgtggggggatggcgtactgtgggccccaggttggagtggggctagtgccccaaggcggcttggagacctctcagcctgagggtgaagcaggagtcggggtggagactccgatggggcctccccggagccctgcaccgcatccatttcctttcccactcctg

SEQ ID NO: 611 - DNA, 1395 bp, Homo sapiens
  source 1..1395: mol_type = genomic DNA
ccttcgcaagccctcatttcaccaggcccccggcttggggcgccttccttccccatggcgggacacctggcttcagattttgccttctcgccccctccaggtggtggaggtgatgggccaggggggccggagccgggctgggttgatcctcggacctggctaagcttccaaggccctcctggagggccaggaatcgggccgggggttgggccaggctctgaggtgtgggggattcccccatgccccccgccgtatgagttctgtggggggatggcgtactgtgggccccaggttggagtggggctagtgccccaaggcggcttggagacctctcagcctgagggcgaagcaggagtcggggtggagagcaactccgatggggcctccccggagccctgcaccgtcacccctggtgccgtgaagctggagaaggagaagctggagcaaaacccggaggagtcccaggacatcaaagctctgcagaaagaactcgagcaatttgccaagctcctgaagcagaagaggatcaccctgggatatacacaggccgatgtgcaccctgggggttctatttgggaaggtattcagccaaacgaccatctgccgctttgaggctctgcagcttagcttcaagaacatgtgtaagctgcggcccttgctgcagaagtgggtggaggaagctgacaacaatgaaaatcttcaggagatatgcaaagcagaaaccctcgtgcaggcccgaaagagaaagcgaaccagtatcgagaaccgagtgagaggcaacctggagaatttgttcctgcagtgcccgaaacccacactgcagcagatcagccacatcgcccagcagcttgggctcgagaaggatgtggtccgagtgtggttctgtaaccggcgccagaagggcaagcgatcaagcagcgactatgcacaacgagaggattttgaggctgctgggtctcctttctcagggggaccagtgtcctttcctctggccccagggccccattttggtaccccaggctatgggagccctcacttcactgcactgtactcctcggtccctttccctgagggggaagcctttccccctgtctctgtcaccactctgggctctcccatgcattcaaactgaggtgcctgcccttctaggaatgggggacagggggaggggaggagctagggaaagaaaacctggagtttgtgccagggtttttgggattaagttcttcattcactaaggaaggaattgggaacacaaagggtgggggcaggggagtttggggcaactggttggagggaaggtgaagttcaatgatgctcttgattttaatcccacatcatgtatcacttttttcttaaataaagaagcttgggacacagtagatagacacactt

SEQ ID NO: 612 - DNA, 369 bp, Homo sapiens; identical to SEQ ID NO: 608
  source 1..369: mol_type = genomic DNA

SEQ ID NO: 613 - DNA, 1395 bp, Homo sapiens; identical to SEQ ID NO: 609
  source 1..1395: mol_type = genomic DNA

SEQ ID NO: 614 - DNA, 1395 bp, Homo sapiens
  source 1..1395: mol_type = genomic DNA
ccttcgcaagccctcatttcaccaggcccccggcttggggcgccttccttccccatggcgggacacctggcttcggatttcgccttctcgccccctccaggtggtggaggtgatgggccaggggggccggagccgggctgggttgatcctcggacctggctaagcttccaaggccctcctggagggccaggaatcgggccgggggttgggccaggctctgaggtgtgggggattcccccatgccccccgccgtatgagttctgtggggggatggcgtactgtgggccccaggttggagtggggctagtgccccaaggcggcttggagacctctcagcctgagggcgaagcaggagtcggggtggagagcaactccgatggggcctccccggagccctgcaccgtcacccctggtgccgtgaagctggagaaggagaagctggagcaaaacccggaggagtcccaggacatcaaagctctgcagaaagaactcgagcaatttgccaagctcctgaagcagaagaggatcaccctgggatatacacaggccgatgtgcaccctgggggttctatttgggaaggtattcagccaaacgaccatctgccgctttgaggctctgcagcttagcttcaagaacatgtgtaagctgcggcccttgctgcagaagtgggtggaggaagctgacaacaatgaaaatcttcaggagatatgcaaagcagaaaccctcgtgcaggcccgaaagagaaagcgaaccagtatcgagaaccgagtgagaggcaacctggagaatttgttcctgcagtgcccgaaacccacactgcagcagatcagccacatcgcccagcagcttgggctcgagaaggatgtggtccgagtgtggttctgtaaccggcgccagaagggcaagcgatcaagcagcgactatgcacaacgagaggattttgaggctgctgggtctcctttctcagggggaccagtgtcctttcctctggccccagggccccattttggtaccccaggctatgggagccctcacttcactgcactgtactcctcggtccctttccctgagggggaagcctttccccctgtctctgtcaccactctgggctctcccatgcattcaaactgaggtgcctgcccttctaggaatgggggacagggggaggggaggagctagggaaagaaaacctggagtttgtgccagggtttttgggattaagttcttcattcactaaggaaggaattgggaacacaaagggtgggggcaggggagtttggggcaactggttggagggaaggtgaagttcaatgatgctcttgattttaatcccacatcatgtatcacttttttcttaaataaagaagcctgggacacagtagatagacacactt

SEQ ID NO: 615 - DNA, 369 bp, Homo sapiens; identical to SEQ ID NO: 610
  source 1..369: mol_type = genomic DNA

SEQ ID NO: 616 - DNA, 369 bp, Homo sapiens
  source 1..369: mol_type = genomic DNA
atggcgggacacctggcttcggatttcgccttctcgccccctccaggtggtggaggtgatgggccaggggggccggagccgggctgggttgatcctcggacctggctaagcttccaaggccctcctggagggccaggaatcgggccgggggttgggccaggctctgaggtgtgggggattcccccatgccccccgccgtatgagttctgtggggggatggcgtactgtgggccccaggttggagtggggctagtgccccaaggcggcttggagacctctcagcctgagggcgaagcaggagtcggggtggagactccgatggggcctccccggagccctgcaccgcatccatttcctttcccactcctg

SEQ ID NO: 617 - DNA, 3637 bp, Homo sapiens
  source 1..3637: mol_type = genomic DNA
agcgacgtcgaggcgctcatggttgcaggcgggcgccgccgttcagttcagggtctgagcctggaggagtgagccaggcagtgagactggctcgggcgggccgggacgcgtcgttgcagcagcggctcccagctcccagccaggattccgcgcgccccttcacgcgccctgctcctgaacttcagctcctgcacagtcctccccaccgcaaggctcaaggcgccgccggcgtggaccgcgcacggcctctaggtctcctcgccaggacagcaacctctcccctggccctcatgggcaccgtcagctccaggcggtcctggtggccgctgccactgctgctgctgctgctgctgctcctgggtcccgcgggcgcccgtgcgcaggaggacgaggacggcgactacgaggagctggtgctagccttgcgttccgaggaggacggcctggccgaagcacccgagcacggaaccacagccaccttccaccgctgcgccaaggatccgtggaggttgcctggcacctacgtggtggtgctgaaggaggagacccacctctcgcagtcagagcgcactgcccgccgcctgcaggcccaggctgcccgccggggatacctcaccaagatcctgcatgtcttccatggccttcttcctggcttcctggtgaagatgagtggcgacctgctggagctggccttgaagttgccccatgtcgactacatcgaggaggactcctctgtctttgcccagagcatcccgtggaacctggagcggattacccctccacggtaccgggcggatgaataccagccccccgacggaggcagcctggtggaggtgtatctcctagacaccagcatacagagtgaccaccgggaaatcgagggcagggtcatggtcaccgacttcgagaatgtgcccgaggaggacgggacccgcttccacagacaggccagcaagtgtgacagtcatggcacccacctggcaggggtggtcagcggccgggatgccggcgtggccaagggtgccagcatgcgcagcctgcgcgtgctcaactgccaagggaagggcacggttagcggcaccctcataggcctggagtttattcggaaaagccagctggtccagcctgtggggccactggtggtgctgctgcccctggcgggtgggtacagccgcgtcctcaacgccgcctgccagcgcctggcgagggctggggtcgtgctggtcaccgctgccggcaacttccgggacgatgcctgcctctactccccagcctcagctcccgaggtcatcacagttggggccaccaatgcccaagaccagccggtgaccctggggactttggggaccaactttggccgctgtgtggacctctttgccccaggggaggacatcattggtgcctccagcgactgcagcacctgctttgtgtcacagagtgggacatcacaggctgctgcccacgtggctggcattgcagccatgatgctgtctgccgagccggagctcaccctggccgagttgaggcagagactgatccacttctctgccaaagatgtcatcaatgaggcctggttccctgaggaccagcgggtactgacccccaacctggtggccgccctgccccccagcacccatggggcaggttggcagctgttttgcaggactgtatggtcagcacactcggggcctacacggatggccacagccgtcgcccgctgcgccccagatgaggagctgctgagctgctccagtttctccaggagtgggaagcggcggggcgagcgcatggaggcccaagggggcaagctggtctgccgggcccacaacgcttttgggggtgagggtgtctacgccattgccaggtgctgcctgctaccccaggccaactgcagcgtccacacagctccaccagctgaggccagcatggggacccgtgtccactgccaccaacagggccacgtcctcacaggctgcagctcccactgggaggtggaggaccttggcacccacaagccgcctgtgctgaggccacgaggtcagcccaaccagtgcgtgggccacagggaggccagcatccacgcttcctgctgccatgccccaggtctggaatgcaaagtcaaggagcatggaatcccggcccctcaggagcaggtgaccgtggcctgcgaggagggctggaccctgactggctgcagtgccctccctgggacctcccacgtcctgggggcctacgccgtagacaacacgtgtgtagtcaggagccgggacgtcagcactacaggcagcaccagcgaaggggccgtgacagccgttgccatctgctgccggagccggcacctggcgcaggcctcccaggagctccagtgacagccccatcccaggatgggtgtctggggagggtcaagggctggggctgagctttaaaatggttccgacttgtccctctctcagccctccatggcctggcacgaggggatggggatgcttccgcctttccggggctgctggcctggcccttgagtggggcagcctccttgcctggaactcactcactctgggtgcctcctccccaggtggaggtgccaggaagctccctccctcactgtggggcatttcaccattcaaacaggtcgagctgtgctcgggtgctgccagctgctcccaatgtgccgatgtccgtgggcagaatgacttttattgagctcttgttccgtgccaggcattcaatcctcaggtctccaccaaggaggcaggattcttcccatggataggggagggggcggtaggggctgcagggacaaacatcgttggggggtgagtgtgaaaggtgctgatggccctcatctccagctaactgtggagaagcccctgggggctccctgattaatggaggcttagctttctggatggcatctagccagaggctggagacaggtgcgcccctggtggtcacaggctgtgccttggtttcctgagccacctttactctgctctatgccaggctgtgctagcaacacccaaaggtggcctgcggggagccatcacctaggactgactcggcagtgtgcagtggtgcatgcactgtctcagccaacccgctccactacccggcagggtacacattcgcacccctacttcacagaggaagaaacctggaaccagagggggcgtgcctgccaagctcacacagcaggaactgagccagaaacgcagattgggctggctctgaagccaagcctcttcttacttcacccggctgggctcctcatttttacgggtaacagtgaggctgggaaggggaacacagaccaggaagctcggtgagtgatggcagaacgatgcctgcaggcatggaactttttccgttatcacccaggcctgattcactggcctggcggagatgcttctaaggcatggtcgggggagagggccaacaactgtccctccttgagcaccagccccacccaagcaagcagacatttatcttttgggtctgtcctctctgttgcctttttacagccaacttttctagacctgttttgcttttgtaacttgaagatatttattctgggttttgtagcatttttattaatatggtgactttttaaaataaaaacaaacaaacgttgtcctaa

SEQ ID NO: 618 - DNA, 1101 bp, Homo sapiens
  source 1..1101: mol_type = genomic DNA
aggctcaaggcgccgccggcgtggaccgcgcacggcctctaggtctcctcgccaggacagcaacctctcccctggccctcatgggcaccgtcagctccaggcggtcctggtggccgctgccactgctgctgctgctgctgctgctcctgggtcccgcgggcgcccgtgcgcaggaggacgaggacggcgactacgaggagctggtgctagccttgcgttccgaggaggacggcctggccgaagcacccgagcacggaaccacagccaccttccaccgctgcgccaaggatccgtggaggttgcctggcacctacgtggtggtgctgaaggaggagacccacctctcgcagtcagagcgcactgcccgccgcctgcaggcccaggctgcccgccggggatacctcaccaagatcctgcatgtcttccatggccttcttcctggcttcctggtgaagatgagtggcgacctgctggagctggccttgaagttgccccatgtcgactacatcgaggaggactcctctgtctttgcccagagcatcccgtggaacctggagcggattacccctccacggtaccgggcggatgaataccagccccccgcatatttggaggatcactgcgggggccacagaggtgctgttcagatggcacttcagaagactcaggagaccctggggcaggagcagtttgactgacagcccagagggctgccctctgattccacctgaggccctgcttttcctggctgcaggggttccagggccaggccatttccgctggcgcaggactctgctagcagcaacctgcctgaagtcttcctttggcctggctgagagtttctgagacctgcgctggagcggagacggaggcagcctggtggaggtgtatctcctagacaccagcatacagagtgaccaccgggaaatcgagggcagggtcatggtcaccgacttcgagaatgtgcccgaggaggacgggacccgcttccacagacaggccagcaagtgtgacagtcatggcacccacctggcaggggtggtcagcggccgggatgccggcgtggccaagggtgccagcatgcgcagcctgcgcgtgctc

SEQ ID NO: 619 - DNA, 1541 bp, Homo sapiens
  source 1..1541: mol_type = genomic DNA
agtggggagcacggtggagagcggggacggccggctctttggggacttgctggggcgtgcggctgcgctattcagtgggaaggttcgcggggttgggagacccggaggccgaggaagggcgagcagagcactgccaggatatcctgcccagatttcccagtttctgcctcgccgcggcacagacggaggcagcctggtggaggtgtatctcctagacaccagcatacagagtgaccaccgggaaatcgagggcagggtcatggtcaccgacttcgagaatgtgcccgaggaggacgggacccgcttccacagacaggccagcaagtgtgacagtcatggcacccacctggcaggggtggtcagcggccgggatgccggcgtggccaagggtgccagcatgcgcagcctgcgcgtgctcaactgccaagggaagggcacggttagcggcaccctcataggcctggagtttattcggaaaagccagctggtccagcctgtggggccactggtggtgctgctgcccctggcgggtgggtacagccgcgtcctcaacgccgcctgccagcgcctggcgagggctggggtcgtgctggtcaccgctgccggcaacttccgggacgatgcctgcctctactccccagcctcagctcccgaggtcatcacagttggggccaccaatgcccaagaccagccggtgaccctggggactttggggaccaactttggccgctgtgtggacctctttgccccaggggaggacatcattggtgcctccagcgactgcagcacctgctttgtgtcacagagtgggacatcacaggctgctgcccacgtggctggcattgcagccatgatgctgtctgccgagccggagctcaccctggccgagttgaggcagagactgatccacttctctgccaaagatgtcatcaatgaggcctggttccctgaggaccagcgggttggcagctgttttgcaggactgtatggtcagcacactcggggcctacacggatggccacagccgtcgcccgctgcgccccagatgaggagctgctgagctgctccagtttctccaggagtgggaagcggcggggcgagcgcatggaggcccaagggggcaagctggtctgccgggcccacaacgcttttgggggtgagggtgtctacgccattgccaggtgctgcctgctaccccaggccaactgcagcgtccacacagctccaccagctgaggccagcatggggacccgtgtccactgccaccaacagggccacgtcctcacaggctgcagctcccactgggaggtggaggaccttggcacccacaagccgcctgtgctgaggccacgaggtcagcccaaccagtgcgtgggccacagggaggccagcatccacgcttcctgctgccatgccccaggtctggaatgcaaagtcaaggagcatggaatcccggcccctcaggagcaggtgaccgtggcctgcgaggagggctggaccctgactggctgcagtgccctccctgggacctcccacgtcct

SEQ ID NO: 620 - DNA, 1773 bp, Homo sapiens
  source 1..1773: mol_type = genomic DNA
aactcgaactccaggctgtcatggcggcaggacggcgaacttgcagtatctccacgacccgcccctacaggtgccagtgcctccagaatgtggcagctcacaagcctcctgctgttcgtggccacctggggaatttccggcacaccagctcctcttgactcagtgttctccagcagcgagcgtgcccaccaggtgctgcggatccgcaaacgtgccaactccttcctggaggagctccgtcacagcagcctggagcgggagtgcatagaggagatctgtgacttcgaggaggccaaggaaattttccaaaatgtggatgacacactggccttctggtccaagcacgtcgacggtgaccagtgcttggtcttgcccttggagcacccgtgcgccagcctgtgctgcgggcacggcacgtgcatcgacggcatcggcagcttcagctgcgactgccgcagcggctgggagggccgcttctgccagcgcgaggtgagcttcctcaattgctcgctggacaacggcggctgcacgcattactgcctagaggaggtgggctggcggcgctgtagctgtgcgcctggctacaagctgggggacgacctcctgcagtgtcaccccgcagtgaagttcccttgtgggaggccctggaagcggatggagaagaagcgcagtcacctgaaacgagacacagaagaccaagaagaccaagtagatccgcggctcattgatgggaagatgaccaggcggggagacagcccctggcaggtggtcctgctggactcaaagaagaagctggcctgcggggcagtgctcatccacccctcctgggtgctgacagcggcccactgcatggatgagtccaagaagctccttgtcaggcttggagagtatgacctgcggcgctgggagaagtgggagctggacctggacatcaaggaggtcttcgtccaccccaactacagcaagagcaccaccgacaatgacatcgcactgctgcacctggcccagcccgccaccctctcgcagaccatagtgcccatctgcctcccggacagcggccttgcagagcgcgagctcaatcaggccggccaggagaccctcgtgacgggctggggctaccacagcagccgagagaaggaggccaagagaaaccgcaccttcgtcctcaacttcatcaagattcccgtggtcccgcacaatgagtgcagcgaggtcatgagcaacatggtgtctgagaacatgctgtgtgcgggcatcctcggggaccggcaggatgcctgcgagggcgacagtggggggcccatggtcgcctccttccacggcacctggttcctggtgggcctggtgagctggggtgagggctgtgggctccttcacaactacggcgtttacaccaaagtcagccgctacctcgactggatccatgggcacatcagagacaaggaagccccccagaagagctgggcaccttagcgaccctccctgcagggctgggcttttgcatggcaatggatgggacattaaagggacatgtaacaagcacaccggcctgctgttctgtccttccatccctcttttgggctcttctggagggaagtaacatttactgagcacctgttgtatgtcacatgccttatgaatagaatcttaactcctagagcaactctgtggggtggggaggagcagatccaagttttgcggggtctaaagctgtgtgtgttgagggggatactctgtttatgaaaaagaataaaaaacacaaccacgaagcca

SEQ ID NO: 621 - DNA, 1586 bp, Homo sapiens
  source 1..1586: mol_type = genomic DNA
cgggggtaggcactgcccggagctcagaagtcctcctcagacaggtgccagtgcctccagaatgtggcagctcacaagcctcctgctgttcgtggccacctggggaatttccggcacaccagctcctcttgactcagtgttctccagcagcgagcgtgcccaccaggtgctgcggatccgcaaacgtgccaactccttcctggaggagctccgtcacagcagcctggagcgggagtgcatagaggagatctgtgacttcgaggaggccaaggaaattttccaaaatgtggatgacacactggccttctggtccaagcacgtcgacggtgaccagtgcttggtcttgcccttggagcacccgtgcgccagcctgtgctgcgggcacggcacgtgcatcgacggcatcggcagcttcagctgcgactgccgcagcggctgggagggccgcttctgccagcgcggtgagggggagaggtggatgctggcgggcggcggggcggggctggggccgggttgggggcgcggcaccagcaccagctgcccgcgccctcccctgcccgcagaggtgagcttcctcaattgctcgctggacaacggcggctgcacgcattactgcctagaggaggtgggctggcggcgctgtagctgtgcgcctggctacaagctgggggacgacctcctgcagtgtcaccccgcagtgaagttcccttgtgggaggccctggaagcggatggagaagaagcgcagtcacctgaaacgagacacagaagaccaagaagaccaagtagatccgcggctcattgatgggaagatgaccaggcggggagacagcccctggcaggtggtcctgctggactcaaagaagaagctggcctgcggggcagtgctcatccacccctcctgggtgctgacagcggcccactgcatggatgagtccaagaagctccttgtcaggcttggagagtatgacctgcggcgctgggagaagtgggagctggacctggacatcaaggaggtcttcgtccaccccaactacagcaagagcaccaccgacaatgacatcgcactgctgcacctggcccagcccgccaccctctcgcagaccatagtgcccatctgcctcccggacagcggccttgcagagcgcgagctcaatcaggccggccaggagaccctcgtgacgggctggggctaccacagcagccgagagaaggaggccaagagaaaccgcaccttcgtcctcaacttcatcaagattcccgtggtcccgcacaatgagtgcagcgaggtcatgagcaacatggtgtctgagaacatgctgtgtgcgggcatcctcggggaccggcaggatgcctgcgagggcgacagtggggggcccatggtcgcctccttccacggcacctggttcctggtgggcctggtgagctggggtgagggctgtgggctccttcacaactacggcgtttacaccaaagtcagccgctacctcgactggatccatgggcacatcagagacaaggaagccccccagaagagctgggcaccttagcgaccctccctgcagggctgggcttttgcatggcaat

SEQ ID NO: 622 - DNA, 1386 bp, Homo sapiens
  source 1..1386: mol_type = genomic DNA
atgtggcagctcacaagcctcctgctgttcgtggccacctggggaatttccggcacaccagctcctcttgactcagtgttctccagcagcgagcgtgcccaccaggtgctgcggatccgcaaacgtgccaactccttcctggaggagctccgtcacagcagcctggagcgggagtgcatagaggagatctgtgacttcgaggaggccaaggaaattttccaaaatgtggatgacacactggccttctggtccaagcacgtcgacggtgaccagtgcttggtcttgcccttggagcacccgtgcgccagcctgtgctgcgggcacggcacgtgcatcgacggcatcggcagcttcagctgcgactgccgcagcggctgggagggccgcttctgccagcgcgaggtgagcttcctcaattgctcgctggacaacggcggctgcacgcattactgcctagaggaggtgggctggcggcgctgtagctgtgcgcctggctacaagctgggggacgacctcctgcagtgtcaccccgcagtgaagttcccttgtgggaggccctggaagcggatggagaagaagcgcagtcacctgaaacgagacacagaagaccaagaagaccaagtagatccgcggctcattgatgggaagatgaccaggcggggagacagcccctggcaggtggtcctgctggactcaaagaagaagctggcctgcggggcagtgctcatccacccctcctgggtgctgacagcggcccactgcatggatgagtccaagaagctccttgtcaggcttggagagtatgacctgcggcgctgggagaagtgggagctggacctggacatcaaggaggtcttcgtccaccccaactacagcaagagcaccaccgacaatgacatcgcactgctgcacctggcccagcccgccaccctctcgcagaccatagtgcccatctgcctcccggacagcggccttgcagagcgcgagctcaatcaggccggccaggagaccctcgtgacgggctggggctaccacagcagccgagagaaggaggccaagagaaaccgcaccttcgtcctcaacttcatcaagattcccgtggtcccgcacaatgagtgcagcgaggtcatgagcaacatggtgtctgagaacatgctgtgtgcgggcatcctcggggaccggcaggatgcctgcgagggcgacagtggggggcccatggtcgcctccttccacggcacctggttcctggtgggcctggtgagctggggtgagggctgtgggctccttcacaactacggcgtttacaccaaagtcagccgctacctcgactggatccatgggcacatcagagacaaggaagccccccagaagagctgggcaccttag

SEQ ID NO: 623 - DNA, 598 bp, Homo sapiens
  source 1..598: mol_type = genomic DNA
ctgcattctggagctgctttctaggcaggcagtgtgagctcagccccacgtagagcgggcagccgaggccttctgaggctatgtctctagcgaacaaggaccctcaatcccagcttccgccctgacggccagcacacagggacagccctttcattccgcttccacctgggggtgcaggcagagcagcagcgggggtaggcactgcccggagctcagaagtcctcctcagacaggtgccagtgcctccagaatgtggcagctcacaagcctcctgctgttcgtggccacctggggaatttccggcacaccagctcctcttgactcagtgttctccagcagcgagcgtgcccaccaggtgctgcggatccgcaaacgtgccaactccttcctggaggagctccgtcacagcagcctggagcgggagtgcatagaggagatctgtgacttcgaggaggccaaggaaattttccaaaatgtggatgacacactggccttctggtccaagcacgtcgacggtgaccagtgcttggtcttgcccttggagcacccgtgcgccagcctgtgctgcgggcacggcacgtgcatcgacggcatcggc

SEQ ID NO: 624 - DNA, 581 bp, Homo sapiens
  source 1..581: mol_type = genomic DNA
actcgaactccaggctgtcatggcggcaggacggcgaacttgcagtatctccacgacccgcccctcttccgccctgacggccagcacacagggacagccctttcattccgcttccacctgggggtgcaggcagagcagcagcgggggtaggcactgcccggagctcagaagtcctcctcagacaggtgccagtgcctccagaatgtggcagctcacaagcctcctgctgttcgtggccacctggggaatttccggcacaccagctcctcttgactcagtgttctccagcagcgagcgtgcccaccaggtgctgcggatccgcaaacgtgccaactccttcctggaggagctccgtcacagcagcctggagcgggagtgcatagaggagatctgtgacttcgaggaggccaaggaaattttccaaaatgtggatgacacactggccttctggtccaagcacgtcgacggtgaccagtgcttggtcttgcccttggagcacccgtgcgccagcctgtgctgcgggcacggcacgtgcatcgacggcatcggcagcttcagctgcgactgccgcagcggctggg

SEQ ID NO: 625 - DNA, 1853 bp, Homo sapiens
  source 1..1853: mol_type = genomic DNA
aggctgtcatggcggcaggacggcgaacttgcagtatctccacgacccgcccctgtgccagtgcctccagaatgtggcagctcacaagcctcctgctgttcgtggccacctggggaatttccggcacaccagctcctcttgactcagtgttctccagcagcgagcgtgcccaccaggtgctgcggatccgcaaacgtgccaactccttcctggaggagctccgtcacagcagcctggagcgggagtgcatagaggagatctgtgacttcgaggaggccaaggaaattttccaaaatgtggatgacacactggccttctggtccaagcacgtcgacggtgaccagtgcttggtcttgcccttggagcacccgtgcgccagcctgtgctgcgggcacggcacgtgcatcgacggcatcggcagcttcagctgcgactgccgcagcggctgggagggccgcttctgccagcgcggtgagggggagaggtggatgctggcgggcggcggggcggggctggggccgggttgggggcgcggcaccagcaccagctgcccgcgccctcccctgcccgcagaggtgagcttcctcaattgctcgctggacaacggcggctgcacgcattactgcctagaggaggtgggctggcggcgctgtagctgtgcgcctggctacaagctgggggacgacctcctgcagtgtcaccccgcagtgaagttcccttgtgggaggccctggaagcggatggagaagaagcgcagtcacctgaaacgagacacagaagaccaagaagaccaagtagatccgcggctcattgatgggaagatgaccaggcggggagacagcccctggcaggtggtcctgctggactcaaagaagaagctggcctgcggggcagtgctcatccacccctcctgggtgctgacagcggcccactgcatggatgagtccaagaagctccttgtcaggcttggagagtatgacctgcggcgctgggagaagtgggagctggacctggacatcaaggaggtcttcgtccaccccaactacagcaagagcaccaccgacaatgacatcgcactgctgcacctggcccagcccgccaccctctcgcagaccatagtgcccatctgcctcccggacagcggccttgcagagcgcgagctcaatcaggccggccaggagaccctcgtgacgggctggggctaccacagcagccgagagaaggaggccaagagaaaccgcaccttcgtcctcaacttcatcaagattcccgtggtcccgcacaatgagtgcagcgaggtcatgagcaacatggtgtctgagaacatgctgtgtgcgggcatcctcggggaccggcaggatgcctgcgagggcgacagtggggggcccatggtcgcctccttccacggcacctggttcctggtgggcctggtgagctggggtgagggctgtgggctccttcacaactacggcgtttacaccaaagtcagccgctacctcgactggatccatgggcacatcagagacaaggaagccccccagaagagctgggcaccttagcgaccctccctgcagggctgggcttttgcatggcaatggatgggacattaaagggacatgtaacaagcacaccggcctgctgttctgtccttccatccctcttttgggctcttctggagggaagtaacatttactgagcacctgttgtatgtcacatgccttatgaatagaatcttaactcctagagcaactctgtggggtggggaggagcagatccaagttttgcggggtctaaagctgtgtgtgttgagggggatactctgtttatgaaaaagaataaaaaacacaaccacg

SEQ ID NO: 626 - DNA, 1828 bp, Homo sapiens
  source 1..1828: mol_type = genomic DNA
aactcgaactccaggctgtcatggcggcaggacggcgaacttgcagtatctccacgacccgcccctgtgccagtgcctccagaatgtggcagctcacaagcctcctgctgttcgtggccacctggggaatttccggcacaccagctcctcttggtgctgcggatccgcaaacgtgccaactccttcctggaggagctccgtcacagcagcctggagcgggagtgcatagaggagatctgtgacttcgaggaggccaaggaaattttccaaaatgtggatgacacactggccttctggtccaagcacgtcgacggtgaccagtgcttggtcttgcccttggagcacccgtgcgccagcctgtgctgcgggcacggcacgtgcatcgacggcatcggcagcttcagctgcgactgccgcagcggctgggagggccgcttctgccagcgcggtgagggggagaggtggatgctggcggggcggggcggggctggggccgggttgggggcgcggcaccagcaccagctgcccgcgccctcccctgcccgcagaggtgagcttcctcaattgctcgctggacaacggcggctgcacgcattactgcctagaggaggtgggctggcggcgctgtagctgtgcgcctggctacaagctgggggacgacctcctgcagtgtcaccccgcagtgaagttcccttgtgggaggccctggaagcggatggagaagaagcgcagtcacctgaaacgagacacagaagaccaagaagaccaagtagatccgcggctcattgatgggaagatgaccaggcggggagacagcccctggcaggtggtcctgctggactcaaagaagaagctggcctgcggggcagtgctcatccacccctcctgggtgctgacagcggcccactgcatggatgagtccaagaagctccttgtcaggcttggagagtatgacctgcggcgctgggagaagtgggagctggacctggacatcaaggaggtcttcgtccaccccaactacagcaagagcaccaccgacaatgacatcgcactgctgcacctggcccagcccgccaccctctcgcagaccatagtgcccatctgcctcccggacagcggccttgcagagcgcgagctcaatcaggccggccaggagaccctcgtgacgggctggggctaccacagcagccgagagaaggaggccaagagaaaccgcaccttcgtcctcaacttcatcaagattcccgtggtcccgcacaatgagtgcagcgaggtcatgagcaacatggtgtctgagaacatgctgtgtgcgggcatcctcggggaccggcaggatgcctgcgagggcgacagtggggggcccatggtcgcctccttccacggcacctggttcctggtgggcctggtgagctggggtgagggctgtgggctccttcacaactacggcgtttacaccaaagtcagccgctacctcgactggatccatgggcacatcagagacaaggaagccccccagaagagctgggcaccttagcgaccctccctgcagggctgggcttttgcatggcaatggatgggacattaaagggacatgtaacaagcacaccggcctgctgttctgtccttccatccctcttttgggctcttctggagggaagtaacatttactgagcacctgttgtatgtcacatgccttatgaatagaatcttaactcctagagcaactctgtggggtggggaggagcagatccaagttttgcggggtctaaagctgtgtgtgttgagggggatactctgtttatgaaaaagaataaaaaacacaaccacg

SEQ ID NO: 627 - DNA, 889 bp, Homo sapiens
  source 1..889: mol_type = genomic DNA
atgcctcgcctgttttttttccacctgctaggagtctgtttactactgaaccaattttccagagcagtcgcggactcatggatggaggaagttattaaattatgcggccgcgaattagttcgcgcgcagattgccatttgcggcatgagcacctggagcaaaaggtctctgagccaggaagatgctcctcagacacctagaccagtggcaggtgattttattcaaacagtctcactgggaatctcaccggacggagggaaagcactgagaacaggaagctgcttcacccgagagttccttggtgccctttccaaattgtgccatccttcatcaacaaagatacagaaaccataaatatgatgtcagaatttgttgctaatttgccacaggagctgaagttaaccctgtctgagatgcagccagcattaccacagctacaacaacatgtacctgtattaaaagattccagtcttctctttgaagaatttaagaaacttattcgcaatagacaaagtgaagccgcagacagcagtccttcagaattaaaatacttaggcttggatactcattctcgaaaaaagagacaactctacagtgcattggctaataaatgttgccatgttggttgtaccaaaagatctcttgctagattttgctgagatgaagctaattgtgcacatctcgtataatattcacacatattcttaatgacatttcactgatgcttctatcaggtcccatcaattcttagaatatctaagaatctttgttagatattaggtcccatcaattcttagaatatctaaacatctttgttgatgtttagatttttttatttgatgtgtaagaaaatgttctttgtgtgattaaatgacacatttttttgctg

SEQ ID NO: 628 - DNA, 1177 bp, Homo sapiens
  source 1..1177: mol_type = genomic DNA
tcaaatttgtttctgtgtgtgtaaaaggaaaggcttcatatctaaaatgactttacctcagtatactaaattgtttgagggtaatgaatgagaagaacacaactgtaaaagggccaaggacagagggatgggcaaatgaaggaaaggcagagagggagaccaagagctgagggggaaaattctgtggaggggtgtgggaaaggggtggagctggcacccttgccttaaaagctgagtgatagcccaagggatacaaaagaccgcttgagccgggtagggaaagcagcctaaagcccgggacaggcacacaggcccaggtgtgtaggccacagcagctgcagtcctgaaaggctgcaacgtcccgacctccaggagagaccaggcccaggatgcctcgcctgttttttttccacctgctaggagtctgtttactactgaaccaattttccagagcagtcgcggactcatggatggaggaagttattaaattatgcggccgcgaattagttcgcgcgcagattgccatttgcggcatgagcacctggagcaaaaggtctctgagccaggaagatgctcctcagacacctagaccagtggcagaaattgtgccatccttcatcaacaaagatacagaaaccataaatatgatgtcagaatttgttgctaatttgccacaggagctgaagttaaccctgtctgagatgcagccagcattaccacagctacaacaacatgtacctgtattaaaagattccagtcttctctttgaagaatttaagaaacttattcgcaatagacaaagtgaagccgcagacagcagtccttcagaattaaaatacttaggcttggatactcattctcgaaaaaagagacaactctacagtgcattggctaataaatgttgccatgttggttgtaccaaaagatctcttgctagattttgctgagatgaagctaattgtgcacatctcgtataatattcacacatattcttaatgacatttcactgatgcttctatcaggtcccatcaattcttagaatatctaagaatctttgttagatattaggtcccatcaattcttagaatatctaaacatctttgttgatgtttagatttttttatttgatgtgtaagaaaatgttctttgtgtgattaaatgacacatttttttgctg

SEQ ID NO: 629 - DNA, 2592 bp, Homo sapiens
  source 1..2592: mol_type = genomic DNA
gagtcatccagctggagccctgagtggctgagctcaggccttcgcagcattcttgggtgggagcagccacgggtcagccacaagggccacagccatgaatggcacagaaggccctaacttctacgtgcccttctccaatgcgacgggtgtggtacgcagccccttcgagtacccacagtactacctggctgagccatggcagttctccatgctggccgcctacatgtttctgctgatcgtgctgggcttccccatcaacttcctcacgctctacgtcaccgtccagcacaagaagctgcgcacgcctctcaactacatcctgctcaacctagccgtggctgacctcttcatggtcctaggtggcttcaccagcaccctctacacctctctgcatggatacttcgtcttcgggcccacaggatgcaatttggagggcttctttgccaccctgggcggtgaaattgccctgtggtccttggtggtcctggccatcgagcggtacgtggtggtgtgtaagcccatgagcaacttccgcttcggggagaaccatgccatcatgggcgttgccttcacctgggtcatggcgctggcctgcgccgcacccccactcgccggctggtccaggtacatccccgagggcctgcagtgctcgtgtggaatcgactactacacgctcaagccggaggtcaacaacgagtcttttgtcatctacatgttcgtggtccacttcaccatccccatgattatcatctttttctgctatgggcagctcgtcttcaccgtcaaggaggccgctgcccagcagcaggagtcagccaccacacagaaggcagagaaggaggtcacccgcatggtcatcatcatggtcatcgctttcctgatctgctgggtgccctacgccagcgtggcattctacatcttcacccaccagggctccaacttcggtcccatcttcatgaccatcccagcgttctttgccaagagcgccgccatctacaaccctgtcatctatatcatgatgaacaagcagttccggaactgcatgctcaccaccatctgctgcggcaagaacccactgggtgacgatgaggcctctgctaccgtgtccaagacggagacgagccaggtggccccggcctaagacctgcctaggactctgtggccgactataggcgtctcccatcccctacaccttcccccagccacagccatcccaccaggagcagcgcctgtgcagaatgaacgaagtcacataggctccttaattttttttttttttttaagaaataattaatgaggctcctcactcacctgggacagcctgagaagggacatccaccaagacctactgatctggagtcccacgttccccaaggccagcgggatgtgtgcccctcctcctcccaactcatctttcaggaacacgaggattcttgctttctggaaaagtgtcccagcttagggataagtgtctagcacagaatggggcacacagtaggtgcttaataaatgctggatggatgcaggaaggaatggaggaatgaatgggaagggagaacatatctatcctctcagaccctcgcagcagcagcaactcatacttggctaatgatatggagcagttgtttttccctccctgggcctcactttcttctcctataaaatggaaatcccagatccctggtcctgccgacacgcagctactgagaagaccaaaagaggtgtgtgtgtgtctatgtgtgtgtttcagcactttgtaaatagcaagaagctgtacagattctagttaatgttgtgaataacatcaattaatgtaactagttaattactatgattatcacctcctgatagtgaacattttgagattgggcattcagatgatggggtttcacccaaccttggggcaggtttttaaaaattagctaggcatcaaggccagaccagggctgggggttgggctgtaggcagggacagtcacaggaatgcagaatgcagtcatcagacctgaaaaaacaacactgggggagggggacggtgaaggccaagttcccaatgagggtgagattgggcctggggtctcacccctagtgtggggccccaggtcccgtgcctccccttcccaatgtggcctatggagagacaggcctttctctcagcctctggaagccacctgctcttttgctctagcacctgggtcccagcatctagagcatggagcctctagaagccatgctcacccgcccacatttaattaacagctgagtccctgatgtcatccttatctcgaagagcttagaaacaaagagtgggaaattccactgggcctaccttccttggggatgttcatgggccccagtttccagtttcccttgccagacaagcccatcttcagcagttgctagtccattctccattctggagaatctgctccaaaaagctggccacatctctgaggtgtcagaattaagctgcctcagtaactgctcccccttctccatataagcaaagccagaagctctagctttacccagctctgcctggagactaaggcaaattgggccattaaaagctcagctcctatgttggtattaa

SEQ ID NO: 630 - DNA, 3236 bp, Homo sapiens
  source 1..3236: mol_type = genomic DNA
tgggcaggaactgggcactgtgcccagggcatgcactgcctccacgcagcaaccctcagagtcctgagctgaaccaagaaggaggagggggtcgggcctccgaggaaggcctagccgctgctgctgccaggaattccaggttggaggggcggcaacctcctgccagccttcaggccactctcctgtgcctgccagaagagacagagcttgaggagagcttgaggagagcaggaaaggtgggacattgctgctgctgctcactcagttccacaggacaatgccgtcttctgtctcgtggggcatcctcctgctggcaggcctgtgctgcctggtccctgtctccctggctgaggatccccagggagatgctgcccagaagacagatacatcccaccatgatcaggatcacccaaccttcaacaagatcacccccaacctggctgagttcgccttcagcctataccgccagctggcacaccagtccaacagcaccaatatcttcttctccccagtgagcatcgctacagcctttgcaatgctctccctggggaccaaggctgacactcacgatgaaatcctggagggcctgaatttcaacctcacggagattccggaggctcagatccatgaaggcttccaggaactcctccgtaccctcaaccagccagacagccagctccagctgaccaccggcaatggcctgttcctcagcgagggcctgaagctagtggataagtttttggaggatgttaaaaagttgtaccactcagaagccttcactgtcaacttcggggacaccgaagaggccaagaaacagatcaacgattacgtggagaagggtactcaagggaaaattgtggatttggtcaaggagcttgacagagacacagtttttgctctggtgaattacatcttctttaaaggcaaatgggagagaccctttgaagtcaaggacaccgaggaagaggacttccacgtggaccaggtgaccaccgtgaaggtgcctatgatgaagcgtttaggcatgtttaacatccagcactgtaagaagctgtccagctgggtgctgctgatgaaatacctgggcaatgccaccgccatcttcttcctgcctgatgaggggaaactacagcacctggaaaatgaactcacccacgatatcatcaccaagttcctggaaaatgaagacagaaggtctgccagcttacatttacccaaactgtccattactggaacctatgatctgaagagcgtcctgggtcaactgggcatcactaaggtcttcagcaatggggctgacctctccggggtcacagaggaggcacccctgaagctctccaaggccgtgcataaggctgtgctgaccatcgacgagaaagggactgaagctgctggggccatgtttttagaggccatacccatgtctatcccccccgaggtcaagttcaacaaaccctttgtcttcttaatgattgaacaaaataccaagtctcccctcttcatgggaaaagtggtgaatcccacccaaaaataactgcctctcgctcctcaacccctcccctccatccctggccccctccctggatgacattaaagaagggttgagctggtccctgcctgcatgtgactgtaaatccctcccatgttttctctgagtctccctttgcctgctgaggctgtatgtgggctccaggtaacagtgctgtcttcgggccccctgaactgtgttcatggagcatctggctgggtaggcacatgctgggcttgaatccaggggggactgaatcctcagcttacggacctgggcccatctgtttctggagggctccagtcttccttgtcctgtcttggagtccccaagaaggaatcacaggggaggaaccagataccagccatgaccccaggctccaccaagcatcttcatgtccccctgctcatcccccactcccccccacccagagttgctcatcctgccagggctggctgtgcccaccccaaggctgccctcctgggggccccagaactgcctgatcgtgccgtggcccagttttgtggcatctgcagcaacacaagagagaggacaatgtcctcctcttgacccgctgtcacctaaccagactcgggccctgcacctctcaggcacttctggaaaatgactgaggcagattcttcctgaagcccattctccatggggcaacaaggacacctattctgtccttgtccttccatcgctgccccagaaagcctcacatatctccgtttagaatcaggtcccttctccccagatgaagaggagggtctctgctttgttttctctatctcctcctcagacttgaccaggcccagcaggccccagaagaccattaccctatatcccttctcctccctagtcacatggccataggcctgctgatggctcaggaaggccattgcaaggactcctcagctatgggagaggaagcacatcacccattgacccccgcaacccctccctttcctcctctgagtcccgactggggccacatgcagcctgacttctttgtgcctgttgctgtccctgcagtcttcagagggccaccgcagctccagtgccacggcaggaggctgttcctgaatagcccctgtggtaagggccaggagagtccttccatcctccaaggccctgctaaaggacacagcagccaggaagtcccctgggcccctagctgaaggacagcctgctccctccgtctctaccaggaatggccttgtcctatggaaggcactgccccatcccaaactaatctaggaatcactgtctaaccactcactgtcatgaatgtgtacttaaaggatgaggttgagtcataccaaatagtgatttcgatagttcaaaatggtgaaattagcaattctacatgattcagtctaatcaatggataccgactgtttcccacacaagtctcctgttctcttaagcttactcactgacagcctttcactctccacaaatacattaaagatatggccatcaccaagccccctaggatgacaccagacctgagagtctgaagacctggatccaagttctgacttttccccctgacagctgtgtgaccttcgtgaagtcgccaaacctctctgagccccagtcattgctagtaagacctgcctttgagttggtatgatgttcaagttagataacaaaatgtttatacccattagaacagagaataaatagaactacatttcttgca

SEQ ID NO: 631 - DNA, 1622 bp, Homo sapiens
  source 1..1622: mol_type = genomic DNA
aggtacaatgactcctttcggtaagtgcagtggaagctgtacactgcccaggcaaagcgtccgggcagcgtaggcgggcgactcagatcccagccagtggacttagcccctgtttgctcctccgataactggggtgaccttggttaatattcaccagcagcctcccccgttgcccctctggatccactgcttaaatacggacgaggacagggccctgtctcctcagcttcaggcaccaccactgacctgggacagtgaatcgacaatgccgtcttctgtctcgtggggcatcctcctgctggcaggcctgtgctgcctggtccctgtctccctggctgaggatccccagggagatgctgcccagaagacagatacatcccaccatgatcaggatcacccaaccttcaacaagatcacccccaacctggctgagttcgccttcagcctataccgccagctggcacaccagtccaacagcaccaatatcttcttctccccagtgagcatcgctacagcctttgcaatgctctccctggggaccaaggctgacactcacgatgaaatcctggagggcctgaatttcaacctcacggagattccggaggctcagatccatgaaggcttccaggaactcctccgtaccctcaaccagccagacagccagctccagctgaccaccggcaatggcctgttcctcagcgagggcctgaagctagtggataagtttttggaggatgttaaaaagttgtaccactcagaagccttcactgtcaacttcggggacaccgaagaggccaagaaacagatcaacgattacgtggagaagggtactcaagggaaaattgtggatttggtcaaggagcttgacagagacacagtttttgctctggtgaattacatcttctttaaaggcaaatgggagagaccctttgaagtcaaggacaccgaggaagaggacttccacgtggaccaggtgaccaccgtgaaggtgcctatgatgaagcgtttaggcatgtttaacatccagcactgtaagaagctgtccagctgggtgctgctgatgaaatacctgggcaatgccaccgccatcttcttcctgcctgatgaggggaaactacagcacctggaaaatgaactcacccacgatatcatcaccaagttcctggaaaatgaagacagaaggtctgccagcttacatttacccaaactgtccattactggaacctatgatctgaagagcgtcctgggtcaactgggcatcactaaggtcttcagcaatggggctgacctctccggggtcacagaggaggcacccctgaagctctccaaggccgtgcataaggctgtgctgaccatcgacgagaaagggactgaagctgctggggccatgtttttagaggccatacccatgtctatcccccccgaggtcaagttcaacaaaccctttgtcttcttaatgattgaacaaaataccaagtctcccctcttcatgggaaaagtggtgaatcccacccaaaaataactgcctctcgctcctcaacccctcccctccatccctggccccctccctggatgacattaaagaagggttgagctggtccctgcctgcatgtgactgtaaa

SEQ ID NO: 632 - DNA, 1885 bp, Homo sapiens
  source 1..1885: mol_type = genomic DNA
gtgggcaggaactgggcactgtgcccagggcatgcactgcctccacgcagcaaccctcagagtcctgagctgaaccaagaaggaggagggggtcgggcctccgaggaaggcctagccgctgctgctgccaggaattccaggttggaggggcggcaacctcctgccagccttcaggccactctcctgtgcctgccagaagagacagagcttgaggagagcttgaggagagcaggaaagggcggcagtaagtcttcagcatcaggcattttggggtgactcagtaaatggtagatcttgctaccagtggaacagccactaaggattctgcagtgagagcagagggccagctaagtggtactctcccagagactgtctgactcacgccaccccctccaccttggacacaggacgctgtggtttctgagccaggtacaatgactcctttcgcagcctcccccgttgcccctctggatccactgcttaaatacggacgaggacagggccctgtctcctcagcttcaggcaccaccactgacctgggacagtgaatcgacaatgccgtcttctgtctcgtggggcatcctcctgctggcaggcctgtgctgcctggtccctgtctccctggctgaggatccccagggagatgctgcccagaagacagatacatcccaccatgatcaggatcacccaaccttcaacaagatcacccccaacctggctgagttcgccttcagcctataccgccagctggcacaccagtccaacagcaccaatatcttcttctccccagtgagcatcgctacagcctttgcaatgctctccctggggaccaaggctgacactcacgatgaaatcctggagggcctgaatttcaacctcacggagattccggaggctcagatccatgaaggcttccaggaactcctccgtaccctcaaccagccagacagccagctccagctgaccaccggcaatggcctgttcctcagcgagggcctgaagctagtggataagtttttggaggatgttaaaaagttgtaccactcagaagccttcactgtcaacttcggggacaccgaagaggccaagaaacagatcaacgattacgtggagaagggtactcaagggaaaattgtggatttggtcaaggagcttgacagagacacagtttttgctctggtgaattacatcttctttaaaggcaaatgggagagaccctttgaagtcaaggacaccgaggaagaggacttccacgtggaccaggtgaccaccgtgaaggtgcctatgatgaagcgtttaggcatgtttaacatccagcactgtaagaagctgtccagctgggtgctgctgatgaaatacctgggcaatgccaccgccatcttcttcctgcctgatgaggggaaactacagcacctggaaaatgaactcacccacgatatcatcaccaagttcctggaaaatgaagacagaaggtctgccagcttacatttacccaaactgtccattactggaacctatgatctgaagagcgtcctgggtcaactgggcatcactaaggtcttcagcaatggggctgacctctccggggtcacagaggaggcacccctgaagctctccaaggccgtgcataaggctgtgctgaccatcgacgagaaagggactgaagctgctggggccatgtttttagaggccatacccatgtctatcccccccgaggtcaagttcaacaaaccctttgtcttcttaatgattgaacaaaataccaagtctcccctcttcatgggaaaagtggtgaatcccacccaaaaataactgcctctcgctcctcaacccctcccctccatccctggccccctccctggatgacattaaagaagggttgagc

SEQ ID NO: 633 - DNA, 1450 bp, Homo sapiens
  source 1..1450: mol_type = genomic DNA
ggcaccaccactgacctgggacagtgaatcgacaatgccgtcttctgtctcgtggggcatcctcctgctggcaggcctgtgctgcctggtccctgtctccctggctgaggatccccagggagatgctgcccagaagacagatacatcccaccatgatcaggatcacccaaccttcaacaagatcacccccaacctggctgagttcgccttcagcctataccgccagctggcacaccagtccaacagcaccaatatcttcttctccccagtgagcatcgctacagcctttgcaatgctctccctggggaccaaggctgacactcacgatgaaatcctggagggcctgaatttcaacctcacggagattccggaggctcagatccatgaaggcttccaggaactcctccgtaccctcaaccagccagacagccagctccagctgaccaccggcaatggcctgttcctcagcgagggcctgaagctagtggataagtttttggaggatgttaaaaagttgtaccactcagaagccttcactgtcaacttcggggacaccgaagaggccaagaaacagatcaacgattacgtggagaagggtactcaagggaaaattgtggatttggtcaaggagcttgacagagacacagtttttgctctggtgaattacatcttctttaaaggcaaatgggagagaccctttgaagtcaaggacaccgaggaagaggacttccacgtggaccaggtgaccaccgtgaaggtgcctatgatgaagcgtttaggcatgtttaacatccagcactgtaagaagctgtccagctgggtgctgctgatgaaatacctgggcaatgccaccgccatcttcttcctgcctgatgaggggaaactacagcacctggaaaatgaactcacccacgatatcatcaccaagttcctggaaaatgaagacagaaggtctgccagcttacatttacccaaactgtccattactggaacctatgatctgaagagcgtcctgggtcaactgggcatcactaaggtcttcagcaatggggctgacctctccggggtcacagaggaggcacccctgaagctctccaaggtgagatcaccctgacgaccttgttgcaccctggtatctgtagggaagaatgtgtgggggctgcagctctgtcctgaggctgaggaaggggccgagggaaacaaatgaagacccaggctgagctcctgaagatgcccgtgattcactgacacgggacgtggtcaaacagcaaagccaggcaggggactgctgtgcagctggcactttcggggcctcccttgaggttgtgtcactgaccctgaatttcaactttgcccaagaccttctagacattgggccttgatttatccatactgacacagaaaggtttgggctaagttgtttcaaaggaatttctgactccttcgatct

SEQ ID NO: 634 - DNA, 1628 bp, Homo sapiens
  source 1..1628: mol_type = genomic DNA
atgcactgcctccacgcagcaaccctcagagtcctgagctgaaccaagaaggaggagggggtcgggcctccgaggaaggcctagccgctgctgctgccaggaattccaggttggaggggcggcaacctcctgccagccttcaggccactctcctgtgcctgccagaagagacagagcttgaggagagcttgaggagagcaggaaagcctcccccgttgcccctctggatccactgcttaaatacggacgaggacagggccctgtctcctcagcttcaggcaccaccactgacctgggacagtgaatcgacaatgccgtcttctgtctcgtggggcatcctcctgctggcaggcctgtgctgcctggtccctgtctccctggctgaggatccccagggagatgctgcccagaagacagatacatcccaccatgatcaggatcacccaaccttcaacaagatcacccccaacctggctgagttcgccttcagcctataccgccagctggcacaccagtccaacagcaccaatatcttcttctccccagtgagcatcgctacagcctttgcaatgctctccctggggaccaaggctgacactcacgatgaaatcctggagggcctgaatttcaacctcacggagattccggaggctcagatccatgaaggcttccaggaactcctccgtaccctcaaccagccagacagccagctccagctgaccaccggcaatggcctgttcctcagcgagggcctgaagctagtggataagtttttggaggatgttaaaaagttgtaccactcagaagccttcactgtcaacttcggggacaccgaagaggccaagaaacagatcaacgattacgtggagaagggtactcaagggaaaattgtggatttggtcaaggagcttgacagagacacagtttttgctctggtgaattacatcttctttaaaggcaaatgggagagaccctttgaagtcaaggacaccgaggaagaggacttccacgtggaccaggtgaccaccgtgaaggtgcctatgatgaagcgtttaggcatgtttaacatccagcactgtaagaagctgtccagctgggtgctgctgatgaaatacctgggcaatgccaccgccatcttcttcctgcctgatgaggggaaactacagcacctggaaaatgaactcacccacgatatcatcaccaagttcctggaaaatgaagacagaaggtctgccagcttacatttacccaaactgtccattactggaacctatgatctgaagagcgtcctgggtcaactgggcatcactaaggtcttcagcaatggggctgacctctccggggtcacagaggaggcacccctgaagctctccaaggccgtgcataaggctgtgctgaccatcgacgagaaagggactgaagctgctggggccatgtttttagaggccatacccatgtctatcccccccgaggtcaagttcaacaaaccctttgtcttcttaatgattgaacaaaataccaagtctcccctcttcatgggaaaagtggtgaatcccacccaaaaataactgcctctcgctcctcaacccctcccctccatccctggccccctccctggatgacattaa

SEQ ID NO: 635 - DNA, 3340 bp, Homo sapiens
  source 1..3340: mol_type = genomic DNA
tgggcaggaactgggcactgtgcccagggcatgcactgcctccacgcagcaaccctcagagtcctgagctgaaccaagaaggaggagggggtcgggcctccgaggaaggcctagccgctgctgctgccaggaattccaggttggaggggcggcaacctcctgccagccttcaggccactctcctgtgcctgccagaagagacagagcttgaggagagcttgaggagagcaggaaaggtgggacattgctgctgctgctcactcagttccacagcagcctcccccgttgcccctctggatccactgcttaaatacggacgaggacagggccctgtctcctcagcttcaggcaccaccactgacctgggacagtgaatcgacaatgccgtcttctgtctcgtggggcatcctcctgctggcaggcctgtgctgcctggtccctgtctccctggctgaggatccccagggagatgctgcccagaagacagatacatcccaccatgatcaggatcacccaaccttcaacaagatcacccccaacctggctgagttcgccttcagcctataccgccagctggcacaccagtccaacagcaccaatatcttcttctccccagtgagcatcgctacagcctttgcaatgctctccctggggaccaaggctgacactcacgatgaaatcctggagggcctgaatttcaacctcacggagattccggaggctcagatccatgaaggcttccaggaactcctccgtaccctcaaccagccagacagccagctccagctgaccaccggcaatggcctgttcctcagcgagggcctgaagctagtggataagtttttggaggatgttaaaaagttgtaccactcagaagccttcactgtcaacttcggggacaccgaagaggccaagaaacagatcaacgattacgtggagaagggtactcaagggaaaattgtggatttggtcaaggagcttgacagagacacagtttttgctctggtgaattacatcttctttaaaggcaaatgggagagaccctttgaagtcaaggacaccgaggaagaggacttccacgtggaccaggtgaccaccgtgaaggtgcctatgatgaagcgtttaggcatgtttaacatccagcactgtaagaagctgtccagctgggtgctgctgatgaaatacctgggcaatgccaccgccatcttcttcctgcctgatgaggggaaactacagcacctggaaaatgaactcacccacgatatcatcaccaagttcctggaaaatgaagacagaaggtctgccagcttacatttacccaaactgtccattactggaacctatgatctgaagagcgtcctgggtcaactgggcatcactaaggtcttcagcaatggggctgacctctccggggtcacagaggaggcacccctgaagctctccaaggccgtgcataaggctgtgctgaccatcgacgagaaagggactgaagctgctggggccatgtttttagaggccatacccatgtctatcccccccgaggtcaagttcaacaaaccctttgtcttcttaatgattgaacaaaataccaagtctcccctcttcatgggaaaagtggtgaatcccacccaaaaataactgcctctcgctcctcaacccctcccctccatccctggccccctccctggatgacattaaagaagggttgagctggtccctgcctgcatgtgactgtaaatccctcccatgttttctctgagtctccctttgcctgctgaggctgtatgtgggctccaggtaacagtgctgtcttcgggccccctgaactgtgttcatggagcatctggctgggtaggcacatgctgggcttgaatccaggggggactgaatcctcagcttacggacctgggcccatctgtttctggagggctccagtcttccttgtcctgtcttggagtccccaagaaggaatcacaggggaggaaccagataccagccatgaccccaggctccaccaagcatcttcatgtccccctgctcatcccccactcccccccacccagagttgctcatcctgccagggctggctgtgcccaccccaaggctgccctcctgggggccccagaactgcctgatcgtgccgtggcccagttttgtggcatctgcagcaacacaagagagaggacaatgtcctcctcttgacccgctgtcacctaaccagactcgggccctgcacctctcaggcacttctggaaaatgactgaggcagattcttcctgaagcccattctccatggggcaacaaggacacctattctgtccttgtccttccatcgctgccccagaaagcctcacatatctccgtttagaatcaggtcccttctccccagatgaagaggagggtctctgctttgttttctctatctcctcctcagacttgaccaggcccagcaggccccagaagaccattaccctatatcccttctcctccctagtcacatggccataggcctgctgatggctcaggaaggccattgcaaggactcctcagctatgggagaggaagcacatcacccattgacccccgcaacccctccctttcctcctctgagtcccgactggggccacatgcagcctgacttctttgtgcctgttgctgtccctgcagtcttcagagggccaccgcagctccagtgccacggcaggaggctgttcctgaatagcccctgtggtaagggccaggagagtccttccatcctccaaggccctgctaaaggacacagcagccaggaagtcccctgggcccctagctgaaggacagcctgctccctccgtctctaccaggaatggccttgtcctatggaaggcactgccccatcccaaactaatctaggaatcactgtctaaccactcactgtcatgaatgtgtacttaaaggatgaggttgagtcataccaaatagtgatttcgatagttcaaaatggtgaaattagcaattctacatgattcagtctaatcaatggataccgactgtttcccacacaagtctcctgttctcttaagcttactcactgacagcctttcactctccacaaatacattaaagatatggccatcaccaagccccctaggatgacaccagacctgagagtctgaagacctggatccaagttctgacttttccccctgacagctgtgtgaccttcgtgaagtcgccaaacctctctgagccccagtcattgctagtaagacctgcctttgagttggtatgatgttcaagttagataacaaaatgtttatacccattagaacagagaataaatagaactacatttcttgca

SEQ ID NO: 636 - DNA, 3144 bp, Homo sapiens
  source 1..3144: mol_type = genomic DNA
tcagagtcctgagctgaaccaagaaggaggagggggtcgggcctccgaggaaggcctagccgctgctgctgccaggaattccaggttggaggggcggcaacctcctgccagccttcaggccactctcctgtgcctgccagaagagacagagcttgaggagagcttgaggagagcaggaaaggacaatgccgtcttctgtctcgtggggcatcctcctgctggcaggcctgtgctgcctggtccctgtctccctggctgaggatccccagggagatgctgcccagaagacagatacatcccaccatgatcaggatcacccaaccttcaacaagatcacccccaacctggctgagttcgccttcagcctataccgccagctggcacaccagtccaacagcaccaatatcttcttctccccagtgagcatcgctacagcctttgcaatgctctccctggggaccaaggctgacactcacgatgaaatcctggagggcctgaatttcaacctcacggagattccggaggctcagatccatgaaggcttccaggaactcctccgtaccctcaaccagccagacagccagctccagctgaccaccggcaatggcctgttcctcagcgagggcctgaagctagtggataagtttttggaggatgttaaaaagttgtaccactcagaagccttcactgtcaacttcggggacaccgaagaggccaagaaacagatcaacgattacgtggagaagggtactcaagggaaaattgtggatttggtcaaggagcttgacagagacacagtttttgctctggtgaattacatcttctttaaaggcaaatgggagagaccctttgaagtcaaggacaccgaggaagaggacttccacgtggaccaggtgaccaccgtgaaggtgcctatgatgaagcgtttaggcatgtttaacatccagcactgtaagaagctgtccagctgggtgctgctgatgaaatacctgggcaatgccaccgccatcttcttcctgcctgatgaggggaaactacagcacctggaaaatgaactcacccacgatatcatcaccaagttcctggaaaatgaagacagaaggtctgccagcttacatttacccaaactgtccattactggaacctatgatctgaagagcgtcctgggtcaactgggcatcactaaggtcttcagcaatggggctgacctctccggggtcacagaggaggcacccctgaagctctccaaggccgtgcataaggctgtgctgaccatcgacgagaaagggactgaagctgctggggccatgtttttagaggccatacccatgtctatcccccccgaggtcaagttcaacaaaccctttgtcttcttaatgattgaacaaaataccaagtctcccctcttcatgggaaaagtggtgaatcccacccaaaaataactgcctctcgctcctcaacccctcccctccatccctggccccctccctggatgacattaaagaagggttgagctggtccctgcctgcatgtgactgtaaatccctcccatgttttctctgagtctccctttgcctgctgaggctgtatgtgggctccaggtaacagtgctgtcttcgggccccctgaactgtgttcatggagcatctggctgggtaggcacatgctgggcttgaatccaggggggactgaatcctcagcttacggacctgggcccatctgtttctggagggctccagtcttccttgtcctgtcttggagtccccaagaaggaatcacaggggaggaaccagataccagccatgaccccaggctccaccaagcatcttcatgtccccctgctcatcccccactcccccccacccagagttgctcatcctgccagggctggctgtgcccaccccaaggctgccctcctgggggccccagaactgcctgatcgtgccgtggcccagttttgtggcatctgcagcaacacaagagagaggacaatgtcctcctcttgacccgctgtcacctaaccagactcgggccctgcacctctcaggcacttctggaaaatgactgaggcagattcttcctgaagcccattctccatggggcaacaaggacacctattctgtccttgtccttccatcgctgccccagaaagcctcacatatctccgtttagaatcaggtcccttctccccagatgaagaggagggtctctgctttgttttctctatctcctcctcagacttgaccaggcccagcaggccccagaagaccattaccctatatcccttctcctccctagtcacatggccataggcctgctgatggctcaggaaggccattgcaaggactcctcagctatgggagaggaagcacatcacccattgacccccgcaacccctccctttcctcctctgagtcccgactggggccacatgcagcctgacttctttgtgcctgttgctgtccctgcagtcttcagagggccaccgcagctccagtgccacggcaggaggctgttcctgaatagcccctgtggtaagggccaggagagtccttccatcctccaaggccctgctaaaggacacagcagccaggaagtcccctgggcccctagctgaaggacagcctgctccctccgtctctaccaggaatggccttgtcctatggaaggcactgccccatcccaaactaatctaggaatcactgtctaaccactcactgtcatgaatgtgtacttaaaggatgaggttgagtcataccaaatagtgatttcgatagttcaaaatggtgaaattagcaattctacatgattcagtctaatcaatggataccgactgtttcccacacaagtctcctgttctcttaagcttactcactgacagcctttcactctccacaaatacattaaagatatggccatcaccaagccccctaggatgacaccagacctgagagtctgaagacctggatccaagttctgacttttccccctgacagctgtgtgaccttcgtgaagtcgccaaacctctctgagccccagtcattgctagtaagacctgcctttgagttggtatgatgttcaagttagataacaaaatgtttatacccattagaacagagaataaatagaactacatttcttgca

SEQ ID NO: 637 - DNA, 3532 bp, Homo sapiens
  source 1..3532: mol_type = genomic DNA
tgggcaggaactgggcactgtgcccagggcatgcactgcctccacgcagcaaccctcagagtcctgagctgaaccaagaaggaggagggggtcgggcctccgaggaaggcctagccgctgctgctgccaggaattccaggttggaggggcggcaacctcctgccagccttcaggccactctcctgtgcctgccagaagagacagagcttgaggagagcttgaggagagcaggaaaggtgggacattgctgctgctgctcactcagttccacagggcggcagtaagtcttcagcatcaggcattttggggtgactcagtaaatggtagatcttgctaccagtggaacagccactaaggattctgcagtgagagcagagggccagctaagtggtactctcccagagactgtctgactcacgccaccccctccaccttggacacaggacgctgtggtttctgagccagcagcctcccccgttgcccctctggatccactgcttaaatacggacgaggacagggccctgtctcctcagcttcaggcaccaccactgacctgggacagtgaatcgacaatgccgtcttctgtctcgtggggcatcctcctgctggcaggcctgtgctgcctggtccctgtctccctggctgaggatccccagggagatgctgcccagaagacagatacatcccaccatgatcaggatcacccaaccttcaacaagatcacccccaacctggctgagttcgccttcagcctataccgccagctggcacaccagtccaacagcaccaatatcttcttctccccagtgagcatcgctacagcctttgcaatgctctccctggggaccaaggctgacactcacgatgaaatcctggagggcctgaatttcaacctcacggagattccggaggctcagatccatgaaggcttccaggaactcctccgtaccctcaaccagccagacagccagctccagctgaccaccggcaatggcctgttcctcagcgagggcctgaagctagtggataagtttttggaggatgttaaaaagttgtaccactcagaagccttcactgtcaacttcggggacaccgaagaggccaagaaacagatcaacgattacgtggagaagggtactcaagggaaaattgtggatttggtcaaggagcttgacagagacacagtttttgctctggtgaattacatcttctttaaaggcaaatgggagagaccctttgaagtcaaggacaccgaggaagaggacttccacgtggaccaggtgaccaccgtgaaggtgcctatgatgaagcgtttaggcatgtttaacatccagcactgtaagaagctgtccagctgggtgctgctgatgaaatacctgggcaatgccaccgccatcttcttcctgcctgatgaggggaaactacagcacctggaaaatgaactcacccacgatatcatcaccaagttcctggaaaatgaagacagaaggtctgccagcttacatttacccaaactgtccattactggaacctatgatctgaagagcgtcctgggtcaactgggcatcactaaggtcttcagcaatggggctgacctctccggggtcacagaggaggcacccctgaagctctccaaggccgtgcataaggctgtgctgaccatcgacgagaaagggactgaagctgctggggccatgtttttagaggccatacccatgtctatcccccccgaggtcaagttcaacaaaccctttgtcttcttaatgattgaacaaaataccaagtctcccctcttcatgggaaaagtggtgaatcccacccaaaaataactgcctctcgctcctcaacccctcccctccatccctggccccctccctggatgacattaaagaagggttgagctggtccctgcctgcatgtgactgtaaatccctcccatgttttctctgagtctccctttgcctgctgaggctgtatgtgggctccaggtaacagtgctgtcttcgggccccctgaactgtgttcatggagcatctggctgggtaggcacatgctgggcttgaatccaggggggactgaatcctcagcttacggacctgggcccatctgtttctggagggctccagtcttccttgtcctgtcttggagtccccaagaaggaatcacaggggaggaaccagataccagccatgaccccaggctccaccaagcatcttcatgtccccctgctcatcccccactcccccccacccagagttgctcatcctgccagggctggctgtgcccaccccaaggctgccctcctgggggccccagaactgcctgatcgtgccgtggcccagttttgtggcatctgcagcaacacaagagagaggacaatgtcctcctcttgacccgctgtcacctaaccagactcgggccctgcacctctcaggcacttctggaaaatgactgaggcagattcttcctgaagcccattctccatggggcaacaaggacacctattctgtccttgtccttccatcgctgccccagaaagcctcacatatctccgtttagaatcaggtcccttctccccagatgaagaggagggtctctgctttgttttctctatctcctcctcagacttgaccaggcccagcaggccccagaagaccattaccctatatcccttctcctccctagtcacatggccataggcctgctgatggctcaggaaggccattgcaaggactcctcagctatgggagaggaagcacatcacccattgacccccgcaacccctccctttcctcctctgagtcccgactggggccacatgcagcctgacttctttgtgcctgttgctgtccctgcagtcttcagagggccaccgcagctccagtgccacggcaggaggctgttcctgaatagcccctgtggtaagggccaggagagtccttccatcctccaaggccctgctaaaggacacagcagccaggaagtcccctgggcccctagctgaaggacagcctgctccctccgtctctaccaggaatggccttgtcctatggaaggcactgccccatcccaaactaatctaggaatcactgtctaaccactcactgtcatgaatgtgtacttaaaggatgaggttgagtcataccaaatagtgatttcgatagttcaaaatggtgaaattagcaattctacatgattcagtctaatcaatggataccgactgtttcccacacaagtctcctgttctcttaagcttactcactgacagcctttcactctccacaaatacattaaagatatggccatcaccaagccccctaggatgacaccagacctgagagtctgaagacctggatccaagttctgacttttccccctgacagctgtgtgaccttcgtgaagtcgccaaacctctctgagccccagtcattgctagtaagacctgcctttgagttggtatgatgttcaagttagataacaaaatgtttatacccattagaacagagaataaatagaactacatttcttgca

SEQ ID NO: 638 - DNA, 1559 bp, Homo sapiens
  source 1..1559: mol_type = genomic DNA
cacgcagcaaccctcagagtcctgagctgaaccaagaaggaggagggggtcgggcctccgaggaaggcctagccgctgctgctgccaggaattccaggttggaggggcggcaacctcctgccagccttcaggccactctcctgtgcctgccagaagagacagagcttgaggagagcttgaggagagcaggaaagcagcctcccccgttgcccctctggatccactgcttaaatacggacgaggacagggccctgtctcctcagcttcaggcaccaccactgacctgggacagtgaatcgacaatgccgtcttctgtctcgtggggcatcctcctgctggcaggcctgtgctgcctggtccctgtctccctggctgaggatccccagggagatgctgcccagaagacagatacatcccaccatgatcaggatcacccaaccttcaacaagatcacccccaacctggctgagttcgccttcagcctataccgccagctggcacaccagtccaacagcaccaatatcttcttctccccagtgagcatcgctacagcctttgcaatgctctccctggggaccaaggctgacactcacgatgaaatcctggagggcctgaatttcaacctcacggagattccggaggctcagatccatgaaggcttccaggaactcctccgtaccctcaaccagccagacagccagctccagctgaccaccggcaatggcctgttcctcagcgagggcctgaagctagtggataagtttttggaggatgttaaaaagttgtaccactcagaagccttcactgtcaacttcggggacaccgaagaggccaagaaacagatcaacgattacgtggagaagggtactcaagggaaaattgtggatttggtcaaggagcttgacagagacacagtttttgctctggtgaattacatcttctttaaaggcaaatgggagagaccctttgaagtcaaggacaccgaggaagaggacttccacgtggaccaggtgaccaccgtgaaggtgcctatgatgaagcgtttaggcatgtttaacatccagcactgtaagaagctgtccagctgggtgctgctgatgaaatacctgggcaatgccaccgccatcttcttcctgcctgatgaggggaaactacagcacctggaaaatgaactcacccacgatatcatcaccaagttcctggaaaatgaagacagaaggtctgccagcttacatttacccaaactgtccattactggaacctatgatctgaagagcgtcctgggtcaactgggcatcactaaggtcttcagcaatggggctgacctctccggggtcacagaggaggcacccctgaagctctccaaggccgtgcataaggctgtgctgaccatcgacgagaaagggactgaagctgctggggccatgtttttagaggccatacccatgtctatcccccccgaggtcaagttcaacaaaccctttgtcttcttaatgattgaacaaaataccaagtctcccctcttcatgggaaaagtggtgaatcccacccaaaaataa

SEQ ID NO: 639 - DNA, 581 bp, Homo sapiens
  source 1..581: mol_type = genomic DNA
aaggaggagggggtcgggcctccgaggaaggcctagccgctgctgctgccaggaattccaggttggaggggcggcaacctcctgccagccttcaggccactctcctgtgcctgccagaagagacagagcttgaggagagcttgaggagagcaggaaaggtgggacattgctgctgctgctcactcagttccacagcagcctcccccgttgcccctctggatccactgcttaaatacggacgaggacagggccctgtctcctcagcttcaggcaccaccactgacctgggacagtgaatcgacaatgccgtcttctgtctcgtggggcatcctcctgctggcaggcctgtgctgcctggtccctgtctccctggctgaggatccccagggagatgctgcccagaagacagatacatcccaccatgatcaggatcacccaaccttcaacaagatcacccccaacctggctgagttcgccttcagcctataccgccagctggcacaccagtccaacagcaccaatatcttcttctccccagtgagcatcgctacagcctttgcaatgctctccctggggaccaa

SEQ ID NO: 640 - DNA, 643 bp, Homo sapiens
  source 1..643: mol_type = genomic DNA
caggcaccaccactgacctgggacagtgaatctgttactgatgtcggcaagtacttggcacaggctggtttaataatccctaggcacttccacgtggtgtcaatccctgatcactgggagtcatcatgtgccttgactcggggcctggcccccccatctctgtcttgcaggacaatgccgtcttctgtctcgtggggcatcctcctgctggcaggcctgtgctgcctggtccctgtctccctggctgaggatccccagggagatgctgcccagaagacagatacatcccaccatgatcaggatcacccaaccttcaacaagatcacccccaacctggctgagttcgccttcagcctataccgccagctggcacaccagtccaacagcaccaatatcttcttctccccagtgagcatcgctacagcctttgcaatgctctccctggggaccaaggctgacactcacgatgaaatcctggagggcctgaatttcaacctcacggagattccggaggctcagatccatgaaggcttccaggaactcctccgtaccctcaaccagccagacagccagctccagctgaccaccggcaatggcctgttcctcagcgagggcctgaagctagtggataagtttttggagg

SEQ ID NO: 641 - DNA, 571 bp, Homo sapiens
  source 1..571: mol_type = genomic DNA
agagtcctgagctgaaccaagaaggaggagggggtcgggcctccgaggaaggcctagccgctgctgctgccaggaattccaggttggaggggcggcaacctcctgccagccttcaggccactctcctgtgcctgccagaagagacagagcttgaggagagcttgaggagagcaggaaaggtgggacattgctgctgctgctcactcagttccacaggacaatgccgtcttctgtctcgtggggcatcctcctgctggcaggcctgtgctgcctggtccctgtctccctggctgaggatccccagggagatgctgcccagaagacagatacatcccaccatgatcaggatcacccaaccttcaacaagatcacccccaacctggctgagttcgccttcagcctataccgccagctggcacaccagtccaacagcaccaatatcttcttctccccagtgagcatcgctacagcctttgcaatgctctccctggggaccaaggctgacactcacgatgaaatcctggagggcctgaatttcaacctcacggagattccggaggctcagatccat

SEQ ID NO: 642 - DNA, 583 bp, Homo sapiens
  source 1..583: mol_type = genomic DNA
agagtcctgagctgaaccaagaaggaggagggggtcgggcctccgaggaaggcctagccgctgctgctgccaggaattccaggttggaggggcggcaacctcctgccagccttcaggccactctcctgtgcctgccagaagagacagagcttgaggagagcttgaggagagcaggaaaggtgggacattgctgctgctgctcactcagttccacagggcggcagtaagtcttcagcatcaggcattttggggtgactcagtaaatggtagatcttgctaccagtggaacagccactaaggattctgcagtgagagcagagggccagctaagtggtactctcccagagactgtctgactcacgccaccccctccaccttggacacaggacgctgtggtttctgagccagcagcctcccccgttgcccctctggatccactgcttaaatacggacgaggacagggccctgtctcctcagcttcaggcaccaccactgacctgggacagtgaatcgacaatgccgtcttctgtctcgtggggcatcctcctgctggcaggcctgtgctgcctggtccctgtctccc

SEQ ID NO: 643 - DNA, 951 bp, Homo sapiens
  source 1..951: mol_type = genomic DNA
actgtgcccagggcatgcactgcctccacgcagcaaccctcagagtcctgagctgaaccaagaaggaggagggggtcgggcctccgaggaaggcctagccgctgctgctgccaggaattccaggttggaggggcggcaacctcctgccagccttcaggccactctcctgtgcctgccagaagagacagagcttgaggagagcttgaggagagcaggaaagggcggcagtaagtcttcagcatcaggcattttggggtgactcagtaaatggtagatcttgctaccagtggaacagccactaaggattctgcagtgagagcagagggccagctaagtggtactctcccagagactgtctgactcacgccaccccctccaccttggacacaggacgctgtggtttctgagccagcctcccccgttgcccctctggatccactgcttaaatacggacgaggacagggccctgtctcctcagcttcaggcaccaccactgacctgggacagtgaatcgacaatgccgtcttctgtctcgtggggcatcctcctgctggcaggcctgtgctgcctggtccctgtctccctggctgaggatccccagggagatgctgcccagaagacagatacatcccaccatgatcaggatcacccaaccttcaacaagatcacccccaacctggctgagttcgccttcagcctataccgccagctggcacaccagtccaacagcaccaatatcttcttctccccagtgagcatcgctacagcctttgcaatgctctccctggggaccaaggctgacactcacgatgaaatcctggagggcctgaatttcaacctcacggagattccggaggctcagatccatgaaggcttccaggaactcctccgtaccctcaaccagccagacagccagctccagctgaccaccggcaatggcctgttcctcag

SEQ ID NO: 644 - DNA, 958 bp, Homo sapiens
  source 1..958: mol_type = genomic DNA
ggaacctctgcgagatttagaggaaagaaccagttttcaggcggattgcctcagatcacactatctccacttgcccagccctgtggaagattagcggccatgtattccaatgtgataggaactgtaacctctggaaaaaggaaggtttatcttttgtccttgctgctcattggcttctgggactgcgtgacctgtcacgggagccctgtggacatctgcacagccaagccgcgggacattcccatgaatcccatgtgcatttaccgctccccggagaagaaggcaactgaggatgagggctcagaacagaagatcccggaggccaccaaccggcgtgtctgggaactgtccaaggccaattcccgctttgctaccactttctatcagcacctggcagattccaagaatgacaatgataacattttcctgtcacccctgagtatctccacggcttttgctatgaccaagctgggtgcctgtaatgacaccctccagcaactgatggaggtatttaagtttgacaccatatctgagaaaacatctgatcagatccacttcttctttgccaaactgaactgccgactctatcgaaaagccaacaaatcctccaagttagtatcagccaatcgcctttttggagacaaatcccttaccttcaatgacctctatgtctcagatgcattccataaggcatttcttgaggtaaatgaagaaggcagtgaagcagctgcaagtaccgctgttgtgattgctggccgttcgctaaaccccaacagggtgactttcaaggccaacaggcctttcctggtttttataagagaagttcctctgaacactattatcttcatgggcagagtagccaacccttgtgttaagtaaaatgttcttattctttgcacctcttcctatttttggtttgtgaacagaagtaaaaataaatacaaactacttccatctc

SEQ ID NO: 645 - DNA, 1594 bp, Homo sapiens
  source 1..1594: mol_type = genomic DNA
tctgccccaccctgtcctctggaacctctgcgagatttagaggaaagaaccagttttcaggcggattgcctcagatcacactatctccacttgcccagccctgtggaagattagcggccatgtattccaatgtgataggaactgtaacctctggaaaaaggaaggtttatcttttgtccttgctgctcattggcttctgggactgcgtgacctgtcacgggagccctgtggacatctgcacagccaagccgcgggacattcccatgaatcccatgtgcatttaccgctccccggagaagaaggcaactgaggatgagggctcagaacagaagatcccggaggccaccaaccggcgtgtctgggaactgtccaaggccaattcccgctttgctaccactttctatcagcacctggcagattccaagaatgacaatgataacattttcctgtcacccctgagtatctccacggcttttgctatgaccaagctgggtgcctgtaatgacaccctccagcaactgatggaggtatttaagtttgacaccatatctgagaaaacatctgatcagatccacttcttctttgccaaactgaactgccgactctatcgaaaagccaacaaatcctccaagttagtatcagccaatcgcctttttggagacaaatcccttaccttcaatgagacctaccaggacatcagtgagttggtatatggagccaagctccagcccctggacttcaaggaaaatgcagagcaatccagagcggccatcaacaaatgggtgtccaataagaccgaaggccgaatcaccgatgtcattccctcggaagccatcaatgagctcactgttctggtgctggttaacaccatttacttcaagggcctgtggaagtcaaagttcagccctgagaacacaaggaaggaactgttctacaaggctgatggagagtcgtgttcagcatctatgatgtaccaggaaggcaagttccgttatcggcgcgtggctgaaggcacccaggtgcttgagttgcccttcaaaggtgatgacatcaccatggtcctcatcttgcccaagcctgagaagagcctggccaaggtagagaaggaactcaccccagaggtgctgcaagagtggctggatgaattggaggagatgatgctggtggtccacatgccccgcttccgcattgaggacggcttcagtttgaaggagcagctgcaagacatgggccttgtcgatctgttcagccctgaaaagtccaaactcccaggtattgttgcagaaggccgagatgacctctatgtctcagatgcattccataaggcatttcttgaggtaaatgaagaaggcagtgaagcagctgcaagtaccgctgttgtgattgctggccgttcgctaaaccccaacagggtgactttcaaggccaacaggcctttcctggtttttataagagaagttcctctgaacactattatcttcatgggcagagtagccaacccttgtgttaagtaaaatgttcttattctttgcacctcttcctatttttggtttgtgaacagaagtaaaaataaatacaaactacttccatctca

SEQ ID NO: 646 - DNA, 2284 bp, Homo sapiens
  source 1..2284: mol_type = genomic DNA
cctgggcagagagtgaggagcacccaagtggggccagaggaacgttgtgtgtggcagcaaggagcccgcagaggaacatggcgctgctctgggggctcctggtgctcagctggtcctgcctgcaaggcccctgctccgtgttctcccctgtgagcgccatggagcccttgggccggcagctaactagcgggccgaaccaggagcaggtgtccccacttaccctcctcaagttgggcaaccaggagcctggtggccagactgccctgaagagtcccccaggagtctgcagcagagaccccaccccagagcagacccacaggctggcccgggccatgatggccttcactgccgacctgttctccctggtggctcaaacgtccacctgccccaacctcatcctgtcacccctgagtgtggccctggcgctgtctcacctggcactaggtgctcagaaccacacgttgcagaggctgcaacaggtgctgcacgcaggctcagggccctgcctcccccatctgctgagccgcctctgccaggacctgggccccggcgcgttccgactggctgccaggatgtacctgcagaaaggatttcccatcaaagaagatttcctggaacaatccgaacagctatttggggcaaagcccgtgagcctgacgggaaagcaggaagatgacctggcaaacatcaaccaatgggtgaaggaggccacggaggggaagattcaggaattcctctctgggctgccggaagacaccgtgttgcttctcctcaacgccatccacttccagggtttctggaggaacaagtttgacccgagccttacccagagagactccttccacctggacgagcagttcacggtgcccgtggaaatgatgcaggcccgcacgtacccgctgcgctggttcttgctggagcagcctgagatccaggtggctcatttcccctttaagaacaacatgagctttgtggtccttgtacccacccactttgaatggaacgtgtcccaggtactggccaacctgagttgggacaccctgcacccacctctggtgtgggagaggcccaccaaggtccggctgcctaagctgtatctgaaacaccaaatggacctggtggccaccctcagccagctgggcctgcaggagttgttccaggccccagacctgcgtgggatctccgagcagagcctggtggtgtccggcgtgcagcatcagtccaccctggagctcagcgaggtcggcgtggaggcggcggcggccaccagcattgccatgtcccgcatgtccctgtcctccttcagcgtgaaccgccccttcctcttcttcatcttcgaggacaccacaggccttcccctcttcgtgggcagcgtgaggaaccccaaccccagtgcaccgcgggagctcaaggaacagcaggattccccgggcaacaaggacttcctccagagcctgaaaggcttcccccgcggagacaagcttttcggccctgacttaaaacttgtgccccccatggaggaggattacccccagtttggcagccccaagtgaggggccgtggctgtggcatccagagtccctgcctggaccagcctctccactcatgtgactctttccaaccggctttgtggcactggggcaggggccgggggcagtctgagagaggccattctttcccaacacctcttggggagtttagggtggggggggggcgcggctgggaggagggcaggcatcggggagccgggagcctgaccctcatctttcttccaaacaggctcagagggtgtcctgcaccggggcctgggcaggagggaggtgcttctagttctgccaggagacaggttagctgctccccacgtcagctgggacaccccgacttttgtttaccagagaaaaagggagggggagagggctgcctttggacttgtcccgggacacctaggctagggtggggagagacgggccctggtggtggctcgggaggcgaagcgttgtcctcagccccgcgtggaactcgtgtctggcacagcctggctgtggcctaacctgccgagagtccatcagcctccatcctaccccctgtgccttgtcacgccagacttcccacggctcctcgagatcccaacactgccagcatttcccttccttcctctcctgtctccctcctctgcccgggagctcaggaaccgaggcagggaaggatcccatgagctccttaaggctcttttgtaaggtttttgtagtgatttttatgccacctgaataaagaatgaatgggc

SEQ ID NO: 647 - DNA, 2263 bp, Homo sapiens
  source 1..2263: mol_type = genomic DNA
gggacttgaaaaactggagcctgttcttggcaagaagattctaatgcccaggaacatggcgctgctctgggggctcctggtgctcagctggtcctgcctgcaaggcccctgctccgtgttctcccctgtgagcgccatggagcccttgggccggcagctaactagcgggccgaaccaggagcaggtgtccccacttaccctcctcaagttgggcaaccaggagcctggtggccagactgccctgaagagtcccccaggagtctgcagcagagaccccaccccagagcagacccacaggctggcccgggccatgatggccttcactgccgacctgttctccctggtggctcaaacgtccacctgccccaacctcatcctgtcacccctgagtgtggccctggcgctgtctcacctggcactaggtgctcagaaccacacgttgcagaggctgcaacaggtgctgcacgcaggctcagggccctgcctcccccatctgctgagccgcctctgccaggacctgggccccggcgcgttccgactggctgccaggatgtacctgcagaaaggatttcccatcaaagaagatttcctggaacaatccgaacagctatttggggcaaagcccgtgagcctgacgggaaagcaggaagatgacctggcaaacatcaaccaatgggtgaaggaggccacggaggggaagattcaggaattcctctctgggctgccggaagacaccgtgttgcttctcctcaacgccatccacttccagggtttctggaggaacaagtttgacccgagccttacccagagagactccttccacctggacgagcagttcacggtgcccgtggaaatgatgcaggcccgcacgtacccgctgcgctggttcttgctggagcagcctgagatccaggtggctcatttcccctttaagaacaacatgagctttgtggtccttgtacccacccactttgaatggaacgtgtcccaggtactggccaacctgagttgggacaccctgcacccacctctggtgtgggagaggcccaccaaggtccggctgcctaagctgtatctgaaacaccaaatggacctggtggccaccctcagccagctgggcctgcaggagttgttccaggccccagacctgcgtgggatctccgagcagagcctggtggtgtccggcgtgcagcatcagtccaccctggagctcagcgaggtcggcgtggaggcggcggcggccaccagcattgccatgtcccgcatgtccctgtcctccttcagcgtgaaccgccccttcctcttcttcatcttcgaggacaccacaggccttcccctcttcgtgggcagcgtgaggaaccccaaccccagtgcaccgcgggagctcaaggaacagcaggattccccgggcaacaaggacttcctccagagcctgaaaggcttcccccgcggagacaagcttttcggccctgacttaaaacttgtgccccccatggaggaggattacccccagtttggcagccccaagtgaggggccgtggctgtggcatccagagtccctgcctggaccagcctctccactcatgtgactctttccaaccggctttgtggcactggggcaggggccgggggcagtctgagagaggccattctttcccaacacctcttggggagtttagggtggggggggggcgcggctgggaggagggcaggcatcggggagccgggagcctgaccctcatctttcttccaaacaggctcagagggtgtcctgcaccggggcctgggcaggagggaggtgcttctagttctgccaggagacaggttagctgctccccacgtcagctgggacaccccgacttttgtttaccagagaaaaagggagggggagagggctgcctttggacttgtcccgggacacctaggctagggtggggagagacgggccctggtggtggctcgggaggcgaagcgttgtcctcagccccgcgtggaactcgtgtctggcacagcctggctgtggcctaacctgccgagagtccatcagcctccatcctaccccctgtgccttgtcacgccagacttcccacggctcctcgagatcccaacactgccagcatttcccttccttcctctcctgtctccctcctctgcccgggagctcaggaaccgaggcagggaaggatcccatgagctccttaaggctcttttgtaaggtttttgtagtgatttttatgccacctgaataaagaatgaatgggcc

SEQ ID NO: 648 - DNA, 2092 bp, Homo sapiens
  source 1..2092: mol_type = genomic DNA
cctgggcagagagtgaggagcacccaagtggggccagaggaacgttgtgtgtggcagcaaggagcccgcagaggaacatggcgctgctctgggggctcctggtgctcagctggtcctgcctgcaaggcccctgctccgtgttctcccctgtgagcgccatggagcccttgggccggcagctaactagcgggccgaaccaggagcaggtgtccccacttaccctcctcaagttgggcaaccaggtacaaccaggtgctcagaaccacacgttgcagaggctgcaacaggtgctgcacgcaggctcagggccctgcctcccccatctgctgagccgcctctgccaggacctgggccccggcgcgttccgactggctgccaggatgtacctgcagaaaggatttcccatcaaagaagatttcctggaacaatccgaacagctatttggggcaaagcccgtgagcctgacgggaaagcaggaagatgacctggcaaacatcaaccaatgggtgaaggaggccacggaggggaagattcaggaattcctctctgggctgccggaagacaccgtgttgcttctcctcaacgccatccacttccagggtttctggaggaacaagtttgacccgagccttacccagagagactccttccacctggacgagcagttcacggtgcccgtggaaatgatgcaggcccgcacgtacccgctgcgctggttcttgctggagcagcctgagatccaggtggctcatttcccctttaagaacaacatgagctttgtggtccttgtacccacccactttgaatggaacgtgtcccaggtactggccaacctgagttgggacaccctgcacccacctctggtgtgggagaggcccaccaaggtccggctgcctaagctgtatctgaaacaccaaatggacctggtggccaccctcagccagctgggcctgcaggagttgttccaggccccagacctgcgtgggatctccgagcagagcctggtggtgtccggcgtgcagcatcagtccaccctggagctcagcgaggtcggcgtggaggcggcggcggccaccagcattgccatgtcccgcatgtccctgtcctccttcagcgtgaaccgccccttcctcttcttcatcttcgaggacaccacaggccttcccctcttcgtgggcagcgtgaggaaccccaaccccagtgcaccgcgggagctcaaggaacagcaggattccccgggcaacaaggacttcctccagagcctgaaaggcttcccccgcggagacaagcttttcggccctgacttaaaacttgtgccccccatggaggaggattacccccagtttggcagccccaagtgaggggccgtggctgtggcatccagagtccctgcctggaccagcctctccactcatgtgactctttccaaccggctttgtggcactggggcaggggccgggggcagtctgagagaggccattctttcccaacacctcttggggagtttagggtggggggggggcgcggctgggaggagggcaggcatcggggagccgggagcctgaccctcatctttcttccaaacaggctcagagggtgtcctgcaccggggcctgggcaggagggaggtgcttctagttctgccaggagacaggttagctgctccccacgtcagctgggacaccccgacttttgtttaccagagaaaaagggagggggagagggctgcctttggacttgtcccgggacacctaggctagggtggggagagacgggccctggtggtggctcgggaggcgaagcgttgtcctcagccccgcgtggaactcgtgtctggcacagcctggctgtggcctaacctgccgagagtccatcagcctccatcctaccccctgtgccttgtcacgccagacttcccacggctcctcgagatcccaacactgccagcatttcccttccttcctctcctgtctccctcctctgcccgggagctcaggaaccgaggcagggaaggatcccatgagctccttaaggctcttttgtaaggtttttgtagtgatttttatgccacctgaataaagaatgaatgggc

SEQ ID NO: 649 - DNA, 842 bp, Homo sapiens
  source 1..842: mol_type = genomic DNA
cctgggcagagagtgaggagcacccaagtggggccagaggaacgttgtgtgtggcagcaaggagcccgcagaggaacatggcgctgctctgggggctcctggtgctcagctggtcctgcctgcaaggcccctgctccgtgttctcccctgtgagcgccatggagcccttgggccggcagctaactagcgggccgaaccaggagcaggtgtccccacttaccctcctcaagttgggcaaccaggagcctggtggccagactgccctgaagagtcccccaggagtctgcagcagagaccccaccccagagcagacccacaggctggcccgggccatgatggccttcactgccgacctgttctccctggtggctcaaacgtccacctgccccaacctcatcctgtcacccctgagtgtggccctggcgctgtctcacctggcactaggtgctcagaaccacacgttgcagaggctgcaacaggtgctgcacgcaggctcagggccctgcctcccccatctgctgagccgcctctgccaggacctgggccccggcgcgttccgactggctgccaggatgtacctgcagaaaggatttcccatcaaagaagatttcctggaacaatccgaacagctatttggggcaaagcccgtgagcctgacgggaaagcaggaagatgacctggcaaacatcaaccaatgggtgaaggaggccacggaggggaagattcaggaattcctctctgggctgccggaagacaccgtgttgcttctcctcaacgccatccacttccagggtttctggaggaacaagtttgacccgagccttacccagagagactccttc

SEQ ID NO: 650 - DNA, 2002 bp, Homo sapiens
  source 1..2002: mol_type = genomic DNA
aagaagaccaagcggtcagtcccattccgtcccatcctgatttacaggaactcacaccagcgatcaatcttccttaatttgtaactgggcagtgtcccgggccagccaatagctaagactgccccccccgcaccccaccctccctgaccctgggggactctctactcagtctgcactggagctgcctggtgaccagaagtttggagtccgctgacgtcgccgcccagatggcctccaggctgaccctgctgaccctcctgctgctgctgctggctggggatagagcctcctcaaatccaaatgctaccagctccagctcccaggatccagagagtttgcaagacagaggcgaagggaaggtcgcaacaacagttatctccaagatgctattcgttgaacccatcctggaggtttccagcttgccgacaaccaactcaacaaccaattcagccaccaaaataacagctaataccactgatgaacccaccacacaacccaccacagagcccaccacccaacccaccatccaacccacccaaccaactacccagctcccaacagattctcctacccagcccactactgggtccttctgcccaggacctgttactctctgctctgacttggagagtcattcaacagaggccgtgttgggggatgctttggtagatttctccctgaagctctaccacgccttctcagcaatgaagaaggtggagaccaacatggccttttccccattcagcatcgccagcctccttacccaggtcctgctcggggctggggagaacaccaaaacaaacctggagagcatcctctcttaccccaaggacttcacctgtgtccaccaggccctgaagggcttcacgaccaaaggtgtcacctcagtctctcagatcttccacagcccagacctggccataagggacacctttgtgaatgcctctcggaccctgtacagcagcagccccagagtcctaagcaacaacagtgacgccaacttggagctcatcaacacctgggtggccaagaacaccaacaacaagatcagccggctgctagacagtctgccctccgatacccgccttgtcctcctcaatgctatctacctgagtgccaagtggaagacaacatttgatcccaagaaaaccagaatggaaccctttcacttcaaaaactcagttataaaagtgcccatgatgaatagcaagaagtaccctgtggcccatttcattgaccaaactttgaaagccaaggtggggcagctgcagctctcccacaatctgagtttggtgatcctggtaccccagaacctgaaacatcgtcttgaagacatggaacaggctctcagcccttctgttttcaaggccatcatggagaaactggagatgtccaagttccagcccactctcctaacactaccccgcatcaaagtgacgaccagccaggatatgctctcaatcatggagaaattggaattcttcgatttttcttatgaccttaacctgtgtgggctgacagaggacccagatcttcaggtttctgcgatgcagcaccagacagtgctggaactgacagagactggggtggaggcggctgcagcctccgccatctctgtggcccgcaccctgctggtctttgaagtgcagcagcccttcctcttcgtgctctgggaccagcagcacaagttccctgtcttcatggggcgagtatatgaccccagggcctgagacctgcaggatcaggttagggcgagcgctacctctccagcctcagctctcagttgcagccctgctgctgcctgcctggacttggcccctgccacctcctgcctcaggtgtccgctatccaccaaaagggctccctgagggtctgggcaagggacctgcttctattagcccttctccatggccctgccatgctctccaaaccactttttgcagctttctctagttcaagttcaccagactctataaataaaacctgacagaccatgactttc

SEQ ID NO: 651 - DNA, 1733 bp, Homo sapiens
  source 1..1733: mol_type = genomic DNA
ctgcactggagctgcctggtgaccagaagtttggagtccgctgacgtcgccgcccagatggcctccaggctgaccctgctgaccctcctgctgctgctgctggctgggtttcttgaaccacaggatagagcctcctcaaatccaaatgctaccagctccagctcccaggatccagagagtttgcaagacagaggcgaagggaaggtcgcaacaacagttatctccaagatgctattcgttgaacccatcctggaggtttccagcttgccgacaaccaactcaacaaccaattcagccaccaaaataacagctaataccactgatgaacccaccacacaacccaccacagagcccaccacccaacccaccatccaacccacccaaccaactacccagctcccaacagattctcctacccagcccactactgggtccttctgcccaggacctgttactctctgctctgacttggagagtcattcaacagaggccgtgttgggggatgctttggtagatttctccctgaagctctaccacgccttctcagcaatgaagaaggtggagaccaacatggccttttccccattcagcatcgccagcctccttacccaggtcctgctcggggctggggagaacaccaaaacaaacctggagagcatcctctcttaccccaaggacttcacctgtgtccaccaggccctgaagggcttcacgaccaaaggtgtcacctcagtctctcagatcttccacagcccagacctggccataagggacacctttgtgaatgcctctcggaccctgtacagcagcagccccagagtcctaagcaacaacagtgacgccaacttggagctcatcaacacctgggtggccaagaacaccaacaacaagatcagccggctgctagacagtctgccctccgatacccgccttgtcctcctcaatgctatctacctgagtgccaagtggaagacaacatttgatcccaagaaaaccagaatggaaccctttcacttcaaaaactcagttataaaagtgcccatgatgaatagcaagaagtaccctgtggcccatttcattgaccaaactttgaaagccaaggtggggcagctgcagctctcccacaatctgagtttggtgatcctggtaccccagaacctgaaacatcgtcttgaagacatggaacaggctctcagcccttctgttttcaaggccatcatggagaaactggagatgtccaagttccagcccactctcctaacactaccccgcatcaaagtgacgaccagccaggatatgctctcaatcatggagaaattggaattcttcgatttttcttatgaccttaacctgtgtgggctgacagaggacccagatcttcaggtttctgcgatgcagcaccagacagtgctggaactgacagagactggggtggaggcggctgcagcctccgccatctctgtggcccgcaccctgctggtctttgaagtgcagcagcccttcctcttcgtgctctgggaccagcagcacaagttccctgtcttcatggggcgagtatatgaccccagggcctgagacctgcaggatcaggttagggcgagcgctacctctccagcctcagctctcagttgcagccctgctgctgcctgcctggacttggcccctgccacctcctgcctcaggtgtccgctatccaccaaaagggctccctgagggtctgggcaagggacctg

SEQ ID NO: 652 - DNA, 1751 bp, Homo sapiens
  source 1..1751: mol_type = genomic DNA
gcactggagctgcctggtgaccagaagtttggagatagagcctcctcaaatccaaatgctaccagctccagctcccaggatccagagagtttgcaagacagaggcgaagggaaggtcgcaacaacagttatctccaagatgctattcgttgaacccatcctggaggtttccagcttgccgacaaccaactcaacaaccaattcagccaccaaaataacagctaataccactgatgaacccaccacacaacccaccacagagcccaccacccaacccaccatccaacccacccaaccaactacccagctcccaacagattctcctacccagcccactactgggtccttctgcccaggacctgttactctctgctctgacttggagagtcattcaacagaggccgtgttgggggatgctttggtagatttctccctgaagctctaccacgccttctcagcaatgaagaaggtggagaccaacatggccttttccccattcagcatcgccagcctccttacccaggtcctgctcggggctggggagaacaccaaaacaaacctggagagcatcctctcttaccccaaggacttcacctgtgtccaccaggccctgaagggcttcacgaccaaaggtgtcacctcagtctctcagatcttccacagcccagacctggccataagggacacctttgtgaatgcctctcggaccctgtacagcagcagccccagagtcctaagcaacaacagtgacgccaacttggagctcatcaacacctgggtggccaagaacaccaacaacaagatcagccggctgctagacagtctgccctccgatacccgccttgtcctcctcaatgctatctacctgagtgccaagtggaagacaacatttgatcccaagaaaaccagaatggaaccctttcacttcaaaaactcagttataaaagtgcccatgatgaatagcaagaagtaccctgtggcccatttcattgaccaaactttgaaagccaaggtggggcagctgcagctctcccacaatctgagtttggtgatcctggtaccccagaacctgaaacatcgtcttgaagacatggaacaggctctcagcccttctgttttcaaggccatcatggagaaactggagatgtccaagttccagcccactctcctaacactaccccgcatcaaagtgacgaccagccaggatatgctctcaatcatggagaaattggaattcttcgatttttcttatgaccttaacctgtgtgggctgacagaggacccagatcttcaggtttctgcgatgcagcaccagacagtgctggaactgacagagactggggtggaggcggctgcagcctccgccatctctgtggcccgcaccctgctggtctttgaagtgcagcagcccttcctcttcgtgctctgggaccagcagcacaagttccctgtcttcatggggcgagtatatgaccccagggcctgagacctgcaggatcaggttagggcgagcgctacctctccagcctcagctctcagttgcagccctgctgctgcctgcctggacttggcccctgccacctcctgcctcaggtgtccgctatccaccaaaagggctccctgagggtctgggcaagggacctgcttctattagcccttctccatggccctgccatgctctccaaaccactttttgcagctttctctagttcaagttcaccagactctataaataaaacctgacagaccatg

SEQ ID NO: 653 - DNA, 648 bp, Homo sapiens
  source 1..648: mol_type = genomic DNA
atgctgtttttattgttactcatgaagacgcgggggaagctttggttgtgtaaagctgagaactgcacccaagcttccccgttcaccccacctaccaggggatttgggctaaattcctggcctggcccacaaagaagaccaagcggtccgctgacgtcgccgcccagatggcctccaggctgaccctgctgaccctcctgctgctgctgctggctggggatagagcctcctcaaatccaaatgctaccagctccagctcccaggatccagagagtttgcaagacagaggcgaagggaaggtcgcaacaacagttatctccaagatgctattcgttgaacccatcctggaggtttccagcttgccgacaaccaactcaacaaccaattcagccaccaaaataacagctaataccactgatgaacccaccacacaacccaccacagagcccaccacccaacccaccatccaacccacccaaccaactacccagctcccaacagattctcctacccagcccactactgggtccttctgcccaggacctgttactctctgctctgacttggagagtcattcaacagaggccgtgttgggggatgctttggtagatttctccctgaagctctaccacgccttctcagcaatga

SEQ ID NO: 654 - DNA, 634 bp, Homo sapiens
  source 1..634: mol_type = genomic DNA
atggcctccaggctgaccctgctgaccctcctgctgctgctgctggctggggatagagcctcctcaaatccaaatgctaccagctccagctcccaggatccagagagtttgcaagacagaggcgaagggaaggtcgcaacaacagttatctccaagatgctattcgttgaacccatcctggaggtttccagcttgccgacaaccaactcaacaaccaattcagccaccaaaataacagctaataccactgatgaacccaccacacaacccaccacagagcccaccacccaacccaccatccaacccacccaaccaactacccagctcccaacagattctcctacccagccaggatatgctctcaatcatggagaaattggaattcttcgatttttcttatgaccttaacctgtgtgggctgacagaggacccagatcttcaggtttctgcgatgcagcaccagacagtgctggaactgacagagactggggtggaggcggctgcagcctccgccatctctgtggcccgcaccctgctggtctttgaagtgcagcagcccttcctcttcgtgctctgggaccagcagcacaagttccctgtcttcatggggcgagtatatgaccccagggcctga

SEQ ID NO: 655 - DNA, 4094 bp, Homo sapiens
  source 1..4094: mol_type = genomic DNA
gtcgagcgggagcagaggaggcgagggaggagggccagagaggcagttggaagatggcggacgaggcggccctcgcccttcagcccggcggctccccctcggcggcgggggccgacagggaggccgcgtcgtcccccgccggggagccgctccgcaagaggccgcggagagatggtcccggcctcgagcggagcccgggcgagcccggtggggcggccccagagcgtgaggtgccggcggcggccaggggctgcccgggtgcggcggcggcggcgctgtggcgggaggcggaggcagaggcggcggcggcaggcggggagcaagaggcccaggcgactgcggcggctggggaaggagacaatgggccgggcctgcagggcccatctcgggagccaccgctggccgacaacttgtacgacgaagacgacgacgacgagggcgaggaggaggaagaggcggcggcggcggcgattgggtaccgagataaccttctgttcggtgatgaaattatcactaatggttttcattcctgtgaaagtgatgaggaggatagagcctcacatgcaagctctagtgactggactccaaggccacggataggtccatatacttttgttcagcaacatcttatgattggcacagatcctcgaacaattcttaaagatttattgccggaaacaatacctccacctgagttggatgatatgacactgtggcagattgttattaatatcctttcagaaccaccaaaaaggaaaaaaagaaaagatattaatacaattgaagatgctgtgaaattactgcaagagtgcaaaaaaattatagttctaactggagctggggtgtctgtttcatgtggaatacctgacttcaggtcaagggatggtatttatgctcgccttgctgtagacttcccagatcttccagatcctcaagcgatgtttgatattgaatatttcagaaaagatccaagaccattcttcaagtttgcaaaggaaatatatcctggacaattccagccatctctctgtcacaaattcatagccttgtcagataaggaaggaaaactacttcgcaactatacccagaacatagacacgctggaacaggttgcgggaatccaaaggataattcagtgtcatggttcctttgcaacagcatcttgcctgatttgtaaatacaaagttgactgtgaagctgtacgaggagatatttttaatcaggtagttcctcgatgtcctaggtgcccagctgatgaaccgcttgctatcatgaaaccagagattgtgttttttggtgaaaatttaccagaacagtttcatagagccatgaagtatgacaaagatgaagttgacctcctcattgttattgggtcttccctcaaagtaagaccagtagcactaattccaagttccataccccatgaagtgcctcagatattaattaatagagaacctttgcctcatctgcattttgatgtagagcttcttggagactgtgatgtcataattaatgaattgtgtcataggttaggtggtgaatatgccaaactttgctgtaaccctgtaaagctttcagaaattactgaaaaacctccacgaacacaaaaagaattggcttatttgtcagagttgccacccacacctcttcatgtttcagaagactcaagttcaccagaaagaacttcaccaccagattcttcagtgattgtcacacttttagaccaagcagctaagagtaatgatgatttagatgtgtctgaatcaaaaggttgtatggaagaaaaaccacaggaagtacaaacttctaggaatgttgaaagtattgctgaacagatggaaaatccggatttgaagaatgttggttctagtactggggagaaaaatgaaagaacttcagtggctggaacagtgagaaaatgctggcctaatagagtggcaaaggagcagattagtaggcggcttgatggtaatcagtatctgtttttgccaccaaatcgttacattttccatggcgctgaggtatattcagactctgaagatgacgtcttatcctctagttcttgtggcagtaacagtgatagtgggacatgccagagtccaagtttagaagaacccatggaggatgaaagtgaaattgaagaattctacaatggcttagaagatgagcctgatgttccagagagagctggaggagctggatttgggactgatggagatgatcaagaggcaattaatgaagctatatctgtgaaacaggaagtaacagacatgaactatccatcaaacaaatcatagtgtaataattgtgcaggtacaggaattgttccaccagcattaggaactttagcatgtcaaaatgaatgtttacttgtgaactcgatagagcaaggaaaccagaaaggtgtaatatttataggttggtaaaatagattgtttttcatggataatttttaacttcattatttctgtacttgtacaaactcaacactaacttttttttttttaaaaaaaaaaaggtactaagtatcttcaatcagctgttggtcaagactaactttcttttaaaggttcatttgtatgataaattcatatgtgtatatataattttttttgttttgtctagtgagtttcaacatttttaaagttttcaaaaagccatcggaatgttaaattaatgtaaagggaacagctaatctagaccaaagaatggtattttcacttttctttgtaacattgaatggtttgaagtactcaaaatctgttacgctaaacttttgattctttaacacaattatttttaaacactggcattttccaaaactgtggcagctaactttttaaaatctcaaatgacatgcagtgtgagtagaaggaagtcaacaatatgtggggagagcactcggttgtctttacttttaaaagtaatacttggtgctaagaatttcaggattattgtatttacgttcaaatgaagatggcttttgtacttcctgtggacatgtagcaatgtctatattggctcataaaactaacctgaaaaacaaataaatgctttggaaatgtttcagttgctttagaaacattagtgcctgcctggatccccttagttttgaaatatttgccattgttgtttaaatacctatcactgtggtagagcttgcattgatcttttccacaagtattaaactgccaaaatgtgaatatgcaaagcctttctgaatctataataatggtacttctactggggagagtgtaatattttggactgctgttttccattaatgaggagagcaacaggcccctgattatacagttccaaagtaataagatgttaattgtaattcagccagaaagtacatgtctcccattgggaggatttggtgttaaataccaaactgctagccctagtattatggagatgaacatgatgatgtaacttgtaatagcagaatagttaatgaatgaaactagttcttataatttatctttatttaaaagcttagcctgccttaaaactagagatcaactttctcagctgcaaaagcttctagtctttcaagaagttcatactttatgaaattgcacagtaagcatttatttttcagaccatttttgaacatcactcctaaattaataaagtattcctctgttgctttagtatttattacaataaaaagggtttgaaatatagctgttctttatgcataaaacacccagctaggaccattactgccagagaaaaaaatcgtattgaatggccatttccctacttataagatgtctcaatctgaatttatttggctacactaaagaatgcagtatatttagttttccatttgcatgatgtttgtgtgctatagatgatattttaaattgaaaagtttgttttaaattatttttacagtgaagactgttttcagctctttttatattgtacatagtcttttatgtaatttactggcatatgttttgtagactgtttaatgactggatatcttccttcaacttttgaaatacaaaaccagtgttttttacttgtacactgttttaaagtctattaaaattgtcatttgacttttttctgttaactta

SEQ ID NO: 656 - DNA, 3333 bp, Homo sapiens
  source 1..3333: mol_type = genomic DNA
cacttactaaatggaatttaataaaaacactgtcaaaagttgggaggaccaaaattgatactttttctctgatctttttgccatgtgtatatctgaattctttgtttttaaagaagaaacagcattgaagcattatttggggggaaaaacacacacacaaaatccagcaactcagcattcatgagcaactctatactataccagtatgtgcctgtgcagtggaaggaaaacaattttggaaatatatcctggacaattccagccatctctctgtcacaaattcatagccttgtcagataaggaaggaaaactacttcgcaactatacccagaacatagacacgctggaacaggttgcgggaatccaaaggataattcagtgtcatggttcctttgcaacagcatcttgcctgatttgtaaatacaaagttgactgtgaagctgtacgaggagatatttttaatcaggtagttcctcgatgtcctaggtgcccagctgatgaaccgcttgctatcatgaaaccagagattgtgttttttggtgaaaatttaccagaacagtttcatagagccatgaagtatgacaaagatgaagttgacctcctcattgttattgggtcttccctcaaagtaagaccagtagcactaattccaagttccataccccatgaagtgcctcagatattaattaatagagaacctttgcctcatctgcattttgatgtagagcttcttggagactgtgatgtcataattaatgaattgtgtcataggttaggtggtgaatatgccaaactttgctgtaaccctgtaaagctttcagaaattactgaaaaacctccacgaacacaaaaagaattggcttatttgtcagagttgccacccacacctcttcatgtttcagaagactcaagttcaccagaaagaacttcaccaccagattcttcagtgattgtcacacttttagaccaagcagctaagagtaatgatgatttagatgtgtctgaatcaaaaggttgtatggaagaaaaaccacaggaagtacaaacttctaggaatgttgaaagtattgctgaacagatggaaaatccggatttgaagaatgttggttctagtactggggagaaaaatgaaagaacttcagtggctggaacagtgagaaaatgctggcctaatagagtggcaaaggagcagattagtaggcggcttgatggtaatcagtatctgtttttgccaccaaatcgttacattttccatggcgctgaggtatattcagactctgaagatgacgtcttatcctctagttcttgtggcagtaacagtgatagtgggacatgccagagtccaagtttagaagaacccatggaggatgaaagtgaaattgaagaattctacaatggcttagaagatgagcctgatgttccagagagagctggaggagctggatttgggactgatggagatgatcaagaggcaattaatgaagctatatctgtgaaacaggaagtaacagacatgaactatccatcaaacaaatcatagtgtaataattgtgcaggtacaggaattgttccaccagcattaggaactttagcatgtcaaaatgaatgtttacttgtgaactcgatagagcaaggaaaccagaaaggtgtaatatttataggttggtaaaatagattgtttttcatggataatttttaacttcattatttctgtacttgtacaaactcaacactaacttttttttttttaaaaaaaaaaaggtactaagtatcttcaatcagctgttggtcaagactaactttcttttaaaggttcatttgtatgataaattcatatgtgtatatataattttttttgttttgtctagtgagtttcaacatttttaaagttttcaaaaagccatcggaatgttaaattaatgtaaagggaacagctaatctagaccaaagaatggtattttcacttttctttgtaacattgaatggtttgaagtactcaaaatctgttacgctaaacttttgattctttaacacaattatttttaaacactggcattttccaaaactgtggcagctaactttttaaaatctcaaatgacatgcagtgtgagtagaaggaagtcaacaatatgtggggagagcactcggttgtctttacttttaaaagtaatacttggtgctaagaatttcaggattattgtatttacgttcaaatgaagatggcttttgtacttcctgtggacatgtagcaatgtctatattggctcataaaactaacctgaaaaacaaataaatgctttggaaatgtttcagttgctttagaaacattagtgcctgcctggatccccttagttttgaaatatttgccattgttgtttaaatacctatcactgtggtagagcttgcattgatcttttccacaagtattaaactgccaaaatgtgaatatgcaaagcctttctgaatctataataatggtacttctactggggagagtgtaatattttggactgctgttttccattaatgaggagagcaacaggcccctgattatacagttccaaagtaataagatgttaattgtaattcagccagaaagtacatgtctcccattgggaggatttggtgttaaataccaaactgctagccctagtattatggagatgaacatgatgatgtaacttgtaatagcagaatagttaatgaatgaaactagttcttataatttatctttatttaaaagcttagcctgccttaaaactagagatcaactttctcagctgcaaaagcttctagtctttcaagaagttcatactttatgaaattgcacagtaagcatttatttttcagaccatttttgaacatcactcctaaattaataaagtattcctctgttgctttagtatttattacaataaaaagggtttgaaatatagctgttctttatgcataaaacacccagctaggaccattactgccagagaaaaaaatcgtattgaatggccatttccctacttataagatgtctcaatctgaatttatttggctacactaaagaatgcagtatatttagttttccatttgcatgatgtttgtgtgctatagatgatattttaaattgaaaagtttgttttaaattatttttacagtgaagactgttttcagctctttttatattgtacatagtcttttatgtaatttactggcatatgttttgtagactgtttaatgactggatatcttccttcaacttttgaaatacaaaaccagtgttttttacttgtacactgttttaaagtctattaaaattgtcatttgacttttttctgttaa

SEQ ID NO: 657 - DNA, 3295 bp, Homo sapiens
  source 1..3295: mol_type = genomic DNA
cagatcctcaagcgatgtttgatattgaatatttcagaaaagatccaagaccattcttcaagtttgcaaagaagaaacagcattgaagcattatttggggggaaaaacacacacacaaaatccagcaactcagcattcatgagcaactctatactataccagtatgtgcctgtgcagtggaaggaaaacaattttggaaatatatcctggacaattccagccatctctctgtcacaaattcatagccttgtcagataaggaaggaaaactacttcgcaactatacccagaacatagacacgctggaacaggttgcgggaatccaaaggataattcagtgtcatggttcctttgcaacagcatcttgcctgatttgtaaatacaaagttgactgtgaagctgtacgaggagatatttttaatcaggtagttcctcgatgtcctaggtgcccagctgatgaaccgcttgctatcatgaaaccagagattgtgttttttggtgaaaatttaccagaacagtttcatagagccatgaagtatgacaaagatgaagttgacctcctcattgttattgggtcttccctcaaagtaagaccagtagcactaattccaagttccataccccatgaagtgcctcagatattaattaatagagaacctttgcctcatctgcattttgatgtagagcttcttggagactgtgatgtcataattaatgaattgtgtcataggttaggtggtgaatatgccaaactttgctgtaaccctgtaaagctttcagaaattactgaaaaacctccacgaacacaaaaagaattggcttatttgtcagagttgccacccacacctcttcatgtttcagaagactcaagttcaccagaaagaacttcaccaccagattcttcagtgattgtcacacttttagaccaagcagctaagagtaatgatgatttagatgtgtctgaatcaaaaggttgtatggaagaaaaaccacaggaagtacaaacttctaggaatgttgaaagtattgctgaacagatggaaaatccggatttgaagaatgttggttctagtactggggagaaaaatgaaagaacttcagtggctggaacagtgagaaaatgctggcctaatagagtggcaaaggagcagattagtaggcggcttgatggtaatcagtatctgtttttgccaccaaatcgttacattttccatggcgctgaggtatattcagactctgaagatgacgtcttatcctctagttcttgtggcagtaacagtgatagtgggacatgccagagtccaagtttagaagaacccatggaggatgaaagtgaaattgaagaattctacaatggcttagaagatgagcctgatgttccagagagagctggaggagctggatttgggactgatggagatgatcaagaggcaattaatgaagctatatctgtgaaacaggaagtaacagacatgaactatccatcaaacaaatcatagtgtaataattgtgcaggtacaggaattgttccaccagcattaggaactttagcatgtcaaaatgaatgtttacttgtgaactcgatagagcaaggaaaccagaaaggtgtaatatttataggttggtaaaatagattgtttttcatggataatttttaacttcattatttctgtacttgtacaaactcaacactaacttttttttttttaaaaaaaaaaaggtactaagtatcttcaatcagctgttggtcaagactaactttcttttaaaggttcatttgtatgataaattcatatgtgtatatataattttttttgttttgtctagtgagtttcaacatttttaaagttttcaaaaagccatcggaatgttaaattaatgtaaagggaacagctaatctagaccaaagaatggtattttcacttttctttgtaacattgaatggtttgaagtactcaaaatctgttacgctaaacttttgattctttaacacaattatttttaaacactggcattttccaaaactgtggcagctaactttttaaaatctcaaatgacatgcagtgtgagtagaaggaagtcaacaatatgtggggagagcactcggttgtctttacttttaaaagtaatacttggtgctaagaatttcaggattattgtatttacgttcaaatgaagatggcttttgtacttcctgtggacatgtagcaatgtctatattggctcataaaactaacctgaaaaacaaataaatgctttggaaatgtttcagttgctttagaaacattagtgcctgcctggatccccttagttttgaaatatttgccattgttgtttaaatacctatcactgtggtagagcttgcattgatcttttccacaagtattaaactgccaaaatgtgaatatgcaaagcctttctgaatctataataatggtacttctactggggagagtgtaatattttggactgctgttttccattaatgaggagagcaacaggcccctgattatacagttccaaagtaataagatgttaattgtaattcagccagaaagtacatgtctcccattgggaggatttggtgttaaataccaaactgctagccctagtattatggagatgaacatgatgatgtaacttgtaatagcagaatagttaatgaatgaaactagttcttataatttatctttatttaaaagcttagcctgccttaaaactagagatcaactttctcagctgcaaaagcttctagtctttcaagaagttcatactttatgaaattgcacagtaagcatttatttttcagaccatttttgaacatcactcctaaattaataaagtattcctctgttgctttagtatttattacaataaaaagggtttgaaatatagctgttctttatgcataaaacacccagctaggaccattactgccagagaaaaaaatcgtattgaatggccatttccctacttataagatgtctcaatctgaatttatttggctacactaaagaatgcagtatatttagttttccatttgcatgatgtttgtgtgctatagatgatattttaaattgaaaagtttgttttaaattatttttacagtgaagactgttttcagctctttttatattgtacatagtcttttatgtaatttactggcatatgttttgtagactgtttaatgactggatatcttccttcaacttttgaaatacaaaaccagtgttttttacttgtacactgttttaaagtctattaaaattgtcatttgacttttttctgttaactta

SEQ ID NO: 658 - DNA, 3587 bp, Homo sapiens
  source 1..3587: mol_type = genomic DNA
gcatctcctcctccctctccccgggctcctactggcctgaggttgagggcggctgggggctcggggcaggctccgcggcgttcccctccccaccccggccctccgttcagccgcgctcctccggggctgcggttcctactgcgcgagctgccagtggattcgctcttttcctccgtccgtggcccgcctgggcggccttgttctttccgcagcagccagataaccttctgttcggtgatgaaattatcactaatggttttcattcctgtgaaagtgatgaggaggatagagcctcacatgcaagctctagtgactggactccaaggccacggataggtgtctgtttcatgtggaatacctgacttcaggtcaagggatggtatttatgctcgccttgctgtagacttcccagatcttccagatcctcaagcgatgtttgatattgaatatttcagaaaagatccaagaccattcttcaagtttgcaaaggaaatatatcctggacaattccagccatctctctgtcacaaattcatagccttgtcagataaggaaggaaaactacttcgcaactatacccagaacatagacacgctggaacaggttgcgggaatccaaaggataattcagtgtcatggttcctttgcaacagcatcttgcctgatttgtaaatacaaagttgactgtgaagctgtacgaggagatatttttaatcaggtagttcctcgatgtcctaggtgcccagctgatgaaccgcttgctatcatgaaaccagagattgtgttttttggtgaaaatttaccagaacagtttcatagagccatgaagtatgacaaagatgaagttgacctcctcattgttattgggtcttccctcaaagtaagaccagtagcactaattccaagttccataccccatgaagtgcctcagatattaattaatagagaacctttgcctcatctgcattttgatgtagagcttcttggagactgtgatgtcataattaatgaattgtgtcataggttaggtggtgaatatgccaaactttgctgtaaccctgtaaagctttcagaaattactgaaaaacctccacgaacacaaaaagaattggcttatttgtcagagttgccacccacacctcttcatgtttcagaagactcaagttcaccagaaagaacttcaccaccagattcttcagtgattgtcacacttttagaccaagcagctaagagtaatgatgatttagatgtgtctgaatcaaaaggttgtatggaagaaaaaccacaggaagtacaaacttctaggaatgttgaaagtattgctgaacagatggaaaatccggatttgaagaatgttggttctagtactggggagaaaaatgaaagaacttcagtggctggaacagtgagaaaatgctggcctaatagagtggcaaaggagcagattagtaggcggcttgatggtaatcagtatctgtttttgccaccaaatcgttacattttccatggcgctgaggtatattcagactctgaagatgacgtcttatcctctagttcttgtggcagtaacagtgatagtgggacatgccagagtccaagtttagaagaacccatggaggatgaaagtgaaattgaagaattctacaatggcttagaagatgagcctgatgttccagagagagctggaggagctggatttgggactgatggagatgatcaagaggcaattaatgaagctatatctgtgaaacaggaagtaacagacatgaactatccatcaaacaaatcatagtgtaataattgtgcaggtacaggaattgttccaccagcattaggaactttagcatgtcaaaatgaatgtttacttgtgaactcgatagagcaaggaaaccagaaaggtgtaatatttataggttggtaaaatagattgtttttcatggataatttttaacttcattatttctgtacttgtacaaactcaacactaacttttttttttttaaaaaaaaaaaggtactaagtatcttcaatcagctgttggtcaagactaactttcttttaaaggttcatttgtatgataaattcatatgtgtatatataattttttttgttttgtctagtgagtttcaacatttttaaagttttcaaaaagccatcggaatgttaaattaatgtaaagggaacagctaatctagaccaaagaatggtattttcacttttctttgtaacattgaatggtttgaagtactcaaaatctgttacgctaaacttttgattctttaacacaattatttttaaacactggcattttccaaaactgtggcagctaactttttaaaatctcaaatgacatgcagtgtgagtagaaggaagtcaacaatatgtggggagagcactcggttgtctttacttttaaaagtaatacttggtgctaagaatttcaggattattgtatttacgttcaaatgaagatggcttttgtacttcctgtggacatgtagcaatgtctatattggctcataaaactaacctgaaaaacaaataaatgctttggaaatgtttcagttgctttagaaacattagtgcctgcctggatccccttagttttgaaatatttgccattgttgtttaaatacctatcactgtggtagagcttgcattgatcttttccacaagtattaaactgccaaaatgtgaatatgcaaagcctttctgaatctataataatggtacttctactggggagagtgtaatattttggactgctgttttccattaatgaggagagcaacaggcccctgattatacagttccaaagtaataagatgttaattgtaattcagccagaaagtacatgtctcccattgggaggatttggtgttaaataccaaactgctagccctagtattatggagatgaacatgatgatgtaacttgtaatagcagaatagttaatgaatgaaactagttcttataatttatctttatttaaaagcttagcctgccttaaaactagagatcaactttctcagctgcaaaagcttctagtctttcaagaagttcatactttatgaaattgcacagtaagcatttatttttcagaccatttttgaacatcactcctaaattaataaagtattcctctgttgctttagtatttattacaataaaaagggtttgaaatatagctgttctttatgcataaaacacccagctaggaccattactgccagagaaaaaaatcgtattgaatggccatttccctacttataagatgtctcaatctgaatttatttggctacactaaagaatgcagtatatttagttttccatttgcatgatgtttgtgtgctatagatgatattttaaattgaaaagtttgttttaaattatttttacagtgaagactgttttcagctctttttatattgtacatagtcttttatgtaatttactggcatatgttttgtagactgtttaatgactggatatcttccttcaacttttgaaatacaaaaccagtgttttttacttgtacactgttttaaagtctattaaaattgtcatttgacttttttctgttaactt

SEQ ID NO: 659 - DNA, 1497 bp, Homo sapiens
  source 1..1497: mol_type = genomic DNA
aggatgtcggtgaattacgcggcggggctgtcgccgtacgcggacaagggcaagtgcggcctcccggagatcttcgaccccccggaggagctggagcggaaggtgtgggaactggcgaggctggtctggcagtcttccagtgtggtgttccacacgggtgccggcatcagcactgcctctggcatccccgacttcaggggtccccacggagtctggaccatggaggagcgaggtctggcccccaagttcgacaccacctttgagagcgcgcggcccacgcagacccacatggcgctggtgcagctggagcgcgtgggcctcctccgcttcctggtcagccagaacgtggacgggctccatgtgcgctcaggcttccccagggacaaactggcagagctccacgggaacatgtttgtggaagaatgtgccaagtgtaagacgcagtacgtccgagacacagtcgtgggcaccatgggcctgaaggccacgggccggctctgcaccgtggctaaggcaagggggctgcgagcctgcaggaacgccgacctgtccatcacgctgggtacatcgctgcagatccggcccagcgggaacctgccgctggctaccaagcgccggggaggccgcctggtcatcgtcaacctgcagcccaccaagcacgaccgccatgctgacctccgcatccatggctacgttgacgaggtcatgacccggctcatgaagcacctggggctggagatccccgcctgggacggcccccgtgtgctggagagggcgctgccacccctgccccgcccgcccacccccaagctggagcccaaggaggaatctcccacccggatcaacggctctatccccgccggccccaagcaggagccctgcgcccagcacaacggctcagagcccgccagccccaaacgggagcggcccaccagccctgccccccacagaccccccaaaagggtgaaggccaaggcggtccccagctgaccagggtgcttggggagggtggggctttttgtagaaactgtggattctttttctctcgtggtctcactttgttacttgtttctgtccccgggagcctcagggctctgagagctgtgctccaggccaggggttacacctgccctccgtggtccctccctgggctccaggggcctctggtgcggttccgggaagaagccacaccccagaggtgacaggtgagcccctgccacaccccagcctctgacttgctgtgttgtccagaggtgaggctgggccctccctggtctccagcttaaacaggagtgaactccctctgtccccagggcctcccttctgggccccctacagcccaccctacccctcctccatgggccctgcaggaggggagacccaccttgaagtgggggatcagtagaggcttgcactgcctttggggctggagggagacgtgggtccaccaggcttctggaaaagtcctcaatgcaataaaaacaatttctttcttgc

SEQ ID NO: 660 - DNA, 1636 bp, Homo sapiens
  source 1..1636: mol_type = genomic DNA
gcttccggcggaagcggcctcaacaagggaaactttattgttcccgtggggcagtcgaggatgtcggtgaattacgcggcggggctgtcgccgtacgcggacaagggcaagtgcggcctcccggagatcttcgaccccccggaggagctggagcggaaggtgtgggaactggcgaggctggtctggcagtcttccagtgtggtgttccacacgggtgccggcatcagcactgcctctggcatccccgacttcaggggtccccacggagtctggaccatggaggagcgaggtctggcccccaagttcgacaccacctttgagagcgcgcggcccacgcagacccacatggcgctggtgcagctggagcgcgtgggcctcctccgcttcctggtcagccagaacgtggacgggctccatgtgcgctcaggcttccccagggacaaactggcagagctccacgggaacatgtttgtggaagaatgtgccaagtgtaagacgcagtacgtccgagacacagtcgtgggcaccatgggcctgaaggccacgggccggctctgcaccgtggctaaggcaagggggctgcgagcctgcaggggagagctgagggacaccatcctagactgggaggactccctgcccgaccgggacctggcactcgccgatgaggccagcaggaacgccgacctgtccatcacgctgggtacatcgctgcagatccggcccagcgggaacctgccgctggctaccaagcgccggggaggccgcctggtcatcgtcaacctgcagcccaccaagcacgaccgccatgctgacctccgcatccatggctacgttgacgaggtcatgacccggctcatgaagcacctggggctggagatccccgcctgggacggcccccgtgtgctggagagggcgctgccacccctgccccgcccgcccacccccaagctggagcccaaggaggaatctcccacccggatcaacggctctatccccgccggccccaagcaggagccctgcgcccagcacaacggctcagagcccgccagccccaaacgggagcggcccaccagccctgccccccacagaccccccaaaagggtgaaggccaaggcggtccccagctgaccagggtgcttggggagggtggggctttttgtagaaactgtggattctttttctctcgtggtctcactttgttacttgtttctgtccccgggagcctcagggctctgagagctgtgctccaggccaggggttacacctgccctccgtggtccctccctgggctccaggggcctctggtgcggttccgggaagaagccacaccccagaggtgacaggtgagcccctgccacaccccagcctctgacttgctgtgttgtccagaggtgaggctgggccctccctggtctccagcttaaacaggagtgaactccctctgtccccagggcctcccttctgggccccctacagcccaccctacccctcctccatgggccctgcaggaggggagacccaccttgaagtgggggatcagtagaggcttgcactgcctttggggctggagggagacgtgggtccaccaggcttctggaaaagtcctcaatgcaataaaaacaatttctttcttgca

SEQ ID NO: 661 - DNA, 1473 bp, Homo sapiens
  source 1..1473: mol_type = genomic DNA
ttattgttcccgtggggcagtcgaggatgtcggtgaattacgcggcggggctgtcgccgtacgcggacaagggcaagtgcggcctcccggaggggtccccacggagtctggaccatggaggagcgaggtctggcccccaagttcgacaccacctttgagagcgcgcggcccacgcagacccacatggcgctggtgcagctggagcgcgtgggcctcctccgcttcctggtcagccagaacgtggacgggctccatgtgcgctcaggcttccccagggacaaactggcagagctccacgggaacatgtttgtggaagaatgtgccaagtgtaagacgcagtacgtccgagacacagtcgtgggcaccatgggcctgaaggccacgggccggctctgcaccgtggctaaggcaagggggctgcgagcctgcaggggagagctgagggacaccatcctagactgggaggactccctgcccgaccgggacctggcactcgccgatgaggccagcaggaacgccgacctgtccatcacgctgggtacatcgctgcagatccggcccagcgggaacctgccgctggctaccaagcgccggggaggccgcctggtcatcgtcaacctgcagcccaccaagcacgaccgccatgctgacctccgcatccatggctacgttgacgaggtcatgacccggctcatgaagcacctggggctggagatccccgcctgggacggcccccgtgtgctggagagggcgctgccacccctgccccgcccgcccacccccaagctggagcccaaggaggaatctcccacccggatcaacggctctatccccgccggccccaagcaggagccctgcgcccagcacaacggctcagagcccgccagccccaaacgggagcggcccaccagccctgccccccacagaccccccaaaagggtgaaggccaaggcggtccccagctgaccagggtgcttggggagggtggggctttttgtagaaactgtggattctttttctctcgtggtctcactttgttacttgtttctgtccccgggagcctcagggctctgagagctgtgctccaggccaggggttacacctgccctccgtggtccctccctgggctccaggggcctctggtgcggttccgggaagaagccacaccccagaggtgacaggtgagcccctgccacaccccagcctctgacttgctgtgttgtccagaggtgaggctgggccctccctggtctccagcttaaacaggagtgaactccctctgtccccagggcctcccttctgggccccctacagcccaccctacccctcctccatgggccctgcaggaggggagacccaccttgaagtgggggatcagtagaggcttgcactgcctttggggctggagggagacgtgggtccaccaggcttctggaaaagtcctcaatgcaataaaaacaatttctttcttgc

SEQ ID NO: 662 - DNA, 3210 bp, Homo sapiens
  source 1..3210: mol_type = genomic DNA
aataaacaggcaggagctagtcaggtgcatgtgccacactcacacaagacctggaattgacaggactcccaactagtacaatgacagaagataaggtcactgggaccctggttttcactgtcatcactgctgtgctgggttccttccagtttggatatgacattggtgtgatcaatgcacctcaacaggtaataatatctcactatagacatgttttgggtgttccactggatgaccgaaaagctatcaacaactatgttatcaacagtacagatgaactgcccacaatctcatactcaatgaacccaaaaccaaccccttgggctgaggaagagactgtggcagctgctcaactaatcaccatgctctggtccctgtctgtatccagctttgcagttggtggaatgactgcatcattctttggtgggtggcttggggacacacttggaagaatcaaagccatgttagtagcaaacattctgtcattagttggagctctcttgatggggttttcaaaattgggaccatctcatatacttataattgctggaagaagcatatcaggactatattgtgggctaatttcaggcctggttcctatgtatatcggtgaaattgctccaaccgctctcaggggagcacttggcacttttcatcagctggccatcgtcacgggcattcttattagtcagattattggtcttgaatttatcttgggcaattatgatctgtggcacatcctgcttggcctgtctggtgtgcgagccatccttcagtctctgctactctttttctgtccagaaagccccagatacctttacatcaagttagatgaggaagtcaaagcaaaacaaagcttgaaaagactcagaggatatgatgatgtcaccaaagatattaatgaaatgagaaaagaaagagaagaagcatcgagtgagcagaaagtctctataattcagctcttcaccaattccagctaccgacagcctattctagtggcactgatgctgcatgtggctcagcaattttccggaatcaatggcattttttactactcaaccagcatttttcagacggctggtatcagcaaacctgtttatgcaaccattggagttggcgctgtaaacatggttttcactgctgtctctgtattccttgtggagaaggcagggcgacgttctctctttctaattggaatgagtgggatgtttgtttgtgccatcttcatgtcagtgggacttgtgctgctgaataagttctcttggatgagttatgtgagcatgatagccatcttcctctttgtcagcttctttgaaattgggccaggcccgatcccctggttcatggtggctgagtttttcagtcaaggaccacgtcctgctgctttagcaatagctgcattcagcaattggacctgcaatttcattgtagctctgtgtttccagtacattgcggacttctgtggaccttatgtgtttttcctctttgctggagtgctcctggcctttaccctgttcacattttttaaagttccagaaaccaaaggaaagtcttttgaggaaattgctgcagaattccaaaagaagagtggctcagcccacaggccaaaagctgctgtagaaatgaaattcctaggagctacagagactgtgtaaaaaaaaaaccctgctttttgacatgaacagaaacaataagggaaccgtctgtttttaaatgatgattccttgagcattttatatccacatctttaagtattgttttatttttatgtgctctcatcagaaatgtcatcaaatattaccaaaaaagtatttttttaagttagagaatatatttttgatggtaagactgtaattaagtaaaccaaaaaggctagtttattttgttacactaaagggcaggtggttctaatatttttagctctgttctttataacaaggttcttctaaaattgaagagatttcaacatatcatttttttaacacataactagaaacctgaggatgcaacaaatatttatatatttgaatatcattaaattggaattttcttacccatatatcttatgttaaaggagatatggctagtggcaataagttccatgttaaaatagacaactcttccatttattgcactcagcttttttcttgagtactagaatttgtattttgcttaaaattttacttttgttctgtattttcatgtggaatggattatagagtatactaaaaaatgtctatagagaaaaactttcatttttggtaggcttatcaaaatctttcagcactcagaaaagaaaaccattttagttcctttatttaatggccaaatggtttttgcaagatttaacactaaaaaggtttcacctgatcatatagcgtgggttatcagttaacattaacatctattataaaaccatgttgattcccttctggtacaatcctttgagttatagtttgctttgctttttaattgaggacagcctggttttcacatacactcaaacaatcatgagtcagacatttggtatattacctcaaattcctaataagtttgatcaaatctaatgtaagaaaatttgaagtaaaggattgatcactttgttaaaaatattttctgaattattatgtctcaaaataagttgaaaaggtagggtttgaggattcctgagtgtgggcttctgaaacttcataaatgttcagcttcagacttttatcaaaatccctatttaattttcctggaaagactgattgttttatggtgtgttcctaacataaaataatcgtctcctttgacatttccttctttgtcttagctgtatacagattctagccaaactattctatggccattactaacacgcattgtacactatctatctgcctttacctacataggcaaattggaaatacacagatgattaaacagactttagcttacagtcaattttacaattatggaaatatagttctgatgggtcccaaaagcttagcagggtgctaacgtatctctaggctgttttctccaccaactggagcactgatcaatccttcttatgtttgctttaatgtgtattgaagaaaagcactttttaaaaagtactctttaagagtgaaataattaaaaaccactgaacatttgctttgttttctaaagttgttcacatatatgtaatttagcagtccaaagaacaagaaattgtttcttttc

SEQ ID NO: 663 - DNA, 1533 bp, Homo sapiens
  source 1..1533: mol_type = genomic DNA
aggcaggagctagtcaggtgcatgtgccacactcacacaagacctggaattgacaggactcccaactagtacaatgacagaagataaggtcactgggaccctggttttcactgtcatcactgctgtgctgggttccttccagtttggatatgacattggtgtgatcaatgcacctcaacagaatcaaagccatgttagtagcaaacattctgtcattagttggagctctcttgatggggttttcaaaattgggaccatctcatatacttataattgctggaagaagcatatcaggactatattgtgggctaatttcaggcctggttcctatgtatatcggtgaaattgctccaaccgctctcaggggagcacttggcacttttcatcagctggccatcgtcacgggcattcttattagtcagattattggtcttgaatttatcttgggcaattatgatctgtggcacatcctgcttggcctgtctggtgtgcgagccatccttcagtctctgctactctttttctgtccagaaagccccagatacctttacatcaagttagatgaggaagtcaaagcaaaacaaagcttgaaaagactcagaggatatgatgatgtcaccaaagatattaatgaaatgagaaaagaaagagaagaagcatcgagtgagcagaaagtctctataattcagctcttcaccaattccagctaccgacagcctattctagtggcactgatgctgcatgtggctcagcaattttccggaatcaatggcattttttactactcaaccagcatttttcagacggctggtatcagcaaacctgtttatgcaaccattggagttggcgctgtaaacatggttttcactgctgtctctgtattccttgtggagaaggcagggcgacgttctctctttctaattggaatgagtgggatgtttgtttgtgccatcttcatgtcagtgggacttgtgctgctgaataagttctcttggatgagttatgtgagcatgatagccatcttcctctttgtcagcttctttgaaattgggccaggcccgatcccctggttcatggtggctgagtttttcagtcaaggaccacgtcctgctgctttagcaatagctgcattcagcaattggacctgcaatttcattgtagctctgtgtttccagtacattgcggacttctgtggaccttatgtgtttttcctctttgctggagtgctcctggcctttaccctgttcacattttttaaagttccagaaaccaaaggaaagtcttttgaggaaattgctgcagaattccaaaagaagagtggctcagcccacaggccaaaagctgctgtagaaatgaaattcctaggagctacagagactgtgtaaaaaaaaaaccctgctttttgacatgaacagaaacaataagggaaccgtctgtttttaaatgatgattccttgagcattttatatccacatctttaagtattgttttatttttatgtgctctcatcagaaatgtcatcaaatattacca

SEQ ID NO: 664 - DNA, 2811 bp, Homo sapiens
  source 1..2811: mol_type = genomic DNA
ctattcgggctcccgcctctgttcagttccagagacaattcatgggtcttggggccaccgaggcgctgtccctgaccaccagcacgagacccctttctatcgcgccagtcctgtggtctccgcacctctccagctcctgcacccccggcccccgtggttcccagccgcacagtagcgtgtcctgggtagcgtgaggacccacggggctgggcaggtgccacgagcccgccgcctcttcgccgcccgccgcctctcctcctctcccgcccgccgcctggccctcccctaccaggctgagcctctgggtgccagaagcgcggggcctccgggagaatacgtgcggtcgcccgctccgcgtgcgcctacgccttctgctccagttgctttcccaattgagcggaaaagccggggcatgttgccggggccctgggcgggacggttgtgccctgcagcccgaagcccgccggggcaccttcccgcccacgagctgcccagtccctctgcttgcggcccctgccaacgtcccacaggacactgggtccccttggagcctccccaggcttaatgattgtccagaaggcggctataaagggagcctgggaggctgggtggaggagggagcagaaaaaacccaactcagcagatctgggaactgtgagagcggcaagcaggaactgtggtcagaggctgtgcgtcttggctggtagggcctgctcttttctaccatggcagcccagggctatggctattatcgcactgtgatcttctcagccatgtttgggggctacagcctgtattacttcaatcgcaagaccttctcctttgtcatgccatcattggtggaagagatccctttggacaaggatgatttggggttcatcaccagcagccagtcggcagcttatgctatcagcaagtttgtcagtggggtgctgtctgaccagatgagtgctcgctggctcttctcttctgggctgctcctggttggcctggtcaacatattctttgcctggagctccacagtacctgtctttgctgccctctggttccttaatggcctggcccaggggctgggctggcccccatgtgggaaggtcctgcggaagtggtttgagccatctcagtttggcacttggtgggccatcctgtcaaccagcatgaacctggctggagggctgggccctatcctggcaaccatccttgcccagagctacagctggcgcagcacgctggccctatctggggcactgtgtgtggttgtctccttcctctgtctcctgctcatccacaatgaacctgctgatgttggactccgcaacctggaccccatgccctctgagggcaagaagggctccttgaaggaggagagcaccctgcaggagctgctgctgtccccttacctgtgggtgctctccactggttaccttgtggtgtttggagtaaagacctgctgtactgactggggccagttcttccttatccaggagaaaggacagtcagcccttgtaggtagctcctacatgagtgccctggaagttgggggccttgtaggcagcatcgcagctggctacctgtcagaccgggccatggcaaaggcgggactgtccaactacgggaaccctcgccatggcctgttgctgttcatgatggctggcatgacagtgtccatgtacctcttccgggtaacagtgaccagtgactcccccaagctctggatcctggtattgggagctgtatttggtttctcctcgtatggccccattgccctgtttggagtcatagccaacgagagtgcccctcccaacttgtgtggcacctcccacgccattgtgggactcatggccaatgtgggcggctttctggctgggctgcccttcagcaccattgccaagcactacagttggagcacagccttctgggtggctgaagtgatttgtgcggccagcacggctgccttcttcctcctacgaaacatccgcaccaagatgggccgagtgtccaagaaggctgagtgaagagagtccaggttccggagcaccatcccacggtggccttccccctgcacgctctgcggggagaaaaggaggggcctgcctggctagccctgaacctttcactttccatttctgcgccttttctgtcacccgggtggcgctggaagttatcagtggctagtgaggtcccagctccctgatcctatgctctatttaaaagataacctttggccttagactccgttagctcctatttcctgccttcagacaaacaggaaacttctgcagtcaggaaggctcctgtacccttcttcttttcctaggccctgtcctgcccgcatcctaccccatccccacctgaagtgaggctatccctgcagctgcagggcactaatgacccttgacttctgctgggtcctaagtcctctcagcagtgggtgactgctgttgccaatacctcagactccagggaaagagaggaggccatcattctcactgtaccactaggcgcagttggatataggtgggaagaaaaggtgacttgttatagaagattaaaactagatttgatactgaacactgtcagtgattcattttttcaaagtgagacagcttccttgggaaatattgtcaatacctgctctttccaccccaaaatggaaagacttcatttccctggaatggggaagctgaagtgtagatggactcctttaaaactcatgcctcctctgccttcacctgaacattgaatagttcaatgattattttagagataaagctattgggttgtggacagattaaataacttgatggaggg

SEQ ID NO: 665 - DNA, 1779 bp, Homo sapiens
  source 1..1779: mol_type = genomic DNA
agccccgccccgtcctattcgggctcccgcctctgttcagttccagagacaattcatgggtcttggggccaccgaggcgctgtccctgaccaccagcacgagacccctttctatcgcgccagtcctgtggtctccgcacctctccagctcctgcacccccggcccccgtggttcccagccgcacagtagcgtgtcctgggtagcgtgaggacccacggggctgggcaggacactgggtccccttggagcctccccaggcttaatgattgtccagaaggcggctataaagggagcctgggaggctgggtggaggagggagcagaaaaaacccaactcagcagatctgggaactgtgagagcggcaagcaggaactgtggtcagaggctgtgcgtcttggctggtagggcctgctcttttctaccatggcagcccagggctatggctattatcgcactgtgatcttctcagccatgtttgggggctacagcctgtattacttcaatcgcaagaccttctcctttgtcatgccatcattggtggaagagatccctttggacaaggatgatttggggttcatcaccagcagccagtcggcagcttatgctatcagcaagtttgtcagtggggtgctgtctgaccagatgagtgctcgctggctcttctcttctgggctgctcctggttggcctggtcaacatattctttgcctggagctccacagtacctgtctttgctgccctctggttccttaatggcctggcccaggggctgggctggcccccatgtgggaaggtcctgcggaagtggtttgagccatctcagtttggcacttggtgggccatcctgtcaaccagcatgaacctggctggagggctgggccctatcctggcaaccatccttgcccagagctacagctggcgcagcacgctggccctatctggggcactgtgtgtggttgtctccttcctctgtctcctgctcatccacaatgaacctgctgatgttggactccgcaacctggaccccatgccctctgagggcaagaagggctccttgaaggaggagagcaccctgcaggagctgctgctgtccccttacctgtgggtgctctccactggttaccttgtggtgtttggagtaaagacctgctgtactgactggggccagttcttccttatccaggagaaaggacagtcagcccttgtaggtagctcctacatgagtgccctggaagttgggggccttgtaggcagcatcgcagctggctacctgtcagaccgggccatggcaaaggcgggactgtccaactacgggaaccctcgccatggcctgttgctgttcatgatggctggcatgacagtgtccatgtacctcttccgggtaacagtgaccagtgactcccccaaggatgttgctttctggactctggctcttcaccctctcgcggagctcacaggctttacagagcatgagctctggatcctggtattgggagctgtatttggtttctcctcgtatggccccattgccctgtttggagtcatagccaacgagagtgcccctcccaacttgtgtggcacctcccacgccattgtgggactcatggccaatgtgggcggctttctggctgggctgcccttcagcaccattgccaagcactacagttggagcacagccttctgggtggctgaagtgatttgtgcggccagcacggctgccttcttcctcctacgaaacatccgcaccaagatgggccgagtgtccaagaaggctgagtga

SEQ ID NO: 666 - DNA, 3442 bp, Homo sapiens
  source 1..3442: mol_type = genomic DNA
gggacgcccgggcggccctgaaggggacggggcggccccagtcggaggtcgcagggagctccgcccccgactcggtataagagctgggcccggcccacggcggcggcggcggcggcggagagagctggctcagggcgtccgctaggctcggacgacctgctgagcctcccaaaccgcttccataaggctttgcctttccaacttcagctacagtgttagctaagtttggaaagaaggaaaaaagaaaatccctgggccccttttcttttgttctttgccaaagtcgtcgttgtagtctttttgcccaaggctgttgtgtttttagaggtgctatctccagttccttgcactcctgttaacaagcacctcagcgagagcagcagcagcgatagcagccgcagaagagccagcggggtcgcctagtgtcatgaccagggcgggagatcacaaccgccagagaggatgctgtggatccttggccgactacctgacctctgcaaaattccttctctaccttggtcattctctctctacttggggagatcggatgtggcactttgcggtgtctgtgtttctggtagagctctatggaaacagcctccttttgacagcagtctacgggctggtggtggcagggtctgttctggtcctgggagccatcatcggtgactgggtggacaagaatgctagacttaaagtggcccagacctcgctggtggtacagaatgtttcagtcatcctgtgtggaatcatcctgatgatggttttcttacataaacatgagcttctgaccatgtaccatggatgggttctcacttcctgctatatcctgatcatcactattgcaaatattgcaaatttggccagtactgctactgcaatcacaatccaaagggattggattgttgttgttgcaggagaagacagaagcaaactagcaaatatgaatgccacaatacgaaggattgaccagttaaccaacatcttagcccccatggctgttggccagattatgacatttggctccccagtcatcggctgtggctttatttcgggatggaacttggtatccatgtgcgtggagtacgttctgctctggaaggtttaccagaaaaccccagctctagctgtgaaagctggtcttaaagaagaggaaactgaattgaaacagctgaatttacacaaagatactgagccaaaacccctggagggaactcatctaatgggtgtgaaagactctaacatccatgagcttgaacatgagcaagagcctacttgtgcctcccagatggctgagcccttccgtaccttccgagatggatgggtctcctactacaaccagcctgtgtttctggctggcatgggtcttgctttcctttatatgactgtcctgggctttgactgcatcaccacagggtacgcctacactcagggactgagtggttccatcctcagtattttgatgggagcatcagctataactggaataatgggaactgtagcttttacttggctacgtcgaaaatgtggtttggttcggacaggtctgatctcaggattggcacagctttcctgtttgatcttgtgtgtgatctctgtattcatgcctggaagccccctggacttgtccgtttctccttttgaagatatccgatcaaggttcattcaaggagagtcaattacacctaccaagatacctgaaattacaactgaaatatacatgtctaatgggtctaattctgctaatattgtcccggagacaagtcctgaatctgtgcccataatctctgtcagtctgctgtttgcaggcgtcattgctgctagaatcggtctttggtcctttgatttaactgtgacacagttgctgcaagaaaatgtaattgaatctgaaagaggcattataaatggtgtacagaactccatgaactatcttcttgatcttctgcatttcatcatggtcatcctggctccaaatcctgaagcttttggcttgctcgtattgatttcagtctcctttgtggcaatgggccacattatgtatttccgatttgcccaaaatactctgggaaacaagctctttgcttgcggtcctgatgcaaaagaagttaggaaggaaaatcaagcaaatacatctgttgtttgagacagtttaactgttgctatcctgttactagattatatagagcacatgtgcttattttgtactgcagaattccaataaatggctgggtgttttgctctgtttttaccacagctgtgccttgagaactaaaagctgtttaggaaacctaagtcagcagaaattaactgattaatttcccttatgttgaggcatggaaaaaaaattggaaaagaaaaactcagtttaaatacggagactataatgataacactgaattcccctatttctcatgagtagatacaatcttacgtaaaagagtggttagtcacgtgaattcagttatcatttgacagattcttatctgtactagaattcagatatgtcagttttctgcaaaactcactcttgttcaagactagctaatttatttttttgcatcttagttatttttaaaaacaaattcttcaagtatgaagactaaattttgataactaatattatccttattgatcctattgatcttaaggtatttacatgtatgtggaaaaacaaaacacttaactagaattctctaataaggtttatggtttagcttaaagagcacctttgtatttttattatcagatggggcaacatattgtatgaagcatatgtagcacttcacagcatggttatcatgtaagctgcaggtagaagcaaagctgtaaagtagatttatcacacaatgactgcatacagacttcaaatatgtcaatagtttggtcatagaacctagaagccaaaagccacacagaagggcaagaatcccaatttaactcatgttatcatcattagtgatctgtgttgtagaacatgagggtgtaagccttcagcctggcaagttacatgtagaaagcccacacttgtgaaggttttgttttacaaatcacttgatttaacacactcaggtagaatatttttatttttactgttttatacccagaagttatttctacattgttctacagcaagaatattcataaaagtatccctttcaaatgcctttgagaagaatagaagaaaaaaagtttgtatatattttaaaaaattgttttaaaagtcagtttgcaacatgtctgtaccaagatggtactttgccttaaccgtttatatgcactttcatggagactgcaatacgttgctatgagcactttctttatccttggagtttaatcctttgcttcatctttctacagtatgacataatgatttgctatgttgtaaaatctttgtaaaaaatttctatataaaaatattttgaaaatcttaatttttcctgaa

SEQ ID NO: 667 - DNA, 824 bp, Homo sapiens
  source 1..824: mol_type = genomic DNA
aatgagagccagcattcataagaaacttcgcaagagcagtggaatagtgaccattctttattctgcctttgtcctggtgagcacatctgatatggcagaggaaactgaggatgcctggccgaggtgctatctccagttccttgcactcctgttaacaagcacctcagcgagagcagcagcagcgatagcagccgcagaagagccagcggggtcgcctagtgtcatgaccagggcgggagatcacaaccgccagagaggatgctgtggatccttggccgactacctgacctctgcaaaattccttctctaccttggtcattctctctctacttggggagatcggatgtggcactttgcggtgtctgtgtttctggtagagctctatggaaacagcctccttttgacagcagtctacgggctggtggtggcagggtctgttctggtcctgggagccatcatcggtgactgggtggacaagaatgctagacttaaagtggcccagacctcgctggtggtacagaatgtttcagtcatcctgtgtggaatcatcctgatgatggttttcttacataaacatgagcttctgaccatgtaccatggatgggttctcacttcctgctatatcctgatcatcactattgcaaatattgcaaatttggccagtactgctactgcaatcacaatccaaagggattggattgttgttgttgcaggagaagacagaagcaaactagcaaatatgaatgccacaatacgaaggattgaccagttaaccaacatcttagcccccatggctgttggccagattatgacatttggctccc

SEQ ID NO: 668 - DNA, 299 bp, Homo sapiens
  source 1..299: mol_type = genomic DNA
atactcatgcgtggctcccttcactactgggtgtcagtctggcctgtgctcaaggtgtggcatctggttggagtttcaatatgtaggatccactaccagggttttcgtgagattaagaaggaggtgctatctccagttccttgcactcctgttaacaagcacctcagcgagagcagcagcagcgatagcagccgcagaagagccagcggggtcgcctagtgtcatgaccagggcgggagatcacaaccgccagagaggatgctgtggatccttggccgactacctgacctctgcaaaat

SEQ ID NO: 669 - DNA, 209 bp, Homo sapiens
  source 1..209: mol_type = genomic DNA
attctttattctgcctttgtcctggtgagcacatctgatatggcagaggaaactgaggatgcctggccgcacctcagcgagagcagcagcagcgatagcagccgcagaagagccagcggggtcgcctagtgtcatgaccagggcgggagatcacaaccgccagagaggatgctgtggatccttggccgactacctgacctctgcaaaat

SEQ ID NO: 670 - DNA, 592 bp, Homo sapiens
  source 1..592: mol_type = genomic DNA
acagggcacatactcatgcgtggctcccttcactactgggtgtcagtctggcctgtgctcaaggtgtggcatctggttggagtttcaatatgtaggatccactaccagggttttcgtgagattaagaagggtaaggtaacctactggcaaaaggggctggtatgccccaggggttggtttggcacagcaggattaaaacgaagtcaaccaaggctagagtctggtgttctttagtcattcacctcaccctccaggaggccaccgaatggctttatctggacagggacagatccagggacacaactgggataaccggtattcctgaggtgctatctccagttccttgcactcctgttaacaagcacctcagcgagagcagcagcagcgatagcagccgcagaagagccagcggggtcgcctagtgtcatgaccagggcgggagatcacaaccgccagagaggatgctgtggatccttggccgactacctgacctctgcaaaattccttctctaccttggtcattctctctctacttggggagatcggatgtggcactttgcggtgtctgtgtttctggtagagctctatggaa

SEQ ID NO: 671 - DNA, 2368 bp, Homo sapiens
  source 1..2368: mol_type = genomic DNA
atgagagccagcattcataagaaacttcgcaagagcagtggaatagtgaccattctttattctgcctttgtcctggtgagcacatctgatatggcagaggaaactgaggatgcctggccgaggtgctatctccagttccttgcactcctgttaacaagcacctcagcgagagcagcagcagcgatagcagccgcagaagagccagcggggtcgcctagtgtcatgaccagggcgggagatcacaaccgccagagaggatgctgtggatccttggccgactacctgacctctgcaaaattccttctctaccttggtcattctctctctacttggggagatcggatgtggcactttgcggtgtctgtgtttctggtagagctctatggaaacagcctccttttgacagcagtctacgggctggtggtggcagggtctgttctggtcctgggagccatcatcggtgactgggtggacaagaatgctagacttaaagtggcccagacctcgctggtggtacagaatgtttcagtcatcctgtgtggaatcatcctgatgatggttttcttacataaacatgagcttctgaccatgtaccatggatgggttctcacttcctgctatatcctgatcatcactattgcaaatattgcaaatttggccagtactgctactgcaatcacaatccaaagggattggattgttgttgttgcaggagaagacagaagcaaactagcaaatatgaatgccacaatacgaaggattgaccagttaaccaacatcttagcccccatggctgttggccagattatgacatttggctccccagtcatcggctgtggctttatttcgggatggaacttggtatccatgtgcgtggagtacgttctgctctggaaggtttaccagaaaaccccagctctagctgtgaaagctggtcttaaagaagaggaaactgaattgaaacagctgaatttacacaaagatactgagccaaaacccctggagggaactcatctaatgggtgtgaaagactctaacatccatgagcttgaacatgagcaagagcctacttgtgcctcccagatggctgagcccttccgtaccttccgagatggatgggtctcctactacaaccagcctgtgtttctggctggcatgggtcttgctttcctttatatgactgtcctgggctttgactgcatcaccacagggtacgcctacactcagggactgagtggttccatcctcagtattttgatgggagcatcagctataactggaataatgggaactgtagcttttacttggctacgtcgaaaatgtggtttggttcggacaggtctgatctcaggattggcacagctttcctgtttgatcttgtgtgtgatctctgtattcatgcctggaagccccctggacttgtccgtttctccttttgaagatatccgatcaaggttcattcaaggagagtcaattacacctaccaagatacctgaaattacaactgaaatatacatgtctaatgggtctaattctgctaatattgtcccggagacaagtcctgaatctgtgcccataatctctgtcagtctgctgtttgcaggcgtcattgctgctagaatcggtctttggtcctttgatttaactgtgacacagttgctgcaagaaaatgtaattgaatctgaaagaggcattataaatggtgtacagaactccatgaactatcttcttgatcttctgcatttcatcatggtcatcctggctccaaatcctgaagcttttggcttgctcgtattgatttcagtctcctttgtggcaatgggccacattatgtatttccgatttgcccaaaatactctgggaaacaagctctttgcttgcggtcctgatgcaaaagaagttaggaaggaaaatcaagcaaatacatctgttgtttgagacagtttaactgttgctatcctgttactagattatatagagcacatgtgcttattttgtactgcagaattccaataaatggctgggtgttttgctctgtttttaccacagctgtgccttgagaactaaaagctgtttaggaaacctaagtcagcagaaattaactgattaatttcccttatgttgaggcatggaaaaaaaattggaaaagaaaaactcagtttaaatacggagactataatgataacactgaattcccctatttctcatgagtagatacaatcttacgtaaaagagtggttagtcacgtgaattcagttatcatttgacagattcttatctgtactagaattcagatatgtcagttttctgcaaaactcactcttgttcaagactagctaatttatttttttgcatcttagttattttt

SEQ ID NO: 672 - DNA, 2286 bp, Homo sapiens
  source 1..2286: mol_type = genomic DNA
cttaaagaagaggaaactgaattgaaacagctgaatttacacaaagatactgagccaaaacccctggagggaactcatctaatgggtgtgaaagactctaacatccatgagcttgaacatgagcaagagcctacttgtgcctcccagatggctgagcccttccgtaccttccgagatggatgggtctcctactacaaccagcctgtgtttctggctggcatgggtcttgctttcctttatatgactgtcctgggctttgactgcatcaccacagggtacgcctacactcagggactgagtggttccatcctcagtattttgatgggagcatcagctataactggaataatgggaactgtagcttttacttggctacgtcgaaaatgtggtttggttcggacaggtctgatctcaggattggcacagctttcctgtttgatcttgtgtgtgatctctgtattcatgcctggaagccccctggacttgtccgtttctccttttgaagatatccgatcaaggttcattcaaggagagtcaattacacctaccaagatacctgaaattacaactgaaatacatgtctaatgggtctaattctgctaatattgtcccggagacaagtcctgaatctgtgcccataatctctgtcagtctgctgtttgcaggcgtcattgctgctagaatcggtctttggtcctttgatttaactgtgacacagttgctgcaagaaaatgtaattgaatctgaaagaggcattataaatggtgtacagaactccatgaactatcttcttgatcttctgcatttcatcatggtcatcctggctccaaatcctgaagcttttggcttgctcgtattgatttcagtctcctttgtggcaatgggccacattatgtatttccgatttgcccaaaatactctgggaaacaagctctttgcttgcggtcctgatgcaaaagaagttaggaaggaaaatcaagcaaatacatctgttgtttgagacagtttaactgttgctatcctgttactagattatatagagcacatgtgcttattttgtactgcagaattccaataaatggctgggtgttttgctctgtttttaccacagctgtgccttgagaactaaaagctgtttaggaaacctaagtcagcagaaattaactgattaatttcccttatgttgaggcatggaaaaaaaattggaaaagaaaaactcagtttaaatacggagactataatgataacactgaattcccctatttctcatgagtagatacaatcttacgtaaaagagtggttagtcacgtgaattcagttatcatttgacagattcttatctgtactagaattcagatatgtcagttttctgcaaaactcactcttgttcaagactagctaatttatttttttgcatcttagttatttttaaaaacaaattcttcaagtatgaagactaaattttgataactaatattatccttattgatcctattgatcttaaggtatttacatgtatgtggaaaaacaaaacacttaactagaattctctaataaggtttatggtttagcttaaagagcacctttgtatttttattatcagatggggcaacatattgtatgaagcatatgtagcacttcacagcatggttatcatgtaagctgcaggtagaagcaaagctgtaaagtagatttatcacacaatgactgcatacagacttcaaatatgtcaatagtttggtcatagaacctagaagccaaaagccacacagaagggcaagaatcccaatttaactcatgttatcatcattagtgatctgtgttgtagaacatgagggtgtaagccttcagcctggcaagttacatgtagaaagcccacacttgtgaaggttttgttttacaaatcacttgatttaacacactcaggtagaatatttttatttttactgttttatacccagaagttatttctacattgttctacagcaagaatattcataaaagtatccctttcaaatgcctttgagaagaatagaagaaaaaaagtttgtatatattttaaaaaattgttttaaaagtcagtttgcaacatgtctgtaccaagatggtactttgccttaaccgtttatatgcactttcatggagactgcaatacgttgctatgagcactttctttatccttggagtttaatcctttgcttcatctttctacagtatgacataatgatttgctatgttgtaaaatctttgtaaaaaatttctatataaaaatattttgaaaatctt

SEQ ID NO: 673 - DNA, 7028 bp, Homo sapiens
  source 1..7028: mol_type = genomic DNA
ggcgggggtgggcgggcgcgccgggcggcaggtgtcggcgtcggcggcattcggcggcgatggagcggccctggggagctgcggacggcctctcgcgctggccccatggcctcggcctcctcctcctcctgcagctgctgccgccgtcgaccctcagccaggaccggctggacgcgccgccgccgcccgctgcgccgctgccgcgctggtctggccccatcggggtgagctgggggctgcgggcggccgcagccgggggcgcgtttccccgcggcggccgttggcgtcgcagcgcgccgggcgaggacgaggagtgcggccgggtccgggacttcgtcgccaagctggccaacaacacgcaccagcatgtgtttgatgatctcagaggctcagtatccttgtcctgggttggagatagcactggggtcattctagtcttgactaccttccatgtaccactggtaattatgacttttggacagtccaagctatatcgaagtgaggattatgggaagaactttaaggatattacagatctcatcaataacacctttattcggactgaatttggcatggctattggtcctgagaactctggaaaggtggtgttaacagcagaggtgtctggaggaagtcgtggaggaagaatctttagatcatcagattttgcgaagaattttgtgcaaacagatctcccttttcatcctctcactcagatgatgtatagccctcagaattctgattatcttttagctctcagcactgaaaatggcctgtgggtgtccaagaattttgggggaaaatgggaagaaatccacaaagcagtatgtttggccaaatggggatcagacaacaccatcttctttacaacctatgcaaatggctcctgcaaagctgaccttggggctctggaattatggagaacttcagacttgggaaaaagcttcaaaactattggtgtgaaaatctactcatttggtcttgggggacgtttcctttttgcctctgtgatggctgataaggatacaacaagaaggatccacgtttcaacagatcaaggggacacatggagcatggcccagctcccctccgtgggacaggaacagttctattctattctggcagcaaatgatgacatggtattcatgcatgtagatgaacctggagacactgggtttggcacaatctttacctcagatgatcgaggcattgtctattccaagtctttggaccgacatctctacactaccacaggcggagagacggactttaccaacgtgacctccctccgcggcgtctacataacaagcgtgctctccgaagataattctatccagaccatgatcacttttgaccaaggaggaaggtggacgcacctgaggaagcctgaaaacagtgaatgtgatgctacagcaaaaaacaagaatgagtgcagccttcatattcatgcttcctacagcatctcccagaaactgaatgttccaatggccccactctcagagccgaatgccgtaggcattgtcattgctcatggtagcgtgggggatgccatctcagtgatggttccagatgtgtacatctcagatgatgggggttactcctggacaaagatgctggaaggaccccactattacaccatcctggattctggaggcatcattgtggccattgagcacagcagccgtcctatcaatgtgattaagttctccacagacgaaggtcaatgctggcaaacctacacgttcaccagggaccccatctatttcactggcctagcttcagaacctggagctaggtccatgaatatcagcatttggggcttcacagaatctttcctgaccagccagtgggtctcctacaccattgattttaaagatatccttgaaaggaactgtgaagagaaggactataccatatggctggcacactccacagaccctgaagattatgaagatggctgcattttgggctacaaagaacagtttctgcggctacgcaagtcatccgtgtgtcagaatggtcgagactatgttgtgaccaagcagccctccatctgcctctgttccctggaggactttctctgtgattttggctactaccgtccagaaaatgactccaagtgtgtggaacagccagaactgaagggccacgacctggagttttgtctgtacggaagagaagaacacctaacaacaaatgggtaccggaaaattccaggggacaaatgccagggtggggtaaatccagttcgagaagtaaaagacttgaaaaagaaatgcacaagcaactttttgagtccggaaaaacagaattccaagtcaaattctgttccaattatcctggccatcgtgggattgatgctggtcacagtcgtagcaggagtgctcattgtgaagaaatatgtctgtgggggaaggttcctggtgcatcgatactctgtgctgcagcagcatgcagaggccaatggtgtggatggtgtggatgctttggacacagcctcccacactaataaaagtggttatcatgatgactcagatgaggacctcttggaatagctcttcagaggagctggacccagcatggatggtggaaccacagtacctcttacactccctgtggctccaacttcaggaaataaatttcccattgcgagggacccagctctgtttctgctgcttccatcaaagccaaaaggacctacactaaagaaatgcagggtgggggtggggaaccctgagcacttttttacaattggctctgagaaaaagggagacattttaaattctttaacttcttatttctcgtcctgtctctttgcaaagtatgggcttttttgtttttgttttttaagggaaacgaaatggaattcgaagggaccttttcactaaccccacttctgtgtgttctgcatggcgcctgccccagggcatctgccaactccagtatcagctctcacagtgtacttggtaccatccctgggctctgctggcgagacgaaacagctgtagagatgaaaacaggctgcagaggctggcacagcctggccggcttttctccatctggggacagtcctactccaagaacactgcacaccagctcctcacacagatcccacttactctttttttttttttcagagaccacagaccacagtgatttttcttttcccttgtttaattaggcaatacccttgttaattgccctttggcaactaacttaaccatgtgcttcccacacagtacatcaggaaaacttacagggcaatatttttaacttggggcaggaagaagggagcagcagagaattgactagatatagcacctattaaaagagaactcttgcttcttctgagatttttcaagctgtgctttgtgtgtgtgccagtagacttacgcaaggacagggtacaaacttagctggaagtctgcccaggctgaatgatctcttccctagagttgattgtcgggtacacagtgtgaacccccgaagacggaacctcacagtcttccatgttcccttcttaactgtcgtgtggctcgttgctaaatcatgacaatggctgcctatctgctgcttcttaggttgctgttgtacatggaaccaggactagagattttttcagatttatagacttaaaaaattagaattttattaccaggctttccttctcaccccttttttctgactttgccaagtaatttgttgacacgaaaattttggaggaaccaattgaaaacacacttccagtctagatgatgctttgtgtgatacattaagttcttattttggattaaaagaagttttccatttgatacctctctaaattaaataaattatagaatgtagttgggtggattttggggtggccatatagtaatggaaagctgcaataattagttttaatacagcttgaatatttgctatatagaaatatagtatggaaagtttttggtcttaatgtagctactgtgcgggtcacagtttctcccaatgattatgactgggacattctttggtagataccatttgctactagtttattttgtggctagaaagtcagttttgtgtgtttttttttttttttatttgaagtgccaaattaactttagtcagaatgtgagcagatggctaagttctctcctccccagaatggattaacagctgcgtggaaagtgggggagagagtggatggagacttttagagatgttaaaactgcagtagaatgaaatgagtcagggagcttcagttagaaaataaagttgaggcagtttttgtgaagataatatggttagggctggagtgcactagtctttttgcttattcattttgcatggttttaaaattaaaaataattccgaagatacaccagctcacaaatgaaaacgtcagcctctgccccaccctccctcctgcccaaagtgaatttggtactcagaaaagaactgtttataccactcacctttctcccagcatgtactcactgtgggcagatgcaccaatacatggtaatcctcttactcattttaagacgtaggaaactcaatattcttctctaaccatatacgatagggctcttcgcttttaatgatatctgggatttctgtggaacttggcaaattttcagagcaccttcactcacataatgtcatttgaacctcacaatgttcttgggatggagtcagttgttcagggtccccgtgtgtgtgataagcagtgctggctggctgtcttcagaactcttggaaatctttacacatgcgagtgctaaccactttgagcaaggctgccttcttgtagatgacttgctgttctttatgacagggatcagtggcatttgtttcctagcagtatttagcacctttttgccaccttggtgaacagaaaattgtattttcctgtctttcatggctgaaaacaaaagtaatgggaattttaaatacgtttgcagaaactgcccctcccctcattgagggtcactgctcaagagtgcaggagtggactctccactgatgggtctccctccccatcctggtttccaccccgggctggctagctctgttggtttgaagactgacagccagcctggctcattctcattattggctagttagctttctttatcaacctgctcactcacaaatgtgtgccctcagccagagagtaagaaagcccaaatctgttacagcttctaaaaaaatagatttctaatttgtcctactcatgttaggagcattatctttgaaggtaaaacatagtgtatcattgtgtaaactcccaggcttgatgtagcagaagagatcatttctggaggcttcagcaatggaatttagcattataagagagattggacaaaccagtccaaagtggtccgagttcttaaatccaggtagggaactcactcttctttcttctctggacctaattgggcattgggctttagtgagaccacagaccaggcccgtctctcctgtaggcttttaattcaatggcaactctatttcaaagaataaaagcctttggagagttgcggcagttctgggggcgggctcaggagagtccatagatcagccgtaactggaacgtagaatctacgtctgcctctgaatggacttcccacctcctctctcttgctctgatgcttgcctctgggcctctccatgcccaaggtggtctttcatccttgacaggctggtaatgtgctggccacctccagctcctgcatcgagtctgtaaaccagagctggttctcatggccttcgtcacgataccaggatacggaggggagcccagggccatccatacccaccccagggtaacggggctggcctggcattagtcattatttagtttccaggccaaccatccagatagagattccctctttcctttgagcagtgctctcaagagctccgtgcctgtccacaatgacctagagtgcatcctgctcattgtcagtgtagcccctcgcccctatattcatccaggatacttggaagtgctaaaataggaagggattcggctttcaactttgctaccatcttccctgaagcaggaaaatgaacatggacttaaatgttctttgaaaaaaccaaagttttaagatttgctgtgtgatgaagtgacagggagggccggagtcagcaggtgccagactttctgttctgtctgccatgggtttgtccagctcaggtagctctaggagcaccatcctgccctagcagagcccaggccttgccctcatgaagcatcattgaaatagcaggagcatgttgatttcttggttaggttgcattataataacaagagtcagaacattaattcgaaacaacttgcagtatgcatttcttcacaccagtacattcttaagtgtacttgtttataaggaataacataaactaatctgtacctttatatatatgtgtgtgtacatatatacatatataaactgtatagtgtacatggtaatgatttattgctatgccccagatccttaatgtagttctcatcctccgcatgccctcagccacaagcgggtgactgactgttccctgatgatttggcccacctcctgtgtttggacctctagggaggagggttttggtcatactctccttatcctcgtgcacagaaatgctcagggtccccatgtgcctgttgttcagccctctctcttgttccctttctgagcatgtggtccttccccaggctgtgggacagctgccttcccacgaaagtgtaaagcagtattaagatcattactgcatgtgccctaaaaacccaagttttctattcccttaggacagaaaattgcatgtgaggtgggataatcgagtttcagtgacccacgtcagttacacattaaagccagaccccatgataaaattccacaaaatggaaataaaactcaaatttctttagcattgtgtaaataaatctgaatgtgtttaactttgtactggtaattttctgtatatttggaatatttgggttaaaaataaaacagactggactttgttacctgacctac

SEQ ID NO: 674 - DNA, 2656 bp, Homo sapiens
  source 1..2656: mol_type = genomic DNA
aaacttatgatgaataaagccaggaactcttgcttattttctgtcctccctctgctcctgtcactaactacttctgtaaacataacttcccaacttctactccaactttaaagcatctggttccttaaataaacaggccctgtagagaggccgtgttgtatggggtgtcagctctgggaagaatgcgtgtgtttgtttgctggctctggcagggttgagtccaagctgacaggactgagtgtgcctgtcagaggcttcagggagctgccgctgaagacctcggcctgttgttgtgaatcgccagacctttgtaacacccggaagtctgaagcatgtgtttgatgatctcagaggctcagtatccttgtcctgggttggagatagcactggggtcattctagtcttgactaccttccatgtaccactggtaattatgacttttggacagtccaagctatatcgaagtgaggattatgggaagaactttaaggatattacagatctcatcaataacacctttattcggactgaatttggcatggctattggtcctgagaactctggaaaggtggtgttaacagcagaggtgtctggaggaagtcgtggaggaagaatctttagatcatcagattttgcgaagaattttgtgcaaacagatctcccttttcatcctctcactcagatgatgtatagccctcagaattctgattatcttttagctctcagcactgaaaatggcctgtgggtgtccaagaattttgggggaaaatgggaagaaatccacaaagcagtatgtttggccaaatggggatcagacaacaccatcttctttacaacctatgcaaatggctcctgcactgaccttggggctctggaattatggagaacttcagacttgggaaaaagcttcaaaactattggtgtgaaaatctactcatttggtcttgggggacgtttcctttttgcctctgtgatggctgataaggatacaacaagaaggatccacgtttcaacagatcaaggggacacatggagcatggcccagctcccctccgtgggacaggaacagttctattctattctggcagcaaatgatgacatggtattcatgcatgtagatgaacctggagacactgggtttggcacaatctttacctcagatgatcgaggcattgtctattccaagtctttggaccgacatctctacactaccacaggcggagagacggactttaccaacgtgacctccctccgcggcgtctacataacaagcgtgctctccgaagataattctatccagaccatgatcacttttgaccaaggaggaaggtggacgcacctgaggaagcctgaaaacagtgaatgtgatgctacagcaaaaaacaagaatgagtgcagccttcatattcatgcttcctacagcatctcccagaaactgaatgttccaatggccccactctcagagccgaatgccgtaggcattgtcattgctcatggtagcgtgggggatgccatctcagtgatggttccagatgtgtacatctcagatgatgggggttactcctggacaaagatgctggaaggaccccactattacaccatcctggattctggaggcatcattgtggccattgagcacagcagccgtcctatcaatgtgattaagttctccacagacgaaggtcaatgctggcaaacctacacgttcaccagggaccccatctatttcactggcctagcttcagaacctggagctaggtccatgaatatcagcatttggggcttcacagaatctttcctgaccagccagtgggtctcctacaccattgattttaaagatatccttgaaaggaactgtgaagagaaggactataccatatggctggcacactccacagaccctgaagattatgaagatggctgcattttgggctacaaagaacagtttctgcggctacgcaagtcatccgtgtgtcagaatggtcgagactatgttgtgaccaagcagccctccatctgcctctgttccctggaggactttctctgtgattttggctactaccgtccagaaaatgactccaagtgtgtggaacagccagaactgaagggccacgacctggagttttgtctgtacggaagagaagaacacctaacaacaaatgggtaccggaaaattccaggggacaaatgccagggtggggtaaatccagttcgagaagtaaaagacttgaaaaagaaatgcacaagcaactttttgagtccggaaaaacagaattccaagtcaaattctgttccaattatcctggccatcgtgggattgatgctggtcacagtcgtagcaggagtgctcattgtgaagaaatatgtctgtgggggaaggttcctggtgcatcgatactctgtgctgcagcagcatgcagaggccaatggtgtggatggtgtggatgctttggacacagcctcccacactaataaaagtggttatcatgatgactcagatgaggacctcttggaatagctcttcagaggagctggacccagcatggatggtggaaccacagtacctcttacactccctgtggctccaacttcaggaaataaatttcccattgcgagggacccagctctgtttctgctgcttccatcaaagccaaaa

SEQ ID NO: 675 - DNA, 2007 bp, Homo sapiens
  source 1..2007: mol_type = genomic DNA
acaggttaaatactgcagagctaatagattggagtgacttctgacctagtcacatcttaaaggaaaacttttcagtttttactttaaaaggatgctaatgactagccaatgctctaggaagacattgagaccagccaacttcttgccttgataactactgaagagacattgggtggctggattttgaaagcagacttctggttataggtgatgcaacttgaaaaacaatcctgaaacatgaaacaagaataataatatttaaatgtaacttaatcattatacctctttatccatcaaagtgaattcattccattccctttcatctgtgctcatactttgcatcagatattgggtaaaccaaagtgtgtaggaagaaataaatgttttcatagtcattactctttacaatgggagtgctaaaattcaagcacatctttttcagaagctttgttaaatcaagtggagtatcccagatagttttcaccttccttctgattccatgttgcttgactctgaatttcagagcacctcctgttattccaaatgtgcctttcctctgggcctggaatgccccaagtgaattttgtcttggaaaatttgatgagccactagatatgagcctcttctctttcataggaagcccccgaataaacgccaccgggcaaggtgttacaatattttatgttgatagacttggctactatccttacatagattcaatcacaggagtaactgtgaatggaggaatcccccagaagatttccttacaagaccatctggacaaagctaagaaagacattacattttatatgccagtagacaatttgggaatggctgttattgactgggaagaatggagacccacttgggcaagaaactggaaacctaaagatgtttacaagaataggtctattgaattggttcagcaacaaaatgtacaacttagtctcacagaggccactgagaaagcaaaacaagaatttgaaaaggcagggaaggatttcctggtagagactataaaattgggaaaattacttcggccaaatcacttgtggggttattatctttttccggattgttacaaccatcactataagaaacccggttacaatggaagttgcttcaatgtagaaataaaaagaaatgatgatctcagctggttgtggaatgaaagcactgctctttacccatccatttatttgaacactcagcagtctcctgtagctgctacactctatgtgcgcaatcgagttcgggaagccatcagagtttccaaaatacctgatgcaaaaagtccacttccggtttttgcatatacccgcatagtttttactgatcaagttttgaaattcctttctcaagatgaacttgtgtatacatttggcgaaactgttgctctgggtgcttctggaattgtaatatggggaaccctcagtataatgcgaagtatgaaatcttgcttgctcctagacaattacatggagactatactgaatccttacataatcaacgtcacactagcagccaaaatgtgtagccaagtgctttgccaggagcaaggagtgtgtataaggaaaaactggaattcaagtgactatcttcacctcaacccagataattttgctattcaacttgagaaaggtggaaagttcacagtacgtggaaaaccgacacttgaagacctggagcaattttctgaaaaattttattgcagctgttatagcaccttgagttgtaaggagaaagctgatgtaaaagacactgatgctgttgatgtgtgtattgctgatggtgtctgtatagatgcttttctaaaacctcccatggagacagaagaacctcaaattttctacaatgcttcaccctccacactatctgccacaatgttcattgttagtattttgtttcttatcatttcttctgtagcgagtttgtaattgcgcaggttagctgaaatgaacaatatgtccatcttaaagtgtgctttttcgactaattaaatctttg

SEQ ID NO: 676 - DNA, 2349 bp, Homo sapiens
  source 1..2349: mol_type = genomic DNA
aggtggttagcagcacctcataaggtccttcctagcaagggatgctaatgactagccaatgctctaggaagacattgagaccagccaacttcttgccttgataactactgaagagacattgggtggctggattttgaaagcagacttctggttataggtgatgcaacttgaaaaacaatcctgaaacatgaaacaagaataataatatttaaatgtaacttaatcattatacctctttatccatcaaagtgaattcattccattccctttcatctgtgctcatactttgcatcagatattgggtaaaccaaagtgtgtaggaagaaataaatgttttcatagtcattactctttacaatgggagtgctaaaattcaagcacatctttttcagaagctttgttaaatcaagtggagtatcccagatagttttcaccttccttctgattccatgttgcttgactctgaatttcagagcacctcctgttattccaaatgtgcctttcctctgggcctggaatgccccaagtgaattttgtcttggaaaatttgatgagccactagatatgagcctcttctctttcataggaagcccccgaataaacgccaccgggcaaggtgttacaatattttatgttgatagacttggctactatccttacatagattcaatcacaggagtaactgtgaatggaggaatcccccagaagatttccttacaagaccatctggacaaagctaagaaagacattacattttatatgccagtagacaatttgggaatggctgttattgactgggaagaatggagacccacttgggcaagaaactggaaacctaaagatgtttacaagaataggtctattgaattggttcagcaacaaaatgtacaacttagtctcacagaggccactgagaaagcaaaacaagaatttgaaaaggcagggaaggatttcctggtagagactataaaattgggaaaattacttcggccaaatcacttgtggggttattatctttttccggattgttacaaccatcactataagaaacccggttacaatggaagttgcttcaatgtagaaataaaaagaaatgatgatctcagctggttgtggaatgaaagcactgctctttacccatccatttatttgaacactcagcagtctcctgtagctgctacactctatgtgcgcaatcgagttcgggaagccatcagagtttccaaaatacctgatgcaaaaagtccacttccggtttttgcatatacccgcatagtttttactgatcaagttttgaaattcctttctcaagatgaacttgtgtatacatttggcgaaactgttgctctgggtgcttctggaattgtaatatggggaaccctcagtataatgcgaagtatgaaatcttgcttgctcctagacaattacatggagactatactgaatccttacataatcaacgtcacactagcagccaaaatgtgtagccaagtgctttgccaggagcaaggagtgtgtataaggaaaaactggaattcaagtgactatcttcacctcaacccagataattttgctattcaacttgagaaaggtggaaagttcacagtacgtggaaaaccgacacttgaagacctggagcaattttctgaaaaattttattgcagctgttatagcaccttgagttgtaaggagaaagctgatgtaaaagacactgatgctgttgatgtgtgtattgctgatggtgtctgtatagatgcttttctaaaacctcccatggagacagaagaacctcaaattttctacaatgcttcaccctccacactatctgccacaatgttcatttggaggctggaagtctgggatcaaggtattagcagaattggtttcttctgagagtcatgagggaaaaatgtgtttcaggcctcttcccttggcttacaggaaatgaaaaaaccatgactatcatcaccaacatccttgggtattaagtgcagtcactctcctagatgctgtggggagaaggcaagttacaaagatagaccttccctcaagataatcagattttcatggtattatccttaacctttttgacatcatggaggctttgggaatctgatgaagcctatcaattttcttccagaagatatttatataagattataagaaaaattatgtacacagcttattttattgcattggatcaaaatgccatttataaagaattatgccttttccatcaattttagcatggaaaaataatttcaggcaatatgcttaaaaattgggggaagacaaaagaaatccatatcgtgtaaataaaaataaattttggttttgctcaaaaataaa

SEQ ID NO: 677 - DNA, 1969 bp, Homo sapiens
  source 1..1969: mol_type = genomic DNA
tggtcttccagttgtcctgagagtgatgactggctccaccttgatgtggctcacataaattcagaaagtatgatagcagtgtaggtggttagcagcacctcataaggtccttcctagcaagggatgctaatgactagccaatgctctaggaagacattgagaccagccaacttcttgccttgataactactgaagagacattgggtggctggattttgaaagcagacttctggttataggtgatgcaacttgaaaaacaatcctgaaacatgaaacaagaataataatatttaaatgtaacttaatcattatacctctttatccatcaaagtgaattcattccattccctttcatctgtgctcatactttgcatcagatattgggtaaaccaaagtgtgtaggaagaaataaatgttttcatagtcattactctttacaatgggagtgctaaaattcaagcacatctttttcagaagctttgttaaatcaagtggagtatcccagatagttttcaccttccttctgattccatgttgcttgactctgaatttcagagcacctcctgttattccaaatgtgcctttcctctgggcctggaatgccccaagtgaattttgtcttggaaaatttgatgagccactagatatgagcctcttctctttcataggaagcccccgaataaacgccaccgggcaaggtgttacaatattttatgttgatagacttggctactatccttacatagattcaatcacaggagtaactgtgaatggaggaatcccccagaagatttccttacaagaccatctggacaaagctaagaaagacattacattttatatgccagtagacaatttgggaatggctgttattgactgggaagaatggagacccacttgggcaagaaactggaaacctaaagatgtttacaagaataggtctattgaattggttcagcaacaaaatgtacaacttagtctcacagaggccactgagaaagcaaaacaagaatttgaaaaggcagggaaggatttcctggtagagactataaaattgggaaaattacttcggccaaatcacttgtggggttattatctttttccggattgttacaaccatcactataagaaacccggttacaatggaagttgcttcaatgtagaaataaaaagaaatgatgatctcagctggttgtggaatgaaagcactgctctttacccatccatttatttgaacactcagcagtctcctgtagctgctacactctatgtgcgcaatcgagttcgggaagccatcagagtttccaaaatacctgatgcaaaaagtccacttccggtttttgcatatacccgcatagtttttactgatcaagttttgaaattcctttctcaagatgaacttgtgtatacatttggcgaaactgttgctctgggtgcttctggaattgtaatatggggaaccctcagtataatgcgaagtatgaaatcttgcttgctcctagacaattacatggagactatactgaatccttacataatcaacgtcacactagcagccaaaatgtgtagccaagtgctttgccaggagcaaggagtgtgtataaggaaaaactggaattcaagtgactatcttcacctcaacccagataattttgctattcaacttgagaaaggtggaaagttcacagtacgtggaaaaccgacacttgaagacctggagcaattttctgaaaaattttattgcagctgttatagcaccttgagttgtaaggagaaagctgatgtaaaagacactgatgctgttgatgtgtgtattgctgatggtgtctgtatagatgcttttctaaaacctcccatggagacagaagaacctcaaattttctacaatgcttcaccctccacactatctgccacaatgttcattgttagtattttgtttcttatcatttcttctgtagcgagtttgtaa

SEQ ID NO: 678 - DNA, 760 bp, Homo sapiens
  source 1..760: mol_type = genomic DNA
ttccagttgtcctgagagtgatgactggctccaccttgatgtggctcacataaattcagaaagtatgatagcagtgtaggtggttagcagcacctcataaggtccttcctagcaaggttaaatactgcagagctaatagattggagtgacttctgacctagtcacatcttaaaggaaaacttttcagtttttactttaaaaggatgctaatgactagccaatgctctaggaagacattgagaccagccaacttcttgccttgataactactgaagagacattgggtggctggattttgaaagcagacttctggttataggtgatgcaacttgaaaaacaatcctgaaacatgaaacaagaataataatatttaaatgtaacttaatcattatacctctttatccatcaaagtgaattcattccattccctttcatctgtgctcatactttgcatcagatattgggtaaaccaaagtgtgtaggaagaaataaatgttttcatagtcattactctttacaatgggagtgctaaaattcaagcacatctttttcagaagctttgttaaatcaagtggagtatcccagatagttttcaccttccttctgattccatgttgcttgactctgaatttcagagcacctcctgttattccaaatgtgcctttcctctgggcctggaatgccccaagtgaattttgtcttggaaaatttgatgagccactagatatgagcctcttctctttcataggaagcccccgaa

SEQ ID NO: 679 - DNA, 2220 bp, Homo sapiens
  source 1..2220: mol_type = genomic DNA
atgggagaatggggaacgtggaggtaaaggagggaacctaatgtaagaatactgaatttgccaattaaggcaccagctgtgactacttcatacaggaatggggacatgcctgatgccatagggtctaattgacttgagaatgtgaaaggaaaataaaaactcagaaccccaattcatcatgccaaaaggaaaaaaaaattaagctgaaatgttaaatactgcagagctaatagattggagtgacttctgacctagtcacatcttaaaggaaaacttttcagtttttactttaaaaggatgctaatgactagccaatgctctaggaagacattgagaccagccaacttcttgccttgataactactgaagagacattgggtggctggattttgaaagcagacttctggttataggtgatgcaacttgaaaaacaatcctgaaacatgaaacaagaataataatatttaaatgtaacttaatcattatacctctttatccatcaaagtgaattcattccattccctttcatctgtgctcatactttgcatcagatattgggtaaaccaaagtgtgtaggaagaaataaatgttttcatagtcattactctttacaatgggagtgctaaaattcaagcacatctttttcagaagctttgttaaatcaagtggagtatcccagatagttttcaccttccttctgattccatgttgcttgactctgaatttcagagcacctcctgttattccaaatgtgcctttcctctgggcctggaatgccccaagtgaattttgtcttggaaaatttgatgagccactagatatgagcctcttctctttcataggaagcccccgaataaacgccaccgggcaaggtgttacaatattttatgttgatagacttggctactatccttacatagattcaatcacaggagtaactgtgaatggaggaatcccccagaagatttccttacaagaccatctggacaaagctaagaaagacattacattttatatgccagtagacaatttgggaatggctgttattgactgggaagaatggagacccacttgggcaagaaactggaaacctaaagatgtttacaagaataggtctattgaattggttcagcaacaaaatgtacaacttagtctcacagaggccactgagaaagcaaaacaagaatttgaaaaggcagggaaggatttcctggtagagactataaaattgggaaaattacttcggccaaatcacttgtggggttattatctttttccggattgttacaaccatcactataagaaacccggttacaatggaagttgcttcaatgtagaaataaaaagaaatgatgatctcagctggttgtggaatgaaagcactgctctttacccatccatttatttgaacactcagcagtctcctgtagctgctacactctatgtgcgcaatcgagttcgggaagccatcagagtttccaaaatacctgatgcaaaaagtccacttccggtttttgcatatacccgcatagtttttactgatcaagttttgaaattcctttctcaagatgaacttgtgtatacatttggcgaaactgttgctctgggtgcttctggaattgtaatatggggaaccctcagtataatgcgaagtatgaaatcttgcttgctcctagacaattacatggagactatactgaatccttacataatcaacgtcacactagcagccaaaatgtgtagccaagtgctttgccaggagcaaggagtgtgtataaggaaaaactggaattcaagtgactatcttcacctcaacccagataattttgctattcaacttgagaaaggtggaaagttcacagtacgtggaaaaccgacacttgaagacctggagcaattttctgaaaaattttattgcagctgttatagcaccttgagttgtaaggagaaagctgatgtaaaagacactgatgctgttgatgtgtgtattgctgatggtgtctgtatagatgcttttctaaaacctcccatggagacagaagaacctcaaattttctacaatgcttcaccctccacactatctgccacaatgttcattgttagtattttgtttcttatcatttcttctgtagcgagtttgtaattgcgcaggttagctgaaatgaacaatatgtccatcttaaagtgtgctttttcgactaattaaatctttgaaaagaa

SEQ ID NO: 680 - DNA, 2154 bp, Homo sapiens
  source 1..2154: mol_type = genomic DNA
gatagcagtgtaggtggttagcagcacctcataaggtccttcctagcaaggtaacagtacaagctttttctaaaaatcttgatgtatacctgatctcctggttgaaagagttggcttgatggattttttcctataagttctttttatgtctagatttttatgttccacttgacctgatgattgaggatggtatgaagtaagaagttttaatgagtaatccagagattttggatgctaatgactagccaatgctctaggaagacattgagaccagccaacttcttgccttgataactactgaagagacattgggtggctggattttgaaagcagacttctggttataggtgatgcaacttgaaaaacaatcctgaaacatgaaacaagaataataatatttaaatgtaacttaatcattatacctctttatccatcaaagtgaattcattccattccctttcatctgtgctcatactttgcatcagatattgggtaaaccaaagtgtgtaggaagaaataaatgttttcatagtcattactctttacaatgggagtgctaaaattcaagcacatctttttcagaagctttgttaaatcaagtggagtatcccagatagttttcaccttccttctgattccatgttgcttgactctgaatttcagagcacctcctgttattccaaatgtgcctttcctctgggcctggaatgccccaagtgaattttgtcttggaaaatttgatgagccactagatatgagcctcttctctttcataggaagcccccgaataaacgccaccgggcaaggtgttacaatattttatgttgatagacttggctactatccttacatagattcaatcacaggagtaactgtgaatggaggaatcccccagaagatttccttacaagaccatctggacaaagctaagaaagacattacattttatatgccagtagacaatttgggaatggctgttattgactgggaagaatggagacccacttgggcaagaaactggaaacctaaagatgtttacaagaataggtctattgaattggttcagcaacaaaatgtacaacttagtctcacagaggccactgagaaagcaaaacaagaatttgaaaaggcagggaaggatttcctggtagagactataaaattgggaaaattacttcggccaaatcacttgtggggttattatctttttccggattgttacaaccatcactataagaaacccggttacaatggaagttgcttcaatgtagaaataaaaagaaatgatgatctcagctggttgtggaatgaaagcactgctctttacccatccatttatttgaacactcagcagtctcctgtagctgctacactctatgtgcgcaatcgagttcgggaagccatcagagtttccaaaatacctgatgcaaaaagtccacttccggtttttgcatatacccgcatagtttttactgatcaagttttgaaattcctttctcaagatgaacttgtgtatacatttggcgaaactgttgctctgggtgcttctggaattgtaatatggggaaccctcagtataatgcgaagtatgaaatcttgcttgctcctagacaattacatggagactatactgaatccttacataatcaacgtcacactagcagccaaaatgtgtagccaagtgctttgccaggagcaaggagtgtgtataaggaaaaactggaattcaagtgactatcttcacctcaacccagataattttgctattcaacttgagaaaggtggaaagttcacagtacgtggaaaaccgacacttgaagacctggagcaattttctgaaaaattttattgcagctgttatagcaccttgagttgtaaggagaaagctgatgtaaaagacactgatgctgttgatgtgtgtattgctgatggtgtctgtatagatgcttttctaaaacctcccatggagacagaagaacctcaaattttctacaatgcttcaccctccacactatctgccacaatgttcattgttagtattttgtttcttatcatttcttctgtagcgagtttgtaattgcgcaggttagctgaaatgaacaatatgtccatcttaaagtgtgctttttcgactaattaaatctttgaaaagaa

SEQ ID NO: 681 - DNA, 2326 bp, Homo sapiens
  source 1..2326: mol_type = genomic DNA
atcagaggaagaggaaggggcggagctgctttgcggccggccgcggagcagtcagccgactacagagaagggtaatcgggtgtccccggcgccgcccggggccctgagggctggctagggtccaggccgggggggacgggacagacgaaccagccccgtgtaggaagcgcgacaatgccccgctacggagcgtcactccgccagagctgccccaggtccggccgggagcagggacaagacgggaccgccggagcccccggactcctttggatgggcctggtgctggcgctggcgctggcgctggcgctggcgctggctctgtctgactctcgggttctctgggctccggcagaggctcaccctctttctccccaaggccatcctgccaggttacatcgcatagtgccccggctccgagatgtctttgggtgggggaacctcacctgcccaatctgcaaaggtctattcaccgccatcaacctcgggctgaagaaggaacccaatgtggctcgcgtgggctccgtggccatcaagctgtgcaatctgctgaagatagcaccacctgccgtgtgccaatccattgtccacctctttgaggatgacatggtggaggtgtggagacgctcagtgctgagcccatctgaggcctgtggcctgctcctgggctccacctgtgggcactgggacattttctcatcttggaacatctctttgcctactgtgccgaagccgccccccaaaccccctagccccccagccccaggtgcccctgtcagccgcatcctcttcctcactgacctgcactgggatcatgactacctggagggcacggaccctgactgtgcagacccactgtgctgccgccggggttctggcctgccgcccgcatcccggccaggtgccggatactggggcgaatacagcaagtgtgacctgcccctgaggaccctggagagcctgttgagtgggctgggcccagccggcccttttgatatggtgtactggacaggagacatccccgcacatgatgtctggcaccagactcgtcaggaccaactgcgggccctgaccaccgtcacagcacttgtgaggaagttcctggggccagtgccagtgtaccctgctgtgggtaaccatgaaagcacacctgtcaatagcttccctccccccttcattgagggcaaccactcctcccgctggctctatgaagcgatggccaaggcttgggagccctggctgcctgccgaagccctgcgcaccctcaggtacttatcgtccgtggaaacccaggaagggaaaagaaaggtgcatataattggccacattcccccagggcactgtctgaagagctggagctggaattattaccgaattgtagccaggtatgagaacaccctggctgctcagttctttggccacactcatgtggatgaatttgaggtcttctatgatgaagagactctgagccggccgctggctgtagccttcctggcacccagtgcaactacctacatcggccttaatcctggttaccgtgtgtaccaaatagatggaaactactccgggagctctcacgtggtcctggaccatgagacctacatcctgaatctgacccaggcaaacataccgggagccataccgcactggcagcttctctacagggctcgagaaacctatgggctgcccaacacactgcctaccgcctggcacaacctggtatatcgcatgcggggcgacatgcaacttttccagaccttctggtttctctaccataagggccacccaccctcggagccctgtggcacgccctgccgtctggctactctttgtgcccagctctctgcccgtgctgacagccctgctctgtgccgccacctgatgccagatgggagcctcccagaggcccagagcctgtggccaaggccactgttttgctagggccccagggcccacatttgggaaagttcttgatgtaggaaagggtgaaaaagcccaaatgctgctgtggttcaaccaggcaagatcatccggtgaaagaaccagtccctgggccccaaggatgccggggaaacaggaccttctcctttcctggagctggtttagctggatatgggagggggtttggctgcctgtgcccaggagctagactgccttgaggctgctgtcctttcacagccatggagtagaggcctaagttgacactgccctgggcagacaagacaggagctgtcgccccaggcctgtgctgcccagccaggaaccctgtactgctgctgcgacctgatgctgccagtctgttaaaataaagataagagacttggactcc

SEQ ID NO: 682 - DNA, 2452 bp, Homo sapiens
  source 1..2452: mol_type = genomic DNA
ggaagaggaaggggcggagctgctttgcggccggccgcggagcagtcagccgactacagagaagggtaatcgggtgtccccggcgccgcccggggccctgagggctggctagggtccaggccgggggggacgggacagacgaaccagccccgtgtaggaagcgcgacaatgccccgctacggagcgtcactccgccagagctgccccaggtccggccgggagcagggacaagacgggaccgccggagcccccggactcctttggatgggcctggtgctggcgctggcgctggcgctggcgctggcgctggctctgtctgactctcgggttctctgggctccggcagaggctcaccctctttctccccaaggccatcctgccaggttacatcgcatagtgccccggctccgagatgtctttgggtgggggaacctcacctgcccaatctgcaaaggtctattcaccgccatcaacctcgggctgaagaaggaacccaatgtggctcgcgtgggctccgtggccatcaagctgtgcaatctgctgaagatagcaccacctgccgtgtgccaatccattgtccacctctttgaggatgacatggtggaggtgtggagacgctcagtgctgagcccatctgaggcctgtggcctgctcctgggctccacctgtgggcactgggacattttctcatcttggaacatctctttgcctactgtgccgaagccgccccccaaaccccctagccccccagccccaggtgcccctgtcagccgcatcctcttcctcactgacctgcactgggatcatgactacctggagggcacggaccctgactgtgcagacccactgtgctgccgccggggttctggcctgccgcccgcatcccggccaggtgccggatactggggcgaatacagcaagtgtgacctgcccctgaggaccctggagagcctgttgagtgggctgggcccagccggcccttttgatatggtgtactggacaggagacatccccgcacatgatgtctggcaccagactcgtcaggaccaactgcgggccctgaccaccgtcacagcacttgtgaggaagttcctggggccagtgccagtgtaccctgctgtgggtaaccatgaaagcacacctgtcaatagcttccctccccccttcattgagggcaaccactcctcccgctggctctatgaagcgatggccaaggcttgggagccctggctgcctgccgaagccctgcgcaccctcagaattggggggttctatgctctttccccataccccggtctccgcctcatctctctcaatatgaatttttgttcccgtgagaacttctggctcttgatcaactccacggatcccgcaggacagctccagtggctggtgggggagcttcaggctgctgaggatcgaggagacaaagtgcatataattggccacattcccccagggcactgtctgaagagctggagctggaattattaccgaattgtagccaggtatgagaacaccctggctgctcagttctttggccacactcatgtggatgaatttgaggtcttctatgatgaagagactctgagccggccgctggctgtagccttcctggcacccagtgcaactacctacatcggccttaatcctggttaccgtgtgtaccaaatagatggaaactactccgggagctctcacgtggtcctggaccatgagacctacatcctgaatctgacccaggcaaacataccgggagccataccgcactggcagcttctctacagggctcgagaaacctatgggctgcccaacacactgcctaccgcctggcacaacctggtatatcgcatgcggggcgacatgcaacttttccagaccttctggtttctctaccataagggccacccaccctcggagccctgtggcacgccctgccgtctggctactctttgtgcccagctctctgcccgtgctgacagccctgctctgtgccgccacctgatgccagatgggagcctcccagaggcccagagcctgtggccaaggccactgttttgctagggccccagggcccacatttgggaaagttcttgatgtaggaaagggtgaaaaagcccaaatgctgctgtggttcaaccaggcaagatcatccggtgaaagaaccagtccctgggccccaaggatgccggggaaacaggaccttctcctttcctggagctggtttagctggatatgggagggggtttggctgcctgtgcccaggagctagactgccttgaggctgctgtcctttcacagccatggagtagaggcctaagttgacactgccctgggcagacaagacaggagctgtcgccccaggcctgtgctgcccagccaggaaccctgtactgctgctgcgacctgatgctgccagtctgttaaaataaagataagagacttggactcc

SEQ ID NO: 683 - DNA, 2290 bp, Homo sapiens
  source 1..2290: mol_type = genomic DNA
atcagaggaagaggaaggggcggagctgctttgcggccggccgcggagcagtcagccgactacagagaagggtaatcgggtgtccccggcgccgcccggggccctgagggctggctagggtccaggccgggggggacgggacagacgaaccagccccgtgtaggaagcgcgacaatgccccgctacggagcgtcactccgccagagctgccccaggtccggccgggagcagggacaagacgggaccgccggagcccccggactcctttggatgggcctggtgctggcgctggcgctggcgctggcgctggcgctggctctgtctgactctcgggttctctgggctccggcagaggctcaccctctttctccccaaggccatcctgccaggttacatcgcatagtgccccggctccgagatgtctttgggtgggggaacctcacctgcccaatctgcaaaggtctattcaccgccatcaacctcgggctgaagaaggaacccaatgtggctcgcgtgggctccgtggccatcaagctgtgcaatctgctgaagatagcaccacctgccgtgtgccaatccattgtccacctctttgaggatgacatggtggaggtgtggagacgctcagtgctgagcccatctgaggcctgtggcctgctcctgggctccacctgtgggcactgggacattttctcatcttggaacatctctttgcctactgtgccgaagccgccccccaaaccccctagccccccagccccaggtgcccctgtcagccgcatcctcttcctcactgacctgcactgggatcatgactacctggagggcacggaccctgactgtgcagacccactgtgctgccgccggggttctggcctgccgcccgcatcccggccaggtgccggatactggggcgaatacagcaagtgtgacctgcccctgaggaccctggagagcctgttgagtgggctgggcccagccggcccttttgatatggtgtactggacaggagacatccccgcacatgatgtctggcaccagactcgtcaggaccaactgcgggccctgaccaccgtcacagcacttgtgaggaagttcctggggccagtgccagtgtaccctgctgtgggtaaccatgaaagcacacctgtcaatagcttccctccccccttcattgagggcaaccactcctcccgctggctctatgaagcgatggccaaggcttgggagccctggctgcctgccgaagccctgcgcaccctcagaaaggtgcatataattggccacattcccccagggcactgtctgaagagctggagctggaattattaccgaattgtagccaggtatgagaacaccctggctgctcagttctttggccacactcatgtggatgaatttgaggtcttctatgatgaagagactctgagccggccgctggctgtagccttcctggcacccagtgcaactacctacatcggccttaatcctggttaccgtgtgtaccaaatagatggaaactactccgggagctctcacgtggtcctggaccatgagacctacatcctgaatctgacccaggcaaacataccgggagccataccgcactggcagcttctctacagggctcgagaaacctatgggctgcccaacacactgcctaccgcctggcacaacctggtatatcgcatgcggggcgacatgcaacttttccagaccttctggtttctctaccataagggccacccaccctcggagccctgtggcacgccctgccgtctggctactctttgtgcccagctctctgcccgtgctgacagccctgctctgtgccgccacctgatgccagatgggagcctcccagaggcccagagcctgtggccaaggccactgttttgctagggccccagggcccacatttgggaaagttcttgatgtaggaaagggtgaaaaagcccaaatgctgctgtggttcaaccaggcaagatcatccggtgaaagaaccagtccctgggccccaaggatgccggggaaacaggaccttctcctttcctggagctggtttagctggatatgggagggggtttggctgcctgtgcccaggagctagactgccttgaggctgctgtcctttcacagccatggagtagaggcctaagttgacactgccctgggcagacaagacaggagctgtcgccccaggcctgtgctgcccagccaggaaccctgtactgctgctgcgacctgatgctgccagtctgttaaaataaagataagagacttggactcc

SEQ ID NO: 684 - DNA, 2188 bp, Homo sapiens
  source 1..2188: mol_type = genomic DNA
gtcagccgactacagagaagggtaatcgggtgtccccggcgccgcccggggccctgagggctggctagggtccaggccgggggggacgggacagacgaaccagccccgtgtaggaagcgcgacaatgccccgctacggagcgtcactccgccagagctgccccaggtccggccgggagcagggacaagacgggaccgccggagcccccggactcctttggatgggcctggtgctggcgctggcgctggcgctggcgctggcgctggctctgtctgactctcgggttctctgggctccggcagaggctcaccctctttctccccaaggccatcctgccaggttacatcgcatagtgccccggctccgagatgtctttgggtgggggaacctcacctgcccaatctgcaaaggtctattcaccgccatcaacctcgggctgaaggaacccaatgtggctcgcgtgggctccgtggccatcaagctgtgcaatctgctgaagatagcaccacctgccgtgtgccaatccattgtccacctctttgaggatgacatggtggaggtgtggagacgctcagtgctgagcccatctgaggcctgtggcctgctcctgggctccacctgtgggcactgggacattttctcatcttggaacatctctttgcctactgtgccgaagccgccccccaaaccccctagccccccagccccaggtgcccctgtcagccgcatcctcttcctcactgacctgcactgggatcatgactacctggagggcacggaccctgactgtgcagacccactgtgctgccgccggggttctggcctgccgcccgcatcccggccaggtgccggatactggggcgaatacagcaagtgtgacctgcccctgaggaccctggagagcctgttgagtgggctgggcccagccggcccttttgatatggtgtactggacaggagacatccccgcacatgatgtctggcaccagactcgtcaggaccaactgcgggccctgaccaccgtcacagcacttgtgaggaagttcctggggccagtgccagtgtaccctgctgtgggtaaccatgaaagcacacctgtcaatagcttccctccccccttcattgagggcaaccactcctcccgctggctctatgaagcgatggccaaggcttgggagccctggctgcctgccgaagccctgcgcaccctcagaattggggggttctatgctctttccccataccccggtctccgcctcatctctctcaatatgaatttttgttcccgtgagaacttctggctcttgatcaactccacggatcccgcaggacagctccagtggctggtgggggagcttcaggctgctgaggatcgaggagacaaagtgcatataattggccacattcccccagggcactgtctgaagagctggagctggaattattaccgaattgtagccaggtatgagaacaccctggctgctcagttctttggccacactcatgtggatgaatttgaggtcttctatgatgaagagactctgagccggccgctggctgtagccttcctggcacccagtgcaactacctacatcggccttaatcctggttaccgtgtgtaccaaatagatggaaactactccgggagctctcacgtggtcctggaccatgagacctacatcctgaatctgacccaggcaaacataccgggagccataccgcactggcagcttctctacagggctcgagaaacctatgggctgcccaacacactgcctaccgcctggcacaacctggtatatcgcatgcggggcgacatgcaacttttccagaccttctggtttctctaccataagggccacccaccctcggagccctgtggcacgccctgccgtctggctactctttgtgcccagctctctgcccgtgctgacagccctgctctgtgccgccacctgatgccagatgggagcctcccagaggcccagagcctgtggccaaggccactgttttgctagggccccagggcccacatttgggaaagttcttgatgtaggaaagggtgaaaaagcccaaatgctgctgtggttcaaccaggcaagatcatccggtgaaagaaccagtccctgggccccaaggatgccggggaaacaggaccttctcctttcctggagctggtttagctggat

SEQ ID NO: 685 - DNA, 2211 bp, Homo sapiens
  source 1..2211: mol_type = genomic DNA
ggtgtccccggcgccgcccggggccctgagggctggctagggtccaggccgggggggacgggacagacgaaccagccccgtgtaggaagcgcgacaatgccccgctacggagcgtcactccgccagagctgccccaggtccggccgggagcagggacaagacgggaccgccggagcccccggactcctttggatgggcctggtgctggcgctggcgctggcgctggcgctggcgctggctctgtctgactctcgggttctctgggctccggcagaggctcaccctctttctccccaaggccatcctgccaggttacatcgcatagtgccccggctccgagatgtctttgggtgggggaacctcacctgcccaatctgcaaaggtctattcaccgccatcaacctcgggctgaagaaggaacccaatgtggctcgcgtgggctccgtggccatcaagctgtgcaatctgctgaagatagcaccacctgccgtgtgccaatccattgtccacctctttgaggatgacatggtggaggtgtggagacgctcagtgctgagcccatctgaggcctgtggcctgctcctgggctccacctgtgggcactgggacattttctcatcttggaacatctctttgcctactgtgccgaagccgccccccaaaccccctagccccccagccccaggtgcccctgtcagccgcatcctcttcctcactgacctgcactgggatcatgactacctggagggcacggaccctgactgtgcagacccactgtgctgccgccggggttctggcctgccgcccgcatcccggccaggtgccggatactggggcgaatacagcaagtgtgacctgcccctgaggaccctggagagcctgttgagtgggctgggcccagccggcccttttgatatggtgtactggacaggagacatccccgcacatgatgtctggcaccagactcgtcaggaccaactgcgggccctgaccaccgtcacagcacttgtgaggaagttcctggggccagtgccagtgtaccctgctgtgggtaaccatgaaagcacacctgtcaatagcttccctccccccttcattgagggcaaccactcctcccgctggctctatgaagcgatggccaaggcttgggagccctggctgcctgccgaagccctgcgcaccctcaggtgcatataattggccacattcccccagggcactgtctgaagagctggagctggaattattaccgaattgtagccaggtatgagaacaccctggctgctcagttctttggccacactcatgtggatgaatttgaggtcttctatgatgaagagactctgagccggccgctggctgtagccttcctggcacccagtgcaactacctacatcggccttaatcctggttaccgtgtgtaccaaatagatggaaactactccgggagctctcacgtggtcctggaccatgagacctacatcctgaatctgacccaggcaaacataccgggagccataccgcactggcagcttctctacagggctcgagaaacctatgggctgcccaacacactgcctaccgcctggcacaacctggtatatcgcatgcggggcgacatgcaacttttccagaccttctggtttctctaccataagggccacccaccctcggagccctgtggcacgccctgccgtctggctactctttgtgcccagctctctgcccgtgctgacagccctgctctgtgccgccacctgatgccagatgggagcctcccagaggcccagagcctgtggccaaggccactgttttgctagggccccagggcccacatttgggaaagttcttgatgtaggaaagggtgaaaaagcccaaatgctgctgtggttcaaccaggcaagatcatccggtgaaagaaccagtccctgggccccaaggatgccggggaaacaggaccttctcctttcctggagctggtttagctggatatgggagggggtttggctgcctgtgcccaggagctagactgccttgaggctgctgtcctttcacagccatggagtagaggcctaagttgacactgccctgggcagacaagacaggagctgtcgccccaggcctgtgctgcccagccaggaaccctgtactgctgctgcgacctgatgctgccagtctgttaaaataaagataagagacttggactccaga

SEQ ID NO: 686 - DNA, 2446 bp, Homo sapiens
  source 1..2446: mol_type = genomic DNA
cagtcagccgactacagagaagggtaatcgggtgtccccggcgccgcccggggccctgagggctggctagggtccaggccgggggggacgggacagacgaaccagccccgtgtaggaagcgcgacaatgccccgctacggagcgtcactccgccagagctgccccaggtccggccgggagcagggacaagacgggaccgccggagcccccggactcctttggatgggcctggtgctggcgctggcgctggcgctggcgctggcgctggctctgtctgactctcgggttctctgggctccggcagaggctcaccctctttctccccaaggccatcctgccaggttacatcgcatagtgccccggctccgagatgtctttgggtgggggaacctcacctgcccaatctgcaaaggtctattcaccgccatcaacctcgggctgaagaaggaacccaatgtggctcgcgtgggctccgtggccatcaagctgtgcaatctgctgaagatagcaccacctgccgtgtgccaatccattgtccacctctttgaggatgacatggtggaggtgtggagacgctcagtgctgagcccatctgaggcctgtggcctgctcctgggctccacctgtgggcactgggacattttctcatcttggaacatctctttgcctactgtgccgaagccgccccccaaaccccctagccccccagccccaggtgcccctgtcagccgcatcctcttcctcactgacctgcactgggatcatgactacctggagggcacggaccctgactgtgcagacccactgtgctgccgccggggttctggcctgccgcccgcatcccggccaggtgccggatactggggcgaatacagcaagtgtgacctgcccctgaggaccctggagagcctgttgagtgggctgggcccagccggcccttttgatatggtgtactggacaggagacatccccgcacatgatgtctggcaccagactcgtcaggaccaactgcgggccctgaccaccgtcacagcacttgtgaggaagttcctggggccagtgccagtgtaccctgctgtgggtaaccatgaaagcacacctgtcaatagcttccctccccccttcattgagggcaaccactcctcccgctggctctatgaagcgatggccaaggcttgggagccctggctgcctgccgaagccctgcgcaccctcaggtacttatcgtccgtggaaacccaggaagggaaaagaaagaattggggggttctatgctctttccccataccccggtctccgcctcatctctctcaatatgaatttttgttcccgtgagaacttctggctcttgatcaactccacggatcccgcaggacagctccagtggctggtgggggagcttcaggctgctgaggatcgaggagacaaagtgcatataattggccacattcccccagggcactgtctgaagagctggagctggaattattaccgaattgtagccaggtatgagaacaccctggctgctcagttctttggccacactcatgtggatgaatttgaggtcttctatgatgaagagactctgagccggccgctggctgtagccttcctggcacccagtgcaactacctacatcggccttaatcctggttaccgtgtgtaccaaatagatggaaactactccgggagctctcacgtggtcctggaccatgagacctacatcctgaatctgacccaggcaaacataccgggagccataccgcactggcagcttctctacagggctcgagaaacctatgggctgcccaacacactgcctaccgcctggcacaacctggtatatcgcatgcggggcgacatgcaacttttccagaccttctggtttctctaccataagggccacccaccctcggagccctgtggcacgccctgccgtctggctactctttgtgcccagctctctgcccgtgctgacagccctgctctgtgccgccacctgatgccagatgggagcctcccagaggcccagagcctgtggccaaggccactgttttgctagggccccagggcccacatttgggaaagttcttgatgtaggaaagggtgaaaaagcccaaatgctgctgtggttcaaccaggcaagatcatccggtgaaagaaccagtccctgggccccaaggatgccggggaaacaggaccttctcctttcctggagctggtttagctggatatgggagggggtttggctgcctgtgcccaggagctagactgccttgaggctgctgtcctttcacagccatggagtagaggcctaagttgacactgccctgggcagacaagacaggagctgtcgccccaggcctgtgctgcccagccaggaaccctgtactgctgctgcgacctgatgctgccagtctgttaaaataaagataagagacttgga

SEQ ID NO: 687 - DNA, 2500 bp, Homo sapiens
  source 1..2500: mol_type = genomic DNA
ctattaacttgttcaaaaaagtatcaggagttgtcaaggcagagaagagagtgtttgcaaaagggggaaagtagtttgctgcctctttaagactaggactgagagaaagaagaggagagagaaagaaagggagagaagtttgagccccaggcttaagcctttccaaaaaataataataacaatcatcggcggcggcaggatcggccagaggaggagggaagcgctttttttgatcctgattccagtttgcctctctctttttttcccccaaattattcttcgcctgattttcctcgcggagccctgcgctcccgacacccccgcccgcctcccctcctcctctccccccgcccgcgggccccccaaagtcccggccgggccgagggtcggcggccgccggcgggccgggcccgcgcacagcgcccgcatgtacaacatgatggagacggagctgaagccgccgggcccgcagcaaacttcggggggcggcggcggcaactccaccgcggcggcggccggcggcaaccagaaaaacagcccggaccgcgtcaagcggcccatgaatgccttcatggtgtggtcccgcgggcagcggcgcaagatggcccaggagaaccccaagatgcacaactcggagatcagcaagcgcctgggcgccgagtggaaacttttgtcggagacggagaagcggccgttcatcgacgaggctaagcggctgcgagcgctgcacatgaaggagcacccggattataaataccggccccggcggaaaaccaagacgctcatgaagaaggataagtacacgctgcccggcgggctgctggcccccggcggcaatagcatggcgagcggggtcggggtgggcgccggcctgggcgcgggcgtgaaccagcgcatggacagttacgcgcacatgaacggctggagcaacggcagctacagcatgatgcaggaccagctgggctacccgcagcacccgggcctcaatgcgcacggcgcagcgcagatgcagcccatgcaccgctacgacgtgagcgccctgcagtacaactccatgaccagctcgcagacctacatgaacggctcgcccacctacagcatgtcctactcgcagcagggcacccctggcatggctcttggctccatgggttcggtggtcaagtccgaggccagctccagcccccctgtggttacctcttcctcccactccagggcgccctgccaggccggggacctccgggacatgatcagcatgtatctccccggcgccgaggtgccggaacccgccgcccccagcagacttcacatgtcccagcactaccagagcggcccggtgcccggcacggccattaacggcacactgcccctctcacacatgtgagggccggacagcgaactggaggggggagaaattttcaaagaaaaacgagggaaatgggaggggtgcaaaagaggagagtaagaaacagcatggagaaaacccggtacgctcaaaaagaaaaaggaaaaaaaaaaatcccatcacccacagcaaatgacagctgcaaaagagaacaccaatcccatccacactcacgcaaaaaccgcgatgccgacaagaaaacttttatgagagagatcctggacttctttttgggggactatttttgtacagagaaaacctggggagggtggggagggcgggggaatggaccttgtatagatctggaggaaagaaagctacgaaaaactttttaaaagttctagtggtacggtaggagctttgcaggaagtttgcaaaagtctttaccaataatatttagagctagtctccaagcgacgaaaaaaatgttttaatatttgcaagcaacttttgtacagtatttatcgagataaacatggcaatcaaaatgtccattgtttataagctgagaatttgccaatatttttcaaggagaggcttcttgctgaattttgattctgcagctgaaatttaggacagttgcaaacgtgaaaagaagaaaattattcaaatttggacattttaattgtttaaaaattgtacaaaaggaaaaaattagaataagtactggcgaaccatctctgtggtcttgtttaaaaagggcaaaagttttagactgtactaaattttataacttactgttaaaagcaaaaatggccatgcaggttgacaccgttggtaatttataatagcttttgttcgatcccaactttccattttgttcagataaaaaaaaccatgaaattactgtgtttgaaatattttcttatggtttgtaatatttctgtaaatttattgtgatattttaaggttttcccccctttattttccgtagttgtattttaaaagattcggctctgtattatttgaatcagtctgccgagaatccatgtatatatttgaactaatatcatccttataacaggtacattttcaacttaagtttttactccattatgcacagtttgagataaataaatttttgaaatatggacactg

SEQ ID NO: 688 - DNA, 1318 bp, Homo sapiens
  source 1..1318: mol_type = genomic DNA
atggttgtctattaacttgttcaaaaaagtatcaggagttgtcaaggcagagaagagagtgtttgcaaaagggggaaagtagtttgctgcctctttaagactaggactgagagaaagaagaggagagagaaagaaagggagagaagtttgagccccaggcttaagcctttccaaaaaataataataacaatcatcggcggcggcaggatcggccagaggaggagggaagcgctttttttgatcctgattccagtttgcctctctctttttttcccccaaattattcttcgcctgattttcctcgcggagccctgcgctcccgacacccccccgccggcgggccgggcccgcgcacagcgcccgcatgtacaacatgatggagacggagctgaagccgccgggcccgcagcaaacttcggggggcggcggcggcaactccaccgcggcggcggccggcggcaaccagaaaaacagcccggaccgcgtcaagcggcccatgaatgccttcatggtgtggtcccgcgggcagcggcgcaagatggcccaggagaaccccaagatgcacaactcggagatcagcaagcgcctgggcgccgagtggaaacttttgtcggagacggagaagcggccgttcatcgacgaggctaagcggctgcgagcgctgcacatgaaggagcacccggattataaataccggccccggcggaaaaccaagacgctcatgaagaaggataagtacacgctgcccggcgggctgctggcccccggcggcaatagcatggcgagcggggtcggggtgggcgccggcctgggcgcgggcgtgaaccagcgcatggacagttacgcgcacatgaacggctggagcaacggcagctacagcatgatgcaggaccagctgggctacccgcagcacccgggcctcaatgcgcacggcgcagcgcagatgcagcccatgcaccgctacgacgtgagcgccctgcagtacaactccatgaccagctcgcagacctacatgaacggctcgcccacctacagcatgtcctactcgcagcagggcacccctggcatggctcttggctccatgggttcggtggtcaagtccgaggccagctccagcccccctgtggttacctcttcctcccactccagggcgccctgccaggccggggacctccgggacatgatcagcatgtatctccccggcgccgaggtgccggaacccgccgcccccagcagacttcacatgtcccagcactaccagagcggcccggtgcccggcacggccattaacggcacactgcccctctcacacatgtga

SEQ ID NO: 689 - DNA, 3664 bp, Homo sapiens
  source 1..3664: mol_type = genomic DNA
tgtaaatgctcttctgactaatgcaaaccatgtgtccatagaaccagaagatttttccaggggaaaagagcccccacgccccgcccagctataaggggccatgcaccaagcagggtacccaggctgcagaggtgccatggctgagtcacacctgctgcagtggctgctgctgctgctgcccacgctctgtggcccaggcactgctgcctggaccacctcatccttggcctgtgcccagggccctgagttctggtgccaaagcctggagcaagcattgcagtgcagagccctagggcattgcctacaggaagtctggggacatgtgggagccgatgacctatgccaagagtgtgaggacatcgtccacatccttaacaagatggccaaggaggccattttccaggacacgatgaggaagttcctggagcaggagtgcaacgtcctccccttgaagctgctcatgccccagtgcaaccaagtgcttgacgactacttccccctggtcatcgactacttccagaaccagactgactcaaacggcatctgtatgcacctgggcctgtgcaaatcccggcagccagagccagagcaggagccagggatgtcagaccccctgcccaaacctctgcgggaccctctgccagaccctctgctggacaagctcgtcctccctgtgctgcccggggccctccaggcgaggcctgggcctcacacacaggatctctccgagcagcaattccccattcctctcccctattgctggctctgcagggctctgatcaagcggatccaagccatgattcccaagggtgcgctagctgtggcagtggcccaggtgtgccgcgtggtacctctggtggcgggcggcatctgccagtgcctggctgagcgctactccgtcatcctgctcgacacgctgctgggccgcatgctgccccagctggtctgccgcctcgtcctccggtgctccatggatgacagcgctggcccaaggtcgccgacaggagaatggctgccgcgagactctgagtgccacctctgcatgtccgtgaccacccaggccgggaacagcagcgagcaggccataccacaggcaatgctccaggcctgtgttggctcctggctggacagggaaaagtgcaagcaatttgtggagcagcacacgccccagctgctgaccctggtgcccaggggctgggatgcccacaccacctgccaggccctcggggtgtgtgggaccatgtccagccctctccagtgtatccacagccccgacctttgatgagaactcagctgtccagctgcaaaggaaaagccaagtgagacgggctctgggaccatggtgaccaggctcttcccctgctccctggccctcgccagctgccaggctgaaaagaagcctcagctcccacaccgccctcctcaccgcccttcctcggcagtcacttccactggtggaccacgggcccccagccctgtgtcggccttgtctgtctcagctcaaccacagtctgacaccagagcccacttccatcctctctggtgtgaggcacagcgagggcagcatctggaggagctctgcagcctccacacctaccacgacctcccagggctgggctcaggaaaaaccagccactgctttacaggacagggggttgaagctgagccccgcctcacacccacccccatgcactcaaagattggattttacagctacttgcaattcaaaattcagaagaataaaaaatgggaacatacagaactctaaaagatagacatcagaaattgttaagttaagctttttcaaaaaatcagcaattccccagcgtagtcaagggtggacactgcacgctctggcatgatgggatggcgaccgggcaagctttcttcctcgagatgctctgctgcttgagagctattgctttgttaagatataaaaaggggtttctttttgtctttctgtaaggtggacttccagcttttgattgaaagtcctagggtgattctatttctgctgtgatttatctgctgaaagctcagctggggttgtgcaagctagggacccattcctgtgtaatacaatgtctgcaccaatgctaataaagtcctattctcttttatgagaaagaaaaagacaccgtcctttaaagtgctgcagtatggccagacgtggtggctcacacctgcaatcccagcaccttaggaggccgaggcaggaggatccttgaggtcaggagttcgagaccagcctcgccaacatggtgaaaccccatttctactaaaaatacaaaaaattagccaagtgtggtggcatatgcctgtaatcccaactactcagaaggccgaggcaggagaattacttgaacgcaggagaatcactgcagcccaggaggcagaggttgcagtgagccgagattgcaccactgcactccagcctgggtgacagagcaagactccatctcagtaaataaataaataaataaaaagcgctgcagtagctgtggcctcaccctgaagtcagcgggcccaggcctacctcactctctcccttggcagagaagcagacgtccatagctcctctccctcacaagcgctcccagcctgccctccagctgctgctctcccctcccagtctctactcactgggatgaggttaggtcatgaggacaccaaaaacctaaaaataaacaaaaagccaaacaagccttagcttttcttaaagactgaaatgcctggaagtgtccctttatttataaaataacttttgtcatatttcttatacatgtttcttgtaagaaattcagaaactacagacaaagagagtggaaattacccactgtcaggcctctgagcccaagctaagccatcatatcccctgtgccctgcacgtatacacccagatggcctgaagcaactgaagatccacaaaagaagtgaaaatagccagttcctgccttaactgatgacattccaccattgtgatttgttcctgccccaccctaactgatcaattgaccttgtgacaatacaccttccccacccttgagaaggtgctttgtaatattctccccacccaccccacgcccgcacccccgcacccttaagaaggtattttgtaatattctctccgccattgagaatgtgctttgtaagatccaccccctgcccacaaaaaattgctcctaactccaccgcctatcccaaacctacaagaactaatgataatcccaccaccctttgctgactctttttggactcagcccacctgcacccaggtgattaaaaagctttattgttcacacaaagcctgtttggtagtctcttcacagggaagcatgtgacacccacaatcccacctagcccaggagagagctacggcagggtgtgtgttttgacactgagcttggggctttttccatcttctccccacagcctctggctccacacctccaccgttcaagcgccagaaagagctgtctatgcagcctgctcttgggcctggggatgagacacacaattcattggctcctggattttaagtagacatttgtaaatctatagctaactactgtccttaaagccattgtttccattacaaaatccaactctctgagagaaaagggtgttttaaatttaaaaaaataaaaacaaaaaagtttgattg

SEQ ID NO: 690 - DNA, 1867 bp, Homo sapiens
  source 1..1867: mol_type = genomic DNA
tgtaaatgctcttctgactaatgcaaaccatgtgtccatagaaccagaagatttttccaggggaaaagagcccccacgccccgcccagctataaggggccatgcaccaagcagggtacccaggctgcagaggtgccatggctgagtcacacctgctgcagtggctgctgctgctgctgcccacgctctgtggcccaggcactgctgcctggaccacctcatccttggcctgtgcccagggccctgagttctggtgccaaagcctggagcaagcattgcagtgcagagccctagggcattgcctacaggaagtctggggacatgtgggagccgatgacctatgccaagagtgtgaggacatcgtccacatccttaacaagatggccaaggaggccattttccaggacacgatgaggaagttcctggagcaggagtgcaacgtcctccccttgaagctgctcatgccccagtgcaaccaagtgcttgacgactacttccccctggtcatcgactacttccagaaccagactgactcaaacggcatctgtatgcacctgggcctgtgcaaatcccggcagccagagccagagcaggagccagggatgtcagaccccctgcccaaacctctgcgggaccctctgccagaccctctgctggacaagctcgtcctccctgtgctgcccggggccctccaggcgaggcctgggcctcacacacaggatctctccgagcagcaattccccattcctctcccctattgctggctctgcagggctctgatcaagcggatccaagccatgattcccaagggtgcgctagctgtggcagtggcccaggtgtgccgcgtggtacctctggtggcgggcggcatctgccagtgcctggctgagcgctactccgtcatcctgctcgacacgctgctgggccgcatgctgccccagctggtctgccgcctcgtcctccggtgctccatggatgacagcgctggcccaaggtcgccgacaggagaatggctgccgcgagactctgagtgccacctctgcatgtccgtgaccacccaggccgggaacagcagcgagcaggccataccacaggcaatgctccaggcctgtgttggctcctggctggacagggaaaagtgcaagcaatttgtggagcagcacacgccccagctgctgaccctggtgcccaggggctgggatgcccacaccacctgccaggccctcggggtgtgtgggaccatgtccagccctctccagtgtatccacagccccgacctttgatgagaactcagctgtccagaaaaagacaccgtcctttaaagtgctgcagtatggccagacgtggtggctcacacctgcaatcccagcaccttaggaggccgaggcaggaggatccttgaggtcaggagttcgagaccagcctcgccaacatggtgaaaccccatttctactaaaaatacaaaaaattagccaagtgtggtggcatatgcctgtaatcccaactactcagaaggccgaggcaggagaattacttgaacgcaggagaatcactgcagcccaggaggcagaggttgcagtgagccgagattgcaccactgcactccagcctgggtgacagagcaagactccatctcagtaaataaataaataaataaaaagcgctgcagtagctgtggcctcaccctgaagtcagcgggcccaggcctacctcactctctcccttggcagagaagcagacgtccatagctcctctccctcacaagcgctcccagcctgccctccagctgctgctctcccctcccagtctctactcactgggatgaggttaggtcatgaggacaccaaaaacctaaaaataaacaaaaa

SEQ ID NO: 691 - DNA, 1302 bp, Homo sapiens
  source 1..1302: mol_type = genomic DNA
acccaggctgcagaggtgccatggctgagtcacacctgctgcagtggctgctgctgctgctgcccacgctctgtggcccaggcactgctgcctggaccacctcatccttggcctgtgcccagggccctgagttctggtgccaaagcctggagcaagcattgcagtgcagagccctagggcattgcctacaggacacgatgaggaagttcctggagcaggagtgcaacgtcctccccttgaagctgctcatgccccagtgcaaccaagtgcttgacgactacttccccctggtcatcgactacttccagaaccagactgactcaaacggcatctgtatgcacctgggcctgtgcaaatcccggcagccagagccagagcaggagccagggatgtcagaccccctgcccaaacctctgcgggaccctctgccagaccctctgctggacaagctcgtcctccctgtgctgcccggggccctccaggcgaggcctgggcctcacacacaggatctctccgagcagcaattccccattcctctcccctattgctggctctgcagggctctgatcaagcggatccaagccatgattcccaagggtgcgctagctgtggcagtggcccaggtgtgccgcgtggtacctctggtggcgggcggcatctgccagtgcctggctgagcgctactccgtcatcctgctcgacacgctgctgggccgcatgctgccccagctggtctgccgcctcgtcctccggtgctccatggatgacagcgctggcccaaggtcgccgacaggagaatggctgccgcgagactctgagtgccacctctgcatgtccgtgaccacccaggccgggaacagcagcgagcaggccataccacaggcaatgctccaggcctgtgttggctcctggctggacagggaaaagtgcaagcaatttgtggagcagcacacgccccagctgctgaccctggtgcccaggggctgggatgcccacaccacctgccaggccctcggggtgtgtgggaccatgtccagccctctccagtgtatccacagccccgacctttgatgagaactcagctgtccagaaaaagacaccgtcctttaaagtgctgcagtatggccagacgtggtggctcacacctgcaatcccagcaccttaggaggccgaggcaggaggatccttgaggtcaggagttcgagaccagcctcgccaacatggtgaaaccccatttctactaaaaatacaaaaaattagccaagtgtggtggcatatgcctgtaatcccaactactcagaag

SEQ ID NO: 692 - DNA, 3540 bp, Homo sapiens
  source 1..3540: mol_type = genomic DNA
ggtgccatggctgagtcacacctgctgcagtggctgctgctgctgctgcccacgctctgtggcccaggcactgctgcctggaccacctcatccttggcctgtgcccagggccctgagttctggtgccaaagcctggagcaagcattgcagtgcagagccctagggcattgcctacaggaagtctggggacatgtgggagccgatgacctatgccaagagtgtgaggacatcgtccacatccttaacaagatggccaaggaggccattttccaggacacgatgaggaagttcctggagcaggagtgcaacgtcctccccttgaagctgctcatgccccagtgcaaccaagtgcttgacgactacttccccctggtcatcgactacttccagaaccagactgactcaaacggcatctgtatgcacctgggcctgtgcaaatcccggcagccagagccagagcaggagccagggatgtcagaccccctgcccaaacctctgcgggaccctctgccagaccctctgctggacaagctcgtcctccctgtgctgcccggggccctccaggcgaggcctgggcctcacacacaggatctctccgagcagcaattccccattcctctcccctattgctggctctgcagggctctgatcaagcggatccaagccatgattcccaagggtgcgctagctgtggcagtggcccaggtgtgccgcgtggtacctctggtggcgggcggcatctgccagtgcctggctgagcgctactccgtcatcctgctcgacacgctgctgggccgcatgctgccccagctggtctgccgcctcgtcctccggtgctccatggatgacagcgctggcccaaggtcgccgacaggagaatggctgccgcgagactctgagtgccacctctgcatgtccgtgaccacccaggccgggaacagcagcgagcaggccataccacaggcaatgctccaggcctgtgttggctcctggctggacagggaaaagtgcaagcaatttgtggagcagcacacgccccagctgctgaccctggtgcccaggggctgggatgcccacaccacctgccaggccctcggggtgtgtgggaccatgtccagccctctccagtgtatccacagccccgacctttgatgagaactcagctgtccagctgcaaaggaaaagccaagtgagacgggctctgggaccatggtgaccaggctcttcccctgctccctggccctcgccagctgccaggctgaaaagaagcctcagctcccacaccgccctcctcaccgcccttcctcggcagtcacttccactggtggaccacgggcccccagccctgtgtcggccttgtctgtctcagctcaaccacagtctgacaccagagcccacttccatcctctctggtgtgaggcacagcgagggcagcatctggaggagctctgcagcctccacacctaccacgacctcccagggctgggctcaggaaaaaccagccactgctttacaggacagggggttgaagctgagccccgcctcacacccacccccatgcactcaaagattggattttacagctacttgcaattcaaaattcagaagaataaaaaatgggaacatacagaactctaaaagatagacatcagaaattgttaagttaagctttttcaaaaaatcagcaattccccagcgtagtcaagggtggacactgcacgctctggcatgatgggatggcgaccgggcaagctttcttcctcgagatgctctgctgcttgagagctattgctttgttaagatataaaaaggggtttctttttgtctttctgtaaggtggacttccagcttttgattgaaagtcctagggtgattctatttctgctgtgatttatctgctgaaagctcagctggggttgtgcaagctagggacccattcctgtgtaatacaatgtctgcaccaatgctaataaagtcctattctcttttatgagaaagaaaaagacaccgtcctttaaagtgctgcagtatggccagacgtggtggctcacacctgcaatcccagcaccttaggaggccgaggcaggaggatccttgaggtcaggagttcgagaccagcctcgccaacatggtgaaaccccatttctactaaaaatacaaaaaattagccaagtgtggtggcatatgcctgtaatcccaactactcagaaggccgaggcaggagaattacttgaacgcaggagaatcactgcagcccaggaggcagaggttgcagtgagccgagattgcaccactgcactccagcctgggtgacagagcaagactccatctcagtaaataaataaataaataaaaagcgctgcagtagctgtggcctcaccctgaagtcagcgggcccaggcctacctcactctctcccttggcagagaagcagacgtccatagctcctctccctcacaagcgctcccagcctgccctccagctgctgctctcccctcccagtctctactcactgggatgaggttaggtcatgaggacaccaaaaacctaaaaataaacaaaaagccaaacaagccttagcttttcttaaagactgaaatgcctggaagtgtccctttatttataaaataacttttgtcatatttcttatacatgtttcttgtaagaaattcagaaactacagacaaagagagtggaaattacccactgtcaggcctctgagcccaagctaagccatcatatcccctgtgccctgcacgtatacacccagatggcctgaagcaactgaagatccacaaaagaagtgaaaatagccagttcctgccttaactgatgacattccaccattgtgatttgttcctgccccaccctaactgatcaattgaccttgtgacaatacaccttccccacccttgagaaggtgctttgtaatattctccccacccaccccacgcccgcacccccgcacccttaagaaggtattttgtaatattctctccgccattgagaatgtgctttgtaagatccaccccctgcccacaaaaaattgctcctaactccaccgcctatcccaaacctacaagaactaatgataatcccaccaccctttgctgactctttttggactcagcccacctgcacccaggtgattaaaaagctttattgttcacacaaagcctgtttggtagtctcttcacagggaagcatgtgacacccacaatcccacctagcccaggagagagctacggcagggtgtgtgttttgacactgagcttggggctttttccatcttctccccacagcctctggctccacacctccaccgttcaagcgccagaaagagctgtctatgcagcctgctcttgggcctggggatgagacacacaattcattggctcctggattttaagtagacatttgtaaatctatagctaactactgtccttaaagccattgtttccattacaaaatccaactctctgagagaaaagggtgttttaaatttaaaaaaataaaaacaaaaaagtttgattgagacaa

SEQ ID NO: 693 - DNA, 4109 bp, Homo sapiens
  source 1..4109: mol_type = genomic DNA
ccttccttttcccgaacgtccagggagggagggccgggcacttataaactcgagccctggccgatccgcatgtcagaggctgcctcgcaggggctgcgcgcagcggcaagaagtgtctgggctgggacggacaggagaggctgtcgccatcggcgtcctgtgcccctctgctccggcacggccctgtcgcagtgcccgcgctttccccggcgcctgcacgcggcgcgcctgggtaacatgcttggggtcctggtccttggcgcgctggccctggccggcctggggttccccgcacccgcagagccgcagccgggtggcagccagtgcgtcgagcacgactgcttcgcgctctacccgggccccgcgaccttcctcaatgccagtcagatctgcgacggactgcggggccacctaatgacagtgcgctcctcggtggctgccgatgtcatttccttgctactgaacggcgacggcggcgttggccgccggcgcctctggatcggcctgcagctgccacccggctgcggcgaccccaagcgcctcgggcccctgcgcggcttccagtgggttacgggagacaacaacaccagctatagcaggtgggcacggctcgacctcaatggggctcccctctgcggcccgttgtgcgtcgctgtctccgctgctgaggccactgtgcccagcgagccgatctgggaggagcagcagtgcgaagtgaaggccgatggcttcctctgcgagttccacttcccagccacctgcaggccactggctgtggagcccggcgccgcggctgccgccgtctcgatcacctacggcaccccgttcgcggcccgcggagcggacttccaggcgctgccggtgggcagctccgccgcggtggctcccctcggcttacagctaatgtgcaccgcgccgcccggagcggtccaggggcactgggccagggaggcgccgggcgcttgggactgcagcgtggagaacggcggctgcgagcacgcgtgcaatgcgatccctggggctccccgctgccagtgcccagccggcgccgccctgcaggcagacgggcgctcctgcaccgcatccgcgacgcagtcctgcaacgacctctgcgagcacttctgcgttcccaaccccgaccagccgggctcctactcgtgcatgtgcgagaccggctaccggctggcggccgaccaacaccggtgcgaggacgtggatgactgcatactggagcccagtccgtgtccgcagcgctgtgtcaacacacagggtggcttcgagtgccactgctaccctaactacgacctggtggacggcgagtgtgtggagcccgtggacccgtgcttcagagccaactgcgagtaccagtgccagcccctgaaccaaactagctacctctgcgtctgcgccgagggcttcgcgcccattccccacgagccgcacaggtgccagatgttttgcaaccagactgcctgtccagccgactgcgaccccaacacccaggctagctgtgagtgccctgaaggctacatcctggacgacggtttcatctgcacggacatcgacgagtgcgaaaacggcggcttctgctccggggtgtgccacaacctccccggtaccttcgagtgcatctgcgggcccgactcggcccttgcccgccacattggcaccgactgtgactccggcaaggtggacggtggcgacagcggctctggcgagcccccgcccagcccgacgcccggctccaccttgactcctccggccgtggggctcgtgcattcgggcttgctcataggcatctccatcgcgagcctgtgcctggtggtggcgcttttggcgctcctctgccacctgcgcaagaagcagggcgccgccagggccaagatggagtacaagtgcgcggccccttccaaggaggtagtgctgcagcacgtgcggaccgagcggacgccgcagagactctgagcggcctccgtccaggagcctggctccgtccaggagcctgtgcctcctcacccccagctttgctaccaaagcaccttagctggcattacagctggagaagaccctccccgcaccccccaagctgttttcttctattccatggctaactggcgagggggtgattagagggaggagaatgagcctcggcctcttccgtgacgtcactggaccactgggcaatgatggcaattttgtaacgaagacacagactgcgatttgtcccaggtcctcactaccgggcgcaggagggtgagcgttattggtcggcagccttctgggcagaccttgacctcgtgggctagggatgactaaaatatttattttttttaagtatttaggtttttgtttgtttcctttgttcttacctgtatgtctccagtatccactttgcacagctctccggtctctctctctctacaaactcccacttgtcatgtgacaggtaaactatcttggtgaatttttttttcctagccctctcacatttatgaagcaagccccacttattccccattcttcctagttttctcctcccaggaactgggccaactcacctgagtcaccctacctgtgcctgaccctacttcttttgctcttagctgtctgctcagacagaacccctacatgaaacagaaacaaaaacactaaaaataaaaatggccatttgctttttcaccagatttgctaatttatcctgaaatttcagattcccagagcaaaataattttaaacaaaggttgagatgtaaaaggtattaaattgatgttgctggactgtcatagaaattacacccaaagaggtatttatctttacttttaaacagtgagcctgaattttgttgctgttttgatttgtactgaaaaatggtaattgttgctaatcttcttatgcaatttccttttttgttattattacttatttttgacagtgttgaaaatgttcagaaggttgctctagattgagagaagagacaaacacctcccaggagacagttcaagaaagcttcaaactgcatgattcatgccaattagcaattgactgtcactgttccttgtcactggtagaccaaaataaaaccagctctactggtcttgtggaattgggagcttgggaatggatcctggaggatgcccaattagggcctagccttaatcaggtcctcagagaatttctaccatttcagagaggccttttggaatgtggcccctgaacaagaattggaagctgccctgcccatgggagctggttagaaatgcagaatcctaggctccaccccatccagttcatgagaatctatatttaacaagatctgcagggggtgtgtctgctcagtaatttgaggacaaccattccagactgcttccaattttctggaatacatgaaatatagatcagttataagtagcaggccaagtcaggcccttattttcaagaaactgaggaattttctttgtgtagctttgctctttggtagaaaaggctaggtacacagctctagacactgccacacagggtctgcaaggtctttggttcagctaagctaggaatgaaatcctgcttcagtgtatggaaataaatgtatcatagaaatgtaacttttgtaagacaaaggttttcctcttctattttgtaaactcaaaatatttgtacatagttatttatttattggagataatctagaacacaggcaaaatccttgcttatgacatcacttgtacaaaataaacaaataacaatgtgctctcgggttgtgtgtctgttcacttttcctccctcagtgccctcattttatgtcattaaatggggctcacaaaccatgcaaatgctatgagatgcatggagggctgccctgtaccccagcacttgtgttgtctggtggtggcaccatctctgattttcaaagctttttccagaggctattattttcactgtagaatgatttcatgctatctctgtgtgcacaaatatttattttctttctgtaaccataacaacttcatatatgaggacttgtgtctctgtgcttttaaatgcataaatgcattataggatcatttgttggaatgaattaaataaacccttcctggggcatctggcgaatccca

SEQ ID NO: 694 - DNA, 3480 bp, Homo sapiens
  source 1..3480: mol_type = genomic DNA
tataaactcgagccctggccgatccgcatgtcagaggctgcctcgcaggggctgcgcgcagcggcaagaagtgtctgggctgggacggacaggagaggctgtcgccatcggcgtcctgtgcccctctgctccggcacggccctgtcgcagtgcccgcgctttccccggcgcctgcacgcggcgcgcctgggtaacatgcttggggtcctggtccttggcgcgctggccctggccggcctggggttccccgcacccggctgcggcgaccccaagcgcctcgggcccctgcgcggcttccagtgggttacgggagacaacaacaccagctatagcaggtgggcacggctcgacctcaatggggctcccctctgcggcccgttgtgcgtcgctgtctccgctgctgaggccactgtgcccagcgagccgatctgggaggagcagcagtgcgaagtgaaggccgatggcttcctctgcgagttccacttcccagccacctgcaggccactggctgtggagcccggcgccgcggctgccgccgtctcgatcacctacggcaccccgttcgcggcccgcggagcggacttccaggcgctgccggtgggcagctccgccgcggtggctcccctcggcttacagctaatgtgcaccgcgccgcccggagcggtccaggggcactgggccagggaggcgccgggcgcttgggactgcagcgtggagaacggcggctgcgagcacgcgtgcaatgcgatccctggggctccccgctgccagtgcccagccggcgccgccctgcaggcagacgggcgctcctgcaccgcatccgcgacgcagtcctgcaacgacctctgcgagcacttctgcgttcccaaccccgaccagccgggctcctactcgtgcatgtgcgagaccggctaccggctggcggccgaccaacaccggtgcgaggacgtggatgactgcatactggagcccagtccgtgtccgcagcgctgtgtcaacacacagggtggcttcgagtgccactgctaccctaactacgacctggtggacggcgagtgtgtggagcccgtggacccgtgcttcagagccaactgcgagtaccagtgccagcccctgaaccaaactagctacctctgcgtctgcgccgagggcttcgcgcccattccccacgagccgcacaggtgccagatgttttgcaaccagactgcctgtccagccgactgcgaccccaacacccaggctagctgtgagtgccctgaaggctacatcctggacgacggtttcatctgcacggacatcgacgagtgcgaaaacggcggcttctgctccggggtgtgccacaacctccccggtaccttcgagtgcatctgcgggcccgactcggcccttgcccgccacattggcaccgactgtgactccggcaaggtggacggtggcgacagcggctctggcgagcccccgcccagcccgacgcccggctccaccttgactcctccggccgtggggctcgtgcattcgggcttgctcataggcatctccatcgcgagcctgtgcctggtggtggcgcttttggcgctcctctgccacctgcgcaagaagcagggcgccgccagggccaagatggagtacaagtgcgcggccccttccaaggaggtagtgctgcagcacgtgcggaccgagcggacgccgcagagactctgagcggcctccgtccaggagcctggctccgtccaggagcctgtgcctcctcacccccagctttgctaccaaagcaccttagctggcattacagctggagaagaccctccccgcaccccccaagctgttttcttctattccatggctaactggcgagggggtgattagagggaggagaatgagcctcggcctcttccgtgacgtcactggaccactgggcaatgatggcaattttgtaacgaagacacagactgcgatttgtcccaggtcctcactaccgggcgcaggagggtgagcgttattggtcggcagccttctgggcagaccttgacctcgtgggctagggatgactaaaatatttattttttttaagtatttaggtttttgtttgtttcctttgttcttacctgtatgtctccagtatccactttgcacagctctccggtctctctctctctacaaactcccacttgtcatgtgacaggtaaactatcttggtgaatttttttttcctagccctctcacatttatgaagcaagccccacttattccccattcttcctagttttctcctcccaggaactgggccaactcacctgagtcaccctacctgtgcctgaccctacttcttttgctcttagctgtctgctcagacagaacccctacatgaaacagaaacaaaaacactaaaaataaaaatggccatttgctttttcaccagatttgctaatttatcctgaaatttcagattcccagagcaaaataattttaaacaaaggttgagatgtaaaaggtattaaattgatgttgctggactgtcatagaaattacacccaaagaggtatttatctttacttttaaacagtgagcctgaattttgttgctgttttgatttgtactgaaaaatggtaattgttgctaatcttcttatgcaatttccttttttgttattattacttatttttgacagtgttgaaaatgttcagaaggttgctctagattgagagaagagacaaacacctcccaggagacagttcaagaaagcttcaaactgcatgattcatgccaattagcaattgactgtcactgttccttgtcactggtagaccaaaataaaaccagctctactggtcttgtggaattgggagcttgggaatggatcctggaggatgcccaattagggcctagccttaatcaggtcctcagagaatttctaccatttcagagaggccttttggaatgtggcccctgaacaagaattggaagctgccctgcccatgggagctggttagaaatgcagaatcctaggctccaccccatccagttcatgagaatctatatttaacaagatctgcagggggtgtgtctgctcagtaatttgaggacaaccattccagactgcttccaattttctggaatacatgaaatatagatcagttataagtagcaggccaagtcaggcccttattttcaagaaactgaggaattttctttgtgtagctttgctctttggtagaaaaggctaggtacacagctctagacactgccacacagggtctgcaaggtctttggttcagctaagctaggaatgaaatcctgcttcagtgtatggaaataaatgtatcatagaaatgtaacttttgtaagacaaaggttttcctcttctattttgtaaactcaaaatatttgtacatagttatttatttattggagataatctagaacacaggcaaaatccttgcttatgacatcacttgtacaaaataaacaaataacaatgtg

SEQ ID NO: 695 - DNA, 1855 bp, Homo sapiens
  source 1..1855: mol_type = genomic DNA
tcttcctacccatctgctccccagagggctgcctgctgtgcacttgggtcctggagcccttctccacccggatagattcttcacccttggcccgcctttgccccaccctactctgcccagaagtgcaagagcctaagccgcctccatggccccaggaaggattcaggggagaggccccaaacagggagccacgccagccagacaccccggccagaatggagctgactgaattgctcctcgtggtcatgcttctcctaactgcaaggctaacgctgtccagcccggctcctcctgcttgtgacctccgagtcctcagtaaactgcttcgtgactcccatgtccttcacagcagactgagccagtgcccagaggttcaccctttgcctacacctgtcctgctgcctgctgtggactttagcttgggagaatggaaaacccagatggaggagaccaaggcacaggacattctgggagcagtgacccttctgctggagggagtgatggcagcacggggacaactgggacccacttgcctctcatccctcctggggcagctttctggacaggtccgtctcctccttggggccctgcagagcctccttggaacccagcttcctccacagggcaggaccacagctcacaaggatcccaatgccatcttcctgagcttccaacacctgctccgaggaaaggtgcgtttcctgatgcttgtaggagggtccaccctctgcgtcaggcgggccccacccaccacagctgtccccagcagaacctctctagtcctcacactgaacgagctcccaaacaggacttctggattgttggagacaaacttcactgcctcagccagaactactggctctgggcttctgaagtggcagcagggattcagagccaagattcctggtctgctgaaccaaacctccaggtccctggaccaaatccccggatacctgaacaggatacacgaactcttgaatggaactcgtggactctttcctggaccctcacgcaggaccctaggagccccggacatttcctcaggaacatcagacacaggctccctgccacccaacctccagcctggatattctccttccccaacccatcctcctactggacagtatacgctcttccctcttccacccaccttgcccacccctgtggtccagctccaccccctgcttcctgacccttctgctccaacgcccacccctaccagccctcttctaaacacatcctacacccactcccagaatctgtctcaggaagggtaaggttctcagacactgccgacatcagcattgtctcgtgtacagctcccttccctgcagggcgcccctgggagacaactggacaagatttcctactttctcctgaaacccaaagccctggtaaaagggatacacaggactgaaaagggaatcatttttcactgtacattataaaccttcagaagctatttttttaagctatcagcaatactcatcagagcagctagctctttggtctattttctgcagaaatttgcaactcactgattctctacatgctctttttctgtgataactctgcaaaggcctgggctggcctggcagttgaacagagggagagactaaccttgagtcagaaaacagagaaagggtaatttcctttgcttcaaattcaaggccttccaacgcccccatcccctttactatcattctcagtgggactctgatcccatattcttaacagatctttactcttgagaaatgaataagctttctctcagaaatgctgtccctatacactagacaaaactgagcctgtataaggaataaatgggagcgccgaaaagctccctaaaaagcaa

SEQ ID NO: 696 - DNA, 1160 bp, Homo sapiens
  source 1..1160: mol_type = genomic DNA
tcttcctacccatctgctccccagagggctgcctgctgtgcacttgggtcctggagcccttctccacccggatagattcttcacccttggcccgcctttgccccaccctactctgcccagaagtgcaagagcctaagccgcctccatggccccaggaaggattcaggggagaggccccaaacagggagccacgccagccagacaccccggccagaatggagctgactgaattgctcctcgtggtcatgcttctcctaactgcaaggctaacgctgtccagcccggctcctcctgcttgtgacctccgagtcctcagtaaactgcttcgtgactcccatgtccttcacagcagactgagccagtgcccagaggttcaccctttgcctacacctgtcctgctgcctgctgtggactttagcttgggagaatggaaaacccagatggaggagaccaaggcacaggacattctgggagcagtgacccttctgctggagggagtgatggcagcacggggacaactgggacccacttgcctctcatccctcctggggcagctttctggacaggtccgtctcctccttggggccctgcagagcctccttggaacccagcttcctccacagggcaggaccacagctcacaaggatcccaatgccatcttcctgagcttccaacacctgctccgaggaaagacttctggattgttggagacaaacttcactgcctcagccagaactactggctctgggcttctgaagtggcagcagggattcagagccaagattcctggtctgctgaaccaaacctccaggtccctggaccaaatccccggatacctgaacaggatacacgaactcttgaatggaactcgtggactctttcctggaccctcacgcaggaccctaggagccccggacatttcctcaggaacatcagacacaggctccctgccacccaacctccagcctggatattctccttccccaacccatcctcctactggacagtatacgctcttccctcttccacccaccttgcccacccctgtggtccagctccaccccctgcttcctgacccttctgctccaacgcccacccctaccagccctcttctaaacacatcctacacccactcccagaatctgtctcaggaagggtaa

SEQ ID NO: 697 - DNA, 1132 bp, Homo sapiens
  source 1..1132: mol_type = genomic DNA
atggagctgactgaattgctcctcgtggtcatgcttctcctaactgcaaggctaacgctgtccagcccggctcctcctgcttgtgacctccgagtcctcagtaaactgcttcgtgactcccatgtccttcacagcagactgagccagtgcccagaggttcaccctttgcctacacctgtcctgctgcctgctgtggactttagcttgggagaatggaaaacccagatggaggagaccaaggcacaggacattctgggagcagtgacccttctgctggagggagtgatggcagcacggggacaactgggacccacttgcctctcatccctcctggggcagctttctggacaggtccgtctcctccttggggccctgcagagcctccttggaacccagcttcctccacagggcaggaccacagctcacaaggatcccaatgccatcttcctgagcttccaacacctgctccgaggaaaggacttctggattgttggagacaaacttcactgcctcagccagaactactggctctgggcttctgaagtggcagcagggattcagagccaagattcctggtctgctgaaccaaacctccaggtccctggaccaaatccccggatacctgaacaggatacacgaactcttgaatggaactcgtggactctttcctggaccctcacgcaggaccctaggagccccggacatttcctcaggaacatcagacacaggctccctgccacccaacctccagcctggatattctccttccccaacccatcctcctactggacagtatacgctcttccctcttccacccaccttgcccacccctgtggtccagctccaccccctgcttcctgacccttctgctccaacgcccacccctaccagccctcttctaaacacatcctacacccactcccagaatctgtctcaggaagggtaaggttctcagacactgccgacatcagcattgtctcgtgtacagctcccttccctgcagggcgcccctgggagacaactggacaagatttcctactttctcctgaaacccaaagccctggtaaaagggatacacaggactgaaaagggaatcatttttcactgtacattataaaccttcagaagctat

SEQ ID NO: 698 - DNA, 1505 bp, Homo sapiens
  source 1..1505: mol_type = genomic DNA
cctacccatctgctccccagagggctgcctgctgtgcacttgggtcctggagcccttctccacccggatagattcttcacccttggcccgcctttgccccaccctactctgcccagaagtgcaagagcctaagccgcctccatggccccaggaaggattcaggggagaggccccaaacagggagccacgccagccagacaccccggccagaatggagctgactgaattgctcctcgtggtcatgcttctcctaactgcaaggctaacgctgtccagcccggctcctcctgcttgtgacctccgagtcctcagtaaactgcttcgtgactcccatgtccttcacagcagactgagccagtgcccagaggttcaccctttgcctacacctgtcctgctgcctgctgtggactttagcttgggagaatggaaaacccagatggaggagaccaaggcacaggacattctgggagcagtgacccttctgctggagggagtgatggcagcacggggacaactgggacccacttgcctctcatccctcctggggcagctttctggacaggtccgtctcctccttggggccctgcagagcctccttggaacccagggcaggaccacagctcacaaggatcccaatgccatcttcctgagcttccaacacctgctccgaggaaaggtgcgtttcctgatgcttgtaggagggtccaccctctgcgtcaggcgggccccacccaccacagctgtccccagcagaacctctctagtcctcacactgaacgagctcccaaacaggacttctggattgttggagacaaacttcactgcctcagccagaactactggctctgggcttctgaagtggcagcagggattcagagccaagattcctggtctgctgaaccaaacctccaggtccctggaccaaatccccggatacctgaacaggatacacgaactcttgaatggaactcgtggactctttcctggaccctcacgcaggaccctaggagccccggacatttcctcaggaacatcagacacaggctccctgccacccaacctccagcctggatattctccttccccaacccatcctcctactggacagtatacgctcttccctcttccacccaccttgcccacccctgtggtccagctccaccccctgcttcctgacccttctgctccaacgcccacccctaccagccctcttctaaacacatcctacacccactcccagaatctgtctcaggaagggtaaggttctcagacactgccgacatcagcattgtctcgtgtacagctcccttccctgcagggcgcccctgggagacaactggacaagatttcctactttctcctgaaacccaaagccctggtaaaagggatacacaggactgaaaagggaatcatttttcactgtacattataaaccttcagaagctatttttttaagctatcagcaatactcatcagagcagctagctctttggtctattttctgc

SEQ ID NO: 699 - DNA, 2888 bp, Homo sapiens
  source 1..2888: mol_type = genomic DNA
cgctgggggacagcctgcaggcttcaggaggggacacaagcatggagcggctttggggtctattccagagagcgcaacaactgtccccaagatcctctcagaccgtctaccagcgtgtggaaggcccccggaaagggcacctggaggaggaagaggaagacggggaggagggggcggagacattggcccacttctgccccatggagctgaggggccctgagcccctgggctctagacccaggcagccaaacctcattccctgggcggcagcaggacggagggctgccccctacctggtcctgacggccctgctgatcttcactggggccttcctactgggctacgtcgccttccgagggtcctgccaggcgtgcggagactctgtgttggtggtcagtgaggatgtcaactatgagcctgacctggatttccaccagggcagactctactggagcgacctccaggccatgttcctgcagttcctgggggaggggcgcctggaggacaccatcaggcaaaccagccttcgggaacgggtggcaggctcggccgggatggccgctctgactcaggacattcgcgcggcgctctcccgccagaagctggaccacgtgtggaccgacacgcactacgtggggctgcaattcccggatccggctcaccccaacaccctgcactgggtcgatgaggccgggaaggtcggagagcagctgccgctggaggaccctgacgtctactgcccctacagcgccatcggcaacgtcacgggagagctggtgtacgcccactacgggcggcccgaagacctgcaggacctgcgggccaggggcgtggatccagtgggccgcctgctgctggtgcgcgtgggggtgatcagcttcgcccagaaggtgaccaatgctcaggacttcggggctcaaggagtgctcatatacccagagccagcggacttctcccaggacccacccaagccaagcctgtccagccagcaggcagtgtatggacatgtgcacctgggaactggagacccctacacacctggcttcccttccttcaatcaaacccagttccctccagttgcatcatcaggccttcccagcatcccagcccagcccatcagtgcagacattgcctcccgcctgctgaggaagctcaaaggccctgtggccccccaagaatggcaggggagcctcctaggctccccttatcacctgggccccgggccacgactgcggctagtggtcaacaatcacaggacctccacccccatcaacaacatcttcggctgcatcgaaggccgctcagagccagatcactacgttgtcatcggggcccagagggatgcatggggcccaggagcagctaaatccgctgtggggacggctatactcctggagctggtgcggaccttttcctccatggtgagcaacggcttccggccccgcagaagtctcctcttcatcagctgggacggtggtgactttggaagcgtgggctccacggagtggctagagggctacctcagcgtgctgcacctcaaagccgtagtgtacgtgagcctggacaacgcagtgctgggggatgacaagtttcatgccaagaccagcccccttctgacaagtctcattgagagtgtcctgaagcaggtggattctcccaaccacagtgggcagactctctatgaacaggtggtgttcaccaatcccagctgggatgctgaggtgatccggcccctacccatggacagcagtgcctattccttcacggcctttgtgggagtccctgccgtcgagttctcctttatggaggacgaccaggcctacccattcctgcacacaaaggaggacacttatgagaacctgcataaggtgctgcaaggccgcctgcccgccgtggcccaggccgtggcccagctcgcagggcagctcctcatccggctcagccacgatcgcctgctgcccctcgacttcggccgctacggggacgtcgtcctcaggcacatcgggaacctcaacgagttctctggggacctcaaggcccgcgggctgaccctgcagtgggtgtactcggcgcggggggactacatccgggcggcggaaaagctgcggcaggagatctacagctcggaggagagagacgagcgactgacacgcatgtacaacgtgcgcataatgcgggtggagttctacttcctttcccagtacgtgtcgccagccgactccccgttccgccacatcttcatgggccgtggagaccacacgctgggcgccctgctggaccacctgcggctgctgcgctccaacagctccgggacccccggggccacctcctccactggcttccaggagagccgtttccggcgtcagctagccctgctcacctggacgctgcaaggggcagccaatgcgcttagcggggatgtctggaacattgataacaacttctgaggccctggggatcctcacatccccgtcccccagtcaagagctcctctgctcctcgcttgaatgattcagggtcagggaggtggctcagagtccacctctcattgctgatcaatttctcattacccctacacatctctccacggagcccagaccccagcacagatatccacacaccccagccctgcagtgtagctgaccctaatgtgacggtcatactgtcggttaatcagagagtagcatcccttcaatcacagccccttcccctttctggggtcctccatacctagagaccactctgggaggtttgctaggccctgggacctggccagctctgttagtgggagagatcgctggcaccatagccttatggccaacaggtggtctgtggtgaaaggggcgtggagtttcaatatcaataaaccacctgatatcaataagcca

SEQ ID NO: 700 - DNA, 2631 bp, Homo sapiens
  source 1..2631: mol_type = genomic DNA
cgctgggggacagcctgcaggcttcaggaggggacacaagcatggagcggctttggggtctattccagagagcgcaacaactgtccccaagatcctctcagaccgtctaccagcgtgtggaaggcccccggaaagggcacctggaggaggaagaggaagacggggaggagggggcggagacattggcccacttctgccccatggagctgaggggccctgagcccctgggctctagacccaggcagccaaacctcattccctgggcggcagcaggacggagggctgccccctacctggtcctgacggccctgctgatcttcactggggccttcctactgggctacgtcgccttccgagggtcctgccaggcgtgcggagactctgtgttggtggtcagtgaggatgtcaactatgagcctgacctggatttccaccagggcagactctactggagcgacctccaggccatgttcctgcagttcctgggggaggggcgcctggaggacaccatcaggcaaaccagccttcgggaacgggtggcaggctcggccgggatggccgctctgactcaggacattcgcgcggcgctctcccgccagaagctggaccacgtgtggaccgacacgcactacgtggggctgcaattcccggatccggctcaccccaacaccctgcactgggtcgatgaggccgggaaggtcggagagcagctgccgctggaggaccctgacgtctactgcccctacagcgccatcggcaacgtcacgggagagctggtgtacgcccactacgggcggcccgaagacctgcaggacctgcgggccaggggcgtggatccagtgggccgcctgctgctggtgcgcgtgggggtgatcagcttcgcccagaaggaagctcaaaggccctgtggccccccaagaatggcaggggagcctcctaggctccccttatcacctgggccccgggccacgactgcggctagtggtcaacaatcacaggacctccacccccatcaacaacatcttcggctgcatcgaaggccgctcagagccagatcactacgttgtcatcggggcccagagggatgcatggggcccaggagcagctaaatccgctgtggggacggctatactcctggagctggtgcggaccttttcctccatggtgagcaacggcttccggccccgcagaagtctcctcttcatcagctgggacggtggtgactttggaagcgtgggctccacggagtggctagagggctacctcagcgtgctgcacctcaaagccgtagtgtacgtgagcctggacaacgcagtgctgggggatgacaagtttcatgccaagaccagcccccttctgacaagtctcattgagagtgtcctgaagcaggtggattctcccaaccacagtgggcagactctctatgaacaggtggtgttcaccaatcccagctgggatgctgaggtgatccggcccctacccatggacagcagtgcctattccttcacggcctttgtgggagtccctgccgtcgagttctcctttatggaggacgaccaggcctacccattcctgcacacaaaggaggacacttatgagaacctgcataaggtgctgcaaggccgcctgcccgccgtggcccaggccgtggcccagctcgcagggcagctcctcatccggctcagccacgatcgcctgctgcccctcgacttcggccgctacggggacgtcgtcctcaggcacatcgggaacctcaacgagttctctggggacctcaaggcccgcgggctgaccctgcagtgggtgtactcggcgcggggggactacatccgggcggcggaaaagctgcggcaggagatctacagctcggaggagagagacgagcgactgacacgcatgtacaacgtgcgcataatgcgggtggagttctacttcctttcccagtacgtgtcgccagccgactccccgttccgccacatcttcatgggccgtggagaccacacgctgggcgccctgctggaccacctgcggctgctgcgctccaacagctccgggacccccggggccacctcctccactggcttccaggagagccgtttccggcgtcagctagccctgctcacctggacgctgcaaggggcagccaatgcgcttagcggggatgtctggaacattgataacaacttctgaggccctggggatcctcacatccccgtcccccagtcaagagctcctctgctcctcgcttgaatgattcagggtcagggaggtggctcagagtccacctctcattgctgatcaatttctcattacccctacacatctctccacggagcccagaccccagcacagatatccacacaccccagccctgcagtgtagctgaccctaatgtgacggtcatactgtcggttaatcagagagtagcatcccttcaatcacagccccttcccctttctggggtcctccatacctagagaccactctgggaggtttgctaggccctgggacctggccagctctgttagtgggagagatcgctggcaccatagccttatggccaacaggtggtctgtggtgaaaggggcgtggagtttcaatatcaataaaccacctgatatcaataagcca

SEQ ID NO: 701 - DNA, 3131 bp, Homo sapiens
  source 1..3131: mol_type = genomic DNA
cacgcctgagcaccccaggacctgcgctcagggaggaggcaggcgtggggctgtggagagattggcaggggagagcacagccccttgtgctctggcctggacccgggggccacgtctggaaggctggactgaggccaggactgtgcccccacccttgggggtggtgaggagcagccttggttcaggctgcctgccaggactgataaggggccctcctagggctcccacaaacggtttatcggtttatcgctgggggacagcctgcaggcttcaggaggggacacaagcatggagcggctttggggtctattccagagagcgcaacaactgtccccaagatcctctcagaccgtctaccagcgtgtggaaggcccccggaaagggcacctggaggaggaagaggaagacggggaggagggggcggagacattggcccacttctgccccatggagctgaggggccctgagcccctgggctctagacccaggcagccaaacctcattccctgggcggcagcaggacggagggctgccccctacctggtcctgacggccctgctgatcttcactggggccttcctactgggctacgtcgccttccgagggtcctgccaggcgtgcggagactctgtgttggtggtcagtgaggatgtcaactatgagcctgacctggatttccaccagggcagactctactggagcgacctccaggccatgttcctgcagttcctgggggaggggcgcctggaggacaccatcaggcaaaccagccttcgggaacgggtggcaggctcggccgggatggccgctctgactcaggacattcgcgcggcgctctcccgccagaagctggaccacgtgtggaccgacacgcactacgtggggctgcaattcccggatccggctcaccccaacaccctgcactgggtcgatgaggccgggaaggtcggagagcagctgccgctggaggaccctgacgtctactgcccctacagcgccatcggcaacgtcacgggagagctggtgtacgcccactacgggcggcccgaagacctgcaggacctgcgggccaggggcgtggatccagtgggccgcctgctgctggtgcgcgtgggggtgatcagcttcgcccagaaggtgaccaatgctcaggacttcggggctcaaggagtgctcatatacccagagccagcggacttctcccaggacccacccaagccaagcctgtccagccagcaggcagtgtatggacatgtgcacctgggaactggagacccctacacacctggcttcccttccttcaatcaaacccagttccctccagttgcatcatcaggccttcccagcatcccagcccagcccatcagtgcagacattgcctcccgcctgctgaggaagctcaaaggccctgtggccccccaagaatggcaggggagcctcctaggctccccttatcacctgggccccgggccacgactgcggctagtggtcaacaatcacaggacctccacccccatcaacaacatcttcggctgcatcgaaggccgctcagagccagatcactacgttgtcatcggggcccagagggatgcatggggcccaggagcagctaaatccgctgtggggacggctatactcctggagctggtgcggaccttttcctccatggtgagcaacggcttccggccccgcagaagtctcctcttcatcagctgggacggtggtgactttggaagcgtgggctccacggagtggctagagggctacctcagcgtgctgcacctcaaagccgtagtgtacgtgagcctggacaacgcagtgctgggggatgacaagtttcatgccaagaccagcccccttctgacaagtctcattgagagtgtcctgaagcaggtggattctcccaaccacagtgggcagactctctatgaacaggtggtgttcaccaatcccagctgggatgctgaggtgatccggcccctacccatggacagcagtgcctattccttcacggcctttgtgggagtccctgccgtcgagttctcctttatggaggacgaccaggcctacccattcctgcacacaaaggaggacacttatgagaacctgcataaggtgctgcaaggccgcctgcccgccgtggcccaggccgtggcccagctcgcagggcagctcctcatccggctcagccacgatcgcctgctgcccctcgacttcggccgctacggggacgtcgtcctcaggcacatcgggaacctcaacgagttctctggggacctcaaggcccgcgggctgaccctgcagtgggtgtactcggcgcggggggactacatccgggcggcggaaaagctgcggcaggagatctacagctcggaggagagagacgagcgactgacacgcatgtacaacgtgcgcataatgcgggtggagttctacttcctttcccagtacgtgtcgccagccgactccccgttccgccacatcttcatgggccgtggagaccacacgctgggcgccctgctggaccacctgcggctgctgcgctccaacagctccgggacccccggggccacctcctccactggcttccaggagagccgtttccggcgtcagctagccctgctcacctggacgctgcaaggggcagccaatgcgcttagcggggatgtctggaacattgataacaacttctgaggccctggggatcctcacatccccgtcccccagtcaagagctcctctgctcctcgcttgaatgattcagggtcagggaggtggctcagagtccacctctcattgctgatcaatttctcattacccctacacatctctccacggagcccagaccccagcacagatatccacacaccccagccctgcagtgtagctgaccctaatgtgacggtcatactgtcggttaatcagagagtagcatcccttcaatcacagccccttcccctttctggggtcctccatacctagagaccactctgggaggtttgctaggccctgggacctggccagctctgttagtgggagagatcgctggcaccatagccttatggccaacaggtggtctgtggtgaaaggggcgtggagtttcaatatcaataaaccacctgatatcaataa

SEQ ID NO: 702 - DNA, 2191 bp, Homo sapiens
  source 1..2191: mol_type = genomic DNA
actacgggcggcccgaagacctgcaggacctgcgggccaggggcgtggatccagtgggccgcctgctgctggtgcgcgtgggggtgatcagcttcgcccagaaggtgaccaatgctcaggacttcggggctcaaggagtgctcatatacccagagccagcggacttctcccaggacccacccaagccaagcctgtccagccagcaggcagtgtatggacatgtgcacctgggaactggagacccctacacacctggcttcccttccttcaatcaaacccagttccctccagttgcatcatcaggccttcccagcatcccagcccagcccatcagtgcagacattgcctcccgcctgctgaggctggagtgcagtggtgcaatcttggctcactgcaacctccacctcccgggttcaagtgattcttctgcctcagactccagagtatctaggattacaggaagctcaaaggccctgtggccccccaagaatggcaggggagcctcctaggctccccttatcacctgggccccgggccacgactgcggctagtggtcaacaatcacaggacctccacccccatcaacaacatcttcggctgcatcgaaggccgctcagagccagatcactacgttgtcatcggggcccagagggatgcatggggcccaggagcagctaaatccgctgtggggacggctatactcctggagctggtgcggaccttttcctccatggtgagcaacggcttccggccccgcagaagtctcctcttcatcagctgggacggtggtgactttggaagcgtgggctccacggagtggctagagggctacctcagcgtgctgcacctcaaagccgtagtgtacgtgagcctggacaacgcagtgctgggggatgacaagtttcatgccaagaccagcccccttctgacaagtctcattgagagtgtcctgaagcaggtggattctcccaaccacagtgggcagactctctatgaacaggtggtgttcaccaatcccagctgggatgctgaggtgatccggcccctacccatggacagcagtgcctattccttcacggcctttgtgggagtccctgccgtcgagttctcctttatggaggacgaccaggcctacccattcctgcacacaaaggaggacacttatgagaacctgcataaggtgctgcaaggccgcctgcccgccgtggcccaggccgtggcccagctcgcagggcagctcctcatccggctcagccacgatcgcctgctgcccctcgacttcggccgctacggggacgtcgtcctcaggcacatcgggaacctcaacgagttctctggggacctcaaggcccgcgggctgaccctgcagtgggtgtactcggcgcggggggactacatccgggcggcggaaaagctgcggcaggagatctacagctcggaggagagagacgagcgactgacacgcatgtacaacgtgcgcataatgcgggtggagttctacttcctttcccagtacgtgtcgccagccgactccccgttccgccacatcttcatgggccgtggagaccacacgctgggcgccctgctggaccacctgcggctgctgcgctccaacagctccgggacccccggggccacctcctccactggcttccaggagagccgtttccggcgtcagctagccctgctcacctggacgctgcaaggggcagccaatgcgcttagcggggatgtctggaacattgataacaacttctgaggccctggggatcctcacatccccgtcccccagtcaagagctcctctgctcctcgcttgaatgattcagggtcagggaggtggctcagagtccacctctcattgctgatcaatttctcattacccctacacatctctccacggagcccagaccccagcacagatatccacacaccccagccctgcagtgtagctgaccctaatgtgacggtcatactgtcggttaatcagagagtagcatcccttcaatcacagccccttcccctttctggggtcctccatacctagagaccactctgggaggtttgctaggccctgggacctggccagctctgttagtgggagagatcgctggcaccatagccttatggccaacaggtggtctgtggtgaaaggggcgtggagtttcaatatcaataaaccacctgatatc

SEQ ID NO: 703 - DNA, 2199 bp, Homo sapiens
  source 1..2199: mol_type = genomic DNA
ccccgccgccgccgcccttcgcgccctgggccatctccctcccacctccctccgcggagcagccagacagcgagggccccggccgggggcaggggggacgccccgtccggggcacccccccggctctgagccgcccgcggggccggcctcggcccggagcggaggaaggagtcgccgaggagcagcctgaggccccagagtctgagacgagccgccgccgcccccgccactgcggggaggagggggaggaggagcgggaggagggacgagctggtcgggagaagaggaaaaaaacttttgagacttttccgttgccgctgggagccggaggcgcggggacctcttggcgcgacgctgccccgcgaggaggcaggacttggggaccccagaccgcctccctttgccgccggggacgcttgctccctccctgccccctacacggcgtccctcaggcgcccccattccggaccagccctcgggagtcgccgacccggcctcccgcaaagacttttccccagacctcgggcgcaccccctgcacgccgccttcatccccggcctgtctcctgagcccccgcgcatcctagaccctttctcctccaggagacggatctctctccgacctgccacagatcccctattcaagaccacccaccttctggtaccagatcgcgcccatctaggttatttccgtgggatactgagacacccccggtccaagcctcccctccaccactgcgcccttctccctgaggacctcagctttccctcgaggccctcctaccttttgccgggagacccccagcccctgcaggggcggggcctccccaccacaccagccctgttcgcgctctcggcagtgccggggggcgccgcctcccccatgccgccctccgggctgcggctgctgccgctgctgctaccgctgctgtggctactggtgctgacgcctggccggccggccgcgggactatccacctgcaagactatcgacatggagctggtgaagcggaagcgcatcgaggccatccgcggccagatcctgtccaagctgcggctcgccagccccccgagccagggggaggtgccgcccggcccgctgcccgaggccgtgctcgccctgtacaacagcacccgcgaccgggtggccggggagagtgcagaaccggagcccgagcctgaggccgactactacgccaaggaggtcacccgcgtgctaatggtggaaacccacaacgaaatctatgacaagttcaagcagagtacacacagcatatatatgttcttcaacacatcagagctccgagaagcggtacctgaacccgtgttgctctcccgggcagagctgcgtctgctgaggctcaagttaaaagtggagcagcacgtggagctgtaccagaaatacagcaacaattcctggcgatacctcagcaaccggctgctggcacccagcgactcgccagagtggttatcttttgatgtcaccggagttgtgcggcagtggttgagccgtggaggggaaattgagggctttcgccttagcgcccactgctcctgtgacagcagggataacacactgcaagtggacatcaacgggttcactaccggccgccgaggtgacctggccaccattcatggcatgaaccggcctttcctgcttctcatggccaccccgctggagagggcccagcatctgcaaagctcccggcaccgccgagccctggacaccaactattgcttcagctccacggagaagaactgctgcgtgcggcagctgtacattgacttccgcaaggacctcggctggaagtggatccacgagcccaagggctaccatgccaacttctgcctcgggccctgcccctacatttggagcctggacacgcagtacagcaaggtcctggccctgtacaaccagcataacccgggcgcctcggcggcgccgtgctgcgtgccgcaggcgctggagccgctgcccatcgtgtactacgtgggccgcaagcccaaggtggagcagctgtccaacatgatcgtgcgctcctgcaagtgcagctgaggtcccgccccgccccgccccgccccggcaggcccggccccaccccgccccgcccccgctgccttgcccatgggggctgtatttaaggacacccgtgccccaagcccacctggggccccattaaagatggagagaggactgcgg

SEQ ID NO: 704 - DNA, 5053 bp, Homo sapiens
  source 1..5053: mol_type = genomic DNA
gcccctcccgtcagttcgccagctgccagccccgggaccttttcatctcttcccttttggccggaggagccgagttcagatccgccactccgcacccgagactgacacactgaactccacttcctcctcttaaatttatttctacttaatagccactcgtctctttttttccccatctcattgctccaagaatttttttcttcttactcgccaaagtcagggttccctctgcccgtcccgtattaatatttccacttttggaactactggccttttctttttaaaggaattcaagcaggatacgtttttctgttgggcattgactagattgtttgcaaaagtttcgcatcaaaaacaacaacaacaaaaaaccaaacaactctccttgatctatactttgagaattgttgatttcttttttttattctgacttttaaaaacaacttttttttccacttttttaaaaaatgcactactgtgtgctgagcgcttttctgatcctgcatctggtcacggtcgcgctcagcctgtctacctgcagcacactcgatatggaccagttcatgcgcaagaggatcgaggcgatccgcgggcagatcctgagcaagctgaagctcaccagtcccccagaagactatcctgagcccgaggaagtccccccggaggtgatttccatctacaacagcaccagggacttgctccaggagaaggcgagccggagggcggccgcctgcgagcgcgagaggagcgacgaagagtactacgccaaggaggtttacaaaatagacatgccgcccttcttcccctccgaaactgtctgcccagttgttacaacaccctctggctcagtgggcagcttgtgctccagacagtcccaggtgctctgtgggtaccttgatgccatcccgcccactttctacagaccctacttcagaattgttcgatttgacgtctcagcaatggagaagaatgcttccaatttggtgaaagcagagttcagagtctttcgtttgcagaacccaaaagccagagtgcctgaacaacggattgagctatatcagattctcaagtccaaagatttaacatctccaacccagcgctacatcgacagcaaagttgtgaaaacaagagcagaaggcgaatggctctccttcgatgtaactgatgctgttcatgaatggcttcaccataaagacaggaacctgggatttaaaataagcttacactgtccctgctgcacttttgtaccatctaataattacatcatcccaaataaaagtgaagaactagaagcaagatttgcaggtattgatggcacctccacatataccagtggtgatcagaaaactataaagtccactaggaaaaaaaacagtgggaagaccccacatctcctgctaatgttattgccctcctacagacttgagtcacaacagaccaaccggcggaagaagcgtgctttggatgcggcctattgctttagaaatgtgcaggataattgctgcctacgtccactttacattgatttcaagagggatctagggtggaaatggatacacgaacccaaagggtacaatgccaacttctgtgctggagcatgcccgtatttatggagttcagacactcagcacagcagggtcctgagcttatataataccataaatccagaagcatctgcttctccttgctgcgtgtcccaagatttagaacctctaaccattctctactacattggcaaaacacccaagattgaacagctttctaatatgattgtaaagtcttgcaaatgcagctaaaattcttggaaaagtggcaagaccaaaatgacaatgatgatgataatgatgatgacgacgacaacgatgatgcttgtaacaagaaaacataagagagccttggttcatcagtgttaaaaaatttttgaaaaggcggtactagttcagacactttggaagtttgtgttctgtttgttaaaactggcatctgacacaaaaaaagttgaaggccttattctacatttcacctactttgtaagtgagagagacaagaagcaaattttttttaaagaaaaaaataaacactggaagaatttattagtgttaattatgtgaacaacgacaacaacaacaacaacaacaaacaggaaaatcccattaagtggagttgctgtacgtaccgttcctatcccgcgcctcacttgatttttctgtattgctatgcaataggcacccttcccattcttactcttagagttaacagtgagttatttattgtgtgttactatataatgaacgtttcattgcccttggaaaataaaacaggtgtataaagtggagaccaaatactttgccagaaactcatggatggcttaaggaacttgaactcaaacgagccagaaaaaaagaggtcatattaatgggatgaaaacccaagtgagttattatatgaccgagaaagtctgcattaagataaagaccctgaaaacacatgttatgtatcagctgcctaaggaagcttcttgtaaggtccaaaaactaaaaagactgttaataaaagaaactttcagtcagaataagtctgtaagtttttttttttctttttaattgtaaatggttctttgtcagtttagtaaaccagtgaaatgttgaaatgttttgacatgtactggtcaaacttcagaccttaaaatattgctgtatagctatgctataggttttttcctttgttttggtatatgtaaccatacctatattattaaaatagatggatatagaagccagcataattgaaaacacatctgcagatctcttttgcaaactattaaatcaaaacattaactactttatgtgtaatgtgtaaatttttaccatattttttatattctgtaataatgtcaactatgatttagattgacttaaatttgggctctttttaatgatcactcacaaatgtatgtttcttttagctggccagtacttttgagtaaagcccctatagtttgacttgcactacaaatgcattttttttttaataacatttgccctacttgtgctttgtgtttctttcattattatgacataagctacctgggtccacttgtcttttcttttttttgtttcacagaaaagatgggttcgagttcagtggtcttcatcttccaagcatcattactaaccaagtcagacgttaacaaatttttatgttaggaaaaggaggaatgttatagatacatagaaaattgaagtaaaatgttttcattttagcaaggatttagggttctaactaaaactcagaatctttattgagttaagaaaagtttctctaccttggtttaatcaatatttttgtaaaatcctattgttattacaaagaggacacttcataggaaacatctttttctttagtcaggtttttaatattcagggggaaattgaaagatatatattttagtcgatttttcaaaaggggaaaaaagtccaggtcagcataagtcattttgtgtatttcactgaagttataaggtttttataaatgttctttgaaggggaaaaggcacaagccaatttttcctatgatcaaaaaattctttctttcctctgagtgagagttatctatatctgaggctaaagtttaccttgctttaataaataatttgccacatcattgcagaagaggtatcctcatgctggggttaatagaatatgtcagtttatcacttgtcgcttatttagctttaaaataaaaattaataggcaaagcaatggaatatttgcagtttcacctaaagagcagcataaggaggcgggaatccaaagtgaagttgtttgatatggtctacttcttttttggaatttcctgaccattaattaaagaattggatttgcaagtttgaaaactggaaaagcaagagatgggatgccataatagtaaacagcccttgtgttggatgtaacccaatcccagatttgagtgtgtgttgattatttttttgtcttccacttttctattatgtgtaaatcacttttatttctgcagacattttcctctcagataggatgacattttgttttgtattattttgtctttcctcatgaatgcactgataatattttaaatgctctattttaagatctcttgaatctgttttttttttttttaatttgggggttctgtaaggtctttatttcccataagtaaatattgccatgggaggggggtggaggtggcaaggaaggggtgaagtgctagtatgcaagtgggcagcaattatttttgtgttaatcagcagtacaatttgatcgttggcatggttaaaaaatggaatataagattagctgttttgtattttgatgaccaattacgctgtattttaacacgatgtatgtctgtttttgtggtgctctagtggtaaataaattatttcgatgatatgtggatgtctttttcctatcagtaccatcatcgagtctagaaaacacctgtgatgcaataagactatctcaagctggaaaagtcataccacctttccgattgccctctgtgctttctcccttaaggacagtcacttcagaagtcatgctttaaagcacaagagtcaggccatatccatcaaggatagaagaaatccctgtgccgtctttttattcccttatttattgctatttggtaattgtttgagatttagtttccatccagcttgactgccgaccagaaaaaatgcagagagatgtttgcaccatgctttggctttctggttctatgttctgccaacgccagggccaaaagaactggtctagacagtatcccctgtagccccataacttggatagttgctgagccagccagatataacaagagccacgtgctttctggggttggttgtttgggatcagctacttgcctgtcagtttcactggtaccactgcaccacaaacaaaaaaacccaccctatttcctccaatttttttggctgctacctacaagaccagactcctcaaacgagttgccaatctcttaataaataggattaataaaaaaagtaattgtgactcaa

SEQ ID NO: 705 - DNA, 4969 bp, Homo sapiens
  source 1..4969: mol_type = genomic DNA
gcccctcccgtcagttcgccagctgccagccccgggaccttttcatctcttcccttttggccggaggagccgagttcagatccgccactccgcacccgagactgacacactgaactccacttcctcctcttaaatttatttctacttaatagccactcgtctctttttttccccatctcattgctccaagaatttttttcttcttactcgccaaagtcagggttccctctgcccgtcccgtattaatatttccacttttggaactactggccttttctttttaaaggaattcaagcaggatacgtttttctgttgggcattgactagattgtttgcaaaagtttcgcatcaaaaacaacaacaacaaaaaaccaaacaactctccttgatctatactttgagaattgttgatttcttttttttattctgacttttaaaaacaacttttttttccacttttttaaaaaatgcactactgtgtgctgagcgcttttctgatcctgcatctggtcacggtcgcgctcagcctgtctacctgcagcacactcgatatggaccagttcatgcgcaagaggatcgaggcgatccgcgggcagatcctgagcaagctgaagctcaccagtcccccagaagactatcctgagcccgaggaagtccccccggaggtgatttccatctacaacagcaccagggacttgctccaggagaaggcgagccggagggcggccgcctgcgagcgcgagaggagcgacgaagagtactacgccaaggaggtttacaaaatagacatgccgcccttcttcccctccgaaaatgccatcccgcccactttctacagaccctacttcagaattgttcgatttgacgtctcagcaatggagaagaatgcttccaatttggtgaaagcagagttcagagtctttcgtttgcagaacccaaaagccagagtgcctgaacaacggattgagctatatcagattctcaagtccaaagatttaacatctccaacccagcgctacatcgacagcaaagttgtgaaaacaagagcagaaggcgaatggctctccttcgatgtaactgatgctgttcatgaatggcttcaccataaagacaggaacctgggatttaaaataagcttacactgtccctgctgcacttttgtaccatctaataattacatcatcccaaataaaagtgaagaactagaagcaagatttgcaggtattgatggcacctccacatataccagtggtgatcagaaaactataaagtccactaggaaaaaaaacagtgggaagaccccacatctcctgctaatgttattgccctcctacagacttgagtcacaacagaccaaccggcggaagaagcgtgctttggatgcggcctattgctttagaaatgtgcaggataattgctgcctacgtccactttacattgatttcaagagggatctagggtggaaatggatacacgaacccaaagggtacaatgccaacttctgtgctggagcatgcccgtatttatggagttcagacactcagcacagcagggtcctgagcttatataataccataaatccagaagcatctgcttctccttgctgcgtgtcccaagatttagaacctctaaccattctctactacattggcaaaacacccaagattgaacagctttctaatatgattgtaaagtcttgcaaatgcagctaaaattcttggaaaagtggcaagaccaaaatgacaatgatgatgataatgatgatgacgacgacaacgatgatgcttgtaacaagaaaacataagagagccttggttcatcagtgttaaaaaatttttgaaaaggcggtactagttcagacactttggaagtttgtgttctgtttgttaaaactggcatctgacacaaaaaaagttgaaggccttattctacatttcacctactttgtaagtgagagagacaagaagcaaattttttttaaagaaaaaaataaacactggaagaatttattagtgttaattatgtgaacaacgacaacaacaacaacaacaacaaacaggaaaatcccattaagtggagttgctgtacgtaccgttcctatcccgcgcctcacttgatttttctgtattgctatgcaataggcacccttcccattcttactcttagagttaacagtgagttatttattgtgtgttactatataatgaacgtttcattgcccttggaaaataaaacaggtgtataaagtggagaccaaatactttgccagaaactcatggatggcttaaggaacttgaactcaaacgagccagaaaaaaagaggtcatattaatgggatgaaaacccaagtgagttattatatgaccgagaaagtctgcattaagataaagaccctgaaaacacatgttatgtatcagctgcctaaggaagcttcttgtaaggtccaaaaactaaaaagactgttaataaaagaaactttcagtcagaataagtctgtaagtttttttttttctttttaattgtaaatggttctttgtcagtttagtaaaccagtgaaatgttgaaatgttttgacatgtactggtcaaacttcagaccttaaaatattgctgtatagctatgctataggttttttcctttgttttggtatatgtaaccatacctatattattaaaatagatggatatagaagccagcataattgaaaacacatctgcagatctcttttgcaaactattaaatcaaaacattaactactttatgtgtaatgtgtaaatttttaccatattttttatattctgtaataatgtcaactatgatttagattgacttaaatttgggctctttttaatgatcactcacaaatgtatgtttcttttagctggccagtacttttgagtaaagcccctatagtttgacttgcactacaaatgcattttttttttaataacatttgccctacttgtgctttgtgtttctttcattattatgacataagctacctgggtccacttgtcttttcttttttttgtttcacagaaaagatgggttcgagttcagtggtcttcatcttccaagcatcattactaaccaagtcagacgttaacaaatttttatgttaggaaaaggaggaatgttatagatacatagaaaattgaagtaaaatgttttcattttagcaaggatttagggttctaactaaaactcagaatctttattgagttaagaaaagtttctctaccttggtttaatcaatatttttgtaaaatcctattgttattacaaagaggacacttcataggaaacatctttttctttagtcaggtttttaatattcagggggaaattgaaagatatatattttagtcgatttttcaaaaggggaaaaaagtccaggtcagcataagtcattttgtgtatttcactgaagttataaggtttttataaatgttctttgaaggggaaaaggcacaagccaatttttcctatgatcaaaaaattctttctttcctctgagtgagagttatctatatctgaggctaaagtttaccttgctttaataaataatttgccacatcattgcagaagaggtatcctcatgctggggttaatagaatatgtcagtttatcacttgtcgcttatttagctttaaaataaaaattaataggcaaagcaatggaatatttgcagtttcacctaaagagcagcataaggaggcgggaatccaaagtgaagttgtttgatatggtctacttcttttttggaatttcctgaccattaattaaagaattggatttgcaagtttgaaaactggaaaagcaagagatgggatgccataatagtaaacagcccttgtgttggatgtaacccaatcccagatttgagtgtgtgttgattatttttttgtcttccacttttctattatgtgtaaatcacttttatttctgcagacattttcctctcagataggatgacattttgttttgtattattttgtctttcctcatgaatgcactgataatattttaaatgctctattttaagatctcttgaatctgttttttttttttttaatttgggggttctgtaaggtctttatttcccataagtaaatattgccatgggaggggggtggaggtggcaaggaaggggtgaagtgctagtatgcaagtgggcagcaattatttttgtgttaatcagcagtacaatttgatcgttggcatggttaaaaaatggaatataagattagctgttttgtattttgatgaccaattacgctgtattttaacacgatgtatgtctgtttttgtggtgctctagtggtaaataaattatttcgatgatatgtggatgtctttttcctatcagtaccatcatcgagtctagaaaacacctgtgatgcaataagactatctcaagctggaaaagtcataccacctttccgattgccctctgtgctttctcccttaaggacagtcacttcagaagtcatgctttaaagcacaagagtcaggccatatccatcaaggatagaagaaatccctgtgccgtctttttattcccttatttattgctatttggtaattgtttgagatttagtttccatccagcttgactgccgaccagaaaaaatgcagagagatgtttgcaccatgctttggctttctggttctatgttctgccaacgccagggccaaaagaactggtctagacagtatcccctgtagccccataacttggatagttgctgagccagccagatataacaagagccacgtgctttctggggttggttgtttgggatcagctacttgcctgtcagtttcactggtaccactgcaccacaaacaaaaaaacccaccctatttcctccaatttttttggctgctacctacaagaccagactcctcaaacgagttgccaatctcttaataaataggattaataaaaaaagtaattgtgactcaa

SEQ ID NO: 706 - DNA, 2522 bp, Homo sapiens
  source 1..2522: mol_type = genomic DNA
tgcttgccctccacctggcctgctgggagtcagagcccagcaaaacctgtttagacacatggacaagaatcccagcgctacaaggcacacagtccgcttcttcgtcctcagggttgccagcgcttcctggaagtcctgaagctctcgcagtgcagtgagttcatgcaccttcttgccaagcctcagtctttgggatctggggaggccgcctggttttcctccctccttctgcacgtctgctggggtctcttcctctccaggccttgccgtccccctggcctctcttcccagctcacacatgaagatgcacttgcaaagggctctggtggtcctggccctgctgaactttgccacggtcagcctctctctgtccacttgcaccaccttggacttcggccacatcaagaagaagagggtggaagccattaggggacagatcttgagcaagctcaggctcaccagcccccctgagccaacggtgatgacccacgtcccctatcaggtcctggccctttacaacagcacccgggagctgctggaggagatgcatggggagagggaggaaggctgcacccaggaaaacaccgagtcggaatactatgccaaagaaatccataaattcgacatgatccaggggctggcggagcacaacgaactggctgtctgccctaaaggaattacctccaaggttttccgcttcaatgtgtcctcagtggagaaaaatagaaccaacctattccgagcagaattccgggtcttgcgggtgcccaaccccagctctaagcggaatgagcagaggatcgagctcttccagatccttcggccagatgagcacattgccaaacagcgctatatcggtggcaagaatctgcccacacggggcactgccgagtggctgtcctttgatgtcactgacactgtgcgtgagtggctgttgagaagagagtccaacttaggtctagaaatcagcattcactgtccatgtcacacctttcagcccaatggagatatcctggaaaacattcacgaggtgatggaaatcaaattcaaaggcgtggacaatgaggatgaccatggccgtggagatctggggcgcctcaagaagcagaaggatcaccacaaccctcatctaatcctcatgatgattcccccacaccggctcgacaacccgggccaggggggtcagaggaagaagcgggctttggacaccaattactgcttccgcaacttggaggagaactgctgtgtgcgccccctctacattgacttccgacaggatctgggctggaagtgggtccatgaacctaagggctactatgccaacttctgctcaggcccttgcccatacctccgcagtgcagacacaacccacagcacggtgctgggactgtacaacactctgaaccctgaagcatctgcctcgccttgctgcgtgccccaggacctggagcccctgaccatcctgtactatgttgggaggacccccaaagtggagcagctctccaacatggtggtgaagtcttgtaaatgtagctgagaccccacgtgcgacagagagaggggagagagaaccaccactgcctgactgcccgctcctcgggaaacacacaagcaacaaacctcactgagaggcctggagcccacaaccttcggctccgggcaaatggctgagatggaggtttccttttggaacatttctttcttgctggctctgagaatcacggtggtaaagaaagtgtgggtttggttagaggaaggctgaactcttcagaacacacagactttctgtgacgcagacagaggggatggggatagaggaaagggatggtaagttgagatgttgtgtggcaatgggatttgggctaccctaaagggagaaggaagggcagagaatggctgggtcagggccagactggaagacacttcagatctgaggttggatttgctcattgctgtaccacatctgctctagggaatctggattatgttatacaaggcaagcattttttttttttttttaaagacaggttacgaagacaaagtcccagaattgtatctcatactgtctgggattaagggcaaatctattacttttgcaaactgtcctctacatcaattaacatcgtgggtcactacagggagaaaatccaggtcatgcagttcctggcccatcaactgtattgggccttttggatatgctgaacgcagaagaaagggtggaaatcaaccctctcctgtctgccctctgggtccctcctctcacctctccctcgatcatatttccccttggacacttggttagacgccttccaggtcaggatgcacatttctggattgtggttccatgcagccttggggcattatgggttcttcccccacttcccctccaagaccctgtgttcatttggtgttcctggaagcaggtgctacaacatgtgaggcattcggggaagctgcacatgtgccacacagtgacttggccccagacgcatagactgaggtataaagacaagtatgaatat

SEQ ID NO: 707 - DNA, 1280 bp, Homo sapiens
  source 1..1280: mol_type = genomic DNA
ggggaggccgcctggttttcctccctccttctgcacgtctgctggggtctcttcctctccaggccttgccgtccccctggcctctcttcccagctcacacatgaagatgcacttgcaaagggctctggtggtcctggccctgctgaactttgccacggtcagcctctctctgtccacttgcaccaccttggacttcggccacatcaagaagaagagggtggaagccattaggggacagatcttgagcaagctcaggctcaccagcccccctgagccaacggtgatgacccacgtcccctatcaggtcctggccctttacaacagcacccgggagctgctggaggagatgcatggggagagggaggaaggctgcacccaggaaaacaccgagtcggaatactatgccaaagaaatccataaattcgacatgatccaggggctggcggagcacaacgaactggctgtctgccctaaaggaattacctccaaggttttccgcttcaatgtgtcctcagtggagaaaaatagaaccaacctattccgagcagaattccgggtcttgcgggtgcccaaccccagctctaagcggaatgagcagaggatcgagctcttccagatccttcggccagatgagcacattgccaaacagcgctatatcggtggcaagaatctgcccacacggggcactgccgagtggctgtcctttgatgtcactgacactgtgcgtgagtggctgttgagaagagagtccaacttaggtctagaaatcagcattcactgtccatgtcacacctttcagcccaatggagatatcctggaaaacattcacgaggtgatggaaatcaaattcaaaggcgtggacaatgaggatgaccatggccgtggagatctggggcgcctcaagaagcagaaggatcaccacaaccctcatctaatcctcatgatgattcccccacaccggctcgacaacccgggccaggggggtcagaggaagaagcgggctttggacaccaattactgcttccggtgagactgggcccacatgggaaccaacatctactgcctgcctactgcccaatggctaggtcaggccccagagccaagccacactcaacagagggtccctgatgctattcacaaacatctccaggaagaagactgaaaatctctcacagagattttctctgtgaaatctctttctgttttcctgggagtcccactgtttttccataggctaactctggaaggagctggctgaagtaaatgaggaaaactctgtg

SEQ ID NO: 708 - DNA, 957 bp, Homo sapiens
  source 1..957: mol_type = genomic DNA
agacaaggttcatatttgtatgggttacttattctctctttgttgactaagtcaataatcagaatcagcaggtttgcagtcagattggcagggataagcagcctagctcaggagaagtgagtataaaagccccaggctgggagcagccatcacagaagtccactcattcttggcaggatggcttctcatcgtctgctcctcctctgccttgctggactggtatttgtgtctgaggctggccctacgggcaccggtgaatccaagtgtcctctgatggtcaaagttctagatgctgtccgaggcagtcctgccatcaatgtggccgtgcatgtgttcagaaaggctgctgatgacacctgggagccatttgcctctgggaaaaccagtgagtctggagagctgcatgggctcacaactgaggaggaatttgtagaagggatatacaaagtggaaatagacaccaaatcttactggaaggcacttggcatctccccattccatgagcatgcagaggtggtattcacagccaacgactccggcccccgccgctacaccattgccgccctgctgagcccctactcctattccaccacggctgtcgtcaccaatcccaaggaatgagggacttctcctccagtggacctgaaggacgagggatgggatttcatgtaaccaagagtattccatttttactaaagcagtgttttcacctcatatgctatgttagaagtccaggcagagacaataaaacattcctgtgaaaggcacttttcattccactttaacttgattttttaaattcccttattgtcccttccaaaaaaaagagaatcaaaattttacaaagaatcaaaggaattctagaaagtatctgggcagaacgctaggagagatccaaatttccattgtcttgcaagcaaagcacgtattaaatatgatctgcagccattaaaaaga

SEQ ID NO: 709 - DNA, 1037 bp, Homo sapiens
  source 1..1037: mol_type = genomic DNA
gttgactaagtcaataatcagaatcagcaggtttgcagtcagattggcagggataagcagcctagctcaggagaagtgagtataaaagccccaggctgggagcagccatcacagaagtccactcattcttggcaggatggcttctcatcgtctgctcctcctctgccttgctggactggtatttgtgtctgaggctggccctacgggcaccggtgaatccaagtgtcctctgatggtcaaagttctagatgctgtccgaggcagtcctgccatcaatgtggccgtgcatgtgttcagaaaggctgctgatgacacctgggagccatttgcctctgggaaaaccagtgagtctggagagctgcatgggctcacaactgaggaggaatttgtagaagggatatacaaagtggaaatagacaccaaatcttactggaaggcacttggcatctccccattccatgagcatgcagaggtgagtatacagaccttcgaggcattccaggaaatattatacaagaaaaaattcacaacactttggcactggacttccggtggtcagtcattttttcgggctctggtggaagtggtattcacagccaacgactccggcccccgccgctacaccattgccgccctgctgagcccctactcctattccaccacggctgtcgtcaccaatcccaaggaatgagggacttctcctccagtggacctgaaggacgagggatgggatttcatgtaaccaagagtattccatttttactaaagcagtgttttcacctcatatgctatgttagaagtccaggcagagacaataaaacattcctgtgaaaggcacttttcattccactttaacttgattttttaaattcccttattgtcccttccaaaaaaaagagaatcaaaattttacaaagaatcaaaggaattctagaaagtatctgggcagaacgctaggagagatccaaatttccattgtcttgcaagcaaagcacgtattaaatatgatctgcagccattaaaaagacacattctgt

SEQ ID NO: 710 - DNA, 556 bp, Homo sapiens
  source 1..556: mol_type = genomic DNA
gttgactaagtcaataatcagaatcagcaggtttgcagtcagattggcagggataagcagcctagctcaggagaagtgagtataaaagccccaggctgggagcagccatcacagaagtccactcattcttggcaggatggcttctcatcgtctgctcctcctctgccttgctggactggtatttgtgtctgaggctggccctacgggcaccggtgaatccaagtgtcctctgatggtcaaagttctagatgctgtccgaggcagtcctgccatcaatgtggccgtgcatgtgttcagaaaggctgctgatgacacctgggagccatttgcctctgggaaaaccagtgagtctggagagctgcatgggctcacaactgaggaggaatttgtagaagggatatacaaagtggaaatagacaccaaatcttactggaaggcacttggcatctccccattccatgagcatgcagaggtggtattcacagccaacgactccggcccccgccgctactactcctattccaccacggctgtcgtcaccaatcccaaggaatga

SEQ ID NO: 711 - DNA, 2933 bp, Homo sapiens
  source 1..2933: mol_type = genomic DNA
gcccagttggagccagacagcggggtggacaagtggcgtgtgtgctgcgaccccgagggaagatgaacgggacgcggaactggtgtaccctggtggacgtgcacccagaggaccaggcggcggtgtacttgaaggggaggtctggagacaagatgattcacgagaagaatattaaccagctgaagagtgaggtccagtacatccaggaggccaggaactgcctacagaagctccgggaggatataagtagcaagcttgacaggaacctaggagattctctccatcgacaggagatacaggtggtgctagaaaagccaaatggctttagtcagagtcccacagccctgtacagcagcccacctgaggtggacacctgtataaatgaggatgttgagagcttgaggaagacggtgcaggacttgctggccaagcttcaggaggccaagcggcaacaccagtcagactgtgtggcttttgaggtcacactcagccggtaccagagggaagcagaacaaagtaatgtggcccttcagagagaggaggacagagtggagcagaaagaggcagaagtcggagagctgcagaggcgcttgctagggatggagacggagcatcaggccttactggcgaaagtgagggaaggggaggtggccctagaggaacttcggagcaacaatgctgactgccaagcagaacgagaaaaggctgctaccctggaaaaggaagtggccgggttgcgggagaagatccaccacttggatgacatgctcaagagccagcagcggaaagtccggcaaatgatagagcagctccagaattcaaaagctgtgatccagtcaaaggacgccaccatccaggagctcaaggagaaaatcgcctatctggaggcagagaatttagagatgcatgaccggatggaacacctgatagaaaaacaaatcagtcatggcaacttcagcacccaggcccgggccaagacagagaacccgggcagtattaggatatccaagccgcctagcccgaagcccatgcctgtcatccgagtggtggaaacctgagctgcctggagatggttgctgccattgctgctgcctctgcctcggagaagcccactgcccctgttggctgttaacactgcctttgacttcctgactgtcccctggctgcacccaggacttcgggctcctgtgtctcaccattcccaagcccctggccactctaagctgggcagacggagcacgagcacctattcaaggcactgcagccctttggaagacattgtcctgcaagcaggagccagggcaatatctatattcctacagtgactatttttctctgtagagagcctcccttctgttgtagactggactctggctgtgccataagccaggccttcatcagattgggagaggtgacaagatttgcctcagccctaaaagctggagacacagatgtccagagtgattggagaatgtcctgggggaatgaagttccttccacaaacacagctcagttcttagcaacaaactgtttgtttttctacttgctccatctgcagcctacgctgccctggcctcctgcagacagatagtggggttacctggcaaggcctggtgagagccagtgaacctaagctttgactgggtggccttgtctttctggggaggagggaatgtacattcagggagtagccttttgcggaaaaattctctagggctacagacagtcatgtgtgacttctctctgctgtgaaaactcccagagtctctttagggattttccctaaggtgtaccaccaggcacacctcagtcttcttgacccagagcctgaaaactgttttcactgggttccaccagtcccagcaaaatcctctttgtatttattttgctaagttattggtggttttgcttacatctcatgattgatataataccaaagttctatagccttctcttgcagtatttggatttgcttgaaaccgggaaaactgttcccattaggcttgttaatgtcagagtgacactattatgaatctttctctccctttcctctgcctgtttcttctctctttctccttcaaacttgctctgcagctaaggaaggtgagtctactttccctgaggctttggggtcagagtatatgttgtttggagaaagagggcaatcaggactcttctgggacccagatgagttcttcactagcccttctgaaccccttgctccataattggtcttttatcctggctctgaatgaccctgcaggtcatcatggttttctttttttattgtttttttttttttctgagacagagtctcactctgtcacccaggctggagtgcagtggcgcgatctcagctcactgcaacctctgcctcccggatttaagcgattcttctgcctcagcctcccgagtagctgggactacaggtgtgccaccacgcctggctgatttttgtatttttagtagagatggggtttcaccatactggctaggctggtctcgaattcctgacctcaggtgatccacccacctcggcttcccaaagtgctaggattataggcttgagctactgcgcccggcccatggtgtttttctttagggctcttcctacaaccttgagaagtagataggcatcagagtatggtactataggaatcagaaaaattcaaaacaaatgtggattaagtgtttaggctctatgtggctcacgcagccagaatccttaagtctgtgtgtttctgtgtctcaagactgggctcacattctggctttgtccataacaatgctctgggatttcagggagttccctcatttgtaaaatgagggggtcagagcaggtgatatccatgtttcttccctttctgatattgttgtctgtggcatattctttgtatggcgaatttaataaattatattaatgtgtctctttg

SEQ ID NO: 712 - DNA, 3033 bp, Homo sapiens
  source 1..3033: mol_type = genomic DNA
cagttggagccagacagcggggtggacaagtggcgtgtgtgctgcgaccccgagggaagatgaacgggacgcggaactggtgtaccctggtggacgtgcacccagaggaccaggcggcggcgggcaggaagacctatgccatggtgtccagccactcagctggtcattctctggcttcagaactggtggagtcccatgatggacatgaggagatcattaaggtgtacttgaaggggaggtctggagacaagatgattcacgagaagaatattaaccagctgaagagtgaggtccagtacatccaggaggccaggaactgcctacagaagctccgggaggatataagtagcaagcttgacaggaacctaggagattctctccatcgacaggagatacaggtggtgctagaaaagccaaatggctttagtcagagtcccacagccctgtacagcagcccacctgaggtggacacctgtataaatgaggatgttgagagcttgaggaagacggtgcaggacttgctggccaagcttcaggaggccaagcggcaacaccagtcagactgtgtggcttttgaggtcacactcagccggtaccagagggaagcagaacaaagtaatgtggcccttcagagagaggaggacagagtggagcagaaagaggcagaagtcggagagctgcagaggcgcttgctagggatggagacggagcatcaggccttactggcgaaagtgagggaaggggaggtggccctagaggaacttcggagcaacaatgctgactgccaagcagaacgagaaaaggctgctaccctggaaaaggaagtggccgggttgcgggagaagatccaccacttggatgacatgctcaagagccagcagcggaaagtccggcaaatgatagagcagctccagaattcaaaagctgtgatccagtcaaaggacgccaccatccaggagctcaaggagaaaatcgcctatctggaggcagagaatttagagatgcatgaccggatggaacacctgatagaaaaacaaatcagtcatggcaacttcagcacccaggcccgggccaagacagagaacccgggcagtattaggatatccaagccgcctagcccgaagcccatgcctgtcatccgagtggtggaaacctgagctgcctggagatggttgctgccattgctgctgcctctgcctcggagaagcccactgcccctgttggctgttaacactgcctttgacttcctgactgtcccctggctgcacccaggacttcgggctcctgtgtctcaccattcccaagcccctggccactctaagctgggcagacggagcacgagcacctattcaaggcactgcagccctttggaagacattgtcctgcaagcaggagccagggcaatatctatattcctacagtgactatttttctctgtagagagcctcccttctgttgtagactggactctggctgtgccataagccaggccttcatcagattgggagaggtgacaagatttgcctcagccctaaaagctggagacacagatgtccagagtgattggagaatgtcctgggggaatgaagttccttccacaaacacagctcagttcttagcaacaaactgtttgtttttctacttgctccatctgcagcctacgctgccctggcctcctgcagacagatagtggggttacctggcaaggcctggtgagagccagtgaacctaagctttgactgggtggccttgtctttctggggaggagggaatgtacattcagggagtagccttttgcggaaaaattctctagggctacagacagtcatgtgtgacttctctctgctgtgaaaactcccagagtctctttagggattttccctaaggtgtaccaccaggcacacctcagtcttcttgacccagagcctgaaaactgttttcactgggttccaccagtcccagcaaaatcctctttgtatttattttgctaagttattggtggttttgcttacatctcatgattgatataataccaaagttctatagccttctcttgcagtatttggatttgcttgaaaccgggaaaactgttcccattaggcttgttaatgtcagagtgacactattatgaatctttctctccctttcctctgcctgtttcttctctctttctccttcaaacttgctctgcagctaaggaaggtgagtctactttccctgaggctttggggtcagagtatatgttgtttggagaaagagggcaatcaggactcttctgggacccagatgagttcttcactagcccttctgaaccccttgctccataattggtcttttatcctggctctgaatgaccctgcaggtcatcatggttttctttttttattgtttttttttttttctgagacagagtctcactctgtcacccaggctggagtgcagtggcgcgatctcagctcactgcaacctctgcctcccggatttaagcgattcttctgcctcagcctcccgagtagctgggactacaggtgtgccaccacgcctggctgatttttgtatttttagtagagatggggtttcaccatactggctaggctggtctcgaattcctgacctcaggtgatccacccacctcggcttcccaaagtgctaggattataggcttgagctactgcgcccggcccatggtgtttttctttagggctcttcctacaaccttgagaagtagataggcatcagagtatggtactataggaatcagaaaaattcaaaacaaatgtggattaagtgtttaggctctatgtggctcacgcagccagaatccttaagtctgtgtgtttctgtgtctcaagactgggctcacattctggctttgtccataacaatgctctgggatttcagggagttccctcatttgtaaaatgagggggtcagagcaggtgatatccatgtttcttccctttctgatattgttgtctgtggcatattctttgtatggcgaatttaataaattatattaatgtgtctctttga

SEQ ID NO: 713 - DNA, 3111 bp, Homo sapiens
  source 1..3111: mol_type = genomic DNA
gcccagttggagccagacagcggggtggacaagtggcgtgtgtgctgcgaccccgagggaagatgaacgggacgcggaactggtgtaccctggtggacgtgcacccagaggaccaggcggcgggcagcgtggacattctcaggctgactctccagggtgaactgacaggagatgaacttgaacacatagcccagaaggcgggcaggaagacctatgccatggtgtccagccactcagctggtcattctctggcttcagaactggtggagtcccatgatggacatgaggagatcattaaggtgtacttgaaggggaggtctggagacaagatgattcacgagaagaatattaaccagctgaagagtgaggtccagtacatccaggaggccaggaactgcctacagaagctccgggaggatataagtagcaagcttgacaggaacctaggagattctctccatcgacaggagatacaggtggtgctagaaaagccaaatggctttagtcagagtcccacagccctgtacagcagcccacctgaggtggacacctgtataaatgaggatgttgagagcttgaggaagacggtgcaggacttgctggccaagcttcaggaggccaagcggcaacaccagtcagactgtgtggcttttgaggtcacactcagccggtaccagagggaagcagaacaaagtaatgtggcccttcagagagaggaggacagagtggagcagaaagaggcagaagtcggagagctgcagaggcgcttgctagggatggagacggagcatcaggccttactggcgaaagtgagggaaggggaggtggccctagaggaacttcggagcaacaatgctgactgccaagcagaacgagaaaaggctgctaccctggaaaaggaagtggccgggttgcgggagaagatccaccacttggatgacatgctcaagagccagcagcggaaagtccggcaaatgatagagcagctccagaattcaaaagctgtgatccagtcaaaggacgccaccatccaggagctcaaggagaaaatcgcctatctggaggcagagaatttagagatgcatgaccggatggaacacctgatagaaaaacaaatcagtcatggcaacttcagcacccaggcccgggccaagacagagaacccgggcagtattaggatatccaagccgcctagcccgaagcccatgcctgtcatccgagtggtggaaacctgagctgcctggagatggttgctgccattgctgctgcctctgcctcggagaagcccactgcccctgttggctgttaacactgcctttgacttcctgactgtcccctggctgcacccaggacttcgggctcctgtgtctcaccattcccaagcccctggccactctaagctgggcagacggagcacgagcacctattcaaggcactgcagccctttggaagacattgtcctgcaagcaggagccagggcaatatctatattcctacagtgactatttttctctgtagagagcctcccttctgttgtagactggactctggctgtgccataagccaggccttcatcagattgggagaggtgacaagatttgcctcagccctaaaagctggagacacagatgtccagagtgattggagaatgtcctgggggaatgaagttccttccacaaacacagctcagttcttagcaacaaactgtttgtttttctacttgctccatctgcagcctacgctgccctggcctcctgcagacagatagtggggttacctggcaaggcctggtgagagccagtgaacctaagctttgactgggtggccttgtctttctggggaggagggaatgtacattcagggagtagccttttgcggaaaaattctctagggctacagacagtcatgtgtgacttctctctgctgtgaaaactcccagagtctctttagggattttccctaaggtgtaccaccaggcacacctcagtcttcttgacccagagcctgaaaactgttttcactgggttccaccagtcccagcaaaatcctctttgtatttattttgctaagttattggtggttttgcttacatctcatgattgatataataccaaagttctatagccttctcttgcagtatttggatttgcttgaaaccgggaaaactgttcccattaggcttgttaatgtcagagtgacactattatgaatctttctctccctttcctctgcctgtttcttctctctttctccttcaaacttgctctgcagctaaggaaggtgagtctactttccctgaggctttggggtcagagtatatgttgtttggagaaagagggcaatcaggactcttctgggacccagatgagttcttcactagcccttctgaaccccttgctccataattggtcttttatcctggctctgaatgaccctgcaggtcatcatggttttctttttttattgtttttttttttttctgagacagagtctcactctgtcacccaggctggagtgcagtggcgcgatctcagctcactgcaacctctgcctcccggatttaagcgattcttctgcctcagcctcccgagtagctgggactacaggtgtgccaccacgcctggctgatttttgtatttttagtagagatggggtttcaccatactggctaggctggtctcgaattcctgacctcaggtgatccacccacctcggcttcccaaagtgctaggattataggcttgagctactgcgcccggcccatggtgtttttctttagggctcttcctacaaccttgagaagtagataggcatcagagtatggtactataggaatcagaaaaattcaaaacaaatgtggattaagtgtttaggctctatgtggctcacgcagccagaatccttaagtctgtgtgtttctgtgtctcaagactgggctcacattctggctttgtccataacaatgctctgggatttcagggagttccctcatttgtaaaatgagggggtcagagcaggtgatatccatgtttcttccctttctgatattgttgtctgtggcatattctttgtatggcgaatttaataaattatattaatgtgtctctttga

SEQ ID NO: 714 - DNA, 2107 bp, Homo sapiens
  source 1..2107: mol_type = genomic DNA
agcggggtggacaagtggcgtgtgtgctgcgaccccgagggaagatgaacgggacgcggaactggtgtaccctggtggacgtgcacccagaggaccaggcggcggcgggcaggaagacctatgccatggtgtccagccactcagctggtcattctctggcttcagaactggtggagtcccatgatggacatgaggagatcattaaggtgtacttgaaggggaggtctggagacaagatgattcacgagaagaatattaaccagctgaagagtgaggtccagtacatccaggaggccaggaactgcctacagaagctccgggaggatataagtagcaagcttgacaggaacctaggagattctctccatcgacaggagatacaggtggtgctagaaaagccaaatggctttagtcagagtcccacagccctgtacagcagcccacctgaggtggacacctgtataaatgaggatgttgagagcttgaggaagacggtgcaggacttgctggccaagcttcaggaggccaagcggcaacaccagtcagactgtgtggcttttgaggtcacactcagccggtaccagagggaagcagaacaaagtaatgtggcccttcagagagaggaggacagatgtccagagtgattggagaatgtcctgggggaatgaagttccttccacaaacacagctcagttcttagcaacaaactgtttgtttttctacttgctccatctgcagcctacgctgccctggcctcctgcagacagatagtggggttacctggcaaggcctggtgagagccagtgaacctaagctttgactgggtggccttgtctttctggggaggagggaatgtacattcagggagtagccttttgcggaaaaattctctagggctacagacagtcatgtgtgacttctctctgctgtgaaaactcccagagtctctttagggattttccctaaggtgtaccaccaggcacacctcagtcttcttgacccagagcctgaaaactgttttcactgggttccaccagtcccagcaaaatcctctttgtatttattttgctaagttattggtggttttgcttacatctcatgattgatataataccaaagttctatagccttctcttgcagtatttggatttgcttgaaaccgggaaaactgttcccattaggcttgttaatgtcagagtgacactattatgaatctttctctccctttcctctgcctgtttcttctctctttctccttcaaacttgctctgcagctaaggaaggtgagtctactttccctgaggctttggggtcagagtatatgttgtttggagaaagagggcaatcaggactcttctgggacccagatgagttcttcactagcccttctgaaccccttgctccataattggtcttttatcctggctctgaatgaccctgcaggtcatcatggttttctttttttattgtttttttttttttctgagacagagtctcactctgtcacccaggctggagtgcagtggcgcgatctcagctcactgcaacctctgcctcccggatttaagcgattcttctgcctcagcctcccgagtagctgggactacaggtgtgccaccacgcctggctgatttttgtatttttagtagagatggggtttcaccatactggctaggctggtctcgaattcctgacctcaggtgatccacccacctcggcttcccaaagtgctaggattataggcttgagctactgcgcccggcccatggtgtttttctttagggctcttcctacaaccttgagaagtagataggcatcagagtatggtactataggaatcagaaaaattcaaaacaaatgtggattaagtgtttaggctctatgtggctcacgcagccagaatccttaagtctgtgtgtttctgtgtctcaagactgggctcacattctggctttgtccataacaatgctctgggatttcagggagttccctcatttgtaaaatgagggggtcagagcaggtgatatccatgtttcttccctttctgatattgttgtctgtggcatattctttgtatggcgaatttaataaattatattaatgtgtc

SEQ ID NO: 715 - DNA, 1767 bp, Homo sapiens
  source 1..1767: mol_type = genomic DNA
agttggagccagacagcggggtggacaagtggcgtgtgtgctgcgaccccgagggaagatgaacgggacgcggaactggtgtaccctggtggacgtgcacccagaggaccaggcggcggagcagaaattctggattgaggatgagcagtccaggaatgacctctctacaactagagaaagaagaatgcatgcaatgtgttccctgtagtccaagaaccagggtagccctgctggagctctacagagccatgtgccagggcagcgtggacattctcaggctgactctccagggtgaactgacaggagatgaacttgaacacatagcccagaaggcgggcaggaagacctatgccatggtgtccagccactcagctggtcattctctggcttcagaactggtggagtcccatgatggacatgaggagatcattaaggtgtacttgaaggggaggtctggagacaagatgattcacgagaagaatattaaccagctgaagagtgaggtccagtacatccaggaggccaggaactgcctacagaagctccgggaggatataagtagcaagcttgacaggaacctaggagattctctccatcgacaggagatacaggtggtgctagaaaagccaaatggctttagtcagagtcccacagccctgtacagcagcccacctgaggtggacacctgtataaatgaggatgttgagagcttgaggaagacggtgcaggacttgctggccaagcttcaggaggccaagcggcaacaccagtcagactgtgtggcttttgaggtcacactcagccggtaccagagggaagcagaacaaagtaatgtggcccttcagagagaggaggacagagtggagcagaaagaggcagaagtcggagagctgcagaggcgcttgctagggatggagacggagcatcaggccttactggcgaaagtgagggaaggggaggtggccctagaggaacttcggagcaacaatgctgactgccaagcagaacgagaaaaggctgctaccctggaaaaggaagtggccgggttgcgggagaagatccaccacttggatgacatgctcaagagccagcagcggaaagtccggcaaatgatagagcagctccagaattcaaaagctgtgatccagtcaaaggacgccaccatccaggagctcaaggagaaaatcgcctatctggaggcagagaatttagagatgcatgaccggatggaacacctgatagaaaaacaaatcagtcatggcaacttcagcacccaggcccgggccaagacagagaacccgggcagtattaggatatccaagccgcctagcccgaagcccatgcctgtcatccgagtggtggaaacctgagctgcctggagatggttgctgccattgctgctgcctctgcctcggagaagcccactgcccctgttggctgttaacactgcctttgacttcctgactgtcccctggctgcacccaggacttcgggctcctgtgtctcaccattcccaagcccctggccactctaagctgggcagacggagcacgagcacctattcaaggcactgcagccctttggaagacattgtcctgcaagcaggagccagggcaatatctatattcctacagtgactatttttctctgtagagagcctcccttctgttgtagactggactctggctgtgccataagccaggccttcatcagattgggagaggtgacaagatttgcctcagccctaaaagctggagacacagatgt

SEQ ID NO: 716 - DNA, 992 bp, Homo sapiens
  source 1..992: mol_type = genomic DNA
cagttggagccagacagcggggtggacaagtggcgtgtgtgctgcgaccccgagggaagatgaacgggacgcggaactggtgtaccctggtggacgtgcacccagaggaccaggcggcggcgggcaggaagacctatgccatggtgtccagccactcagctggtcattctctggcttcagaactggtggagtcccatgatggacatgaggagatcattaaggtgtacttgaaggggaggtctggagacaagatgattcacgagaagaatattaaccagctgaagagtgaggtccagtacatccaggaggccaggaactgcctacagaagctccgggaggatataagtagcaagcttgacaggaacctaggagattctctccatcgacaggagatacaggtggtgctagaaaagccaaatggctttagtcagagtcccacagccctaaaagctggagacacagatgtccagagtgattggagaatgtcctgggggaatgaagttccttccacaaacacagctcagttcttagcaacaaactgtttgtttttctacttgctccatctgcagcctacgctgccctggcctcctgcagacagatagtggggttacctggcaaggcctggtgagagccagtgaacctaagctttgactgggtggccttgtctttctggggaggagggaatgtacattcagggagtagccttttgcggaaaaattctctagggctacagacagtcatgtgtgacttctctctgctgtgaaaactcccagagtctctttagggattttccctaaggtgtaccaccaggcacacctcagtcttcttgacccagagcctgaaaactgttttcactgggttccaccagtcccagcaaaatcctctttgtatttattttgctaagttattggtggttttgcttacatctcatgattgatataataccaaagttctatagccttctcttgcagtatttggatttgcttgaaacc

SEQ ID NO: 717 - DNA, 2579 bp, Homo sapiens
  source 1..2579: mol_type = genomic DNA
gttttcccctcccatgtgctcaagactggcgctaaaagttttgagcttctcaaaagtctagagccaccgtccagggagcaggtagctgctgggctccggggacactttgcgttcgggctgggagcgtgctttccacgacggtgacacgcttccctggattggcagccagactgccttccgggtcactgccatggaggagccgcagtcagatcctagcgtcgagccccctctgagtcaggaaacattttcagacctatggaaactacttcctgaaaacaacgttctgtcccccttgccgtcccaagcaatggatgatttgatgctgtccccggacgatattgaacaatggttcactgaagacccaggtccagatgaagctcccagaatgccagaggctgctccccccgtggcccctgcaccagcagctcctacaccggcggcccctgcaccagccccctcctggcccctgtcatcttctgtcccttcccagaaaacctaccagggcagctacggtttccgtctgggcttcttgcattctgggacagccaagtctgtgacttgcacgtactcccctgccctcaacaagatgttttgccaactggccaagacctgccctgtgcagctgtgggttgattccacacccccgcccggcacccgcgtccgcgccatggccatctacaagcagtcacagcacatgacggaggttgtgaggcgctgcccccaccatgagcgctgctcagatagcgatggtctggcccctcctcagcatcttatccgagtggaaggaaatttgcgtgtggagtatttggatgacagaaacacttttcgacatagtgtggtggtgccctatgagccgcctgaggttggctctgactgtaccaccatccactacaactacatgtgtaacagttcctgcatgggcggcatgaaccggaggcccatcctcaccatcatcacactggaagactccagtggtaatctactgggacggaacagctttgaggtgcgtgtttgtgcctgtcctgggagagaccggcgcacagaggaagagaatctccgcaagaaaggggagcctcaccacgagctgcccccagggagcactaagcgagcactgcccaacaacaccagctcctctccccagccaaagaagaaaccactggatggagaatatttcacccttcagatccgtgggcgtgagcgcttcgagatgttccgagagctgaatgaggccttggaactcaaggatgcccaggctgggaaggagccaggggggagcagggctcactccagccacctgaagtccaaaaagggtcagtctacctcccgccataaaaaactcatgttcaagacagaagggcctgactcagactgacattctccacttcttgttccccactgacagcctcccacccccatctctccctcccctgccattttgggttttgggtctttgaacccttgcttgcaataggtgtgcgtcagaagcacccaggacttccatttgctttgtcccggggctccactgaacaagttggcctgcactggtgttttgttgtggggaggaggatggggagtaggacataccagcttagattttaaggtttttactgtgagggatgtttgggagatgtaagaaatgttcttgcagttaagggttagtttacaatcagccacattctaggtaggggcccacttcaccgtactaaccagggaagctgtccctcactgttgaattttctctaacttcaaggcccatatctgtgaaatgctggcatttgcacctacctcacagagtgcattgtgagggttaatgaaataatgtacatctggccttgaaaccaccttttattacatggggtctagaacttgacccccttgagggtgcttgttccctctccctgttggtcggtgggttggtagtttctacagttgggcagctggttaggtagagggagttgtcaagtctctgctggcccagccaaaccctgtctgacaacctcttggtgaaccttagtacctaaaaggaaatctcaccccatcccacaccctggaggatttcatctcttgtatatgatgatctggatccaccaagacttgttttatgctcagggtcaatttcttttttcttttttttttttttttttctttttctttgagactgggtctcgctttgttgcccaggctggagtggagtggcgtgatcttggcttactgcagcctttgcctccccggctcgagcagtcctgcctcagcctccggagtagctgggaccacaggttcatgccaccatggccagccaacttttgcatgttttgtagagatggggtctcacagtgttgcccaggctggtctcaaactcctgggctcaggcgatccacctgtctcagcctcccagagtgctgggattacaattgtgagccaccacgtccagctggaagggtcaacatcttttacattctgcaagcacatctgcattttcaccccacccttcccctccttctccctttttatatcccatttttatatcgatctcttattttacaataaaactttgctgccacctgtgtgtctgaggggtg

SEQ ID NO: 718 - DNA, 1152 bp, Homo sapiens
  source 1..1152: mol_type = genomic DNA
atggaggagccgcagtcagatcctagcgtcgagccccctctgagtcaggaaacattttcagacctatggaaactacttcctgaaaacaacgttctgtcccccttgccgtcccaagcaatggatgatttgatgctgtccccggacgatattgaacaatggttcactgaagacccaggtccagatgaagctcccagaatgccagaggctgctccccccgtggcccctgcaccagcagctcctacaccggcggcccctgcaccagccccctcctggcccctgtcatcttctgtcccttcccagaaaacctaccagggcagctacggtttccgtctgggcttcttgcattctgggacagccaagtctgtgacttgcacgtactcccctgccctcaacaagatgttttgccaactggccaagacctgccctgtgcagctgtgggttgattccacacccccgcccggcacccgcgtccgcgccatggccatctacaagcagtcacagcacatgacggaggttgtgaggcgctgcccccaccatgagcgctgctcagatagcgatggtctggcccctcctcagcatcttatccgagtggaaggaaatttgcgtgtggagtatttggatgacagaaacacttttcgacatagtgtggtggtgccctatgagccgcctgaggttggctctgactgtaccaccatccactacaactacatgtgtaacagttcctgcatgggcggcatgaaccggaggcccatcctcaccatcatcacactggaagactccagtggtaatctactgggacggaacagctttgaggtgcgtgtttgtgcctgtcctgggagagaccggcgcacagaggaagagaatctccgcaagaaaggggagcctcaccacgagctgcccccagggagcactaagcgagcactgcccaacaacaccagctcctctccccagccaaagaagaaaccactggatggagaatatttcacccttcagaaaacatttccggccaggcacggtggatcacacctgtaatcccagctactcgggaggctgaggcaggagaatcgcttgaacccaggaggcagagggttgcagtgagccgagattgcgccattgcactctagcctgggcaacagagcaagactccatctc

SEQ ID NO: 719 - DNA, 2466 bp, Homo sapiens
  source 1..2466: mol_type = genomic DNA
gagccaccgtccagggagcaggtagctgctgggctccggggacactttgcgttcgggctgggagcgtgctttccacgacggtgacacgcttccctggattggcagccagactgccttccgggtcactgccatggaggagccgcagtcagatcctagcgtcgagccccctctgagtcaggaaacattttcagacctatggaaactacttcctgaaaacaacgttctgtcccccttgccgtcccaagcaatggatgatttgatgctgtccccggacgatattgaacaatggttcactgaagacccaggtccagatgaagctcccagaatgccagaggctgctccccccgtggcccctgcaccagcagctcctacaccggcggcccctgcaccagccccctcctggcccctgtcatcttctgtcccttcccagaaaacctaccagggcagctacggtttccgtctgacttgcacgtactcccctgccctcaacaagatgttttgccaactggccaagacctgccctgtgcagctgtgggttgattccacacccccgcccggcacccgcgtccgcgccatggccatctacaagcagtcacagcacatgacggaggttgtgaggcgctgcccccaccatgagcgctgctcagatagcgatggtctggcccctcctcagcatcttatccgagtggaaggaaatttgcgtgtggagtatttggatgacagaaacacttttcgacatagtgtggtggtgccctatgagccgcctgaggttggctctgactgtaccaccatccactacaactacatgtgtaacagttcctgcatgggcggcatgaaccggaggcccatcctcaccatcatcacactggaagactccagtggtaatctactgggacggaacagctttgaggtgcgtgtttgtgcctgtcctgggagagaccggcgcacagaggaagagaatctccgcaagaaaggggagcctcaccacgagctgcccccagggagcactaagcgagcactgcccaacaacaccagctcctctccccagccaaagaagaaaccactggatggagaatatttcacccttcagatccgtgggcgtgagcgcttcgagatgttccgagagctgaatgaggccttggaactcaaggatgcccaggctgggaaggagccaggggggagcagggctcactccagccacctgaagtccaaaaagggtcagtctacctcccgccataaaaaactcatgttcaagacagaagggcctgactcagactgacattctccacttcttgttccccactgacagcctcccacccccatctctccctcccctgccattttgggttttgggtctttgaacccttgcttgcaataggtgtgcgtcagaagcacccaggacttccatttgctttgtcccggggctccactgaacaagttggcctgcactggtgttttgttgtggggaggaggatggggagtaggacataccagcttagattttaaggtttttactgtgagggatgtttgggagatgtaagaaatgttcttgcagttaagggttagtttacaatcagccacattctaggtaggggcccacttcaccgtactaaccagggaagctgtccctcactgttgaattttctctaacttcaaggcccatatctgtgaaatgctggcatttgcacctacctcacagagtgcattgtgagggttaatgaaataatgtacatctggccttgaaaccaccttttattacatggggtctagaacttgacccccttgagggtgcttgttccctctccctgttggtcggtgggttggtagtttctacagttgggcagctggttaggtagagggagttgtcaagtctctgctggcccagccaaaccctgtctgacaacctcttggtgaaccttagtacctaaaaggaaatctcaccccatcccacaccctggaggatttcatctcttgtatatgatgatctggatccaccaagacttgttttatgctcagggtcaatttcttttttcttttttttttttttttttctttttctttgagactgggtctcgctttgttgcccaggctggagtggagtggcgtgatcttggcttactgcagcctttgcctccccggctcgagcagtcctgcctcagcctccggagtagctgggaccacaggttcatgccaccatggccagccaacttttgcatgttttgtagagatggggtctcacagtgttgcccaggctggtctcaaactcctgggctcaggcgatccacctgtctcagcctcccagagtgctgggattacaattgtgagccaccacgtccagctggaagggtcaacatcttttacattctgcaagcacatctgcattttcaccccacccttcccctccttctccctttttatatcccatttttatatcgatctcttattttacaataaaactttgctgcc

SEQ ID NO: 720 - DNA, 1018 bp, Homo sapiens
  source 1..1018: mol_type = genomic DNA
atggaggagccgcagtcagatcctagcgtcgagccccctctgagtcaggaaacattttcagacctatggaaactacttcctgaaaacaacgttctgtcccccttgccgtcccaagcaatggatgatttgatgctgtccccggacgatattgaacaatggttcactgaagacccaggtccagatgaagctcccagaatgccagaggctgctccccccgtggcccctgcaccagcagctcctacaccggcggcccctgcaccagccccctcctggcccctgtcatcttctgtcccttcccagaaaacctaccagggcagctacggtttccgtctgggcttcttgcattctgggacagccaagtctgtgacttgcacgtactcccctgccctcaacaagatgttttgccaactggccaagacctgccctgtgcagctgtgggttgattccacacccccgcccggcacccgcgtccgcgccatggccatctacaagcagtcacagcacatgacggaggttgtgaggcgctgcccccaccatgagcgctgctcagatagcgatggtctggcccctcctcagcatcttatccgagtggaaggaaatttgcgtgtggagtatttggatgacagaaacacttttcgacatagtgtggtggtgccctatgagccgcctgaggttggctctgactgtaccaccatccactacaactacatgtgtaacagttcctgcatgggcggcatgaaccggaggcccatcctcaccatcatcacactggaagactccaggccaaggcaggtggatcacctgaggtcaggagttcaagacagcctggccaacatagcgaaatcccatctctactaaaaatacaaaaattagcctggcagtggtggcccacgcctgtaatcccagctactaagggggctgaggcaggaggatctcttaaccagggaggaggaggttgcagtgagcagagattgtgccactgcactccagcctgtgcaacagagtgagactctgtctc

SEQ ID NO: 721 - DNA, 808 bp, Homo sapiens
  source 1..808: mol_type = genomic DNA
aaaagtctagagccaccgtccagggagcaggtagctgctgggctccggggacactttgcgttcgggctgggagcgtgctttccacgacggtgacacgcttccctggattggcagccagactgccttccgggtcactgccatggaggagccgcagtcagatcctagcgtcgagccccctctgagtcaggaaacattttcagacctatggaaactacttcctgaaaacaacgttctgtcccccttgccgtcccaagcaatggatgatttgatgctgtccccggacgatattgaacaatggttcactgaagacccaggtccagatgaagctcccagaatgccagaggctgctccccccgtggcccctgcaccagcagctcctacaccggcggcccctgcaccagccccctcctggcccctgtcatcttctgtcccttcccagaaaacctaccagggcagctacggtttccgtctgggcttcttgcattctgggacagccaagtctgtgacttgcacgtactcccctgccctcaacaagatgttttgccaactggccaagacctgccctgtgcagctgtgggttgattccacacccccgcccggcacccgcgtccgcgccatggccatctacaagcagtcacagcacatgacggaggttgtgaggcgctgcccccaccatgagcgctgctcagatagcgatggtctggcccctcctcagcatcttatccgagtggaaggaaatttgcgtgtggagtatttggatgacagaaacacttttcgacatagtgtggtctctgggaggaggggttaa

SEQ ID NO: 722 - DNA, 1075 bp, Homo sapiens
  source 1..1075: mol_type = genomic DNA
atggaggagccgcagtcagatcctagcgtcgagccccctctgagtcaggaaacattttcagacctatggaaactacttcctgaaaacaacgttctgtcccccttgccgtcccaagcaatggatgatttgatgctgtccccggacgatattgaacaatggttcactgaagacccaggtccagatgaagctcccagaatgccagaggctgctccccccgtggcccctgcaccagcagctcctacaccggcggcccctgcaccagccccctcctggcccctgtcatcttctgtcccttcccagaaaacctaccagggcagctacggtttccgtctgggcttcttgcattctgggacagccaagtctgtgacttgcacgtactcccctgccctcaacaagatgttttgccaactggccaagacctgccctgtgcagctgtgggttgattccacacccccgcccggcacccgcgtccgcgccatggccatctacaagcagtcacagcacatgacggaggttgtgaggcgctgcccccaccatgagcgctgctcagatagcgatggtctggcccctcctcagcatcttatccgagtggaaggaaatttgcgtgtggagtatttggatgacagaaacacttttcgacatagtgtggtggtgccctatgagccgcctgaggttggctctgactgtaccaccatccactacaactacatgtgtaacagttcctgcatgggcggcatgaaccggaggcccatcctcaccatcatcacactggaagactccagtggtaatctactgggacggaacagctttgaggtgcgtgtttgtgcctgtcctgggagagaccggcgcacagaggaagagaatctccgcaagaaaggggagcctcaccacgagctgcccccagggagcactaagcgagcactgcccaacaacaccagctcctctccccagccaaagaagaaaccactggatggagaatatttcacccttcagccacctgaagtccaaaaagggtcagtctacctcccgccataaaaaactcatgttcaagacagaagggcctgactcagactga

SEQ ID NO: 723 - DNA, 2653 bp, Homo sapiens
  source 1..2653: mol_type = genomic DNA
ctagagccaccgtccagggagcaggtagctgctgggctccggggacactttgcgttcgggctgggagcgtgctttccacgacggtgacacgcttccctggattggcagccagactgccttccgggtcactgccatggaggagccgcagtcagatcctagcgtcgagccccctctgagtcaggaaacattttcagacctatggaaactacttcctgaaaacaacgttctgtcccccttgccgtcccaagcaatggatgatttgatgctgtccccggacgatattgaacaatggttcactgaagacccaggtccagatgaagctcccagaatgccagaggctgctccccccgtggcccctgcaccagcagctcctacaccggcggcccctgcaccagccccctcctggcccctgtcatcttctgtcccttcccagaaaacctaccagggcagctacggtttccgtctgggcttcttgcattctgggacagccaagtctgtgacttgcacgtactcccctgccctcaacaagatgttttgccaactggccaagacctgccctgtgcagctgtgggttgattccacacccccgcccggcacccgcgtccgcgccatggccatctacaagcagtcacagcacatgacggaggttgtgaggcgctgcccccaccatgagcgctgctcagatagcgatggtctggcccctcctcagcatcttatccgagtggaaggaaatttgcgtgtggagtatttggatgacagaaacacttttcgacatagtgtggtggtgccctatgagccgcctgaggttggctctgactgtaccaccatccactacaactacatgtgtaacagttcctgcatgggcggcatgaaccggaggcccatcctcaccatcatcacactggaagactccagtggtaatctactgggacggaacagctttgaggtgcgtgtttgtgcctgtcctgggagagaccggcgcacagaggaagagaatctccgcaagaaaggggagcctcaccacgagctgcccccagggagcactaagcgagcactgcccaacaacaccagctcctctccccagccaaagaagaaaccactggatggagaatatttcacccttcaggaccagaccagctttcaaaaagaaaattgttaaagagagcatgaaaatggttctatgactttgcctgatacagatgctacttgacttacgatggtgttacttcctgataaactcgtcgtaagttgaaaatattatccgtgggcgtgagcgcttcgagatgttccgagagctgaatgaggccttggaactcaaggatgcccaggctgggaaggagccaggggggagcagggctcactccagccacctgaagtccaaaaagggtcagtctacctcccgccataaaaaactcatgttcaagacagaagggcctgactcagactgacattctccacttcttgttccccactgacagcctcccacccccatctctccctcccctgccattttgggttttgggtctttgaacccttgcttgcaataggtgtgcgtcagaagcacccaggacttccatttgctttgtcccggggctccactgaacaagttggcctgcactggtgttttgttgtggggaggaggatggggagtaggacataccagcttagattttaaggtttttactgtgagggatgtttgggagatgtaagaaatgttcttgcagttaagggttagtttacaatcagccacattctaggtaggggcccacttcaccgtactaaccagggaagctgtccctcactgttgaattttctctaacttcaaggcccatatctgtgaaatgctggcatttgcacctacctcacagagtgcattgtgagggttaatgaaataatgtacatctggccttgaaaccaccttttattacatggggtctagaacttgacccccttgagggtgcttgttccctctccctgttggtcggtgggttggtagtttctacagttgggcagctggttaggtagagggagttgtcaagtctctgctggcccagccaaaccctgtctgacaacctcttggtgaaccttagtacctaaaaggaaatctcaccccatcccacaccctggaggatttcatctcttgtatatgatgatctggatccaccaagacttgttttatgctcagggtcaatttcttttttcttttttttttttttttttctttttctttgagactgggtctcgctttgttgcccaggctggagtggagtggcgtgatcttggcttactgcagcctttgcctccccggctcgagcagtcctgcctcagcctccggagtagctgggaccacaggttcatgccaccatggccagccaacttttgcatgttttgtagagatggggtctcacagtgttgcccaggctggtctcaaactcctgggctcaggcgatccacctgtctcagcctcccagagtgctgggattacaattgtgagccaccacgtccagctggaagggtcaacatcttttacattctgcaagcacatctgcattttcaccccacccttcccctccttctccctttttatatcccatttttatatcgatctcttattttacaataaaactttgctgccacctgtgtgtctgagggg

SEQ ID NO: 724 - DNA, 2506 bp, Homo sapiens
  source 1..2506: mol_type = genomic DNA
aaaagtctagagccaccgtccagggagcaggtagctgctgggctccggggacactttgcgttcgggctgggagcgtgctttccacgacggtgacacgcttccctggattggccagactgccttccgggtcactgccatggaggagccgcagtcagatcctagcgtcgagccccctctgagtcaggaaacattttcagacctatggaaactacttcctgaaaacaacgttctgtcccccttgccgtcccaagcaatggatgatttgatgctgtccccggacgatattgaacaatggttcactgaagacccaggtccagatgaagctcccagaatgccagaggctgctccccccgtggcccctgcaccagcagctcctacaccggcggcccctgcaccagccccctcctggcccctgtcatcttctgtcccttcccagaaaacctaccagggcagctacggtttccgtctgggcttcttgcattctgggacagccaagtctgtgacttgcacgtactcccctgccctcaacaagatgttttgccaactggccaagacctgccctgtgcagctgtgggttgattccacacccccgcccggcacccgcgtccgcgccatggccatctacaagcagtcacagcacatgacggaggttgtgaggcgctgcccccaccatgagcgctgctcagatagcgatggtctggcccctcctcagcatcttatccgagtggaaggaaatttgcgtgtggagtatttggatgacagaaacacttttcgacatagtgtggtggtgccctatgagccgcctgaggttggctctgactgtaccaccatccactacaactacatgtgtaacagttcctgcatgggcggcatgaaccggaggcccatcctcaccatcatcacactggaagactccagtggtaatctactgggacggaacagctttgaggtgcgtgtttgtgcctgtcctgggagagaccggcgcacagaggaagagaatctccgcaagaaaggggagcctcaccacgagctgcccccagggagcactaagcgagcactgcccaacaacaccagctcctctccccagccaaagaagaaaccactggatggagaatatttcacccttcagatccgtgggcgtgagcgcttcgagatgttccgagagctgaatgaggccttggaactcaaggatgcccaggctgggaaggagccaggggggagcagggctcactccagccacctgaagtccaaaaagggtcagtctacctcccgccataaaaaactcatgttcaagacagaagggcctgactcagactgacattctccacttcttgttccccactgacagcctcccacccccatctctccctcccctgccattttgggttttgggtctttgaacccttgcttgcaataggtgtgcgtcagaagcacccaggacttccatttgctttgtcccggggctccactgaacaagttggcctgcactggtgttttgttgtggggaggaggatggggagtaggacataccagcttagattttaaggtttttactgtgagggatgtttgggagatgtaagaaatgttcttgcagttaagggttagtttacaatcagccacattctaggtaggggcccacttcaccgtactaaccagggaagctgtccctcactgttgaattttctctaacttcaaggcccatatctgtgaaatgctggcatttgcacctacctcacagagtgcattgtgagggttaatgaaataatgtacatctggccttgaaaccaccttttattacatggggtctagaacttgacccccttgagggtgcttgttccctctccctgttggtcggtgggttggtagtttctacagttgggcagctggttaggtagagggagttgtcaagtctctgctggcccagccaaaccctgtctgacaacctcttggtgaaccttagtacctaaaaggaaatctcaccccatcccacaccctggaggatttcatctcttgtatatgatgatctggatccaccaagacttgttttatgctcagggtcaatttcttttttcttttttttttttttttttctttttctttgagactgggtctcgctttgttgcccaggctggagtggagtggcgtgatcttggcttactgcagcctttgcctccccggctcgagcagtcctgcctcagcctccggagtagctgggaccacaggttcatgccaccatggccagccaacttttgcatgttttgtagagatggggtctcacagtgttgcccaggctggtctcaaactcctgggctcaggcgatccacctgtctcagcctcccagagtgctgggattacaattgtgagccaccacgtccagctggaagggtcaacatcttttacattctgcaagcacatctgcattttcaccccacccttcccctccttctccctttttatatcccatttttatatcgatctcttattttacaataaaactttgctgcca

SEQ ID NO: 725 - DNA, 2580 bp, Homo sapiens
  source 1..2580: mol_type = genomic DNA
ctagagccaccgtccagggagcaggtagctgctgggctccggggacactttgcgttcgggctgggagcgtgctttccacgacggtgacacgcttccctggattggcagccagactgccttccgggtcactgccatggaggagccgcagtcagatcctagcgtcgagccccctctgagtcaggaaacattttcagacctatggaaactacttcctgaaaacaacgttctgtcccccttgccgtcccaagcaatggatgatttgatgctgtccccggacgatattgaacaatggttcactgaagacccaggtccagatgaagctcccagaatgccagaggctgctccccccgtggcccctgcaccagcagctcctacaccggcggcccctgcaccagccccctcctggcccctgtcatcttctgtcccttcccagaaaacctaccagggcagctacggtttccgtctgggcttcttgcattctgggacagccaagtctgtgacttgcacgtactcccctgccctcaacaagatgttttgccaactggccaagacctgccctgtgcagctgtgggttgattccacacccccgcccggcacccgcgtccgcgccatggccatctacaagcagtcacagcacatgacggaggttgtgaggcgctgcccccaccatgagcgctgctcagatagcgatggtctggcccctcctcagcatcttatccgagtggaaggaaatttgcgtgtggagtatttggatgacagaaacacttttcgacatagtgtggtggtgccctatgagccgcctgaggttggctctgactgtaccaccatccactacaactacatgtgtaacagttcctgcatgggcggcatgaaccggaggcccatcctcaccatcatcacactggaagactccagtggtaatctactgggacggaacagctttgaggtgcgtgtttgtgcctgtcctgggagagaccggcgcacagaggaagagaatctccgcaagaaaggggagcctcaccacgagctgcccccagggagcactaagcgagcactgcccaacaacaccagctcctctccccagccaaagaagaaaccactggatggagaatatttcacccttcagatgctacttgacttacgatggtgttacttcctgataaactcgtcgtaagttgaaaatattatccgtgggcgtgagcgcttcgagatgttccgagagctgaatgaggccttggaactcaaggatgcccaggctgggaaggagccaggggggagcagggctcactccagccacctgaagtccaaaaagggtcagtctacctcccgccataaaaaactcatgttcaagacagaagggcctgactcagactgacattctccacttcttgttccccactgacagcctcccacccccatctctccctcccctgccattttgggttttgggtctttgaacccttgcttgcaataggtgtgcgtcagaagcacccaggacttccatttgctttgtcccggggctccactgaacaagttggcctgcactggtgttttgttgtggggaggaggatggggagtaggacataccagcttagattttaaggtttttactgtgagggatgtttgggagatgtaagaaatgttcttgcagttaagggttagtttacaatcagccacattctaggtaggggcccacttcaccgtactaaccagggaagctgtccctcactgttgaattttctctaacttcaaggcccatatctgtgaaatgctggcatttgcacctacctcacagagtgcattgtgagggttaatgaaataatgtacatctggccttgaaaccaccttttattacatggggtctagaacttgacccccttgagggtgcttgttccctctccctgttggtcggtgggttggtagtttctacagttgggcagctggttaggtagagggagttgtcaagtctctgctggcccagccaaaccctgtctgacaacctcttggtgaaccttagtacctaaaaggaaatctcaccccatcccacaccctggaggatttcatctcttgtatatgatgatctggatccaccaagacttgttttatgctcagggtcaatttcttttttcttttttttttttttttttctttttctttgagactgggtctcgctttgttgcccaggctggagtggagtggcgtgatcttggcttactgcagcctttgcctccccggctcgagcagtcctgcctcagcctccggagtagctgggaccacaggttcatgccaccatggccagccaacttttgcatgttttgtagagatggggtctcacagtgttgcccaggctggtctcaaactcctgggctcaggcgatccacctgtctcagcctcccagagtgctgggattacaattgtgagccaccacgtccagctggaagggtcaacatcttttacattctgcaagcacatctgcattttcaccccacccttcccctccttctccctttttatatcccatttttatatcgatctcttattttacaataaaactttgctgccacctgtgtgtctgagggg

SEQ ID NO: 726 - DNA, 565 bp, Homo sapiens
  source 1..565: mol_type = genomic DNA
ttcgggctgggagcgtgctttccacgacggtgacacgcttccctggattggggctgaggagtgtccgaagagaatgggcaggtgagcggtgagacagttgttcttccagaagctttgcagtgaaaggaatcaaagaaatggagccgtgtatcagcagccagactgccttccgggtcactgccatggaggagccgcagtcagatcctagcgtcgagccccctctgagtcaggaaacattttcagacctatggaaactacttcctgaaaacaacgttctgtcccccttgccgtcccaagcaatggatgatttgatgctgtccccggacgatattgaacaatggttcactgaagacccaggtccagatgaagctcccagaatgccagaggctgctccccccgtggcccctgcaccagcagctcctacaccggcggcccctgcaccagccccctcctggcccctgtcatcttctgtcccttcccagaaaacctaccagggcagctacggtttccgtctgggcttcttgcattctgggacagccaagtctgtgacttgcacgtactcccc

SEQ ID NO: 727 - DNA, 634 bp, Homo sapiens
  source 1..634: mol_type = genomic DNA
aatgcagggctgaggagtgtccgaagagaatgggcaggtgagcggtgagacagttgttcttccagaagctttgcagtgaaaggaatcaaagaaatggagccgtgtatcagcagccagactgccttccgggtcactgccatggaggagccgcagtcagatcctagcgtcgagccccctctgagtcaggaaacattttcagacctatggaaactacttcctgaaaacaacgttctgtcccccttgccgtcccaagcaatggatgatttgatgctgtccccggacgatattgaacaatggttcactgaagacccaggtccagatgaagctcccagaatgccagaggctgctccccccgtggcccctgcaccagcagctcctacaccggcggcccctgcaccagccccctcctggcccctgtcatcttctgtcccttcccagaaaacctaccagggcagctacggtttccgtctgggcttcttgcattctgggacagccaagtctgtgacttgcacgtactcccctgccctcaacaagatgttttgccaactggccaagacctgccctgtgcagctgtgggttgattccacacccccgcccggcacccgcgtccgcgccatggccatctacaagcagt

SEQ ID NO: 728 - DNA, 729 bp, Homo sapiens
  source 1..729: mol_type = genomic DNA
aaaagtctagagccaccgtccagggagcaggtagctgctgggctccggggacactttgcgttcgggctgggagcgtgctttccacgacggtgacacgcttccctggattggtactcccctgccctcaacaagatgttttgccaactggccaagacctgccctgtgcagctgtgggttgattccacacccccgcccggcacccgcgtccgcgccatggccatctacaagcagtcacagcacatgacggaggttgtgaggcgctgcccccaccatgagcgctgctcagatagcgatggtctggcccctcctcagcatcttatccgagtggaaggaaatttgcgtgtggagtatttggatgacagaaacacttttcgacatagtgtggtggtgccctatgagccgcctgaggttggctctgactgtaccaccatccactacaactacatgtgtaacagttcctgcatgggcggcatgaaccggaggcccatcctcaccatcatcacactggaagactccagtggtaatctactgggacggaacagctttgaggtgcgtgtttgtgcctgtcctgggagagaccggcgcacagaggaagagaatctccgcaagaaaggggagcctcaccacgagctgcccccagggagcactaagcgagcactgcccaacaacaccagctcctctccccagccaaagaagaaaccactggatggagaatatttcacccttcag

SEQ ID NO: 729 - DNA, 546 bp, Homo sapiens
  source 1..546: mol_type = genomic DNA
ttcgggctgggagcgtgctttccacgacggtgacacgcttccctggattggcagccagactgccttccgggtcactgccatggaggagccgcagtcagatcctagcgtcgagccccctctgagtcaggaaacattttcagacctatggaaactacttcctgaaaacaacgttctgtactcccctgccctcaacaagatgttttgccaactggccaagacctgccctgtgcagctgtgggttgattccacacccccgcccggcacccgcgtccgcgccatggccatctacaagcagtcacagcacatgacggaggttgtgaggcgctgcccccaccatgagcgctgctcagatagcgatggtctggcccctcctcagcatcttatccgagtggaaggaaatttgcgtgtggagtatttggatgacagaaacacttttcgacatagtgtggtggtgccctatgagccgcctgaggttggctctgactgtaccaccatccactacaactacatgtgtaacagttcctgcatgggcggcatgaaccggag

SEQ ID NO: 730 - DNA, 2220 bp, Homo sapiens
  source 1..2220: mol_type = genomic DNA
gagccaccgtccagggagcaggtagctgctgggctccggggacactttgcgttcgggctgggagcgtgctttccacgacggtgacacgcttccctggattggcagccagactgccttccgggtcactgccatggaggagccgcagtcagatcctagcgtcgagccccctctgagtcaggaaacattttcagacctatggaaactacttcctgaaaacaacgttctgtactcccctgccctcaacaagatgttttgccaactggccaagacctgccctgtgcagctgtgggttgattccacacccccgcccggcacccgcgtccgcgccatggccatctacaagcagtcacagcacatgacggaggttgtgaggcgctgcccccaccatgagcgctgctcagatagcgatggtctggcccctcctcagcatcttatccgagtggaaggaaatttgcgtgtggagtatttggatgacagaaacacttttcgacatagtgtggtggtgccctatgagccgcctgaggttggctctgactgtaccaccatccactacaactacatgtgtaacagttcctgcatgggcggcatgaaccggaggcccatcctcaccatcatcacactggaagactccagtggtaatctactgggacggaacagctttgaggtgcgtgtttgtgcctgtcctgggagagaccggcgcacagaggaagagaatctccgcaagaaaggggagcctcaccacgagctgcccccagggagcactaagcgagcactgcccaacaacaccagctcctctccccagccaaagaagaaaccactggatggagaatatttcacccttcagatccgtgggcgtgagcgcttcgagatgttccgagagctgaatgaggccttggaactcaaggatgcccaggctgggaaggagccaggggggagcagggctcactccagccacctgaagtccaaaaagggtcagtctacctcccgccataaaaaactcatgttcaagacagaagggcctgactcagactgacattctccacttcttgttccccactgacagcctcccacccccatctctccctcccctgccattttgggttttgggtctttgaacccttgcttgcaataggtgtgcgtcagaagcacccaggacttccatttgctttgtcccggggctccactgaacaagttggcctgcactggtgttttgttgtggggaggaggatggggagtaggacataccagcttagattttaaggtttttactgtgagggatgtttgggagatgtaagaaatgttcttgcagttaagggttagtttacaatcagccacattctaggtaggggcccacttcaccgtactaaccagggaagctgtccctcactgttgaattttctctaacttcaaggcccatatctgtgaaatgctggcatttgcacctacctcacagagtgcattgtgagggttaatgaaataatgtacatctggccttgaaaccaccttttattacatggggtctagaacttgacccccttgagggtgcttgttccctctccctgttggtcggtgggttggtagtttctacagttgggcagctggttaggtagagggagttgtcaagtctctgctggcccagccaaaccctgtctgacaacctcttggtgaaccttagtacctaaaaggaaatctcaccccatcccacaccctggaggatttcatctcttgtatatgatgatctggatccaccaagacttgttttatgctcagggtcaatttcttttttcttttttttttttttttttctttttctttgagactgggtctcgctttgttgcccaggctggagtggagtggcgtgatcttggcttactgcagcctttgcctccccggctcgagcagtcctgcctcagcctccggagtagctgggaccacaggttcatgccaccatggccagccaacttttgcatgttttgtagagatggggtctcacagtgttgcccaggctggtctcaaactcctgggctcaggcgatccacctgtctcagcctcccagagtgctgggattacaattgtgagccaccacgtccagctggaagggtcaacatcttttacattctgcaagcacatctgcattttcaccccacccttcccctccttctccctttttatatcccatttttatatcgatctcttattttacaataaaactttgctgcc

SEQ ID NO: 731 - DNA, 2466 bp, Homo sapiens
  source 1..2466: mol_type = genomic DNA
tattgagttcttcaaacattgtagcctctttatggtctctgagaaataactaccttaaacccataatctttaatacttcctaaactttcttaataagagaagctctattcctgacactacctctcatttgcaaggtcaaatcatcattagttttgtagtctattaactgggtttgcttaggtcaggcattattattactaaccttattgttaatattctaaccataagaattaaactattaatggtgaatagagtttttcactttaacataggcctatcccactggtgggatacgagccaattcgaaagaaaagtcagtcatgtgcttttcagaggatgaaagcttaagataaagactaaaagtgtttgatgctggaggtgggagtggtattatataggtctcagccaagacatgtgataatcactgtagtagtagctggaaagagaaatctgtgactccaattagccagttcctgcagaccttgtgaggactagaggaagaatgctcctggctgttttgtactgcctgctgtggagtttccagacctccgctggccatttccctagagcctgtgtctcctctaagaacctgatggagaaggaatgctgtccaccgtggagcggggacaggagtccctgtggccagctttcaggcagaggttcctgtcagaatatccttctgtccaatgcaccacttgggcctcaatttcccttcacaggggtggatgaccgggagtcgtggccttccgtcttttataataggacctgccagtgctctggcaacttcatgggattcaactgtggaaactgcaagtttggcttttggggaccaaactgcacagagagacgactcttggtgagaagaaacatcttcgatttgagtgccccagagaaggacaaattttttgcctacctcactttagcaaagcataccatcagctcagactatgtcatccccatagggacctatggccaaatgaaaaatggatcaacacccatgtttaacgacatcaatatttatgacctctttgtctggatgcattattatgtgtcaatggatgcactgcttgggggatctgaaatctggagagacattgattttgcccatgaagcaccagcttttctgccttggcatagactcttcttgttgcggtgggaacaagaaatccagaagctgacaggagatgaaaacttcactattccatattgggactggcgggatgcagaaaagtgtgacatttgcacagatgagtacatgggaggtcagcaccccacaaatcctaacttactcagcccagcatcattcttctcctcttggcagattgtctgtagccgattggaggagtacaacagccatcagtctttatgcaatggaacgcccgagggacctttacggcgtaatcctggaaaccatgacaaatccagaaccccaaggctcccctcttcagctgatgtagaattttgcctgagtttgacccaatatgaatctggttccatggataaagctgccaatttcagctttagaaatacactggaaggatttgctagtccacttactgggatagcggatgcctctcaaagcagcatgcacaatgccttgcacatctatatgaatggaacaatgtcccaggtacagggatctgccaacgatcctatcttccttcttcaccatgcatttgttgacagtatttttgagcagtggctccgaaggcaccgtcctcttcaagaagtttatccagaagccaatgcacccattggacataaccgggaatcctacatggttccttttataccactgtacagaaatggtgatttctttatttcatccaaagatctgggctatgactatagctatctacaagattcagacccagactcttttcaagactacattaagtcctatttggaacaagcgagtcggatctggtcatggctccttggggcggcgatggtaggggccgtcctcactgccctgctggcagggcttgtgagcttgctgtgtcgtcacaagagaaagcagcttcctgaagaaaagcagccactcctcatggagaaagaggattaccacagcttgtatcagagccatttataaaaggcttaggcaatagagtagggccaaaaagcctgacctcactctaactcaaagtaatgtccaggttcccagagaatatctgctggtatttttctgtaaagaccatttgcaaaattgtaacctaatacaaagtgtagccttcttccaactcaggtagaacacacctgtctttgtcttgctgttttcactcagcccttttaacattttcccctaagcccatatgtctaaggaaaggatgctatttggtaatgaggaactgttatttgtatgtgaattaaagtgctcttattttaaaaaattgaaataattttgatttttgccttctgattatttaaagatctatatatgttttattggccccttctttattttaa

SEQ ID NO: 732 - DNA, 3983 bp, Homo sapiens
  source 1..3983: mol_type = genomic DNA
ggagactatttcaggagttaggatttgcatctgagttcattgcccctgtaacctgtcaaagaagagctaagggagctttcggggttggcttcttggaggctgctttctcctttacttggaaggcttcgctagtgatggacccatacatgattcagatgagcagcaaaggcaacctcccctcaattctggacgtgcatgtcaacgttggtgggagaagctctgtgccgggaaaaatgaaaggcagaaaggccaggtggtctgtgaggccctcagacatggccaagaaaactttcaaccccatccgagccattgtggacaacatgaaggtgaaaccaaatccaaacaaaaccatgatttccctgtccattggggaccctactgtgtttggaaacctgcctacagaccctgaagttacccaggcaatgaaagatgccctggactcgggcaaatataatggctatgccccatccatcggcttcctatccagtcgggaggagattgcttcttattaccactgtcctgaggcacccctagaagctaaggacgtcattctgacaagtggctgcagccaagctattgacctttgtttagctgtgttggccaacccagggcaaaacatcctggttccaagacctggtttctctctctacaagactctggctgagtctatgggaattgaggtcaaactctacaatttgttgccagagaaatcttgggaaattgacctgaaacaactggaatatctaattgatgaaaagacagcttgtctcattgtcaataatccatcaaacccctgtgggtcagtgttcagcaaacgtcatcttcagaagattctggcagtggctgcacggcagtgtgtccccatcttagctgatgagatctatggagacatggtgttttcggattgcaaatatgaaccactggccaccctcagcaccgatgtccccatcctgtcctgtggagggctggccaagcgctggctggttcctggctggaggttgggctggatcctcattcatgaccgaagagacatttttggcaatgagatccgagatgggctggtgaagctgagtcagcgcattttgggaccctgtaccattgtccagggagctctgaaaagcatcctatgtcgcaccccgggagagttttaccacaacactctgagcttcctcaagtccaatgctgatctctgttatggggcgttggctgccatccctggactccggccagtccgcccttctggggctatgtacctcatggttggaattgagatggaacatttcccagaatttgagaacgatgtggagttcacggagcggttagttgctgagcagtctgtccactgcctcccagcaacgtgctttgagtacccgaatttcatccgagtggtcatcacagtccccgaggtgatgatgctggaggcgtgcagccggatccaggagttctgtgagcagcactaccattgtgctgaaggcagccaggaggagtgtgataaataggcctgcatccattctcctgaggatgtgtcccatctagggaaggctggactaggccttgcggctcctcagggactcaggtggccctactgggagaggggcctcaaatgcaccatgtcaagggttcaagattgttcctgcttttccccaagtacaaccacacccacactcagatcctcctcattcacatcgcagattctcccttgctctgcgctgctagagtgactcactaattcattaatctgcctccctctcgtaagatttccttctttttttcttgaaagtaccaggtgaacaaagtttaccagaaagcagttgagacaagaaaataagagctcaggatgagggaaaagaaaaagattgagagaatttgtgcccccaaccatttcctcagactctaagaaagaacacgctctctccaggcaggtctgaagctcaactctcttattgcctcacttcaggtatacctcactttacacaatagaattataactggaaagaagttggggacacatgtatttggtgattacattttaaacacattaggaaaagttgctatttgaactttttattgatttttggggggagtaaagaattattttgtgatgcaaataaatatcctttaattgatcgacttgccaaatttagatttgtgtgcatcaggctttcttttttttctttttttagagaagttcaatataagcttttcttttctttgtttctttctttctttattttgagatggagtcttgctctgtcgcccatgctggagtgcagtggcgcgatctcggctcactgcaacctccacctcctgggttcaagcgattctcttgcctcaacctcccaagcagttgggactacaggcgtgagccaccatgcccggctaatttttgtatttttagtagagacagggtttcaccatgttagccaggctggtctcaaactcctgacctcaggcaatctgcccgcctgggtctcctaaagtactgggattacaggcgtgagccacctcgcccagcggcatcaggctttcttaaagtgagagcacgcctgtactagagcaagcaggaatcagagaccttccagaaatactactgtgtaagggccagaaatatcttcacttgtcattgttatataatcattattacttttgctgtaatgttaatattgatttattaatatatattatcttttcatacattttctaagaaacatttatattgataagatcttttattttgccaagggcataaattattgtttttctttttttttttttaataaatttcaccaagtatggctcttctgtgatgtgtttttttctccgtttgggaatttctaatcccaggcactcctcagtctcattgtttcattacctatgaggtttcatttacttctttgtaaatgtactgacttttggagttacttaagaaccacagttcctaaaacattttatttgggagctcaacttctggcttcctacttaccaagaggcagtaagttataacctctggcctttgtctttacattttcaactttctggatccctaacctctggtcccaagttactacgcttgcctatatccactaaccactcactaggtcacaaagttgatggctctggcttgacccagtgaatgagaagtgtcctagatgtttttttttttttttttttttcgcaaatcttcataggcacagttgcctgtttaattttttcttcagcccttcccttagaggagggagccttaagttacctttcaaggttgggggttaggaatctatcataactagtctagagatttctcaccaagggaaattttccttatctaaaagaggaacttcaggtctcaaccctgccagtcacacccaattaatgtccttcacaaaaataaacagcatatgttccctttcaatttgagttcagtgagctcacagcaaaatttaccttttaattttcttcagcaaatccaagacgaatatacaaaggatgagattagataaagatttcagtttcccgtatgccaccgctgccgccaattttccaaaaaagcctggctcctcttttcctgttcctccatccaagcccccaaagatctctaaccagaaataaacaggaagactcagtgatttacaaaagacattttagttttacacgtacagaaaattctacccagcattacagaattcttagacttcttaaattcctgattttccttggtatttacattttgataagggagccaatggttcttcaaacatttgaaaagaacacatacacactggacaatttcaaacgatacaaacaaacgcaactgtccttctttctcattcctgtccttcagccacccagtttcttctcccctgagggaatcagttatcatttgctggtcatacttccagattatactgtgcctatgtaagtgtgtgtgtgtgtgtgtgtgtgtgcacttttcattttttcaaataaagtattactcaactttgtaa

SEQ ID NO: 733 - DNA, 2382 bp, Homo sapiens
  source 1..2382: mol_type = genomic DNA
aagtaggagagggcgaacctctggcaggagcaaaggcgccatggctgtggagtcccagggcggacgcccacttgtcctgggcctgctgctgtgtgtgctgggcccagtggtgtcccatgctgggaagatactgttgatcccagtggatggcagccactggctgagcatgcttggggccatccagcagctgcagcagaggggacatgaaatagttgtcctagcacctgacgcctcgttgtacatcagagacggagcattttacaccttgaagacgtaccctgtgccattccaaagggaggatgtgaaagagtcttttgttagtctcgggcataatgtttttgagaatgattctttcctgcagcgtgtgatcaaaacatacaagaaaataaaaaaggactctgctatgcttttgtctggctgttcccacttactgcacaacaaggagctcatggcctccctggcagaaagcagctttgatgtcatgctgacggaccctttccttccttgcagccccatcgtggcccagtacctgtctctgcccactgtattcttcttgcatgcactgccatgcagcctggaatttgaggctacccagtgccccaacccattctcctacgtgcccaggcctctctcctctcattcagatcacatgaccttcctgcagcgggtgaagaacatgctcattgccttttcacagaactttctgtgcgacgtggtttattccccgtatgcaacccttgcctcagaattccttcagagagaggtgactgtccaggacctattgagctctgcatctgtctggctgtttagaagtgactttgtgaaggattaccctaggcccatcatgcccaatatggtttttgttggtggaatcaactgccttcaccaaaatccactatcccaggaatttgaagcctacattaatgcttctggagaacatggaattgtggttttctctttgggatcaatggtctcagaaattccagagaagaaagctatggcaattgctgatgctttgggcaaaatccctcagacagtcctgtggcggtacactggaacccgaccatcgaatcttgcgaacaacacgatacttgttaagtggctaccccaaaacgatctgcttggtcacccgatgacccgtgcctttatcacccatgctggttcccatggtgtttatgaaagcatatgcaatggcgttcccatggtgatgatgcccttgtttggtgatcagatggacaatgcaaagcgcatggagactaagggagctggagtgaccctgaatgttctggaaatgacttctgaagatttagaaaatgctctaaaagcagtcatcaatgacaaaagttacaaggagaacatcatgcgcctctccagccttcacaaggaccgcccggtggagccgctggacctggccgtgttctgggtggagtttgtgatgaggcacaagggcgcgccacacctgcgccccgcagcccacgacctcacctggtaccagtaccattccttggacgtgattggtttcctcttggccgtcgtgctgacagtggccttcatcacctttaaatgttgtgcttatggctaccggaaatgcttggggaaaaaagggcgagttaagaaagcccacaaatccaagacccattgagaagtgggtgggaaataaggtaaaattttgaaccattccctagtcatttccaaacttgaaaacagaatcagtgttaaattcattttattcttattaaggaaatactttgcataaattaatcagccccagagtgctttaaaaaattctcttaaataaaaataatagactcgctagtcagtaaagatatttgaatatgtatcgtgccccctctggtgtctttgatcaggatgacatgtgccatttttcagaggacgtgcagacaggctggcattctagattacttttcttactctgaaacatggcctgtttgggagtgcgggattcaaaggtggtcccacggctgcccctactgcaaatggcagttttaatcttatcttttggcttctgcagatggttgcaattgatccttaaccaataatggtcagtcctcatctctgtcgtgcttcataggtgccaccttgtgtgtttaaagaagggaagctttgtacctttagagtgtaggtgaaatgaatgaatggcttggagtgcactgagaacagcatatgatttcttgctttggggaaaaagaatgatgctatgaaattggtgggtggtgtatttgagaagataatcattgcttatgtcaaatggagctgaatttgataaaaacccaaaatacagctatgaagtgctgggcaagtttactttttttctgatgtttcctacaactaaaaataaattaataaatttatataaattct

SEQ ID NO: 734 - DNA, 3389 bp, Homo sapiens
  source 1..3389: mol_type = genomic DNA
atggctgtggagtcccagggcggacgcccacttgtcctgggcctgctgctgtgtgtgctgggcccagtggtgtcccatgctgggaagatactgttgatcccagtggatggcagccactggctgagcatgcttggggccatccagcagctgcagcagaggggacatgaaatagttgtcctagcacctgacgcctcgttgtacatcagagacggagcattttacaccttgaagacgtaccctgtgccattccaaagggaggatgtgaaagagtcttttgttagtctcgggcataatgtttttgagaatgattctttcctgcagcgtgtgatcaaaacatacaagaaaataaaaaaggactctgctatgcttttgtctggctgttcccacttactgcacaacaaggagctcatggcctccctggcagaaagcagctttgatgtcatgctgacggaccctttccttccttgcagccccatcgtggcccagtacctgtctctgcccactgtattcttcttgcatgcactgccatgcagcctggaatttgaggctacccagtgccccaacccattctcctacgtgcccaggcctctctcctctcattcagatcacatgaccttcctgcagcgggtgaagaacatgctcattgccttttcacagaactttctgtgcgacgtggtttattccccgtatgcaacccttgcctcagaattccttcagagagaggtgactgtccaggacctattgagctctgcatctgtctggctgtttagaagtgactttgtgaaggattaccctaggcccatcatgcccaatatggtttttgttggtggaatcaactgccttcaccaaaatccactatcccaggaatttgaagcctacattaatgcttctggagaacatggaattgtggttttctctttgggatcaatggtctcagaaattccagagaagaaagctatggcaattgctgatgctttgggcaaaatccctcagacagtcctgtggcggtacactggaacccgaccatcgaatcttgcgaacaacacgatacttgttaagtggctaccccaaaacgatctgcttggtcacccgatgacccgtgcctttatcacccatgctggttcccatggtgtttatgaaagcatatgcaatggcgttcccatggtgatgatgcccttgtttggtgatcagatggacaatgcaaagcgcatggagactaagggagctggagtgaccctgaatgttctggaaatgacttctgaagatttagaaaatgctctaaaagcagtcatcaatgacaaaagaaagaagcagcagtcaggaagacagatgtgaagagctggagcatgttcagatgagaggagacggaacacggggacacaccagcttgagcaagggacaacaggggaggactgatgactgacttcccacctttgaggtgctaatgtgtgtgtggtggcactggataaaagatcaatgttggctaggcaccatggcacacgcctgtagtcccagccactctggaggctaaggcgggaggattgcttgagcccagaagttggaggctgctatgagccgtgatcatgccactgcactccagcaacctgggcaacagagtgagaccctgtctcaaaaaaaaaaaaaaaaatgaaaagtccacataacctgagcatcatgtgcccagagcgttgggtggtgtggtcccattccttccttccagcggcttcttctggccacctcaatgtcaggatgtcctgctcacatatcaataccattaaaacctgacttctttccctgcactgttgaagctccttcttgaggctcacattatggatataattttgattctttcttcagtggtatagataactacttgtaacctaagaacaacttggtgaaagtcctctaatacattattttttaaaaaaacacaaatcaatgagctcaacttattaactaactttcatctattcatttttgagccatccctgtctgattgtgaatctccatgattccaacactctgagctggggatagtgcctacacaaaataaaaagaagtggaaaattttcaaacatcagtttatgctgacaaccaggccataataggtgctcaattactattgaatgaatgaatgaaagttctggccaggtacggtggctcatgcctgtagtcccaacactttgggaggccgaggcaggtggatcacttgaggttaggagttcgaaaccaacctgaccaacatgaagaaaccttatctctaccaaaaaaatataaaaaaattacccaggcatggtggtgtatgcctgtaatcccagctatttgggaggctgaggcaggaaaatcacttgaacctgagaggcggaggttgcagtgagctgagattgtgccactccactccagcctgggcgacagagtgagactccgtcttacttaaaaaaaaaaaaaagaaggttccaagaaaattcatcttaaggtttatgtaaaaggaagatgatatttaacatgattcatggccaagtactaatattacattataataatgtttccaaataacattatagatatgtttaaagacagtgtattaggctgttcttgcattgctgtaaagaaatacccaagactgggtaatttataaagaaaagaggtttcattggctcgtgtttctgcaggctgtacaggaagcttagtgctgacatcacttggctgccgggggaacctcagggagcttttactcatggcagaaggcaatgcgggagcttgcatgtcacatggcaaaagcaggagcgagagagagttgggggggaaggtgccacacactttttaatgaccggctctcacaataactcatgaaaactcactatcaggaagacagcactaaagcacaagggatccgaccccatgatccaaacacctcccaccaggccccatctccagcactggggattacaattcaacatgagatctgagtgtggacaaatatccaaactgtatcagtcaacagcgatcataattagtcctgaataggagtgcctttttttttctttcttctcccttttcttttctacttcctcctccttttccctctcctcttcaatctcctcttcattcctgtagcaccaagggttgaagcacctaacccgttttggattgagatgttctgattgggcaatgaacactgtccagaataaacagaaatccattttgcactaagtggctgcacagaccctgcctcatgctaaatctagcacccagatagtttaatgtttcaatgactgaattacaaatatatcatcaccttggatttggcacttacaaatggctgttaatttggccagaggtggttgtttacaacttcaaataggagactattcataatttctgacgtg

SEQ ID NO: 735 - DNA, 2408 bp, Homo sapiens
  source 1..2408: mol_type = genomic DNA
gtacttcttccgcctactgtatcatagcagcttagaatcccagctgctggctcgggctgcagttctctcatggctcgcgcagggtggaccagccccgttcctttatgtgtgtgtctactgctgacctgtggctttgccgaggcagggaagctgctggtagtgcccatggatgggagtcactggttcaccatgcagtcggtggtggagaaacttatcctcagggggcatgaggtggttgtagtcatgccagaggtgagttggcaactggaaagatcactgaattgcacagtgaagacttactcaacctcgtacactctggaagatcagaaccgggaattcatggttttcgcccatgctcaatggaaagcacaggcacaaagtatattttctctattaatgagttcatccagtggttttcttgacttatttttttcgcattgcaggagtttgtttaatgaccgaaaattagtagaatacttaaaggagagttcttttgatgcagtgtttctggatccttttgatacctgtggcttaattgttgctaaatatttctccctcccctctgtggtcttcaccaggggaatattttgccaccatcttgaagaaggtgcacagtgccctgctcctctttcctatgtccccaatgatctcttagggttctcagatgccatgactttcaaggagagagtatggaaccacatcgtgcacttggaggaccatttattttgccagtatctttttagaaatgccctagaaatagcctctgaaattctccaaacccctgtcacggcatatgatctctacagtcacacatcaatttggttgttgcgaacggactttgttttggactatcccaaacccgtgatgcccaacatgatcttcattggtggtatcaactgtcatcagggaaagccattgcctatggaatttgaagcctacattaatgcttctggagaacatggaattgtggttttctctttgggatcaatggtctcagaaattccagagaagaaagctatggcaattgctgatgctttgggcaaaatccctcagacagtcctgtggcggtacactggaacccgaccatcgaatcttgcgaacaacacgatacttgttaagtggctaccccaaaacgatctgcttggtcacccgatgacccgtgcctttatcacccatgctggttcccatggtgtttatgaaagcatatgcaatggcgttcccatggtgatgatgcccttgtttggtgatcagatggacaatgcaaagcgcatggagactaagggagctggagtgaccctgaatgttctggaaatgacttctgaagatttagaaaatgctctaaaagcagtcatcaatgacaaaagttacaaggagaacatcatgcgcctctccagccttcacaaggaccgcccggtggagccgctggacctggccgtgttctgggtggagtttgtgatgaggcacaagggcgcgccacacctgcgccccgcagcccacgacctcacctggtaccagtaccattccttggacgtgattggtttcctcttggccgtcgtgctgacagtggccttcatcacctttaaatgttgtgcttatggctaccggaaatgcttggggaaaaaagggcgagttaagaaagcccacaaatccaagacccattgagaagtgggtgggaaataaggtaaaattttgaaccattccctagtcatttccaaacttgaaaacagaatcagtgttaaattcattttattcttattaaggaaatactttgcataaattaatcagccccagagtgctttaaaaaattctcttaaataaaaataatagactcgctagtcagtaaagatatttgaatatgtatcgtgccccctctggtgtctttgatcaggatgacatgtgccatttttcagaggacgtgcagacaggctggcattctagattacttttcttactctgaaacatggcctgtttgggagtgcgggattcaaaggtggtcccacggctgcccctactgcaaatggcagttttaatcttatcttttggcttctgcagatggttgcaattgatccttaaccaataatggtcagtcctcatctctgtcgtgcttcataggtgccaccttgtgtgtttaaagaagggaagctttgtacctttagagtgtaggtgaaatgaatgaatggcttggagtgcactgagaacagcatatgatttcttgctttggggaaaaagaatgatgctatgaaattggtgggtggtgtatttgagaagataatcattgcttatgtcaaatggagctgaatttgataaaaacccaaaatacagctatgaagtgctgggcaagtttactttttttctgatgtttcctacaactaaaaataaattaataaatttatataaattctatttaa

SEQ ID NO: 736 - DNA, 2364 bp, Homo sapiens
  source 1..2364: mol_type = genomic DNA
gtccgtgtcttctgctgagatggccacaggactccaggttcccctgccgtggctggccacaggactgctgcttctcctcagtgtccagccctgggctgagagtggaaaggtgttggtggtgcccattgatggcagccactggctcagcatgcgggaggtcttgcgggagctccatgccagaggccaccaggcagtggtcctcaccccagaggtgaatatgcacatcaaagaagagaactttttcaccctgacaacctatgccatttcgtggacccaggatgaatttgatcgccatgtgctgggccacactcaactgtactttgaaacagaacattttctgaagaaatttttcagaagtatggcaatgttgaacaatatgtctttggtctatcataggtcttgtgtggagctactacataatgaggccctgatcaggcacctgaatgctacttcctttgatgtggttttaacagaccccgttaacctctgcgcggcagtgctggctaagtacctgtcgattcctactgtgttttttttgaggaacattccatgtgatttagactttaagggcacacagtgtccaaacccttcctcctatattcctagattactaacaaccaattcagaccacatgacattcatgcaaagggtcaagaacatgctctaccctctggccctgtcctacatttgccatgctttttctgctccttatgcaagccttgcctctgagctttttcagagagaggtgtcagtggtggatattctcagtcatgcatctgtgtggctgttccgaggggactttgtgatggactaccccaggccaatcatgcccaacatggtcttcattgggggcatcaactgtgccaacaggaagccactatctcaggaatttgaagcctacattaatgcttctggagaacatggaattgtggttttctctttgggatcaatggtctcagaaattccagagaagaaagctatggcaattgctgatgctttgggcaaaatccctcagacagtcctgtggcggtacactggaacccgaccatcgaatcttgcgaacaacacgatacttgttaagtggctaccccaaaacgatctgcttggtcacccgatgacccgtgcctttatcacccatgctggttcccatggtgtttatgaaagcatatgcaatggcgttcccatggtgatgatgcccttgtttggtgatcagatggacaatgcaaagcgcatggagactaagggagctggagtgaccctgaatgttctggaaatgacttctgaagatttagaaaatgctctaaaagcagtcatcaatgacaaaagttacaaggagaacatcatgcgcctctccagccttcacaaggaccgcccggtggagccgctggacctggccgtgttctgggtggagtttgtgatgaggcacaagggcgcgccacacctgcgccccgcagcccacgacctcacctggtaccagtaccattccttggacgtgattggtttcctcttggccgtcgtgctgacagtggccttcatcacctttaaatgttgtgcttatggctaccggaaatgcttggggaaaaaagggcgagttaagaaagcccacaaatccaagacccattgagaagtgggtgggaaataaggtaaaattttgaaccattccctagtcatttccaaacttgaaaacagaatcagtgttaaattcattttattcttattaaggaaatactttgcataaattaatcagccccagagtgctttaaaaaattctcttaaataaaaataatagactcgctagtcagtaaagatatttgaatatgtatcgtgccccctctggtgtctttgatcaggatgacatgtgccatttttcagaggacgtgcagacaggctggcattctagattacttttcttactctgaaacatggcctgtttgggagtgcgggattcaaaggtggtcccacggctgcccctactgcaaatggcagttttaatcttatcttttggcttctgcagatggttgcaattgatccttaaccaataatggtcagtcctcatctctgtcgtgcttcataggtgccaccttgtgtgtttaaagaagggaagctttgtacctttagagtgtaggtgaaatgaatgaatggcttggagtgcactgagaacagcatatgatttcttgctttggggaaaaagaatgatgctatgaaattggtgggtggtgtatttgagaagataatcattgcttatgtcaaatggagctgaatttgataaaaacccaaaatacagctatgaagtgctgggcaagtttactttttttctgatgtttcctacaactaaaaataaattaataaatttatataaattct

SEQ ID NO: 737 - DNA, 1924 bp, Homo sapiens
  source 1..1924: mol_type = genomic DNA
agtgcctttggcgcactgaggtgcacagggtcccttagccgggcgcagggcgcgcagcccaggctgagatccgcggcttccgtagaagtgagcatggctgggcagcgagtgcttcttctagtgggcttccttctccctggggtcctgctctcagaggctgccaaaatcctgacaatatctacagtagattttaaaaaggaagaaaaatcatatcaagttatcagttggcttgcacctgaagatcatcaaagagaatttaaaaagagttttgatttctttctggaagaaactttaggtggcagaggaaaatttgaaaacttattaaatgttctagaatacttggcgttgcagtgcagtcattttttaaatagaaaggatatcatggattccttaaagaatgagaacttcgacatggtgatagttgaaacttttgactactgtcctttcctgattgctgagaagcttgggaagccatttgtggccattctttccacttcattcggctctttggaatttgggctaccaatccccttgtcttatgttccagtattccgttccttgctgactgatcacatggacttctggggccgagtgaagaattttctgatgttctttagtttctgcaggaggcaacagcacatgcagtctacatttgacaacaccatcaaggaacatttcacagaaggctctaggccagttttgtctcatcttctactgaaagcagagttgtggttcattaactctgactttgcctttgattttgctcgacctctgcttcccaacactgtttatgttggaggcttgatggaaaaacctattaaaccagtaccacaagacttggagaacttcattgccaagtttggggactctggttttgtccttgtgaccttgggctccatggtgaacacctgtcagaatccggaaatcttcaaggagatgaacaatgcctttgctcacctaccccaaggggtgatatggaagtgtcagtgttctcattggcccaaagatgtccacctggctgcaaatgtgaaaattgtggactggcttcctcagagtgacctcctggctcacccaagcatccgtctgtttgtcacccacggcgggcagaatagcataatggaggccatccagcatggtgtgcccatggtggggatccctctctttggagaccagcctgaaaacatggtccgagtagaagccaaaaagtttggtgtttctattcagttaaagaagctcaaggcagagacattggctcttaagatgaaacaaatcatggaagacaagagatacaagtccgcggcagtggctgccagtgtcatcctgcgctcccacccgctcagccccacacagcggctggtgggctggattgaccacgtcctccagacagggggcgcgacgcacctcaagccctatgtctttcagcagccctggcatgagcagtacctgctcgacgtttttgtgtttctgctggggctcactctggggactctatggctttgtgggaagctgctgggcatggctgtctggtggctgcgtggggccagaaaggtgaaggagacataaggccaggtgcagccttggcggggtctgtttggtgggcgatgtcaccatttctagggagcttcccactagttctggcagccccattctctagtccttctagttatctcctgttttcttgaagaacaggaaaaatggccaaaaatcatcctttccacttgctaattttgctacaaattcatccttactagctcctgcctgctagcagaattctttccagtcctcttgtcctcctttgtttgccatcagcaagggctatgctgtgattctgtctctgagtgacttggaccactgaccctcagatttccagccttaaaatccaccttccttctcatgcgcctctccgaatcacaccctgactctt

SEQ ID NO: 738 - DNA, 2355 bp, Homo sapiens
  source 1..2355: mol_type = genomic DNA
cccacagccagtgcctttggcgcactgaggtgcacagggtcccttagccgggcgcagggcgcgcagcccaggctgagatccgcggcttccgtagaagtgagcatggctgggcagcgagtgcttcttctagtgggcttccttctccctggggtcctgctctcagaggctgccaaaatcctgacaatatctacagtaggtggaagccattatctactgatggaccgggtttctcagattcttcaagatcacggtcataatgtcaccatgcttaaccacaaaagaggtccttttatgccagattttaaaaaggaagaaaaatcatatcaagttatcagttggcttgcacctgaagatcatcaaagagaatttaaaaagagttttgatttctttctggaagaaactttaggtggcagaggaaaatttgaaaacttattaaatgttctagaatacttggcgttgcagtgcagtcattttttaaatagaaaggatatcatggattccttaaagaatgagaacttcgacatggtgatagttgaaacttttgactactgtcctttcctgattgctgagaagcttgggaagccatttgtggccattctttccacttcattcggctctttggaatttgggctaccaatccccttgtcttatgttccagtattccgttccttgctgactgatcacatggacttctggggccgagtgaagaattttctgatgttctttagtttctgcaggaggcaacagcacatgcagtctacatttgacaacaccatcaaggaacatttcacagaaggctctaggccagttttgtctcatcttctactgaaagcagagttgtggttcattaactctgactttgcctttgattttgctcgacctctgcttcccaacactgtttatgttggaggcttgatggaaaaacctattaaaccagtaccacaagacttggagaacttcattgccaagtttggggactctggttttgtccttgtgaccttgggctccatggtgaacacctgtcagaatccggaaatcttcaaggagatgaacaatgcctttgctcacctaccccaaggggtgatatggaagtgtcagtgttctcattggcccaaagatgtccacctggctgcaaatgtgaaaattgtggactggcttcctcagagtgacctcctggctcacccaagcatccgtctgtttgtcacccacggcgggcagaatagcataatggaggccatccagcatggtgtgcccatggtggggatccctctctttggagaccagcctgaaaacatggtccgagtagaagccaaaaagtttggtgtttctattcagttaaagaagctcaaggcagagacattggctcttaagatgaaacaaatcatggaagacaagagatacaagtccgcggcagtggctgccagtgtcatcctgcgctcccacccgctcagccccacacagcggctggtgggctggattgaccacgtcctccagacagggggcgcgacgcacctcaagccctatgtctttcagcagccctggcatgagcagtacctgctcgacgtttttgtgtttctgctggggctcactctggggactctatggctttgtgggaagctgctgggcatggctgtctggtggctgcgtggggccagaaaggtgaaggagacataaggccaggtgcagccttggcggggtctgtttggtgggcgatgtcaccatttctagggagcttcccactagttctggcagccccattctctagtccttctagttatctcctgttttcttgaagaacaggaaaaatggccaaaaatcatcctttccacttgctaattttgctacaaattcatccttactagctcctgcctgctagcagaattctttccagtcctcttgtcctcctttgtttgccatcagcaagggctatgctgtgattctgtctctgagtgacttggaccactgaccctcagatttccagccttaaaatccaccttccttctcatgcgcctctccgaatcacaccctgactcttccagcctccatgtccagacctagtcagcctctctcactcctgcccctactatctatcatggaataacatccaagaaagacaccttgcatattctttcagtttctgttttgttctcccacatattctcttcaatgctcaggaagcctgccctgtgcttgagagttcagggccggacacaggctcacaggtctccacattgggtccctgtctctggtgcccacagtgagctccttcttggctgagcaggcttggagactgtaggtttccagatttcctgaaaaataaaagtttacagcgttatctctccccaacctcactaa

SEQ ID NO: 739 - DNA, 572 bp, Homo sapiens
  source 1..572: mol_type = genomic DNA
acatcagctcaagattttaagcaagtctctcaggaaatagatcgcggggctggcagtatgagccagtgcctttggcgcactgaggtgcacagggtcccttagccgggcgcagggcgcgcagcccaggctgagatccgcggcttccgtagaagtgagcatggctgggcagcgagtgcttcttctagtgggcttccttctccctggggtcctgctctcagaggctgccaaaatcctgacaatatctacagtaggtggaagccattatctactgatggaccgggtttctcagattcttcaagatcacggtcataatgtcaccatgcttaaccacaaaagaggtccttttatgccagattttaaaaaggaagaaaaatcatatcaagttatcagttggcttgcacctgaagatcatcaaagagaatttaaaaagagttttgatttctttctggaagaaactttaggtggcagaggaaaatttgaaaacttattaaatgttctagaatacttggcgttgcagtgcagtcattttttaaatagaaaggatatcatggattccttaaagaatgagaact

SEQ ID NO: 740 - DNA, 1476 bp, Homo sapiens
  source 1..1476: mol_type = genomic DNA
agtgcctttggcgcactgaggtgcacagggtcccttagccgggcgcagggcgcgcagcccaggctgagatccgcggcttccgtagaagtgagcatggctgggcagcgagtgcttcttctagtgggcttccttctccctggggtcctgctctcagaggctgccaaaatcctgacaatatctacagtaggtggaagccattatctactgatggaccgggtttctcagattcttcaagatcacggtcataatgtcaccatgcttaaccacaaaagaggtccttttatgccagattttaaaaaggaagaaaaatcatatcaagttatcagttggcttgcacctgaagatcatcaaagagaatttaaaaagagttttgatttctttctggaagaaactttaggtggcaggacttggagaacttcattgccaagtttggggactctggttttgtccttgtgaccttgggctccatggtgaacacctgtcagaatccggaaatcttcaaggagatgaacaatgcctttgctcacctaccccaaggggtgatatggaagtgtcagtgttctcattggcccaaagatgtccacctggctgcaaatgtgaaaattgtggactggcttcctcagagtgacctcctggctcacccaagcatccgtctgtttgtcacccacggcgggcagaatagcataatggaggccatccagcatggtgtgcccatggtggggatccctctctttggagaccagcctgaaaacatggtccgagtagaagccaaaaagtttggtgtttctattcagttaaagaagctcaaggcagagacattggctcttaagatgaaacaaatcatggaagacaagagatacaagtccgcggcagtggctgccagtgtcatcctgcgctcccacccgctcagccccacacagcggctggtgggctggattgaccacgtcctccagacagggggcgcgacgcacctcaagccctatgtctttcagcagccctggcatgagcagtacctgctcgacgtttttgtgtttctgctggggctcactctggggactctatggctttgtgggaagctgctgggcatggctgtctggtggctgcgtggggccagaaaggtgaaggagacataaggccaggtgcagccttggcggggtctgtttggtgggcgatgtcaccatttctagggagcttcccactagttctggcagccccattctctagtccttctagttatctcctgttttcttgaagaacaggaaaaatggccaaaaatcatcctttccacttgctaattttgctacaaattcatccttactagctcctgcctgctagcagaattctttccagtcctcttgtcctcctttgtttgccatcagcaagggctatgctgtgattctgtctctgagtgacttggaccactgaccctcagatttccagccttaaaatccaccttccttctcatgcgcctctccg

SEQ ID NO: 741 - DNA, 993 bp, Homo sapiens
  source 1..993: mol_type = genomic DNA
gcctggccggccgcgtgttcccggagcctcggctgcccgaatggggagcccagagtggcgagcggcacccctccccccgccagccctccgcgggaaggtgacctctcgagtggtcccaggctgcacccatggcagaaggaggagggcagaatcatcacgaagtggtgaagttcatggatgtctatcagcgcagctactgccatccaatcgagaccctggtggacatcttccaggagtaccctgatgagatcgagtacatcttcaagccatcctgtgtgcccctgatgcgatgcgggggctgctgcaatgacgagggcctggagtgtgtgcccactgaggagtccaacatcaccatgcagattatgcggatcaaacctcaccaaggccagcacataggagagatgagcttcctacagcacaacaaatgtgaatgcagaccaaagaaagatagagcaagacaagaaaatccctgtgggccttgctcagagcggagaaagcatttgtttgtacaagatccgcagacgtgtaaatgttcctgcaaaaacacagactcgcgttgcaaggcgaggcagcttgagttaaacgaacgtacttgcagatgtgacaagccgaggcggtgagccgggcaggaggaaggagcctccctcagggtttcgggaaccagatctctcaccaggaaagactgatacagaacgatcgatacagaaaccacgctgccgccaccacaccatcaccatcgacagaacagtccttaatccagaaacctgaaatgaaggaagaggagactctgcgcagagcactttgggtccggagggcgagactccggcggaagcattcccgggcgggtgacccagcacggtccctcttggaattggattcgccattttatttttcttgctgctaaatcaccgagcccggaagattagagagttttatttctgggattcctgtagacacacccacccacatacatacatttatatatatatatat

SEQ ID NO: 742 - DNA, 954 bp, Homo sapiens
  source 1..954: mol_type = genomic DNA
ctgacggacagacagacagacaccgcccccagccccagctaccacctcctccccggccggcggcggacagtggacgcggcggcgagccgcgggcaggggccggagcccgcgcccggaggcggggtggagggggtcggggctcgcggcgtcgcactgaaacttttcgtccaacttctgggctgttctcgcttcggaggagccgtggtccgcgcgggggaagccgagccgagcggagccgcgagaagtgctagctcgggccgggaggagccgcagccggaggagggggaggaggaagaagagaaggaagaggagagggggccgcagtggcgactcggcgctcggaagccgggctcatggacgggtgaggcggcggtgtgcgcagacagtgctccagccgcgcgcgctccccaggccctggcccgggcctcgggccggggaggaagagtagctcgccgaggcgccgaggagagcgggccgccccacagcccgagccggagagggagcgcgagccgcgccggccccggtcgggcctccgaaaccatgaactttctgctgtcttgggtgcattggagccttgccttgctgctctacctccaccatgccaagtggtcccaggctgcacccatggcagaaggaggagggcagaatcatcacgaagtggtgaagttcatggatgtctatcagcgcagctactgccatccaatcgagaccctggtggacatcttccaggagtaccctgatgagatcgagtacatcttcaagccatcctgtgtgcccctgatgcgatgcgggggctgctgcaatgacgagggcctggagtgtgtgcccactgaggagtccaacatcaccatgcagattatgcggatcaaacctcaccaaggccagcacataggagagatgagcttcctacagcacaacaaatgtgaatgcagatgtgacaagccgaggcggtga

SEQ ID NO: 743 - DNA, 1286 bp, Homo sapiens
  source 1..1286: mol_type = genomic DNA
ctgacggacagacagacagacaccgcccccagccccagctaccacctcctccccggccggcggcggacagtggacgcggcggcgagccgcgggcaggggccggagcccgcgcccggaggcggggtggagggggtcggggctcgcggcgtcgcactgaaacttttcgtccaacttctgggctgttctcgcttcggaggagccgtggtccgcgcgggggaagccgagccgagcggagccgcgagaagtgctagctcgggccgggaggagccgcagccggaggagggggaggaggaagaagagaaggaagaggagagggggccgcagtggcgactcggcgctcggaagccgggctcatggacgggtgaggcggcggtgtgcgcagacagtgctccagccgcgcgcgctccccaggccctggcccgggcctcgggccggggaggaagagtagctcgccgaggcgccgaggagagcgggccgccccacagcccgagccggagagggagcgcgagccgcgccggccccggtcgggcctccgaaaccatgaactttctgctgtcttgggtgcattggagccttgccttgctgctctacctccaccatgccaagtggtcccaggctgcacccatggcagaaggaggagggcagaatcatcacgaagtggtgaagttcatggatgtctatcagcgcagctactgccatccaatcgagaccctggtggacatcttccaggagtaccctgatgagatcgagtacatcttcaagccatcctgtgtgcccctgatgcgatgcgggggctgctgcaatgacgagggcctggagtgtgtgcccactgaggagtccaacatcaccatgcagattatgcggatcaaacctcaccaaggccagcacataggagagatgagcttcctacagcacaacaaatgtgaatgcagaccaaagaaagatagagcaagacaagaaaaaaaatcagttcgaggaaagggaaaggggcaaaaacgaaagcgcaagaaatcccggtataagtcctggagcgtgtacgttggtgcccgctgctgtctaatgccctggagcctccctggcccccatccctgtgggccttgctcagagcggagaaagcatttgtttgtacaagatccgcagacgtgtaaatgttcctgcaaaaacacagactcgcgttgcaaggcgaggcagcttgagttaaacgaacgtacttgcagatgtgacaagccgaggcggtgagccgggcaggaggaaggagcctccctcagggtttcgggaaccagatc

SEQ ID NO: 744 - DNA, 2909 bp, Homo sapiens
  source 1..2909: mol_type = genomic DNA
ctgacggacagacagacagacaccgcccccagccccagctaccacctcctccccggccggcggcggacagtggacgcggcggcgagccgcgggcaggggccggagcccgcgcccggaggcggggtggagggggtcggggctcgcggcgtcgcactgaaacttttcgtccaacttctgggctgttctcgcttcggaggagccgtggtccgcgcgggggaagccgagccgagcggagccgcgagaagtgctagctcgggccgggaggagccgcagccggaggagggggaggaggaagaagagaaggaagaggagagggggccgcagtggcgactcggcgctcggaagccgggctcatggacgggtgaggcggcggtgtgcgcagacagtgctccagccgcgcgcgctccccaggccctggcccgggcctcgggccggggaggaagagtagctcgccgaggcgccgaggagagcgggccgccccacagcccgagccggagagggagcgcgagccgcgccggccccggtcgggcctccgaaaccatgaactttctgctgtcttgggtgcattggagccttgccttgctgctctacctccaccatgccaagtggtcccaggctgcacccatggcagaaggaggagggcagaatcatcacgaagtggtgaagttcatggatgtctatcagcgcagctactgccatccaatcgagaccctggtggacatcttccaggagtaccctgatgagatcgagtacatcttcaagccatcctgtgtgcccctgatgcgatgcgggggctgctgcaatgacgagggcctggagtgtgtgcccactgaggagtccaacatcaccatgcagattatgcggatcaaacctcaccaaggccagcacataggagagatgagcttcctacagcacaacaaatgtgaatgcagaccaaagaaagatagagcaagacaagaaaaatgtgacaagccgaggcggtgagccgggcaggaggaaggagcctccctcagggtttcgggaaccagatctctcaccaggaaagactgatacagaacgatcgatacagaaaccacgctgccgccaccacaccatcaccatcgacagaacagtccttaatccagaaacctgaaatgaaggaagaggagactctgcgcagagcactttgggtccggagggcgagactccggcggaagcattcccgggcgggtgacccagcacggtccctcttggaattggattcgccattttatttttcttgctgctaaatcaccgagcccggaagattagagagttttatttctgggattcctgtagacacacccacccacatacatacatttatatatatatatattatatatatataaaaataaatatctctattttatatatataaaatatatatattctttttttaaattaacagtgctaatgttattggtgtcttcactggatgtatttgactgctgtggacttgagttgggaggggaatgttcccactcagatcctgacagggaagaggaggagatgagagactctggcatgatcttttttttgtcccacttggtggggccagggtcctctcccctgcccaggaatgtgcaaggccagggcatgggggcaaatatgacccagttttgggaacaccgacaaacccagccctggcgctgagcctctctaccccaggtcagacggacagaaagacagatcacaggtacagggatgaggacaccggctctgaccaggagtttggggagcttcaggacattgctgtgctttggggattccctccacatgctgcacgcgcatctcgcccccaggggcactgcctggaagattcaggagcctgggcggccttcgcttactctcacctgcttctgagttgcccaggagaccactggcagatgtcccggcgaagagaagagacacattgttggaagaagcagcccatgacagctccccttcctgggactcgccctcatcctcttcctgctccccttcctggggtgcagcctaaaaggacctatgtcctcacaccattgaaaccactagttctgtccccccaggagacctggttgtgtgtgtgtgagtggttgaccttcctccatcccctggtccttcccttcccttcccgaggcacagagagacagggcaggatccacgtgcccattgtggaggcagagaaaagagaaagtgttttatatacggtacttatttaatatccctttttaattagaaattaaaacagttaatttaattaaagagtagggttttttttcagtattcttggttaatatttaatttcaactatttatgagatgtatcttttgctctctcttgctctcttatttgtaccggtttttgtatataaaattcatgtttccaatctctctctccctgatcggtgacagtcactagcttatcttgaacagatatttaattttgctaacactcagctctgccctccccgatcccctggctccccagcacacattcctttgaaataaggtttcaatatacatctacatactatatatatatttggcaacttgtatttgtgtgtatatatatatatatatgtttatgtatatatgtgattctgataaaatagacattgctattctgttttttatatgtaaaaacaaaacaagaaaaaatagagaattctacatactaaatctctctccttttttaattttaatatttgttatcatttatttattggtgctactgtttatccgtaataattgtggggaaaagatattaacatcacgtctttgtctctagtgcagtttttcgagatattccgtagtacatatttatttttaaacaacgacaaagaaatacagatatatcttaaaaaaaaaaaagcattttgtattaaagaatttaattctgatctcaaa

SEQ ID NO: 745 - DNA, 3535 bp, Homo sapiens
  source 1..3535: mol_type = genomic DNA
ggaggcttggggcagccgggtagctcggaggtcgtggcgctgggggctagcaccagcgctctgtcgggaggcgcagcggttaggtggaccggtcagcggactcaccggccagggcgctcggtgctggaatttgatattcattgatccgggttttatccctcttcttttttcttaaacatttttttttaaaactgtattgtttctcgttttaatttatttttgcttgccattccccacttgaatcgggccgacggcttggggagattgctctacttccccaaatcactgtggattttggaaaccagcagaaagaggaaagaggtagcaagagctccagagagaagtcgaggaagagagagacggggtcagagagagcgcgcgggcgtgcgagcagcgaaagcgacaggggcaaagtgagtgacctgcttttgggggtgaccgccggagcgcggcgtgagccctcccccttgggatcccgcagctgaccagtcgcgctgacggacagacagacagacaccgcccccagccccagctaccacctcctccccggccggcggcggacagtggacgcggcggcgagccgcgggcaggggccggagcccgcgcccggaggcggggtggagggggtcggggctcgcggcgtcgcactgaaacttttcgtccaacttctgggctgttctcgcttcggaggagccgtggtccgcgcgggggaagccgagccgagcggagccgcgagaagtgctagctcgggccgggaggagccgcagccggaggagggggaggaggaagaagagaaggaagaggagagggggccgcagtggcgactcggcgctcggaagccgggctcatggacgggtgaggcggcggtgtgcgcagacagtgctccagccgcgcgcgctccccaggccctggcccgggcctcgggccggggaggaagagtagctcgccgaggcgccgaggagagcgggccgccccacagcccgagccggagagggagcgcgagccgcgccggccccggtcgggcctccgaaaccatgaactttctgctgtcttgggtgcattggagccttgccttgctgctctacctccaccatgccaagtggtcccaggctgcacccatggcagaaggaggagggcagaatcatcacgaagtggtgaagttcatggatgtctatcagcgcagctactgccatccaatcgagaccctggtggacatcttccaggagtaccctgatgagatcgagtacatcttcaagccatcctgtgtgcccctgatgcgatgcgggggctgctgcaatgacgagggcctggagtgtgtgcccactgaggagtccaacatcaccatgcagattatgcggatcaaacctcaccaaggccagcacataggagagatgagcttcctacagcacaacaaatgtgaatgcagaccaaagaaagatagagcaagacaagaaaatccctgtgggccttgctcagagcggagaaagcatttgtttgtacaagatccgcagacgtgtaaatgttcctgcaaaaacacagactcgcgttgcaaggcgaggcagcttgagttaaacgaacgtacttgcagatgtgacaagccgaggcggtgagccgggcaggaggaaggagcctccctcagggtttcgggaaccagatctctcaccaggaaagactgatacagaacgatcgatacagaaaccacgctgccgccaccacaccatcaccatcgacagaacagtccttaatccagaaacctgaaatgaaggaagaggagactctgcgcagagcactttgggtccggagggcgagactccggcggaagcattcccgggcgggtgacccagcacggtccctcttggaattggattcgccattttatttttcttgctgctaaatcaccgagcccggaagattagagagttttatttctgggattcctgtagacacacccacccacatacatacatttatatatatatatattatatatatataaaaataaatatctctattttatatatataaaatatatatattctttttttaaattaacagtgctaatgttattggtgtcttcactggatgtatttgactgctgtggacttgagttgggaggggaatgttcccactcagatcctgacagggaagaggaggagatgagagactctggcatgatcttttttttgtcccacttggtggggccagggtcctctcccctgcccaggaatgtgcaaggccagggcatgggggcaaatatgacccagttttgggaacaccgacaaacccagccctggcgctgagcctctctaccccaggtcagacggacagaaagacagatcacaggtacagggatgaggacaccggctctgaccaggagtttggggagcttcaggacattgctgtgctttggggattccctccacatgctgcacgcgcatctcgcccccaggggcactgcctggaagattcaggagcctgggcggccttcgcttactctcacctgcttctgagttgcccaggagaccactggcagatgtcccggcgaagagaagagacacattgttggaagaagcagcccatgacagctccccttcctgggactcgccctcatcctcttcctgctccccttcctggggtgcagcctaaaaggacctatgtcctcacaccattgaaaccactagttctgtccccccaggagacctggttgtgtgtgtgtgagtggttgaccttcctccatcccctggtccttcccttcccttcccgaggcacagagagacagggcaggatccacgtgcccattgtggaggcagagaaaagagaaagtgttttatatacggtacttatttaatatccctttttaattagaaattaaaacagttaatttaattaaagagtagggttttttttcagtattcttggttaatatttaatttcaactatttatgagatgtatcttttgctctctcttgctctcttatttgtaccggtttttgtatataaaattcatgtttccaatctctctctccctgatcggtgacagtcactagcttatcttgaacagatatttaattttgctaacactcagctctgccctccccgatcccctggctccccagcacacattcctttgaaataaggtttcaatatacatctacatactatatatatatttggcaacttgtatttgtgtgtatatatatatatatatgtttatgtatatatgtgattctgataaaatagacattgctattctgttttttatatgtaaaaacaaaacaagaaaaaatagagaattctacatactaaatctctctccttttttaattttaatatttgttatcatttatttattggtgctactgtttatccgtaataattgtggggaaaagatattaacatcacgtctttgtctctagtgcagtttttcgagatattccgtagtacatatttatttttaaacaacgacaaagaaatacagatatatcttaaaaaaaaaaaagcattttgtattaaagaatttaattctgatctcaaa

SEQ ID NO: 746 - DNA, 2834 bp, Homo sapiens
  source 1..2834: mol_type = genomic DNA
gcggcggcgagccgcgggcaggggccggagcccgcgcccggaggcggggtggagggggtcggggctcgcggcgtcgcactgaaacttttcgtccaacttctgggctgttctcgcttcggaggagccgtggtccgcgcgggggaagccgagccgagcggagccgcgagaagtgctagctcgggccgggaggagccgcagccggaggagggggaggaggaagaagagaaggaagaggagagggggccgcagtggcgactcggcgctcggaagccgggctcatggacgggtgaggcggcggtgtgcgcagacagtgctccagccgcgcgcgctccccaggccctggcccgggcctcgggccggggaggaagagtagctcgccgaggcgccgaggagagcgggccgccccacagcccgagccggagagggagcgcgagccgcgccggccccggtcgggcctccgaaaccatgaactttctgctgtcttgggtgcattggagccttgccttgctgctctacctccaccatgccaagtggtcccaggctgcacccatggcagaaggaggagggcagaatcatcacgaagtggtgaagttcatggatgtctatcagcgcagctactgccatccaatcgagaccctggtggacatcttccaggagtaccctgatgagatcgagtacatcttcaagccatcctgtgtgcccctgatgcgatgcgggggctgctgcaatgacgagggcctggagtgtgtgcccactgaggagtccaacatcaccatgcagattatgcggatcaaacctcaccaaggccagcacataggagagatgagcttcctacagcacaacaaatgtgaatgcagaccaaagaaagatagagcaagacaagaaaaatgtgacaagccgaggcggtgagccgggcaggaggaaggagcctccctcagggtttcgggaaccagatctctcaccaggaaagactgatacagaacgatcgatacagaaaccacgctgccgccaccacaccatcaccatcgacagaacagtccttaatccagaaacctgaaatgaaggaagaggagactctgcgcagagcactttgggtccggagggcgagactccggcggaagcattcccgggcgggtgacccagcacggtccctcttggaattggattcgccattttatttttcttgctgctaaatcaccgagcccggaagattagagagttttatttctgggattcctgtagacacacccacccacatacatacatttatatatatatatattatatatatataaaaataaatatctctattttatatatataaaatatatatattctttttttaaattaacagtgctaatgttattggtgtcttcactggatgtatttgactgctgtggacttgagttgggaggggaatgttcccactcagatcctgacagggaagaggaggagatgagagactctggcatgatcttttttttgtcccacttggtggggccagggtcctctcccctgcccaggaatgtgcaaggccagggcatgggggcaaatatgacccagttttgggaacaccgacaaacccagccctggcgctgagcctctctaccccaggtcagacggacagaaagacagatcacaggtacagggatgaggacaccggctctgaccaggagtttggggagcttcaggacattgctgtgctttggggattccctccacatgctgcacgcgcatctcgcccccaggggcactgcctggaagattcaggagcctgggcggccttcgcttactctcacctgcttctgagttgcccaggagaccactggcagatgtcccggcgaagagaagagacacattgttggaagaagcagcccatgacagctccccttcctgggactcgccctcatcctcttcctgctccccttcctggggtgcagcctaaaaggacctatgtcctcacaccattgaaaccactagttctgtccccccaggagacctggttgtgtgtgtgtgagtggttgaccttcctccatcccctggtccttcccttcccttcccgaggcacagagagacagggcaggatccacgtgcccattgtggaggcagagaaaagagaaagtgttttatatacggtacttatttaatatccctttttaattagaaattaaaacagttaatttaattaaagagtagggttttttttcagtattcttggttaatatttaatttcaactatttatgagatgtatcttttgctctctcttgctctcttatttgtaccggtttttgtatataaaattcatgtttccaatctctctctccctgatcggtgacagtcactagcttatcttgaacagatatttaattttgctaacactcagctctgccctccccgatcccctggctccccagcacacattcctttgaaataaggtttcaatatacatctacatactatatatatatttggcaacttgtatttgtgtgtatatatatatatatatgtttatgtatatatgtgattctgataaaatagacattgctattctgttttttatatgtaaaaacaaaacaagaaaaaatagagaattctacatactaaatctctctccttttttaattttaatatttgttatcatttatttattggtgctactgtttatccgtaataattgtggggaaaagatattaacatcacgtctttgtctctagtgcagtttttcgagatattccgtagtacatatttatttttaaacaacgacaaagaaatacagatatatcttaaaaaaaaaaaagcattttgtattaaagaatttaattctgatctcaaa

SEQ ID NO: 747 - DNA, 1197 bp, Homo sapiens
  source 1..1197: mol_type = genomic DNA
ctgacggacagacagacagacaccgcccccagccccagctaccacctcctccccggccggcggcggacagtggacgcggcggcgagccgcgggcaggggccggagcccgcgcccggaggcggggtggagggggtcggggctcgcggcgtcgcactgaaacttttcgtccaacttctgggctgttctcgcttcggaggagccgtggtccgcgcgggggaagccgagccgagcggagccgcgagaagtgctagctcgggccgggaggagccgcagccggaggagggggaggaggaagaagagaaggaagaggagagggggccgcagtggcgactcggcgctcggaagccgggctcatggacgggtgaggcggcggtgtgcgcagacagtgctccagccgcgcgcgctccccaggccctggcccgggcctcgggccggggaggaagagtagctcgccgaggcgccgaggagagcgggccgccccacagcccgagccggagagggagcgcgagccgcgccggccccggtcgggcctccgaaaccatgaactttctgctgtcttgggtgcattggagccttgccttgctgctctacctccaccatgccaagtggtcccaggctgcacccatggcagaaggaggagggcagaatcatcacgaagtggtgaagttcatggatgtctatcagcgcagctactgccatccaatcgagaccctggtggacatcttccaggagtaccctgatgagatcgagtacatcttcaagccatcctgtgtgcccctgatgcgatgcgggggctgctgcaatgacgagggcctggagtgtgtgcccactgaggagtccaacatcaccatgcagattatgcggatcaaacctcaccaaggccagcacataggagagatgagcttcctacagcacaacaaatgtgaatgcagaccaaagaaagatagagcaagacaagaaaaaaaatcagttcgaggaaagggaaaggggcaaaaacgaaagcgcaagaaatcccgtccctgtgggccttgctcagagcggagaaagcatttgtttgtacaagatccgcagacgtgtaaatgttcctgcaaaaacacagactcgcgttgcaaggcgaggcagcttgagttaaacgaacgtacttgcagatgtgacaagccgaggcggtgagccgggcaggaggaaggagcctccctc

SEQ ID NO: 748 - DNA, 1081 bp, Homo sapiens
  source 1..1081: mol_type = genomic DNA
ctgacggacagacagacagacaccgcccccagccccagctaccacctcctccccggccggcggcggacagtggacgcggcggcgagccgcgggcaggggccggagcccgcgcccggaggcggggtggagggggtcggggctcgcggcgtcgcactgaaacttttcgtccaacttctgggctgttctcgcttcggaggagccgtggtccgcgcgggggaagccgagccgagcggagccgcgagaagtgctagctcgggccgggaggagccgcagccggaggagggggaggaggaagaagagaaggaagaggagagggggccgcagtggcgactcggcgctcggaagccgggctcatggacgggtgaggcggcggtgtgcgcagacagtgctccagccgcgcgcgctccccaggccctggcccgggcctcgggccggggaggaagagtagctcgccgaggcgccgaggagagcgggccgccccacagcccgagccggagagggagcgcgagccgcgccggccccggtcgggcctccgaaaccatgaactttctgctgtcttgggtgcattggagccttgccttgctgctctacctccaccatgccaagtggtcccaggctgcacccatggcagaaggaggagggcagaatcatcacgaagtggtgaagttcatggatgtctatcagcgcagctactgccatccaatcgagaccctggtggacatcttccaggagtaccctgatgagatcgagtacatcttcaagccatcctgtgtgcccctgatgcgatgcgggggctgctgcaatgacgagggcctggagtgtgtgcccactgaggagtccaacatcaccatgcagattatgcggatcaaacctcaccaaggccagcacataggagagatgagcttcctacagcacaacaaatgtgaatgcagaccaaagaaagatagagcaagacaagaaaatccctgtgggccttgctcagagcggagaaagcatttgtttgtacaagatccgcagacgtgtaaatgttcctgcaaaaacacagactcgcgttgcaagatgtgacaagccgaggcggtga

SEQ ID NO: 749 - DNA, 1575 bp, Homo sapiens
  source 1..1575: mol_type = genomic DNA
ctgacggacagacagacagacaccgcccccagccccagctaccacctcctccccggccggcggcggacagtggacgcggcggcgagccgcgggcaggggccggagcccgcgcccggaggcggggtggagggggtcggggctcgcggcgtcgcactgaaacttttcgtccaacttctgggctgttctcgcttcggaggagccgtggtccgcgcgggggaagccgagccgagcggagccgcgagaagtgctagctcgggccgggaggagccgcagccggaggagggggaggaggaagaagagaaggaagaggagagggggccgcagtggcgactcggcgctcggaagccgggctcatggacgggtgaggcggcggtgtgcgcagacagtgctccagccgcgcgcgctccccaggccctggcccgggcctcgggccggggaggaagagtagctcgccgaggcgccgaggagagcgggccgccccacagcccgagccggagagggagcgcgagccgcgccggccccggtcgggcctccgaaaccatgaactttctgctgtcttgggtgcattggagccttgccttgctgctctacctccaccatgccaagtggtcccaggctgcacccatggcagaaggaggagggcagaatcatcacgaagtggtgaagttcatggatgtctatcagcgcagctactgccatccaatcgagaccctggtggacatcttccaggagtaccctgatgagatcgagtacatcttcaagccatcctgtgtgcccctgatgcgatgcgggggctgctgcaatgacgagggcctggagtgtgtgcccactgaggagtccaacatcaccatgcagattatgcggatcaaacctcaccaaggccagcacataggagagatgagcttcctacagcacaacaaatgtgaatgcagaccaaagaaagatagagcaagacaagaaaaaaaatcagttcgaggaaagggaaaggggcaaaaacgaaagcgcaagaaatcccggtataagtcctggagcgttccctgtgggccttgctcagagcggagaaagcatttgtttgtacaagatccgcagacgtgtaaatgttcctgcaaaaacacagactcgcgttgcaaggcgaggcagcttgagttaaacgaacgtacttgcagatgtgacaagccgaggcggtgagccgggcaggaggaaggagcctccctcagggtttcgggaaccagatctctcaccaggaaagactgatacagaacgatcgatacagaaaccacgctgccgccaccacaccatcaccatcgacagaacagtccttaatccagaaacctgaaatgaaggaagaggagactctgcgcagagcactttgggtccggagggcgagactccggcggaagcattcccgggcgggtgacccagcacggtccctcttggaattggattcgccattttatttttcttgctgctaaatcaccgagcccggaagattagagagttttatttctgggattcctgtagacacacccacccacatacatacatttatatatatatatattatatatatataaa

SEQ ID NO: 750 - DNA, 414 bp, Homo sapiens
  source 1..414: mol_type = genomic DNA
atgaactttctgctgtcttgggtgcattggagccttgccttgctgctctacctccaccatgccaagtggtcccaggctgcacccatggcagaaggaggagggcagaatcatcacgaagtggtgaagttcatggatgtctatcagcgcagctactgccatccaatcgagaccctggtggacatcttccaggagtaccctgatgagatcgagtacatcttcaagccatcctgtgtgcccctgatgcgatgcgggggctgctgcaatgacgagggcctggagtgtgtgcccactgaggagtccaacatcaccatgcagattatgcggatcaaacctcaccaaggccagcacataggagagatgagcttcctacagcacaacaaatgtgaatgcagatgtgacaagccgaggcggtga

SEQ ID NO: 751 - DNA, 1146 bp, Homo sapiens
  source 1..1146: mol_type = genomic DNA
ctgacggacagacagacagacaccgcccccagccccagctaccacctcctccccggccggcggcggacagtggacgcggcggcgagccgcgggcaggggccggagcccgcgcccggaggcggggtggagggggtcggggctcgcggcgtcgcactgaaacttttcgtccaacttctgggctgttctcgcttcggaggagccgtggtccgcgcgggggaagccgagccgagcggagccgcgagaagtgctagctcgggccgggaggagccgcagccggaggagggggaggaggaagaagagaaggaagaggagagggggccgcagtggcgactcggcgctcggaagccgggctcatggacgggtgaggcggcggtgtgcgcagacagtgctccagccgcgcgcgctccccaggccctggcccgggcctcgggccggggaggaagagtagctcgccgaggcgccgaggagagcgggccgccccacagcccgagccggagagggagcgcgagccgcgccggccccggtcgggcctccgaaaccatgaactttctgctgtcttgggtgcattggagccttgccttgctgctctacctccaccatgccaagtggtcccaggctgcacccatggcagaaggaggagggcagaatcatcacgaagtggtgaagttcatggatgtctatcagcgcagctactgccatccaatcgagaccctggtggacatcttccaggagtaccctgatgagatcgagtacatcttcaagccatcctgtgtgcccctgatgcgatgcgggggctgctgcaatgacgagggcctggagtgtgtgcccactgaggagtccaacatcaccatgcagattatgcggatcaaacctcaccaaggccagcacataggagagatgagcttcctacagcacaacaaatgtgaatgcagaccaaagaaagatagagcaagacaagaaaatccctgtgggccttgctcagagcggagaaagcatttgtttgtacaagatccgcagacgtgtaaatgttcctgcaaaaacacagactcgcgttgcaaggcgaggcagcttgagttaaacgaacgtacttgcagatctctcaccaggaaagactgatacagaacgatcgatacagaaaccacgctg

SEQ ID NO: 752 - DNA, 630 bp, Homo sapiens
  source 1..630: mol_type = genomic DNA
atgaactttctgctgtcttgggtgcattggagccttgccttgctgctctacctccaccatgccaagtggtcccaggctgcacccatggcagaaggaggagggcagaatcatcacgaagtggtgaagttcatggatgtctatcagcgcagctactgccatccaatcgagaccctggtggacatcttccaggagtaccctgatgagatcgagtacatcttcaagccatcctgtgtgcccctgatgcgatgcgggggctgctgcaatgacgagggcctggagtgtgtgcccactgaggagtccaacatcaccatgcagattatgcggatcaaacctcaccaaggccagcacataggagagatgagcttcctacagcacaacaaatgtgaatgcagaccaaagaaagatagagcaagacaagaaaaaaaatcagttcgaggaaagggaaaggggcaaaaacgaaagcgcaagaaatcccgtccctgtgggccttgctcagagcggagaaagcatttgtttgtacaagatccgcagacgtgtaaatgttcctgcaaaaacacagactcgcgttgcaaggcgaggcagcttgagttaaacgaacgtacttgcagatgtgacaagccgaggcggtga

SEQ ID NO: 753 - DNA, 606 bp, Homo sapiens
  source 1..606: mol_type = genomic DNA
atgaactttctgctgtcttgggtgcattggagccttgccttgctgctctacctccaccatgccaagtggtcccaggctgcacccatggcagaaggaggagggcagaatcatcacgaagtggtgaagttcatggatgtctatcagcgcagctactgccatccaatcgagaccctggtggacatcttccaggagtaccctgatgagatcgagtacatcttcaagccatcctgtgtgcccctgatgcgatgcgggggctgctgcaatgacgagggcctggagtgtgtgcccactgaggagtccaacatcaccatgcagattatgcggatcaaacctcaccaaggccagcacataggagagatgagcttcctacagcacaacaaatgtgaatgcagaccaaagaaagatagagcaagacaagaaaatccctgtgggccttgctcagagcggagaaagcatttgtttgtacaagatccgcagacgtgtaaatgttcctgcaaaaacacagactcgcgttgcaaggcgaggcagcttgagttaaacgaacgtacttgcagatctctcaccaggaaagactgatacagaacgatcgatacagaaaccacgctg

SEQ ID NO: 754 - DNA, 970 bp, Homo sapiens
  source 1..970: mol_type = genomic DNA
ccgcgggcaggggccggagcccgcgcccggaggcggggtggagggggtcggggctcgcggcgtcgcactgaaacttttcgtccaacttctgggctgttctcgcttcggaggagccgtggtccgcgcgggggaagccgagccgagcggagccgcgagaagtgctagctcgggccgggaggagccgcagccggaggagggggaggaggaagaagagaaggaagaggagagggggccgcagtggcgactcggcgctcggaagccgggctcatggacgggtgaggcggcggtgtgcgcagacagtgctccagccgcgcgcgctccccaggccctggcccgggcctcgggccggggaggaagagtagctcgccgaggcgccgaggagagcgggccgccccacagcccgagccggagagggagcgcgagccgcgccggccccggtcgggcctccgaaaccatgaactttctgctgtcttgggtgcattggagccttgccttgctgctctacctccaccatgccaagtggtcccaggctgcacccatggcagaaggaggagggcagaatcatcacgaagtggtgaagttcatggatgtctatcagcgcagctactgccatccaatcgagaccctggtggacatcttccaggagtaccctgatgagatcgagtacatcttcaagccatcctgtgtgcccctgatgcgatgcgggggctgctgcaatgacgagggcctggagtgtgtgcccactgaggagtccaacatcaccatgcagattatgcggatcaaacctcaccaaggccagcacataggagagatgagcttcctacagcacaacaaatgtgaatgcagaccaaagaaagatagagcaagacaagaaaaaaaatcagttcgaggaaagggaaaggggcaaaaacgaaagcgcaagaaatcccggtataagtcctggagcgtatgtgacaagccgaggcggtga

SEQ ID NO: 755 - DNA, 1199 bp, Homo sapiens
  source 1..1199: mol_type = genomic DNA
gcgcagacagtgctccagccgcgcgcgctccccaggccctggcccgggcctcgggccggggaggaagagtagctcgccgaggcgccgaggagagcgggccgccccacagcccgagccggagagggagcgcgagccgcgccggccccggtcgggcctccgaaaccatgaactttctgctgtcttgggtgcattggagccttgccttgctgctctacctccaccatgccaagtggtcccaggctgcacccatggcagaaggaggagggcagaatcatcacgaagtggtgaagttcatggatgtctatcagcgcagctactgccatccaatcgagaccctggtggacatcttccaggagtaccctgatgagatcgagtacatcttcaagccatcctgtgtgcccctgatgcgatgcgggggctgctgcaatgacgagggcctggagtgtgtgcccactgaggagtccaacatcaccatgcagattatgcggatcaaacctcaccaaggccagcacataggagagatgagcttcctacagcacaacaaatgtgaatgcagaccaaagaaagatagagcaagacaagaaaaaaaatcagttcgaggaaagggaaaggggcaaaaacgaaagcgcaagaaatcccggtataagtcctggagcgttccctgtgggccttgctcagagcggagaaagcatttgtttgtacaagatccgcagacgtgtaaatgttcctgcaaaaacacagactcgcgttgcaaggcgaggcagcttgagttaaacgaacgtacttgcagatgtgacaagccgaggcggtgagccgggcaggaggaaggagcctccctcagggtttcgggaaccagatctctcaccaggaaagactgatacagaacgatcgatacagaaaccacgctgccgccaccacaccatcaccatcgacagaacagtccttaatccagaaacctgaaatgaaggaagaggagactctgcgcagagcactttgggtccggagggcgagactccggcggaagcattcccgggcgggtgacccagcacggtccctcttggaattggattcgccattttatttttcttgctgctaaatcaccgagcccggaagattagagagttttatttctgggattcctgtagacacacccacccacatacatacatttatatatatatatattatatatatataaa

SEQ ID NO: 756 - DNA, 541 bp, Homo sapiens
  source 1..541: mol_type = genomic DNA
atgaactttctgctgtcttgggtgcattggagccttgccttgctgctctacctccaccatgccaagtggtcccaggctgcacccatggcagaaggaggagggcagaatcatcacgaagtggtgaagttcatggatgtctatcagcgcagctactgccatccaatcgagaccctggtggacatcttccaggagtaccctgatgagatcgagtacatcttcaagccatcctgtgtgcccctgatgcgatgcgggggctgctgcaatgacgagggcctggagtgtgtgcccactgaggagtccaacatcaccatgcagattatgcggatcaaacctcaccaaggccagcacataggagagatgagcttcctacagcacaacaaatgtgaatgcagaccaaagaaagatagagcaagacaagaaaatccctgtgggccttgctcagagcggagaaagcatttgtttgtacaagatccgcagacgtgtaaatgttcctgcaaaaacacagactcgcgttgcaagatgtgacaagccgaggcggtga

SEQ ID NO: 757 - DNA, 784 bp, Homo sapiens
  source 1..784: mol_type = genomic DNA
gcgcgagccgcgccggccccggtcgggcctccgaaaccatgaactttctgctgtcttgggtgcattggagccttgccttgctgctctacctccaccatgccaagtggtcccaggctgcacccatggcagaaggaggagggcagaatcatcacgaagtggtgaagttcatggatgtctatcagcgcagctactgccatccaatcgagaccctggtggacatcttccaggagtaccctgatgagatcgagtacatcttcaagccatcctgtgtgcccctgatgcgatgcgggggctgctgcaatgacgagggcctggagtgtgtgcccactgaggagtccaacatcaccatgcagattatgcggatcaaacctcaccaaggccagcacataggagagatgagcttcctacagcacaacaaatgtgaatgcagaccaaagaaagatagagcaagacaagaaaaaaaatcagttcgaggaaagggaaaggggcaaaaacgaaagcgcaagaaatcccggtataagtcctggagcgtgtacgttggtgcccgctgctgtctaatgccctggagcctccctggcccccatccctgtgggccttgctcagagcggagaaagcatttgtttgtacaagatccgcagacgtgtaaatgttcctgcaaaaacacagactcgcgttgcaaggcgaggcagcttgagttaaacgaacgtacttgcagatgtgacaagccgaggcggtgagccgggcaggaggaaggagcctccctcagggtttcgggaaccagatc

SEQ ID NO: 758 - DNA, 954 bp, Homo sapiens
  source 1..954: mol_type = genomic DNA
gcgcgagccgcgccggccccggtcgggcctccgaaaccatgaactttctgctgtcttgggtgcattggagccttgccttgctgctctacctccaccatgccaagtggtcccaggctgcacccatggcagaaggaggagggcagaatcatcacgaagtggtgaagttcatggatgtctatcagcgcagctactgccatccaatcgagaccctggtggacatcttccaggagtaccctgatgagatcgagtacatcttcaagccatcctgtgtgcccctgatgcgatgcgggggctgctgcaatgacgagggcctggagtgtgtgcccactgaggagtccaacatcaccatgcagattatgcggatcaaacctcaccaaggccagcacataggagagatgagcttcctacagcacaacaaatgtgaatgcagaccaaagaaagatagagcaagacaagaaaatccctgtgggccttgctcagagcggagaaagcatttgtttgtacaagatccgcagacgtgtaaatgttcctgcaaaaacacagactcgcgttgcaaggcgaggcagcttgagttaaacgaacgtacttgcagatgtgacaagccgaggcggtgagccgggcaggaggaaggagcctccctcagggtttcgggaaccagatctctcaccaggaaagactgatacagaacgatcgatacagaaaccacgctgccgccaccacaccatcaccatcgacagaacagtccttaatccagaaacctgaaatgaaggaagaggagactctgcgcagagcactttgggtccggagggcgagactccggcggaagcattcccgggcgggtgacccagcacggtccctcttggaattggattcgccattttatttttcttgctgctaaatcaccgagcccggaagattagagagttttatttctgggattcctgtagacacacc

SEQ ID NO: 759 - DNA, 2067 bp, Homo sapiens
  source 1..2067: mol_type = genomic DNA
gaggagggggacgagggctctggcgggtttggaggggctgaacatcgcggggtgttctggtgtcccccgccccgcctctccaaaaagctacaccgacgcggaccgcggcggcgtcctccctcgccctcgcttcacctcgcgggctccgaatgcggggagctcggatgtccggtttcctgtgaggcttttacctgacacccgccgcctttccccggcactggctgggagggcgccctgcaaagttgggaacgcggagccccggacccgctcccgccgcctccggctcgcccagggggggtcgccgggaggagcccgggggagagggaccaggaggggcccgcggcctcgcaggggcgcccgcgcccccacccctgcccccgccagcggaccggtcccccacccccggtccttccaccatgcacttgctgggcttcttctctgtggcgtgttctctgctcgccgctgcgctgctcccgggtcctcgcgaggcgcccgccgccgccgccgccttcgagtccggactcgacctctcggacgcggagcccgacgcgggcgaggccacggcttatgcaagcaaagatctggaggagcagttacggtctgtgtccagtgtagatgaactcatgactgtactctacccagaatattggaaaatgtacaagtgtcagctaaggaaaggaggctggcaacataacagagaacaggccaacctcaactcaaggacagaagagactataaaatttgctgcagcacattataatacagagatcttgaaaagtattgataatgagtggagaaagactcaatgcatgccacgggaggtgtgtatagatgtggggaaggagtttggagtcgcgacaaacaccttctttaaacctccatgtgtgtccgtctacagatgtgggggttgctgcaatagtgaggggctgcagtgcatgaacaccagcacgagctacctcagcaagacgttatttgaaattacagtgcctctctctcaaggccccaaaccagtaacaatcagttttgccaatcacacttcctgccgatgcatgtctaaactggatgtttacagacaagttcattccattattagacgttccctgccagcaacactaccacagtgtcaggcagcgaacaagacctgccccaccaattacatgtggaataatcacatctgcagatgcctggctcaggaagattttatgttttcctcggatgctggagatgactcaacagatggattccatgacatctgtggaccaaacaaggagctggatgaagagacctgtcagtgtgtctgcagagcggggcttcggcctgccagctgtggaccccacaaagaactagacagaaactcatgccagtgtgtctgtaaaaacaaactcttccccagccaatgtggggccaaccgagaatttgatgaaaacacatgccagtgtgtatgtaaaagaacctgccccagaaatcaacccctaaatcctggaaaatgtgcctgtgaatgtacagaaagtccacagaaatgcttgttaaaaggaaagaagttccaccaccaaacatgcagctgttacagacggccatgtacgaaccgccagaaggcttgtgagccaggattttcatatagtgaagaagtgtgtcgttgtgtcccttcatattggaaaagaccacaaatgatgagctaagattgtactgttttccagttcatcgattttctattatggaaaactgtgttgccacagtagaactgtctgtgaacagagagacccttgtgggtccatgctaacaaagacaaaagtctgtctttcctgaaccatgtggataactttacagaaatggactggagctcatctgcaaaaggcctcttgtaaagactggttttctgccaatgaccaaacagccaagattttcctcttgtgatttctttaaaagaatgactatataatttatttccactaaaaatattgtttctgcattcatttttatagcaacaacaattggtaaaactcactgtgatcaatatttttatatcatgcaaaatatgtttaaaataaaatgaaaattgtattataa

SEQ ID NO: 760 - DNA, 1581 bp, Homo sapiens
  source 1..1581: mol_type = genomic DNA
gggtagagtgagaagcaccagcaggcagtaacagccaacccttagccattgctaagggcagagaactggtggagcctttctcttactcccaggacttcagcacctaagacagctccaaaacaaaccagaacagtcagctccgggggagcacgactgggcgagaggcacagaaatggacaccagaaataaggcccagctccttgtgctcctgactcttctcagtgtgctcttctcacagacttcggcatggcctctttacagggcaccttctgctctcaggttgggtgacagaataccctttgagggagcaaatgaacctgatcaagtttcattaaaagaagacattgacatgttgcaaaatgcattagctgaaaatgacacaccctattatgatgtatccagaaatgccaggcatgctgatggagttttcaccagtgacttcagtaaactcttgggtcaactttctgccaaaaagtaccttgagtctcttatgggaaaacgtgttagtaacatctcagaagaccctgtaccagtcaaacgtcactcagatgcagtcttcactgacaactatacccgccttagaaaacaaatggctgtaaagaaatatttgaactcaattctgaatggaaagaggagcagtgagggagaatctcccgactttccagaagagttagaaaaatgatgaaaaagacctttggagcaaagctgatgacaacttcccagtgaattcttgaaggaaaatgatacgcaacataattaaattttgagttctacataagtaattcaagaaaacaacttcaatatccaaaccaaataaaaatattgtgttgtgaatgttgtgatgtattctagctaatgtaataactgtgaagtttacattgtaaatagtatttgagagttctaaattttgtctttaactcataaaaagcctgcaatttcatatgctgtatatcctttctaacaaaaaaatatatttaatgataagtaaatgctaggttaattccaattatatgagacgtttttggaagagtagtaatagagcaaaattgatgtgtttatttatagagtgtacttaactattcaggagagtagaacagataatcagtgtgtctaaatttgaatgttaagcagatggaatgctgtgttaaataaacctcaaaatgtctaagatagtaacaatgaagataaaaagacattcttccaaaaagattttcagaaaatattatgtgtttccatattttataggcaacctttatttttaatggtgttttaaaaaatctcaaatttggattgctaatcaccaaaggctctctcctgatagtctttcagttaaggagaacgacccctgcttctgacactgaaacttccctttctgcttgtgttaagtatgtgtaaaatgtgaagtgaatgaaacactcagttgttcaataataaatatttttgccataatgactcagaatattgctttggtcatatgagcttccttctgtgaaagtacatttggagacacaactatttttccaaaataattttaagaaatcaaagagagaaaataaagaccttgcttatgattgcagataa

SEQ ID NO: 761 - DNA, 1584 bp, Homo sapiens
  source 1..1584: mol_type = genomic DNA
gggtagagtgagaagcaccagcaggcagtaacagccaacccttagccattgctaagggcagagaactggtggagcctttctcttactcccaggacttcagcacctaagacagctccaaaacaaaccagaacagtcagctccgggggagcacgactgggcgagaggcacagaaatggacaccagaaataaggcccagctccttgtgctcctgactcttctcagtgtgctcttctcacagacttcggcatggcctctttacagggcaccttctgctctcaggttgggtgacagaataccctttgagggagcaaatgaacctgatcaagtttcattaaaagaagacattgacatgttgcaaaatgcattagctgaaaatgacacaccctattatgatgtatccagaaatgccaggcatgctgatggagttttcaccagtgacttcagtaaactcttgggtcaactttctgccaaaaagtaccttgagtctcttatgggaaaacgtgttagcagtaacatctcagaagaccctgtaccagtcaaacgtcactcagatgcagtcttcactgacaactatacccgccttagaaaacaaatggctgtaaagaaatatttgaactcaattctgaatggaaagaggagcagtgagggagaatctcccgactttccagaagagttagaaaaatgatgaaaaagacctttggagcaaagctgatgacaacttcccagtgaattcttgaaggaaaatgatacgcaacataattaaattttgagttctacataagtaattcaagaaaacaacttcaatatccaaaccaaataaaaatattgtgttgtgaatgttgtgatgtattctagctaatgtaataactgtgaagtttacattgtaaatagtatttgagagttctaaattttgtctttaactcataaaaagcctgcaatttcatatgctgtatatcctttctaacaaaaaaatatatttaatgataagtaaatgctaggttaattccaattatatgagacgtttttggaagagtagtaatagagcaaaattgatgtgtttatttatagagtgtacttaactattcaggagagtagaacagataatcagtgtgtctaaatttgaatgttaagcagatggaatgctgtgttaaataaacctcaaaatgtctaagatagtaacaatgaagataaaaagacattcttccaaaaagattttcagaaaatattatgtgtttccatattttataggcaacctttatttttaatggtgttttaaaaaatctcaaatttggattgctaatcaccaaaggctctctcctgatagtctttcagttaaggagaacgacccctgcttctgacactgaaacttccctttctgcttgtgttaagtatgtgtaaaatgtgaagtgaatgaaacactcagttgttcaataataaatatttttgccataatgactcagaatattgctttggtcatatgagcttccttctgtgaaagtacatttggagacacaactatttttccaaaataattttaagaaatcaaagagagaaaataaagaccttgcttatgattgcagataa

SEQ ID NO: 762 - DNA, 1257 bp, Homo sapiens
  source 1..1257: mol_type = genomic DNA
agtttcattaaaagaagacattgacatgttgcaaaatgcattagctgaaaatgacacaccctattatgatgtatccagaaatgccaggcatgctgatggagttttcaccagtgacttcagtaaactcttgggtcaactttctgccaaaaagtaccttgagtctcttatgggaaaacgtgttagcagtaacatctcagaagaccctgtaccagtcaaacgtcactcagatgcagtcttcactgacaactatacccgccttagaaaacaaatggctgtaaagaaatatttgaactcaattctgaatggaaagaggagtgagggagaatctcccgactttccagaagagttagaaaaatgatgaaaaagacctttggagcaaagctgatgacaacttcccagtgaattcttgaaggaaaatgatacgcaacataattaaattttgagttctacataagtaattcaagaaaacaacttcaatatccaaaccaaataaaaatattgtgttgtgaatgttgtgatgtattctagctaatgtaataactgtgaagtttacattgtaaatagtatttgagagttctaaattttgtctttaactcataaaaagcctgcaatttcatatgctgtatatcctttctaacaaaaaaatatatttaatgataagtaaatgctaggttaattccaattatatgagacgtttttggaagagtagtaatagagcaaaattgatgtgtttatttatagagtgtacttaactattcaggagagtagaacagataatcagtgtgtctaaatttgaatgttaagcagatggaatgctgtgttaaataaacctcaaaatgtctaagatagtaacaatgaagataaaaagacattcttccaaaaagattttcagaaaatattatgtgtttccatattttataggcaacctttatttttaatggtgttttaaaaaatctcaaatttggattgctaatcaccaaaggctctctcctgatagtctttcagttaaggagaacgacccctgcttctgacactgaaacttccctttctgcttgtgttaagtatgtgtaaaatgtgaagtgaatgaaacactcagttgttcaataataaatatttttgccataatgactcagaatattgctttggtcatatgagcttccttctgtgaaagtacatttggagacacaactatttttccaaaataattttaagaaatcaaagagagaaaataaagaccttgcttatgattgcagataa

SEQ ID NO: 763 - DNA, 2042 bp, Homo sapiens
  source 1..2042: mol_type = genomic DNA
ggagtttattcataacgcgctctccaagtatacgtggcaatgcgttgctgggttattttaatcattctaggcatcgttttcctccttatgcctctatcattcctccctatctacactaacatcccacgctctgaacgcgcgcccattaatacccttctttcctccactctccctgggactcttgatcaaagcgcggccctttccccagccttagcgaggcgccctgcagcctggtacgcgcgtggcgtggcggtgggcgcgcagtgcgttctcggtgtggagggcagctgttccgcctgcgatgatttatactcacaggacaaggatgcggtttgtcaaacagtactgctacggaggagcagcagagaaagggagagggtttgagagggagcaaaagaaaatggtaggcgcgcgtagttaattcatgcggctctcttactctgtttacatcctagagctagagtgctcggctgcccggctgagtctcctccccaccttccccaccctccccaccctccccataagcgcccctcccgggttcccaaagcagagggcgtgggggaaaagaaaaaagatcctctctcgctaatctccgcccaccggccctttataatgcgagggtctggacggctgaggacccccgagctgtgctgctcgcggccgccaccgccgggccccggccgtccctggctcccctcctgcctcgagaagggcagggcttctcagaggcttggcgggaaaaagaacggagggagggatcgcgctgagtataaaagccggttttcggggctttatctaactcgctgtagtaattccagcgagaggcagagggagcgagcgggcggccggctagggtggaagagccgggcgagcagagctgcgctgcgggcgtcctgggaagggagatccggagcgaatagggggcttcgcctctggcccagccctcccgctgatcccccagccagcggtccgcaacccttgccgcatccacgaaactttgcccatagcagcgggcgggcactttgcactggaacttacaacacccgagcaaggacgcgactctcccgacgcggggaggctattctgcccatttggggacacttccccgccgctgccaggacccgcttctctgaaaggctctccttgcagctgcttagacgctggatttttttcgggtagtggaaaaccagcagcctcccgcgacgatgcccctcaacgttagcttcaccaacaggaactatgacctcgactacgactcggtgcagccgtatttctactgcgacgaggaggagaacttctaccagcagcagcagcagagcgagctgcagcccccggcgcccagcgaggatatctggaagaaattcgagctgctgcccaccccgcccctgtcccctagccgccgctccgggctctgctcgccctcctacgttgcggtcacacccttctcccttcggggagacaacgacggcggtggcgggagcttctccacggccgaccagctggagatggtgaccgagctgctgggaggagacatggtgaaccagagtttcatctgcgacccggacgacgagaccttcatcaaaaacatcatcatccaggactgtatgtggagcggcttctcggccgccgccaagctcgtctcagagaagctggcctcctaccaggctgcgcgcaaagacagcggcagcccgaaccccgcccgcggccacagcgtctgctccacctccagcttgtacctgcaggatctgagcgccgccgcctcagagtgcatcgacccctcggtggtcttcccctaccctctcaacgacagcagctcgcccaagtcctgcgcctcgcaagactccagcgccttctctccgtcctcggattctctgctctcctcgacggagtcctccccgcagggcagccccgagcccctggtgctccatgaggagacaccgcccaccaccagcagcgactctggaggaacaagaagatgaggaagaaatcgatgttgtttctgtggaaaagaggcaggctcctggcaaaaggtcagagtctgg

SEQ ID NO: 764 - DNA, 2345 bp, Homo sapiens
  source 1..2345: mol_type = genomic DNA
ctgctcgcggccgccaccgccgggccccggccgtccctggctcccctcctgcctcgagaagggcagggcttctcagaggcttggcgggaaaaagaacggagggagggatcgcgctgagtataaaagccggttttcggggctttatctaactcgctgtagtaattccagcgagaggcagagggagcgagcgggcggccggctagggtggaagagccgggcgagcagagctgcgctgcgggcgtcctgggaagggagatccggagcgaatagggggcttcgcctctggcccagccctcccgctgatcccccagccagcggtccgcaacccttgccgcatccacgaaactttgcccatagcagcgggcgggcactttgcactggaacttacaacacccgagcaaggacgcgactctcccgacgcggggaggctattctgcccatttggggacacttccccgccgctgccaggacccgcttctctgaaaggctctccttgcagctgcttagacgctggatttttttcgggtagtggaaaaccagcagcctcccgcgacgatgcccctcaacgttagcttcaccaacaggaactatgacctcgactacgactcggtgcagccgtatttctactgcgacgaggaggagaacttctaccagcagcagcagcagagcgagctgcagcccccggcgcccagcgaggatatctggaagaaattcgagctgctgcccaccccgcccctgtcccctagccgccgctccgggctctgctcgccctcctacgttgcggtcacacccttctcccttcggggagacaacgacggcggtggcgggagcttctccacggccgaccagctggagatggtgaccgagctgctgggaggagacatggtgaaccagagtttcatctgcgacccggacgacgagaccttcatcaaaaacatcatcatccaggactgtatgtggagcggcttctcggccgccgccaagctcgtctcagagaagctggcctcctaccaggctgcgcgcaaagacagcggcagcccgaaccccgcccgcggccacagcgtctgctccacctccagcttgtacctgcaggatctgagcgccgccgcctcagagtgcatcgacccctcggtggtcttcccctaccctctcaacgacagcagctcgcccaagtcctgcgcctcgcaagactccagcgccttctctccgtcctcggattctctgctctcctcgacggagtcctccccgcagggcagccccgagcccctggtgctccatgaggagacaccgcccaccaccagcagcgactctgaggaggaacaagaagatgaggaagaaatcgatgttgtttctgtggaaaagaggcaggctcctggcaaaaggtcagagtctggatcaccttctgctggaggccacagcaaacctcctcacagcccactggtcctcaagaggtgccacgtctccacacatcagcacaactacgcagcgcctccctccactcggaaggactatcctgctgccaagagggtcaagttggacagtgtcagagtcctgagacagatcagcaacaaccgaaaatgcaccagccccaggtcctcggacaccgaggagaatgtcaagaggcgaacacacaacgtcttggagcgccagaggaggaacgagctaaaacggagcttttttgccctgcgtgaccagatcccggagttggaaaacaatgaaaaggcccccaaggtagttatccttaaaaaagccacagcatacatcctgtccgtccaagcagaggagcaaaagctcatttctgaagaggacttgttgcggaaacgacgagaacagttgaaacacaaacttgaacagctacggaactcttgtgcgtaaggaaaagtaaggaaaacgattccttctaacagaaatgtcctgagcaatcacctatgaacttgtttcaaatgcatgatcaaatgcaacctcacaaccttggctgagtcttgagactgaaagatttagccataatgtaaactgcctcaaattggactttgggcataaaagaacttttttatgcttaccatcttttttttttctttaacagatttgtatttaagaattgtttttaaaaaattttaagatttacacaatgtttctctgtaaatattgccattaaatgtaaataactttaataaaacgtttatagcagttacacagaatttcaatcctagtatatagtacctagtattataggtactataaaccctaattttttttatttaagtacattttgctttttaaagttgatttttttctattgtttttagaaaaaataaaataactggcaaatatatcattgagccaaa

SEQ ID NO: 765 - DNA, 1893 bp, Homo sapiens
  source 1..1893: mol_type = genomic DNA
aactcgctgtagtaattccagcgagaggcagagggagcgagcgggcggccggctagggtggaagagccgggcgagcagagctgcgctgcgggcgtcctgggaagggagatccggagcgaatagggggcttcgcctctggcccagccctcccgctgatcccccagccagcggtccgcaacccttgccgcatccacgaaactttgcccatagcagcgggcgggcactttgcactggaacttacaacacccgagcaaggacgcgactctcccgacgcggggaggctattctgcccatttggggacacttccccgccgctgccaggacccgcttctctgaaaggctctccttgcagctgcttagacgctggatttttttcgggtagtggaaaaccagcagcctcccgcgacgatgcccctcaacgttagcttcaccaacaggaactatgacctcgactacgactcggtgcagccgtatttctactgcgacgaggaggatatctggaagaaattcgagctgctgcccaccccgcccctgtcccctagccgccgctccgggctctgctcgccctcctacgttgcggtcacacccttctcccttcggggagacaacgacggcggtggcgggagcttctccacggccgaccagctggagatggtgaccgagctgctgggaggagacatggtgaaccagagtttcatctgcgacccggacgacgagaccttcatcaaaaacatcatcatccaggactgtatgtggagcggcttctcggccgccgccaagctcgtctcagagaagctggcctcctaccaggctgcgcgcaaagacagcggcagcccgaaccccgcccgcggccacagcgtctgctccacctccagcttgtacctgcaggatctgagcgccgccgcctcagagtgcatcgacccctcggtggtcttcccctaccctctcaacgacagcagctcgcccaagtcctgcgcctcgcaagactccagcgccttctctccgtcctcggattctctgctctcctcgacggagtcctccccgcagggcagccccgagcccctggtgctccatgaggagacaccgcccaccaccagcagcgactctgaggaggaacaagaagatgaggaagaaatcgatgttgtttctgtggaaaagaggcaggctcctggcaaaaggtcagagtctggatcaccttctgctggaggccacagcaaacctcctcacagcccactggtcctcaagaggtgccacgtctccacacatcagcacaactacgcagcgcctccctccactcggaaggactatcctgctgccaagagggtcaagttggacagtgtcagagtcctgagacagatcagcaacaaccgaaaatgcaccagccccaggtcctcggacaccgaggagaatgtcaagaggcgaacacacaacgtcttggagcgccagaggaggaacgagctaaaacggagcttttttgccctgcgtgaccagatcccggagttggaaaacaatgaaaaggcccccaaggtagttatccttaaaaaagccacagcatacatcctgtccgtccaagcagaggagcaaaagctcatttctgaagaggacttgttgcggaaacgacgagaacagttgaaacacaaacttgaacagctacggaactcttgtgcgtaaggaaaagtaaggaaaacgattccttctaacagaaatgtcctgagcaatcacctatgaacttgtttcaaatgcatgatcaaatgcaacctcacaaccttggctgagtcttgagactgaaagatttagccataatgtaaactgcctcaaattggactttgggcataaaagaacttttttatgcttaccatcttttttttttctttaacagatttgtatttaaga

SEQ ID NO: 766 - DNA, 2150 bp, Homo sapiens
  source 1..2150: mol_type = genomic DNA
gggctttatctaactcgctgtagtaattccagcgagaggcagagggagcgagcgggcggccggctagggtggaagagccgggcgagcagagctgcgctgcgggcgtcctgggaagggagatccggagcgaatagggggcttcgcctctggcccagccctcccgctgatcccccagccagcggtccgcaacccttgccgcatccacgaaactttgcccatagcagcgggcgggcactttgcactggaacttacaacacccgagcaaggacgcgactctcccgacgcggggaggctattctgcccatttggggacacttccccgccgctgccaggacccgcttctctgaaaggctctccttgcagctgcttagacgctggatttttttcgggtagtggaaaaccagcctcccgcgacgatgcccctcaacgttagcttcaccaacaggaactatgacctcgactacgactcggtgcagccgtatttctactgcgacgaggaggagaacttctaccagcagcagcagcagagcgagctgcagcccccggcgcccagcgaggatatctggaagaaattcgagctgctgcccaccccgcccctgtcccctagccgccgctccgggctctgctcgccctcctacgttgcggtcacacccttctcccttcggggagacaacgacggcggtggcgggagcttctccacggccgaccagctggagatggtgaccgagctgctgggaggagacatggtgaaccagagtttcatctgcgacccggacgacgagaccttcatcaaaaacatcatcatccaggactgtatgtggagcggcttctcggccgccgccaagctcgtctcagagaagctggcctcctaccaggctgcgcgcaaagacagcggcagcccgaaccccgcccgcggccacagcgtctgctccacctccagcttgtacctgcaggatctgagcgccgccgcctcagagtgcatcgacccctcggtggtcttcccctaccctctcaacgacagcagctcgcccaagtcctgcgcctcgcaagactccagcgccttctctccgtcctcggattctctgctctcctcgacggagtcctccccgcagggcagccccgagcccctggtgctccatgaggagacaccgcccaccaccagcagcgactctgaggaggaacaagaagatgaggaagaaatcgatgttgtttctgtggaaaagaggcaggctcctggcaaaaggtcagagtctggatcaccttctgctggaggccacagcaaacctcctcacagcccactggtcctcaagaggtgccacgtctccacacatcagcacaactacgcagcgcctccctccactcggaaggactatcctgctgccaagagggtcaagttggacagtgtcagagtcctgagacagatcagcaacaaccgaaaatgcaccagccccaggtcctcggacaccgaggagaatgtcaagaggcgaacacacaacgtcttggagcgccagaggaggaacgagctaaaacggagcttttttgccctgcgtgaccagatcccggagttggaaaacaatgaaaaggcccccaaggtagttatccttaaaaaagccacagcatacatcctgtccgtccaagcagaggagcaaaagctcatttctgaagaggacttgttgcggaaacgacgagaacagttgaaacacaaacttgaacagctacggaactcttgtgcgtaaggaaaagtaaggaaaacgattccttctaacagaaatgtcctgagcaatcacctatgaacttgtttcaaatgcatgatcaaatgcaacctcacaaccttggctgagtcttgagactgaaagatttagccataatgtaaactgcctcaaattggactttgggcataaaagaacttttttatgcttaccatcttttttttttctttaacagatttgtatttaagaattgtttttaaaaaattttaagatttacacaatgtttctctgtaaatattgccattaaatgtaaataactttaataaaacgtttatagcagttacacagaatttcaatcctagtatatagtacctagtattataggtactataaaccctaattttttttatttaagtacattttgctttttaaagttgattt

SEQ ID NO: 767 - DNA, 8838 bp, Homo sapiens
  source 1..8838: mol_type = genomic DNA
gtggcagctcacagctattgtggtgggaaagggagggtggttggtggatgtcacagcttgggctttatctcccccagcagtggggactccacagcccctgggctacataacagcaagacagtccggagctgtagcagacctgattgagcctttgcagcagctgagagcatggcctagggtgggcggcaccattgtccagcagctgagtttcccagggaccttggagatagccgcagccctcatttgcaggggaagatgattcctgccagatttgccggggtgctgcttgctctggccctcattttgccagggaccctttgtgcagaaggaactcgcggcaggtcatccacggcccgatgcagccttttcggaagtgacttcgtcaacacctttgatgggagcatgtacagctttgcgggatactgcagttacctcctggcagggggctgccagaaacgctccttctcgattattggggacttccagaatggcaagagagtgagcctctccgtgtatcttggggaattttttgacatccatttgtttgtcaatggtaccgtgacacagggggaccaaagagtctccatgccctatgcctccaaagggctgtatctagaaactgaggctgggtactacaagctgtccggtgaggcctatggctttgtggccaggatcgatggcagcggcaactttcaagtcctgctgtcagacagatacttcaacaagacctgcgggctgtgtggcaactttaacatctttgctgaagatgactttatgacccaagaagggaccttgacctcggacccttatgactttgccaactcatgggctctgagcagtggagaacagtggtgtgaacgggcatctcctcccagcagctcatgcaacatctcctctggggaaatgcagaagggcctgtgggagcagtgccagcttctgaagagcacctcggtgtttgcccgctgccaccctctggtggaccccgagccttttgtggccctgtgtgagaagactttgtgtgagtgtgctggggggctggagtgcgcctgccctgccctcctggagtacgcccggacctgtgcccaggagggaatggtgctgtacggctggaccgaccacagcgcgtgcagcccagtgtgccctgctggtatggagtataggcagtgtgtgtccccttgcgccaggacctgccagagcctgcacatcaatgaaatgtgtcaggagcgatgcgtggatggctgcagctgccctgagggacagctcctggatgaaggcctctgcgtggagagcaccgagtgtccctgcgtgcattccggaaagcgctaccctcccggcacctccctctctcgagactgcaacacctgcatttgccgaaacagccagtggatctgcagcaatgaagaatgtccaggggagtgccttgtcacaggtcaatcacacttcaagagctttgacaacagatacttcaccttcagtgggatctgccagtacctgctggcccgggattgccaggaccactccttctccattgtcattgagactgtccagtgtgctgatgaccgcgacgctgtgtgcacccgctccgtcaccgtccggctgcctggcctgcacaacagccttgtgaaactgaagcatggggcaggagttgccatggatggccaggacgtccagctccccctcctgaaaggtgacctccgcatccagcatacagtgacggcctccgtgcgcctcagctacggggaggacctgcagatggactgggatggccgcgggaggctgctggtgaagctgtcccccgtctatgccgggaagacctgcggcctgtgtgggaattacaatggcaaccagggcgacgacttccttaccccctctgggctggcggagccccgggtggaggacttcgggaacgcctggaagctgcacggggactgccaggacctgcagaagcagcacagcgatccctgcgccctcaacccgcgcatgaccaggttctccgaggaggcgtgcgcggtcctgacgtcccccacattcgaggcctgccatcgtgccgtcagcccgctgccctacctgcggaactgccgctacgacgtgtgctcctgctcggacggccgcgagtgcctgtgcggcgccctggccagctatgccgcggcctgcgcggggagaggcgtgcgcgtcgcgtggcgcgagccaggccgctgtgagctgaactgcccgaaaggccaggtgtacctgcagtgcgggaccccctgcaacctgacctgccgctctctctcttacccggatgaggaatgcaatgaggcctgcctggagggctgcttctgccccccagggctctacatggatgagaggggggactgcgtgcccaaggcccagtgcccctgttactatgacggtgagatcttccagccagaagacatcttctcagaccatcacaccatgtgctactgtgaggatggcttcatgcactgtaccatgagtggagtccccggaagcttgctgcctgacgctgtcctcagcagtcccctgtctcatcgcagcaaaaggagcctatcctgtcggccccccatggtcaagctggtgtgtcccgctgacaacctgcgggctgaagggctcgagtgtaccaaaacgtgccagaactatgacctggagtgcatgagcatgggctgtgtctctggctgcctctgccccccgggcatggtccggcatgagaacagatgtgtggccctggaaaggtgtccctgcttccatcagggcaaggagtatgcccctggagaaacagtgaagattggctgcaacacttgtgtctgtcaggaccggaagtggaactgcacagaccatgtgtgtgatgccacgtgctccacgatcggcatggcccactacctcaccttcgacgggctcaaatacctgttccccggggagtgccagtacgttctggtgcaggattactgcggcagtaaccctgggacctttcggatcctagtggggaataagggatgcagccacccctcagtgaaatgcaagaaacgggtcaccatcctggtggagggaggagagattgagctgtttgacggggaggtgaatgtgaagaggcccatgaaggatgagactcactttgaggtggtggagtctggccggtacatcattctgctgctgggcaaagccctctccgtggtctgggaccgccacctgagcatctccgtggtcctgaagcagacataccaggagaaagtgtgtggcctgtgtgggaattttgatggcatccagaacaatgacctcaccagcagcaacctccaagtggaggaagaccctgtggactttgggaactcctggaaagtgagctcgcagtgtgctgacaccagaaaagtgcctctggactcatcccctgccacctgccataacaacatcatgaagcagacgatggtggattcctcctgtagaatccttaccagtgacgtcttccaggactgcaacaagctggtggaccccgagccatatctggatgtctgcatttacgacacctgctcctgtgagtccattggggactgcgcctgcttctgcgacaccattgctgcctatgcccacgtgtgtgcccagcatggcaaggtggtgacctggaggacggccacattgtgcccccagagctgcgaggagaggaatctccgggagaacgggtatgagtgtgagtggcgctataacagctgtgcacctgcctgtcaagtcacgtgtcagcaccctgagccactggcctgccctgtgcagtgtgtggagggctgccatgcccactgccctccagggaaaatcctggatgagcttttgcagacctgcgttgaccctgaagactgtccagtgtgtgaggtggctggccggcgttttgcctcaggaaagaaagtcaccttgaatcccagtgaccctgagcactgccagatttgccactgtgatgttgtcaacctcacctgtgaagcctgccaggagccgggaggcctggtggtgcctcccacagatgccccggtgagccccaccactctgtatgtggaggacatctcggaaccgccgttgcacgatttctactgcagcaggctactggacctggtcttcctgctggatggctcctccaggctgtccgaggctgagtttgaagtgctgaaggcctttgtggtggacatgatggagcggctgcgcatctcccagaagtgggtccgcgtggccgtggtggagtaccacgacggctcccacgcctacatcgggctcaaggaccggaagcgaccgtcagagctgcggcgcattgccagccaggtgaagtatgcgggcagccaggtggcctccaccagcgaggtcttgaaatacacactgttccaaatcttcagcaagatcgaccgccctgaagcctcccgcatcaccctgctcctgatggccagccaggagccccaacggatgtcccggaactttgtccgctacgtccagggcctgaagaagaagaaggtcattgtgatcccggtgggcattgggccccatgccaacctcaagcagatccgcctcatcgagaagcaggcccctgagaacaaggccttcgtgctgagcagtgtggatgagctggagcagcaaagggacgagatcgttagctacctctgtgaccttgcccctgaagcccctcctcctactctgccccccgacatggcacaagtcactgtgggcccggggctcttgggggtttcgaccctggggcccaagaggaactccatggttctggatgtggcgttcgtcctggaaggatcggacaaaattggtgaagccgacttcaacaggagcaaggagttcatggaggaggtgattcagcggatggatgtgggccaggacagcatccacgtcacggtgctgcagtactcctacatggtgactgtggagtaccccttcagcgaggcacagtccaaaggggacatcctgcagcgggtgcgagagatccgctaccagggcggcaacaggaccaacactgggctggccctgcggtacctctctgaccacagcttcttggtcagccagggtgaccgggagcaggcgcccaacctggtctacatggtcaccggaaatcctgcctctgatgagatcaagaggctgcctggagacatccaggtggtgcccattggagtgggccctaatgccaacgtgcaggagctggagaggattggctggcccaatgcccctatcctcatccaggactttgagacgctcccccgagaggctcctgacctggtgctgcagaggtgctgctccggagaggggctgcagatccccaccctctcccctgcacctgactgcagccagcccctggacgtgatccttctcctggatggctcctccagtttcccagcttcttattttgatgaaatgaagagtttcgccaaggctttcatttcaaaagccaatatagggcctcgtctcactcaggtgtcagtgctgcagtatggaagcatcaccaccattgacgtgccatggaacgtggtcccggagaaagcccatttgctgagccttgtggacgtcatgcagcgggagggaggccccagccaaatcggggatgccttgggctttgctgtgcgatacttgacttcagaaatgcatggtgccaggccgggagcctcaaaggcggtggtcatcctggtcacggacgtctctgtggattcagtggatgcagcagctgatgccgccaggtccaacagagtgacagtgttccctattggaattggagatcgctacgatgcagcccagctacggatcttggcaggcccagcaggcgactccaacgtggtgaagctccagcgaatcgaagacctccctaccatggtcaccttgggcaattccttcctccacaaactgtgctctggatttgttaggatttgcatggatgaggatgggaatgagaagaggcccggggacgtctggaccttgccagaccagtgccacaccgtgacttgccagccagatggccagaccttgctgaagagtcatcgggtcaactgtgaccgggggctgaggccttcgtgccctaacagccagtcccctgttaaagtggaagagacctgtggctgccgctggacctgcccctgcgtgtgcacaggcagctccactcggcacatcgtgacctttgatgggcagaatttcaagctgactggcagctgttcttatgtcctatttcaaaacaaggagcaggacctggaggtgattctccataatggtgcctgcagccctggagcaaggcagggctgcatgaaatccatcgaggtgaagcacagtgccctctccgtcgagctgcacagtgacatggaggtgacggtgaatgggagactggtctctgttccttacgtgggtgggaacatggaagtcaacgtttatggtgccatcatgcatgaggtcagattcaatcaccttggtcacatcttcacattcactccacaaaacaatgagttccaactgcagctcagccccaagacttttgcttcaaagacgtatggtctgtgtgggatctgtgatgagaacggagccaatgacttcatgctgagggatggcacagtcaccacagactggaaaacacttgttcaggaatggactgtgcagcggccagggcagacgtgccagcccatcctggaggagcagtgtcttgtccccgacagctcccactgccaggtcctcctcttaccactgtttgctgaatgccacaaggtcctggctccagccacattctatgccatctgccagcaggacagttgccaccaggagcaagtgtgtgaggtgatcgcctcttatgcccacctctgtcggaccaacggggtctgcgttgactggaggacacctgatttctgtgctatgtcatgcccaccatctctggtctacaaccactgtgagcatggctgtccccggcactgtgatggcaacgtgagctcctgtggggaccatccctccgaaggctgtttctgccctccagataaagtcatgttggaaggcagctgtgtccctgaagaggcctgcactcagtgcattggtgaggatggagtccagcaccagttcctggaagcctgggtcccggaccaccagccctgtcagatctgcacatgcctcagcgggcggaaggtcaactgcacaacgcagccctgccccacggccaaagctcccacgtgtggcctgtgtgaagtagcccgcctccgccagaatgcagaccagtgctgccccgagtatgagtgtgtgtgtgacccagtgagctgtgacctgcccccagtgcctcactgtgaacgtggcctccagcccacactgaccaaccctggcgagtgcagacccaacttcacctgcgcctgcaggaaggaggagtgcaaaagagtgtccccaccctcctgccccccgcaccgtttgcccacccttcggaagacccagtgctgtgatgagtatgagtgtgcctgcaactgtgtcaactccacagtgagctgtccccttgggtacttggcctcaactgccaccaatgactgtggctgtaccacaaccacctgccttcccgacaaggtgtgtgtccaccgaagcaccatctaccctgtgggccagttctgggaggagggctgcgatgtgtgcacctgcaccgacatggaggatgccgtgatgggcctccgcgtggcccagtgctcccagaagccctgtgaggacagctgtcggtcgggcttcacttacgttctgcatgaaggcgagtgctgtggaaggtgcctgccatctgcctgtgaggtggtgactggctcaccgcggggggactcccagtcttcctggaagagtgtcggctcccagtgggcctccccggagaacccctgcctcatcaatgagtgtgtccgagtgaaggaggaggtctttatacaacaaaggaacgtctcctgcccccagctggaggtccctgtctgcccctcgggctttcagctgagctgtaagacctcagcgtgctgcccaagctgtcgctgtgagcgcatggaggcctgcatgctcaatggcactgtcattgggcccgggaagactgtgatgatcgatgtgtgcacgacctgccgctgcatggtgcaggtgggggtcatctctggattcaagctggagtgcaggaagaccacctgcaacccctgccccctgggttacaaggaagaaaataacacaggtgaatgttgtgggagatgtttgcctacggcttgcaccattcagctaagaggaggacagatcatgacactgaagcgtgatgagacgctccaggatggctgtgatactcacttctgcaaggtcaatgagagaggagagtacttctgggagaagagggtcacaggctgcccaccctttgatgaacacaagtgtctggctgagggaggtaaaattatgaaaattccaggcacctgctgtgacacatgtgaggagcctgagtgcaacgacatcactgccaggctgcagtatgtcaaggtgggaagctgtaagtctgaagtagaggtggatatccactactgccagggcaaatgtgccagcaaagccatgtactccattgacatcaacgatgtgcaggaccagtgctcctgctgctctccgacacggacggagcccatgcaggtggccctgcactgcaccaatggctctgttgtgtaccatgaggttctcaatgccatggagtgcaaatgctcccccaggaagtgcagcaagtgaggctgctgcagctgcatgggtgcctgctgctgcctgccttggcctgatggccaggccagagtgctgccagtcctctgcatgttctgctcttgtgcccttctgagcccacaataaaggctgagctcttatcttgcaaaaggc

SEQ ID NO: 768 - DNA, 2303 bp, Homo sapiens
  source 1..2303: mol_type = genomic DNA
aaacaaaaacaaaccacacctgcatctgctgtgctgggcccccggttctcttttccctctgggatctaagatgccgctggggatccaaggcagaggcctgggagcccccatttccgagggggagggctagcgtggaaggccccgccccggcagctgcggagggatttggtggggtccaggccgcccttgccacgcaggggtgcgcggatgacctgaaaaaagccagaaagaggaaaggtgccgccgaggctggtcgctctcagctggggctcatcgcatcctctaccaagagcgctcccaccacacaggtcccgcccctcccaggtgggtttcatcgggtgggcccagcgggacagggccgggtgaaattagggagggggctgggctggggcgcaatggaggccgagccaatcccggactcctcaatgccagcaaagcttctggcgccgccctgtctgaacctggagcggctgggaggatccccctcccaggagaagccgaggaccccaggatgctgcagaatcagtgagaggtgcgtaaggccaaaccccattccccggaccccgctagcacttcaccacctggctcagtgatcaaggggtcatgacctctctttgctggggttatcgagaagtggcaattttataatagttactgaaacttacaaagaggttctggtgcccagagacacttggggtcatctagggatcagaggccatgcaattccatgtctctggggctgatgtaggcactccccagggatcatccaggggttatggagggcaactcaataataatgaaaatgataaaaatcgtaatcatattatggcaagccagcggcgtggtggcgcgtgcctgtaagtcccagctactcgggaggctgaggcggaaggatcggtcgagcccaggagttctaggctgcactgagtcctgatcacgcccctgcactccaggcgggggtacagagtgaggctcggtctctaaaagaaacacaaagaaaaaaagtaacctttttctcgatcctgcagccagaggcttgatatcctgcctcggtcacctagggcggtccctgcctgggtgatctacgggtgccgtaaggggttgattgatgtggagggctgggcgtgcctgggaggcccacagtgggcgaggtgagttgcaattactgcaactcttaaaccttccacccagagttagaaatgactgaacctcaggtggggtgtgtagcctgtccaagggtacacaaagagccggcccaagttggaaccccctggccggctaaacccaggagtcacccaagaaaacgtgaccccactgcccttctccccaggtccctctggcctgcatgccaggagtcggtcaccgccctgtgcttcctccaagagacagtggagaggctgggtcagtcccctgcccaggacaccccggtcctggggccttgctgggacccgatggctctggggactcagggccgcctgctgctggacagggattccaaggacacacagaccaggatcagccaaaagggccgccgtctgcagcccccggggactccctcggccccaccccagagaaggccccggaaacagctgaacccctgccggggcaccgagagagtggaccctgggttcgagggggtgactctgaagtttcagataaagccggactccagcctgcagatcatccccacgtacagcctgccctgcagtagccgttctcaggaatcccctgcagatgctgttgggggccctgcagcccacccaggaggcaccgaggcccactcagcaggcagcgaggccctggagccccggcgctgtgcttcctgtcggacccagaggaccccgctctggagagacgctgaagatgggacccctctctgcaacgcctgtgggatcaggtacaagaaatacggcactcgctgctccagctgctggctggtgcccaggaaaaatgtccagcccaagaggctatgtggcagatgtggagtgtccctggaccccattcaggaaggttaaacccagcttcaccctgctgagctgctgcttctgcctccgtttcaccagtgggagaatgggcagaagcagctctcctaggaggattggggaaagagccggcctgcctcctctctgccatctccagattcaaggatcccgggggaagacccaggcctcaggtggcagagcctgctaggggtcaccagccccttctccagtcagccttggccgaggccccctcaggagacgctctcaggaaggatgagcattgttacagcagggacaataaagtacagagatatgccgaga

SEQ ID NO: 769 - protein, 393 aa, Homo sapiens
MTTYSDKGAKPERGRFLHFHSVTFWVGNAKQATSFYCSKMGFEPLAYRGLETGSREVVSHVIKQGKIVFVLSSALNPWNKEMGDHLVKHGDGVKDIAFEVEDCDYIVQKARERGAKIMREPWVEQDKFGKVKFAVLQTYGDTTHTLVEKMNYIGQFLPGYEAPAFMDPLLPKLPKCSLEMIDHIVGNQPDQEMVSASEWYLKNLQFHRFWSVDDTQVHTEYSSLRSIVVANYEESIKMPINEPAPGKKKSQIQEYVDYNGGAGVQHIALKTEDIITAIRHLRERGLEFLSVPSTYYKQLREKLKTAKIKVKENIDALEELKILVDYDEKGYLLQIFTKPVQDRPTLFLEVIQRHNHQGFGAGNFNSLFKAFEEEQNLRGNLTNMETNGVVPGM

SEQ ID NO: 770 - protein, 354 aa, Homo sapiens
MGFEPLAYRGLETGSREVVSHVIKQGKIVFVLSSALNPWNKEMGDHLVKHGDGVKDIAFEVEDCDYIVQKARERGAKIMREPWVEQDKFGKVKFAVLQTYGDTTHTLVEKMNYIGQFLPGYEAPAFMDPLLPKLPKCSLEMIDHIVGNQPDQEMVSASEWYLKNLQFHRFWSVDDTQVHTEYSSLRSIVVANYEESIKMPINEPAPGKKKSQIQEYVDYNGGAGVQHIALKTEDIITAIRHLRERGLEFLSVPSTYYKQLREKLKTAKIKVKENIDALEELKILVDYDEKGYLLQIFTKPVQDRPTLFLEVIQRHNHQGFGAGNFNSLFKAFEEEQNLRGNLTNMETNGVVPGM

SEQ ID NO: 771 - protein, 390 aa, Homo sapiens
YSDKGAKPERGRFLHFHSVTFWVGNAKQATSFYCSKMGFEPLAYRGLETGSREVVSHVIKQGKIVFVLSSALNPWNKEMGDHLVKHGDGVKDIAFEVEDCDYIVQKARERGAKIMREPWVEQDKFGKVKFAVLQTYGDTTHTLVEKMNYIGQFLPGYEAPAFMDPLLPKLPKCSLEMIDHIVGNQPDQEMVSASEWYLKNLQFHRFWSVDDTQVHTEYSSLRSIVVANYEESIKMPINEPAPGKKKSQIQEYVDYNGGAGVQHIALKTEDIITAIRHLRERGLEFLSVPSTYYKQLREKLKTAKIKVKENIDALEELKILVDYDEKGYLLQIFTKPVQDRPTLFLEVIQRHNHQGFGAGNFNSLFKAFEEEQNLRGNLTNMETNGVVPGM

SEQ ID NO: 772 - protein, 145 aa, Homo sapiens
MSTEGGGRRCQAQVSRRISFSASHRLYSKFLSDEENLKLFGKCNNPNGHGHNYKVVVTVHGEIDPATGMVMNLADLKKYMEEAIMQPLDHKNLDMDVPYFADVVSTTENVAVYIWDNLQKVLPVGVLYKVKVYETDNNIVVYKGE

SEQ ID NO: 773 - protein, 1427 aa, Homo sapiens
MHQRHPRARCPPLCVAGILACGFLLGCWGPSHFQQSCLQALEPQAVSSYLSPGAPLKGRPPSPGFQRQRQRQRRAAGGILHLELLVAVGPDVFQAHQEDTERYVLTNLNIGAELLRDPSLGAQFRVHLVKMVILTEPEGAPNITANLTSSLLSVCGWSQTINPEDDTDPGHADLVLYITRFDLELPDGNRQVRGVTQLGGACSPTWSCLITEDTGFDLGVTIAHEIGHSFGLEHDGAPGSGCGPSGHVMASDGAAPRAGLAWSPCSRRQLLSLLSAGRARCVWDPPRPQPGSAGHPPDAQPGLYYSANEQCRVAFGPKAVACTFAREHLDMCQALSCHTDPLDQSSCSRLLVPLLDGTECGVEKWCSKGRCRSLVELTPIAAVHGRWSSWGPRSPCSRSCGGGVVTRRRQCNNPRPAFGGRACVGADLQAEMCNTQACEKTQLEFMSQQCARTDGQPLRSSPGGASFYHWGAAVPHSQGDALCRHMCRAIGESFIMKRGDSFLDGTRCMPSGPREDGTLSLCVSGSCRTFGCDGRMDSQQVWDRCQVCGGDNSTCSPRKGSFTAGRAREYVTFLTVTPNLTSVYIANHRPLFTHLAVRIGGRYVVAGKMSISPNTTYPSLLEDGRVEYRVALTEDRLPRLEEIRIWGPLQEDADIQVYRRYGEEYGNLTRPDITFTYFQPKPRQAWVWAAVRGPCSVSCGAGLRWVNYSCLDQARKELVETVQCQGSQQPPAWPEACVLEPCPPYWAVGDFGPCSASCGGGLRERPVRCVEAQGSLLKTLPPARCRAGAQQPAVALETCNPQPCPARWEVSEPSSCTSAGGAGLALENETCVPGADGLEAPVTEGPGSVDEKLPAPEPCVGMSCPPGWGHLDATSAGEKAPSPWGSIRTGAQAAHVWTPAAGSCSVSCGRGLMELRFLCMDSALRVPVQEELCGLASKPGSRREVCQAVPCPARWQYKLAACSVSCGRGVVRRILYCARAHGEDDGEEILLDTQCQGLPRPEPQEACSLEPCPPRWKVMSLGPCSASCGLGTARRSVACVQLDQGQDVEVDEAACAALVRPEASVPCLIADCTYRWHVGTWMECSVSCGDGIQRRRDTCLGPQAQAPVPADFCQHLPKPVTVRGCWAGPCVGQGTPSLVPHEEAAAPGRTTATPAGASLEWSQARGLLFSPAPQPRRLLPGPQENSVQSSACGRQHLEPTGTIDMRGPGQADCAVAIGRPLGEVVTLRVLESSLNCSAGDMLLLWGRLTWRKMCRKLLDMTFSSKTNTLVVRQRCGRPGGGVLLRYGSQLAPETFYRECDMQLFGPWGEIVSPSLSPATSNAGGCRLFINVAPHARIAIHALATNMGAGTEGANASYILIRDTHSLRTTAFHGQQVLYWESESSQAEMEFSEGFLKAQASLRGQYWTLQSWVPEMQDPQSWKGKEGT

SEQ ID NO: 774 - protein, 1102 aa, Homo sapiens
MFQLPVNNLGSLRKARKTVKKILSDIGLEYCKEHIEDFKQFEPNDFYLKNTTWEDVGLWDPSLTKNQDYRTKPFCCSACPFSSKFFSAYKSHFRNVHSEDFENRILLNCPYCTFNADKKTLETHIKIFHAPNASAPSSSLSTFKDKNKNDGLKPKQADSVEQAVYYCKKCTYRDPLYEIVRKHIYREHFQHVAAPYIAKAGEKSLNGAVPLGSNAREESSIHCKRCLFMPKSYEALVQHVIEDHERIGYQVTAMIGHTNVVVPRSKPLMLIAPKPQDKKSMGLPPRIGSLASGNVRSLPSQQMVNRLSIPKPNLNSTGVNMMSSVHLQQNNYGVKSVGQGYSVGQSMRLGLGGNAPVSIPQQSQSVKQLLPSGNGRSYGLGSEQRSQAPARYSLQSANASSLSSGQLKSPSLSQSQASRVLGQSSSKPAAAATGPPPGNTSSTQKWKICTICNELFPENVYSVHFEKEHKAEKVPAVANYIMKIHNFTSKCLYCNRYLPTDTLLNHMLIHGLSCPYCRSTFNDVEKMAAHMRMVHIDEEMGPKTDSTLSFDLTLQQGSHTNIHLLVTTYNLRDAPAESVAYHAQNNPPVPPKPQPKVQEKADIPVKSSPQAAVPYKKDVGKTLCPLCFSILKGPISDALAHHLRERHQVIQTVHPVEKKLTYKCIHCLGVYTSNMTASTITLHLVHCRGVGKTQNGQDKTNAPSRLNQSPSLAPVKRTYEQMEFPLLKKRKLDDDSDSPSFFEEKPEEPVVLALDPKGHEDDSYEARKSFLTKYFNKQPYPTRREIEKLAASLWLWKSDIASHFSNKRKKCVRDCEKYKPGVLLGFNMKELNKVKHEMDFDAEWLFENHDEKDSRVNASKTADKKLNLGKEDDSSSDSFENLEEESNESGSPFDPVFEVEPKISNDNPEEHVLKVIPEDASESEEKLDQKEDGSKYETIHLTEEPTKLMHNASDSEVDQDDVVEWKDGASPSESGPGSQQVSDFEDNTCEMKPGTWSDESSQSEDARSSKPAAKKKATMQGDREQLKWKNSSYGKVEGFWSKDQSQWKNASENDERLSNPQIEWQNSTIDSEDGEQFDNMTDGVAEPMHGSLAGVKLSSQQA

SEQ ID NO: 775 - protein, 1102 aa, Homo sapiens; identical to SEQ ID NO: 774

SEQ ID NO: 776 - protein, 1102 aa, Homo sapiens; identical to SEQ ID NO: 774

SEQ ID NO: 777 - protein, 1102 aa, Homo sapiens; identical to SEQ ID NO: 774

SEQ ID NO: 778 - protein, 173 aa, Homo sapiens
MFQLPVNNLGSLRKARKTVKKILSDIGLEYCKEHIEDFKQFEPNDFYLKNTTWEDVGLWDPSLTKNQDYRTKPFCCSACPFSSKFFSAYKSHFRNVHSEDFENRILLNCPYCTFNADKKTLETHIKIFHAPNASAPSSSLSTFKDKNKNDGLKPKQADSVEQAVYYCKKCTYR

SEQ ID NO: 779 - protein, 146 aa, Homo sapiens
MVILTEPEGAPNITANLTSSLLSVCGWSQTINPEDDTDPGHADLVLYITRFDLELPDGNRQVRGVTQLGGACSPTWSCLITEDTGFDLGVTIAHEIGHRICARPSPATQTRWTKAAAAASSFLSWMGQNVAWRSGAPRVAAAPWWS

SEQ ID NO: 780 - protein, 1371 aa, Homo sapiens
MHQRHPRARCPPLCVAGILACGFLLGCWGPSHFQQSCLQALEPQAVSSYLSPGAPLKGRPPSPGFQRQRQRQRRAAGGILHLELLVAVGPDVFQAHQEDTERYVLTNLNIGAELLRDPSLGAQFRVHLVKMVILTEPEGAPNITANLTSSLLSVCGWSQTINPEDDTDPGHADLVLYITRFDLELPDGNRQVRGVTQLGGACSPTWSCLITEDTGFDLGVTIAHEIGHSFGLEHDGAPGSGCGPSGHVMASDGAAPRAGLAWSPCSRRQLLSLLSAGRARCVWDPPRPQPGSAGHPPDAQPGLYYSANEQCRVAFGPKAVACTFAREHLDMCQALSCHTDPLDQSSCSRLLVPLLDGTECGVEKWCSKGRCRSLVELTPIAAVHGRWSSWGPRSPCSRSCGGGVVTRRRQCNNPRPAFGGRACVGADLQAEMCNTQACEKTQLEFMSQQCARTDGQPLRSSPGGASFYHWGAAVPHSQGDALCRHMCRAIGESFIMKRGDSFLDGTRCMPSGPREDGTLSLCVSGSCRTFGCDGRMDSQQVWDRCQVCGGDNSTCSPRKGSFTAGRAREYVTFLTVTPNLTSVYIANHRPLFTHLAVRIGGRYVVAGKMSISPNTTYPSLLEDGRVEYRVALTEDRLPRLEEIRIWGPLQEDADIQVYRRYGEEYGNLTRPDITFTYFQPKPRQAWVWAAVRGPCSVSCGAGLRWVNYSCLDQARKELVETVQCQGSQQPPAWPEACVLEPCPPYWAVGDFGPCSASCGGGLRERPVRCVEAQGSLLKTLPPARCRAGAQQPAVALETCNPQPCPARWEVSEPSSCTSAGGAGLALENETCVPGADGLEAPVTEGPGSVDEKLPAPEPCVGMSCPPGWGHLDATSAGEKAPSPWGSIRTGAQAAHVWTPAAGSCSVSCGRGLMELRFLCMDSALRVPVQEELCGLASKPGSRREVCQAVPCPARWQYKLAACSVSCGRGVVRRILYCARAHGEDDGEEILLDTQCQGLPRPEPQEACSLEPCPPRWKVMSLGPCSASCGLGTARRSVACVQLDQGQDVEVDEAACAALVRPEASVPCLIADCTYRWHVGTWMECSVSCGDGIQRRRDTCLGPQAQAPVPADFCQHLPKPVTVRGCWAGPCVGQGACGRQHLEPTGTIDMRGPGQADCAVAIGRPLGEVVTLRVLESSLNCSAGDMLLLWGRLTWRKMCRKLLDMTFSSKTNTLVVRQRCGRPGGGVLLRYGSQLAPETFYRECDMQLFGPWGEIVSPSLSPATSNAGGCRLFINVAPHARIAIHALATNMGAGTEGANASYILIRDTHSLRTTAFHGQQVLYWESESSQAEMEFSEGFLKAQASLRGQYWTLQSWVPEMQDPQSWKGKEGT

SEQ ID NO: 781 - protein, 1340 aa, Homo sapiens
MHQRHPRARCPPLCVAGILACGFLLGCWGPSHFQQSCLQALEPQAVSSYLSPGAPLKGRPPSPGFQRQRQRQRRAAGGILHLELLVAVGPDVFQAHQEDTERYVLTNLNIGAELLRDPSLGAQFRVHLVKMVILTEPEGAPNITANLTSSLLSVCGWSQTINPEDDTDPGHADLVLYITRFDLELPDGNRQVRGVTQLGGACSPTWSCLITEDTGFDLGVTIAHEIGHSFGLEHDGAPGSGCGPSGHVMASDGAAPRAGLAWSPCSRRQLLSLLSANEQCRVAFGPKAVACTFAREHLDMCQALSCHTDPLDQSSCSRLLVPLLDGTECGVEKWCSKGRCRSLVELTPIAAVHGRWSSWGPRSPCSRSCGGGVVTRRRQCNNPRPAFGGRACVGADLQAEMCNTQACEKTQLEFMSQQCARTDGQPLRSSPGGASFYHWGAAVPHSQGDALCRHMCRAIGESFIMKRGDSFLDGTRCMPSGPREDGTLSLCVSGSCRTFGCDGRMDSQQVWDRCQVCGGDNSTCSPRKGSFTAGRAREYVTFLTVTPNLTSVYIANHRPLFTHLAVRIGGRYVVAGKMSISPNTTYPSLLEDGRVEYRVALTEDRLPRLEEIRIWGPLQEDADIQVYRRYGEEYGNLTRPDITFTYFQPKPRQAWVWAAVRGPCSVSCGAGLRWVNYSCLDQARKELVETVQCQGSQQPPAWPEACVLEPCPPYWAVGDFGPCSASCGGGLRERPVRCVEAQGSLLKTLPPARCRAGAQQPAVALETCNPQPCPARWEVSEPSSCTSAGGAGLALENETCVPGADGLEAPVTEGPGSVDEKLPAPEPCVGMSCPPGWGHLDATSAGEKAPSPWGSIRTGAQAAHVWTPAAGSCSVSCGRGLMELRFLCMDSALRVPVQEELCGLASKPGSRREVCQAVPCPARWQYKLAACSVSCGRGVVRRILYCARAHGEDDGEEILLDTQCQGLPRPEPQEACSLEPCPPRWKVMSLGPCSASCGLGTARRSVACVQLDQGQDVEVDEAACAALVRPEASVPCLIADCTYRWHVGTWMECSVSCGDGIQRRRDTCLGPQAQAPVPADFCQHLPKPVTVRGCWAGPCVGQGACGRQHLEPTGTIDMRGPGQADCAVAIGRPLGEVVTLRVLESSLNCSAGDMLLLWGRLTWRKMCRKLLDMTFSSKTNTLVVRQRCGRPGGGVLLRYGSQLAPETFYRECDMQLFGPWGEIVSPSLSPATSNAGGCRLFINVAPHARIAIHALATNMGAGTEGANASYILIRDTHSLRTTAFHGQQVLYWESESSQAEMEFSEGFLKAQASLRGQYWTLQSWVPEMQDPQSWKGKEGT

SEQ ID NO: 782 - protein, 223 aa, Homo sapiens
MRGPGQADCAVAIGRPLGEVVTLRVLESSLNCSAGDMLLLWGRLTWRKMCRKLLDMTFSSKTNTLVVRQRCGRPGGGVLLRYGSQLAPETFYRECDMQLFGPWGEIVSPSLSPATSNAGGCRLFINVAPHARIAIHALATNMGAGTEGANASYILIRDTHSLRTTAFHGQQVLYWESESSQAEMEFSEGFLKAQASLRGQYWTLQSWVPEMQDPQSWKGKEGT

SEQ ID NO: 783 - protein, 344 aa, Homo sapiens
MHQRHPRARCPPLCVAGILACGFLLGCWGPSHFQQSCLQALEPQAVSSYLSPGAPLKGRPPSPGFQRQRQRQRRAAGGILHLELLVAVGPDVFQAHQEDTERYVLTNLNIGAELLRDPSLGAQFRVHLVKMVILTEPEGAPNITANLTSSLLSVCGWSQTINPEDDTDPGHADLVLYITRFDLELPDGNRQVRGVTQLGGACSPTWSCLITEDTGFDLGVTIAHEIGHSFGLEHDGAPGSGCGPSGHVMASDGAAPRAGLAWSPCSRRQLLSLLRPVPPSPLPLLATHLCAGRSLSLGPSQEPAPGGGRGPRTPVPTHKRPRFQTLPSSCPLLRPASSRCTPRD

SEQ ID NO: 784 - protein, 276 aa, Homo sapiens
MHQRHPRARCPPLCVAGILACGFLLGCWGPSHFQQSCLQALEPQAVSSYLSPGAPLKGRPPSPGFQRQRQRQRRAAGGILHLELLVAVGPDVFQAHQEDTERYVLTNLNIGAELLRDPSLGAQFRVHLVKMVILTEPEGAPNITANLTSSLLSVCGWSQTINPEDDTDPGHADLVLYITRFDLELPDGNRQVRGVTQLGGACSPTWSCLITEDTGFDLGVTIAHEIGHRICARPSPATQTRWTKAAAAASSFLSWMGQNVAWRSGAPRVAAAPWWS

SEQ ID NO: 785 - protein, 1427 aa, Homo sapiens; identical to SEQ ID NO: 773

SEQ ID NO: 786 - protein, 364 aa, Homo sapiens
MDMCQALSCHTDPLDQSSCSRLLVPLLDGTECGVEKWCSKGRCRSLVELTPIAAVHGRWSSWGPRSPCSRSCGGGVVTRRRQCNNPRPAFGGRACVGADLQAEMCNTQACEKTQLEFMSQQCARTDGQPLRSSPGGASFYHWGAAVPHSQGDALCRHMCRAIGESFIMKRGDSFLDGTRCMPSGPREDGTLSLCVSGSCRTFGCDGRMDSQQVWDRCQVCGGDNSTCSPRKGSFTAGRAREYVTFLTVTPNLTSVYIANHRPLFTHLAVRIGGRYVVAGKMSISPNTTYPSLLEDGRVEYRVALTEDRLPRLEEIRIWGPLQEDADIQVGGVRAQLMHISWWSRPGLGERDLCARGRWPGGSSD

SEQ ID NO: 787 - protein, 364 aa, Homo sapiens
MPYQYPALTPEQKKELSDIAHRIVAPGKGILAADESTGSIAKRLQSIGTENTEENRRFYRQLLLTADDRVNPCIGGVILFHETLYQKADDGRPFPQVIKSKGGVVGIKVDKGVVPLAGTNGETTTQGLDGLSERCAQYKKDGADFAKWRCVLKIGEHTPSALAIMENANVLARYASICQQNGIVPIVEPEILPDGDHDLKRCQYVTEKVLAAVYKALSDHHIYLEGTLLKPNMVTPGHACTQKFSHEEIAMATVTALRRTVPPAVTGITFLSGGQSEEEASINLNAINKCPLLKPWALTFSYGRALQASALKAWGGKKENLKAAQEEYVKRALANSLACQGKYTPSGQAGAAASESLFVSNHAY

SEQ ID NO: 788 - protein, 364 aa, Homo sapiens; identical to SEQ ID NO: 787

SEQ ID NO: 789 - protein, 418 aa, Homo sapiens
MARRKPEGSSFNMTHLSMAMAFSFPPVASGQLHPQLGNTQHQTELGKELATTSTMPYQYPALTPEQKKELSDIAHRIVAPGKGILAADESTGSIAKRLQSIGTENTEENRRFYRQLLLTADDRVNPCIGGVILFHETLYQKADDGRPFPQVIKSKGGVVGIKVDKGVVPLAGTNGETTTQGLDGLSERCAQYKKDGADFAKWRCVLKIGEHTPSALAIMENANVLARYASICQQNGIVPIVEPEILPDGDHDLKRCQYVTEKVLAAVYKALSDHHIYLEGTLLKPNMVTPGHACTQKFSHEEIAMATVTALRRTVPPAVTGITFLSGGQSEEEASINLNAINKCPLLKPWALTFSYGRALQASALKAWGGKKENLKAAQEEYVKRALANSLACQGKYTPSGQAGAAASESLFVSNHAY

SEQ ID NO: 790 - protein, 364 aa, Homo sapiens; identical to SEQ ID NO: 787

SEQ ID NO: 791 - protein, 364 aa, Homo sapiens; identical to SEQ ID NO: 787

SEQ ID NO: 792 - protein, 418 aa, Homo sapiens; identical to SEQ ID NO: 789

SEQ ID NO: 793 - protein, 364 aa, Homo sapiens; identical to SEQ ID NO: 787

SEQ ID NO: 794 - protein, 447 aa, Homo sapiens
MSASKIPLFKMKDLILILCLLEMSFAVPFFPQQSGTPGMASLSLETMRQLGSLQRLNTLSQYSRYGFGKSFNSLWMHGLLPPHSSLPWMRPREHETQQYEYSLPVHPPPLPSQPSLKPQQPGLKPFLQSAAATTNQATALKEALQPPIHLGHLPLQEGELPLVQQQVAPSDKPPKPELPGVDFADPQGPSLPGMDFPDPQGPSLPGLDFADPQGSTIFQIARLISHGPMPQNKQSPLYPGMLYVPFGANQLNAPARLGIMSSEEVAGGREDPMAYGAMFPGFGGMRPGFEGMPHNPAMGGDFTLEFDSPVAATKGPENEEGGAQGSPMPEANPDNLENPAFLTELEPAPHAGLLALPKDDIPGLPRSPSGKMKGLPSVTPAAADPLMTPELADVYRTYDADMTTSVDFQEEATMDTTMAPNSLQTSMPGNKAQEPEMMHDAWHFQEP

SEQ ID NO: 795 - protein, 432 aa, Homo sapiens
MSASKIPLFKMKDLILILCLLEMSFAVPFFPQQSGTPGMASLSLETMRQLGSLQRLNTLSQYSRYGFGKSFNSLWMHGLLPPHSSLPWMRPREHETQQPSLKPQQPGLKPFLQSAAATTNQATALKEALQPPIHLGHLPLQEGELPLVQQQVAPSDKPPKPELPGVDFADPQGPSLPGMDFPDPQGPSLPGLDFADPQGSTIFQIARLISHGPMPQNKQSPLYPGMLYVPFGANQLNAPARLGIMSSEEVAGGREDPMAYGAMFPGFGGMRPGFEGMPHNPAMGGDFTLEFDSPVAATKGPENEEGGAQGSPMPEANPDNLENPAFLTELEPAPHAGLLALPKDDIPGLPRSPSGKMKGLPSVTPAAADPLMTPELADVYRTYDADMTTSVDFQEEATMDTTMAPNSLQTSMPGNKAQEPEMMHDAWHFQEP

SEQ ID NO: 796 - protein, 446 aa, Homo sapiens [sequence omitted]

SEQ ID NO: 797 - protein, 175 aa, Homo sapiens
MGTWILFACLLGAAFAMPVLTPLKWYQSIRPPYPSYGYEPMGGWLHHQIIPVLSQQHPPTHTLQPHHHIPVVPAQQPVIPQQPMMPVPGQHSMTPIQHHQPNLPPPAQQPYQPQPVQPQPHQPMQPQPPVHPMQPLPPQPPLPPMFPMQPLPPMLPDLTLEAWPSTDKTKREEVD

SEQ ID NO: 798 - protein, 205 aa, Homo sapiens
MGTWILFACLLGAAFAMPLPPHPGHPGYINFSYENSHSQAINVDRTALVLTPLKWYQSIRPPYPSYGYEPMGGWLHHQIIPVLSQQHPPTHTLQPHHHIPVVPAQQPVIPQQPMMPVPGQHSMTPIQHHQPNLPPPAQQPYQPQPVQPQPHQPMQPQPPVHPMQPLPPQPPLPPMFPMQPLPPMLPDLTLEAWPSTDKTKREEVD

SEQ ID NO: 799 - protein, 191 aa, Homo sapiens
MGTWILFACLLGAAFAMPLPPHPGHPGYINFSYEVLTPLKWYQSIRPPYPSYGYEPMGGWLHHQIIPVLSQQHPPTHTLQPHHHIPVVPAQQPVIPQQPMMPVPGQHSMTPIQHHQPNLPPPAQQPYQPQPVQPQPHQPMQPQPPVHPMQPLPPQPPLPPMFPMQPLPPMLPDLTLEAWPSTDKTKREEVD

SEQ ID NO: 800 - protein, 192 aa, Homo sapiens
MGTWILFACLVGAAFAMPLPPHPGHPGYINFSYEVLTPLKWYQSMIRPPYSSYGYEPMGGWLHHQIIPVVSQQHPLTHTLQSHHHIPVVPAQQPRVRQQALMPVPGQQSMTPTQHHQPNLPLPAQQPFQPQPVQPQPHQPMQPQPPVQPMQPLLPQPPLPPMFPLRPLPPILPDLHLEAWPATDKTKQEEVD

SEQ ID NO: 801 - protein, 206 aa, Homo sapiens
MGTWILFACLVGAAFAMPLPPHPGHPGYINFSYENSHSQAINVDRIALVLTPLKWYQSMIRPPYSSYGYEPMGGWLHHQIIPVVSQQHPLTHTLQSHHHIPVVPAQQPRVRQQALMPVPGQQSMTPTQHHQPNLPLPAQQPFQPQPVQPQPHQPMQPQPPVQPMQPLLPQPPLPPMFPLRPLPPILPDLHLEAWPATDKTKQEEVD

SEQ ID NO: 802 - protein, 205 aa, Homo sapiens
MGTWILFACLVGAAFAMPLPPHPGHPGYINFSYENSHSQAINVDRIALVLTPLKWYQSMIRPPYSSYGYEPMGGWLHHQIIPVVSQQHPLTHTLQSHHHIPVVPAQQPRVRQQALMPVPGQQSMTPTQHHQPNLPLPAQQPFQPQPVQPQPHQPMQPQPPVQPMQPLLPQPPLPPMFPLRPLPPILPDLHLEAWPATDKTKQEEV

SEQ ID NO: 803 - protein, 1532 aa, Homo sapiens
MGHSKQIRILLLNEMEKLEKTLFRLEQGYELQFRLGPTLQGKAVTVYTNYPFPGETFNREKFRSLDWENPTEREDDSDKYCKLNLQQSGSFQYYFLQGNEKSGGGYIVVDPILRVGADNHVLPLDCVTLQTFLAKCLGPFDEWESRLRVAKESGYNMIHFTPLQTLGLSRSCYSLANQLELNPDFSRPNRKYTWNDVGQLVEKLKKEWNVICITDVVYNHTAANSKWIQEHPECAYNLVNSPHLKPAWVLDRALWRFSCDVAEGKYKEKGIPALIENDHHMNSIRKIIWEDIFPKLKLWEFFQVDVNKAVEQFRRLLTQENRRVTKSDPNQHLTIIQDPEYRRFGCTVDMNIALTTFIPHDKGPAAIEECCNWFHKRMEELNSEKHRLINYHQEQAVNCLLGNVFYERLAGHGPKLGPVTRKHPLVTRYFTFPFEEIDFSMEESMIHLPNKACFLMAHNGWVMGDDPLRNFAEPGSEVYLRRELICWGDSVKLRYGNKPEDCPYLWAHMKKYTEITATYFQGVRLDNCHSTPLHVAEYMLDAARNLQPNLYVVAELFTGSEDLDNVFVTRLGISSLIREAMSAYNSHEEGRLVYRYGGEPVGSFVQPCLRPLMPAIAHALFMDITHDNECPIVHRSAYDALPSTTIVSMACCASGSTRGYDELVPHQISVVSEERFYTKWNPEALPSNTGEVNFQSGIIAARCAISKLHQELGAKGFIQVYVDQVDEDIVAVTRHSPSIHQSVVAVSRTAFRNPKTSFYSKEVPQMCIPGKIEEVVLEARTIERNTKPYRKDENSINGTPDITVEIREHIQLNESKIVKQAGVATKGPNEYIQEIEFENLSPGSVIIFRVSLDPHAQVAVGILRNHLTQFSPHFKSGSLAVDNADPILKIPFASLASRLTLAELNQILYRCESEEKEDGGGCYDIPNWSALKYAGLQGLMSVLAEIRPKNDLGHPFCNNLRSGDWMIDYVSNRLISRSGTIAEVGKWLQAMFFYLKQIPRYLIPCYFDAILIGAYTTLLDTAWKQMSSFVQNGSTFVKHLSLGSVQLCGVGKFPSLPILSPALMDVPYRLNEITKEKEQCCVSLAAGLPHFSSGIFRCWGRDTFIALRGILLITGRYVEARNIILAFAGTLRHGLIPNLLGEGIYARYNCRDAVWWWLQCIQDYCKMVPNGLDILKCPVSRMYPTDDSAPLPAGTLDQPLFEVIQEAMQKHMQGIQFRERNAGPQIDRNMKDEGFNITAGVDEETGFVYGGNRFNCGTWMDKMGESDRARNRGIPATPRDGSAVEIVGLSKSAVRWLLELSKKNIFPYHEVTVKRHGKAIKVSYDEWNRKIQDNFEKLFHVSEDPSDLNEKHPNLVHKRGIYKDSYGASSPWCDYQLRPNFTIAMVVAPELFTTEKAWKALEIAEKKLLGPLGMKTLDPDDMVYCGIYDNALDNDNYNLAKGFNYHQGPEWLWPIGYFLRAKLYFSRLMGPETTAKTIVLVKNVLSRHYVHLERSPWKGLPELTNENAQYCPFSCETQAWSIATILETLYDL

SEQ ID NO: 804 - protein, 1516 aa, Homo sapiens
MAPILSINLFIGYELQFRLGPTLQGKAVTVYTNYPFPGETFNREKFRSLDWENPTEREDDSDKYCKLNLQQSGSFQYYFLQGNEKSGGGYIVVDPILRVGADNHVLPLDCVTLQTFLAKCLGPFDEWESRLRVAKESGYNMIHFTPLQTLGLSRSCYSLANQLELNPDFSRPNRKYTWNDVGQLVEKLKKEWNVICITDVVYNHTAANSKWIQEHPECAYNLVNSPHLKPAWVLDRALWRFSCDVAEGKYKEKGIPALIENDHHMNSIRKIIWEDIFPKLKLWEFFQVDVNKAVEQFRRLLTQENRRVTKSDPNQHLTIIQDPEYRRFGCTVDMNIALTTFIPHDKGPAAIEECCNWFHKRMEELNSEKHRLINYHQEQAVNCLLGNVFYERLAGHGPKLGPVTRKHPLVTRYFTFPFEEIDFSMEESMIHLPNKACFLMAHNGWVMGDDPLRNFAEPGSEVYLRRELICWGDSVKLRYGNKPEDCPYLWAHMKKYTEITATYFQGVRLDNCHSTPLHVAEYMLDAARNLQPNLYVVAELFTGSEDLDNVFVTRLGISSLIREAMSAYNSHEEGRLVYRYGGEPVGSFVQPCLRPLMPAIAHALFMDITHDNECPIVHRSAYDALPSTTIVSMACCASGSTRGYDELVPHQISVVSEERFYTKWNPEALPSNTGEVNFQSGIIAARCAISKLHQELGAKGFIQVYVDQVDEDIVAVTRHSPSIHQSVVAVSRTAFRNPKTSFYSKEVPQMCIPGKIEEVVLEARTIERNTKPYRKDENSINGTPDITVEIREHIQLNESKIVKQAGVATKGPNEYIQEIEFENLSPGSVIIFRVSLDPHAQVAVGILRNHLTQFSPHFKSGSLAVDNADPILKIPFASLASRLTLAELNQILYRCESEEKEDGGGCYDIPNWSALKYAGLQGLMSVLAEIRPKNDLGHPFCNNLRSGDWMIDYVSNRLISRSGTIAEVGKWLQAMFFYLKQIPRYLIPCYFDAILIGAYTTLLDTAWKQMSSFVQNGSTFVKHLSLGSVQLCGVGKFPSLPILSPALMDVPYRLNEITKEKEQCCVSLAAGLPHFSSGIFRCWGRDTFIALRGILLITGRYVEARNIILAFAGTLRHGLIPNLLGEGIYARYNCRDAVWWWLQCIQDYCKMVPNGLDILKCPVSRMYPTDDSAPLPAGTLDQPLFEVIQEAMQKHMQGIQFRERNAGPQIDRNMKDEGFNITAGVDEETGFVYGGNRFNCGTWMDKMGESDRARNRGIPATPRDGSAVEIVGLSKSAVRWLLELSKKNIFPYHEVTVKRHGKAIKVSYDEWNRKIQDNFEKLFHVSEDPSDLNEKHPNLVHKRGIYKDSYGASSPWCDYQLRPNFTIAMVVAPELFTTEKAWKALEIAEKKLLGPLGMKTLDPDDMVYCGIYDNALDNDNYNLAKGFNYHQGPEWLWPIGYFLRAKLYFSRLMGPETTAKTIVLVKNVLSRHYVHLERSPWKGLPELTNENAQYCPFSCETQAWSIATILETLYDL

SEQ ID NO: 805 - protein, 1515 aa, Homo sapiens
MSLLTCAFYLGYELQFRLGPTLQGKAVTVYTNYPFPGETFNREKFRSLDWENPTEREDDSDKYCKLNLQQSGSFQYYFLQGNEKSGGGYIVVDPILRVGADNHVLPLDCVTLQTFLAKCLGPFDEWESRLRVAKESGYNMIHFTPLQTLGLSRSCYSLANQLELNPDFSRPNRKYTWNDVGQLVEKLKKEWNVICITDVVYNHTAANSKWIQEHPECAYNLVNSPHLKPAWVLDRALWRFSCDVAEGKYKEKGIPALIENDHHMNSIRKIIWEDIFPKLKLWEFFQVDVNKAVEQFRRLLTQENRRVTKSDPNQHLTIIQDPEYRRFGCTVDMNIALTTFIPHDKGPAAIEECCNWFHKRMEELNSEKHRLINYHQEQAVNCLLGNVFYERLAGHGPKLGPVTRKHPLVTRYFTFPFEEIDFSMEESMIHLPNKACFLMAHNGWVMGDDPLRNFAEPGSEVYLRRELICWGDSVKLRYGNKPEDCPYLWAHMKKYTEITATYFQGVRLDNCHSTPLHVAEYMLDAARNLQPNLYVVAELFTGSEDLDNVFVTRLGISSLIREAMSAYNSHEEGRLVYRYGGEPVGSFVQPCLRPLMPAIAHALFMDITHDNECPIVHRSAYDALPSTTIVSMACCASGSTRGYDELVPHQISVVSEERFYTKWNPEALPSNTGEVNFQSGIIAARCAISKLHQELGAKGFIQVYVDQVDEDIVAVTRHSPSIHQSVVAVSRTAFRNPKTSFYSKEVPQMCIPGKIEEVVLEARTIERNTKPYRKDENSINGTPDITVEIREHIQLNESKIVKQAGVATKGPNEYIQEIEFENLSPGSVIIFRVSLDPHAQVAVGILRNHLTQFSPHFKSGSLAVDNADPILKIPFASLASRLTLAELNQILYRCESEEKEDGGGCYDIPNWSALKYAGLQGLMSVLAEIRPKNDLGHPFCNNLRSGDWMIDYVSNRLISRSGTIAEVGKWLQAMFFYLKQIPRYLIPCYFDAILIGAYTTLLDTAWKQMSSFVQNGSTFVKHLSLGSVQLCGVGKFPSLPILSPALMDVPYRLNEITKEKEQCCVSLAAGLPHFSSGIFRCWGRDTFIALRGILLITGRYVEARNIILAFAGTLRHGLIPNLLGEGIYARYNCRDAVWWWLQCIQDYCKMVPNGLDILKCPVSRMYPTDDSAPLPAGTLDQPLFEVIQEAMQKHMQGIQFRERNAGPQIDRNMKDEGFNITAGVDEETGFVYGGNRFNCGTWMDKMGESDRARNRGIPATPRDGSAVEIVGLSKSAVRWLLELSKKNIFPYHEVTVKRHGKAIKVSYDEWNRKIQDNFEKLFHVSEDPSDLNEKHPNLVHKRGIYKDSYGASSPWCDYQLRPNFTIAMVVAPELFTTEKAWKALEIAEKKLLGPLGMKTLDPDDMVYCGIYDNALDNDNYNLAKGFNYHQGPEWLWPIGYFLRAKLYFSRLMGPETTAKTIVLVKNVLSRHYVHLERSPWKGLPELTNENAQYCPFSCETQAWSIATILETLYDL

SEQ ID NO: 806 - protein, 1532 aa, Homo sapiens; identical to SEQ ID NO: 803

SEQ ID NO: 807 - protein, 1516 aa, Homo sapiens; identical to SEQ ID NO: 804

SEQ ID NO: 808 - protein, 1532 aa, Homo sapiens; identical to SEQ ID NO: 803

SEQ ID NO: 809 - protein, 1532 aa, Homo sapiens; identical to SEQ ID NO: 803

SEQ ID NO: 810 - protein, 223 aa, Homo sapiens
MNKPLLWISVLTSLLEAFAHTDLSGKVFVFPRESVTDHVNLITPLEKPLQNFTLCFRAYSDLSRAYSLFSYNTQGRDNELLVYKERVGEYSLYIGRHKVTSKVIEKFPAPVHICVSWESSSGIAEFWINGTPLVKKGLRQGYFVEAQPKIVLGQEQDSYGGKFDRSQSFVGEIGDLYMWDSVLPPENILSAYQGTPLPANILDWQALNYEIRGYVIIKPLVWV

SEQ ID NO: 811 - protein, 805 aa, Homo sapiens [sequence omitted]

SEQ ID NO: 812 - protein, 805 aa, Homo sapiens [sequence omitted]

SEQ ID NO: 813 - protein, 267 aa, Homo sapiens
MKAAVLTLAVLFLTGSQARHFWQQDEPPQSPWDRVKDLATVYVDVLKDSGRDYVSQFEGSALGKQLNLKLLDNWDSVTSTFSKLREQLGPVTQEFWDNLEKETEGLRQEMSKDLEEVKAKVQPYLDDFQKKWQEEMELYRQKVEPLRAELQEGARQKLHELQEKLSPLGEEMRDRARAHVDALRTHLAPYSDELRQCLAARLEALKENGGARLAEYHAKATEHLSTLSEKAKPALEDLRQGLLPVLESFKVSFLSALEEYTKKLNTQ

SEQ ID NO: 814 - protein, 267 aa, Homo sapiens
MKAAVLTLAVLFLTGSQARHFWQQDEPPQSPWDRVKDLATVYVDVLKDSGRDYVSQFEGSALGKQLNLKLLDNWDSVTSTFSKLREQLGPVTQEFWDNLEKETEGLRQEMSKDLEEVKAKVQPYLDDFQKKWQEEMELYRQKVEPLRAELQEGARQKLHELQEKLSPLGEEMRDCARAHVDALRTHLAPYSDELRQRLAARLEALKENGGARLAEYHAKATEHLSTLSEKAKPALEDLRQGLLPVLESFKVSFLSALEEYTKKLNTQ

SEQ ID NO: 815 - protein, 267 aa, Homo sapiens
MKAAVLTLAVLFLTGSQARHFWQQDEPPQSPWDRVKDLATVYVDVLKDSGRDYVSQFEGSALGKQLNLKLLDNWDSVTSTFSKLREQLGPVTQEFWDNLEKETEGLRQEMSKDLEEVKAKVQPYLDDFQKKWQEEMELYRQKVEPLRAELQEGARQKLHELQEKLSPLGEEMRDRARAHVDALRTHLAPYSDELRQRLAARLEALKENGGARLAEYHAKATEHLSTLSEKAKPALEDLRQGLLPVLESFKVSFLSALEEYTKKLNTQ

SEQ ID NO: 816 - protein, 267 aa, Homo sapiens; identical to SEQ ID NO: 815

SEQ ID NO: 817 - protein, 267 aa, Homo sapiens; identical to SEQ ID NO: 815

SEQ ID NO: 818 - protein, 267 aa, Homo sapiens; identical to SEQ ID NO: 815

SEQ ID NO: 819 - protein, 4563 aa, Homo sapiens
MDPPRPALLALLALPALLLLLLAGARAEEEMLENVSLVCPKDATRFKHLRKYTYNYEAESSSGVPGTADSRSATRINCKVELEVPQLCSFILKTSQCTLKEVYGFNPEGKALLKKTKNSEEFAAAMSRYELKLAIPEGKQVFLYPEKDEPTYILNIKRGIISALLVPPETEEAKQVLFLDTVYGNCSTHFTVKTRKGNVATEISTERDLGQCDRFKPIRTGISPLALIKGMTRPLSTLISSSQSCQYTLDAKRKHVAEAICKEQHLFLPFSYKNKYGMVAQVTQTLKLEDTPKINSRFFGEGTKKMGLAFESTKSTSPPKQAEAVLKTLQELKKLTISEQNIQRANLFNKLVTELRGLSDEAVTSLLPQLIEVSSPITLQALVQCGQPQCSTHILQWLKRVHANPLLIDVVTYLVALIPEPSAQQLREIFNMARDQRSRATLYALSHAVNNYHKTNPTGTQELLDIANYLMEQIQDDCTGDEDYTYLILRVIGNMGQTMEQLTPELKSSILKCVQSTKPSLMIQKAAIQALRKMEPKDKDQEVLLQTFLDDASPGDKRLAAYLMLMRSPSQADINKIVQILPWEQNEQVKNFVASHIANILNSEELDIQDLKKLVKEALKESQLPTVMDFRKFSRNYQLYKSVSLPSLDPASAKIEGNLIFDPNNYLPKESMLKTTLTAFGFASADLIEIGLEGKGFEPTLEALFGKQGFFPDSVNKALYWVNGQVPDGVSKVLVDHFGYTKDDKHEQDMVNGIMLSVEKLIKDLKSKEVPEARAYLRILGEELGFASLHDLQLLGKLLLMGARTLQGIPQMIGEVIRKGSKNDFFLHYIFMENAFELPTGAGLQLQISSSGVIAPGAKAGVKLEVANMQAELVAKPSVSVEFVTNMGIIIPDFARSGVQMNTNFFHESGLEAHVALKAGKLKFIIPSPKRPVKLLSGGNTLHLVSTTKTEVIPPLIENRQSWSVCKQVFPGLNYCTSGAYSNASSTDSASYYPLTGDTRLELELRPTGEIEQYSVSATYELQREDRALVDTLKFVTQAEGAKQTEATMTFKYNRQSMTLSSEVQIPDFDVDLGTILRVNDESTEGKTSYRLTLDIQNKKITEVALMGHLSCDTKEERKIKGVISIPRLQAEARSEILAHWSPAKLLLQMDSSATAYGSTVSKRVAWHYDEEKIEFEWNTGTNVDTKKMTSNFPVDLSDYPKSLHMYANRLLDHRVPQTDMTFRHVGSKLIVAMSSWLQKASGSLPYTQTLQDHLNSLKEFNLQNMGLPDFHIPENLFLKSDGRVKYTLNKNSLKIEIPLPFGGKSSRDLKMLETVRTPALHFKSVGFHLPSREFQVPTFTIPKLYQLQVPLLGVLDLSTNVYSNLYNWSASYSGGNTSTDHFSLRARYHMKADSVVDLLSYNVQGSGETTYDHKNTFTLSYDGSLRHKFLDSNIKFSHVEKLGNNPVSKGLLIFDASSSWGPQMSASVHLDSKKKQHLFVKEVKIDGQFRVSSFYAKGTYGLSCQRDPNTGRLNGESNLRFNSSYLQGTNQITGRYEDGTLSLTSTSDLQSGIIKNTASLKYENYELTLKSDTNGKYKNFATSNKMDMTFSKQNALLRSEYQADYESLRFFSLLSGSLNSHGLELNADILGTDKINSGAHKATLRIGQDGISTSATTNLKCSLLVLENELNAELGLSGASMKLTTNGRFREHNAKFSLDGKAALTELSLGSAYQAMILGVDSKNIFNFKVSQEGLKLSNDMMGSYAEMKFDHTNSLNIAGLSLDFSSKLDNIYSSDKFYKQTVNLQLQPYSLVTTLNSDLKYNALDLTNNGKLRLEPLKLHVAGNLKGAYQNNEIKHIYAISSAALSASYKADTVAKVQGVEFSHRLNTDIAGLASAIDMSTNYNSDSLHFSNVFRSVMAPFTMTIDAHTNGNGKLALWGEHTGQLYSKFLLKAEPLAFTFSHDYKGSTSHHLVSRKSISAALEHKVSALLTPAEQTGTWKLKTQFNNNEYSQDLDAYNTKDKIGVELTGRTLADLTLLDSPIKVPLLLSEPINIIDALEMRDAVEKPQEFTIVAFVKYDKNQDVHSINLPFFETLQEYFERNRQTIIVVLENVQRNLKHINIDQFVRKYRAALGKLPQQANDYLNSFNWERQVSHAKEKLTALTKKYRITENDIQIALDDAKINFNEKLSQLQTYMIQFDQYIKDSYDLHDLKIAIANIIDEIIEKLKSLDEHYHIRVNLVKTIHDLHLFIENIDFNKSGSSTASWIQNVDTKYQIRIQIQEKLQQLKRHIQNIDIQHLAGKLKQHIEAIDVRVLLDQLGTTISFERINDILEHVKHFVINLIGDFEVAEKINAFRAKVHELIERYEVDQQIQVLMDKLVELAHQYKLKETIQKLSNVLQQVKIKDYFEKLVGFIDDAVKKLNELSFKTFIEDVNKFLDMLIKKLKSFDYHQFVDETNDKIREVTQRLNGEIQALELPQKAEALKLFLEETKATVAVYLESLQDTKITLIINWLQEALSSASLAHMKAKFRETLEDTRDRMYQMDIQQELQRYLSLVGQVYSTLVTYISDWWTLAAKNLTDFAEQYSIQDWAKRMKALVEQGFTVPEIKTILGTMPAFEVSLQALQKATFQTPDFIVPLTDLRIPSVQINFKDLKNIKIPSRFSTPEFTILNTFHIPSFTIDFVEMKVKIIRTIDQMLNSELQWPVPDIYLRDLKVEDIPLARITLPDFRLPEIAIPEFIIPTLNLNDFQVPDLHIPEFQLPHISHTIEVPTFGKLYSILKIQSPLFTLDANADIGNGTTSANEAGIAASITAKGESKLEVLNFDFQANAQLSNPKINPLALKESVKFSSKYLRTEHGSEMLFFGNAIEGKSNTVASLHTEKNTLELSNGVIVKINNQLTLDSNTKYFHKLNIPKLDFSSQADLRNEIKTLLKAGHIAWTSSGKGSWKWACPRFSDEGTHESQISFTIEGPLTSFGLSNKINSKHLRVNQNLVYESGSLNFSKLEIQSQVDSQHVGHSVLTAKGMALFGEGKAEFTGRHDAHLNGKVIGTLKNSLFFSAQPFEITASTNNEGNLKVRFPLRLTGKIDFLNNYALFLSPSAQQASWQVSARFNQYKYNQNFSAGNNENIMEAHVGINGEANLDFLNIPLTIPEMRLPYTIITTPPLKDFSLWEKTGLKEFLKTTKQSFDLSVKAQYKKNKHRHSITNPLAVLCEFISQSIKSFDRHFEKNRNNALDFVTKSYNETKIKFDKYKAEKSHDELPRTFQIPGYTVPVVNVEVSPFTIEMSAFGYVFPKAVSMPSFSILGSDVRVPSYTLILPSLELPVLHVPRNLKLSLPDFKELCTISHIFIPAMGNITYDFSFKSSVITLNTNAELFNQSDIVAHLLSSSSSVIDALQYKLEGTTRLTRKRGLKLATALSLSNKFVEGSHNSTVSLTTKNMEVSVATTTKAQIPILRMNFKQELNGNTKSKPTVSSSMEFKYDFNSSMLYSTAKGAVDHKLSLESLTSYFSIESSTKGDVKGSVLSREYSGTIASEANTYLNSKSTRSSVKLQGTSKIDDIWNLEVKENFAGEATLQRIYSLWEHSTKNHLQLEGLFFTNGEHTSKATLELSPWQMSALVQVHASQPSSFHDFPDLGQEVALNANTKNQKIRWKNEVRIHSGSFQSQVELSNDQEKAHLDIAGSLEGHLRFLKNIILPVYDKSLWDFLKLDVTTSIGRRQHLRVSTAFVYTKNPNGYSFSIPVKVLADKFIIPGLKLNDLNSVLVMPTFHVPFTDLQVPSCKLDFREIQIYKKLRTSSFALNLPTLPEVKFPEVDVLTKYSQPEDSLIPFFEITVPESQLTVSQFTLPKSVSDGIAALDLNAVANKIADFELPTIIVPEQTIEIPSIKFSVPAGIVIPSFQALTARFEVDSPVYNATWSASLKNKADYVETVLDSTCSSTVQFLEYELNVLGTHKIEDGTLASKTKGTFAHRDFSAEYEEDGKYEGLQEWEGKAHLNIKSPAFTDLHLRYQKDKKGISTSAASPAVGTVGMDMDEDDDFSKWNFYYSPQSSPDKKLTIFKTELRVRESDEETQIKVNWEEEAASGLLTSLKDNVPKATGVLYDYVNKYHWEHTGLTLREVSSKLRRNLQNNAEWVYQGAIRQIDDIDVRFQKAASGTTGTYQEWKDKAQNLYQELLTQEGQASFQGLKDNVFDGLVRVTQEFHMKVKHLIDSLIDFLNFPRFQFPGKPGIYTREELCTMFIREVGTVLSQVYSKVHNGSEILFSYFQDLVITLPFELRKHKLIDVISMYRELLKDLSKEAQEVFKAIQSLKTTEVLRNLQDLLQFIFQLIEDNIKQLKEMKFTYLINYIQDEINTIFSDYIPYVFKLLKENLCLNLHKFNEFIQNELQEASQELQQIHQYIMALREEYFDPSIVGWTVKYYELEEKIVSLIKNLLVALKDFHSEYIVSASNFTSQLSSQVEQFLHRNIQEYLSILTDPDGKGKEKIAELSATAQEIIKSQAIATKKIISDYHQQFRYKLQDFSDQLSDYYEKFIAESKRLIDLSIQNYHTFLIYITELLKKLQSTTVMNPYMKLAPGELTIIL

SEQ ID NO: 820 - protein, 4344 aa, Homo sapiens
MDPPRPALLALLALPALLLLLLAGARAEEEMLENVSLVCPKDATRFKHLRKYTYNYEAESSSGVPGTADSRSATRINCKVELEVPQLCSFILKTSQCTLKEVYGFNPEGKALLKKTKNSEEFAAAMSRYELKLAIPEGKQVFLYPEKDEPTYILNIKRGIISALLVPPETEEAKQVLFLDTVYGNCSTHFTVKTRKGNVATEISTERDLGQCDRFKPIRTGISPLALIKGMTRPLSTLISSSQSCQYTLDAKRKHVAEAICKEQHLFLPFSYKNKYGMVAQVTQTLKLEDTPKINSRFFGEGTKKMGLAFESTKSTSPPKQAEAVLKTLQELKKLTISEQNIQRANLFNKLVTELRGLSDEAVTSLLPQLIEVSSPITLQALVQCGQPQCSTHILQWLKRVHANPLLIDVVTYLVALIPEPSAQQLREIFNMARDQRSRATLYALSHAVNNYHKTNPTGTQELLDIANYLMEQIQDDCTGDEDYTYLILRVIGNMGQTMEQLTPELKSSILKCVQSTKPSLMIQKAAIQALRKMEPKDKDQEVLLQTFLDDASPGDKRLAAYLMLMRSPSQADINKIVQILPWEQNEQVKNFVASHIANILNSEELDIQDLKKLVKEALKESQLPTVMDFRKFSRNYQLYKSVSLPSLDPASAKIEGNLIFDPNNYLPKESMLKTTLTAFGFASADLIEIGLEGKGFEPTLEALFGKQGFFPDSVNKALYWVNGQVPDGVSKVLVDHFGYTKDDKHEQDMVNGIMLSVEKLIKDLKSKEVPEARAYLRILGEELGFASLHDLQLLGKLLLMGARTLQGIPQMIGEVIRKGSKNDFFLHYIFMENAFELPTGAGLQLQISSSGVIAPGAKAGVKLEVANMQAELVAKPSVSVEFVTNMGIIIPDFARSGVQMNTNFFHESGLEAHVALKAGKLKFIIPSPKRPVKLLSGGNTLHLVSTTKTEVIPPLIENRQSWSVCKQVFPGLNYCTSGAYSNASSTDSASYYPLTGDTRLELELRPTGEIEQYSVSATYELQREDRALVDTLKFVTQAEGAKQTEATMTFKYNRQSMTLSSEVQIPDFDVDLGTILRVNDESTEGKTSYRLTLDIQNKKITEVALMGHLSCDTKEERKIKGVISIPRLQAEARSEILAHWSPAKLLLQMDSSATAYGSTVSKRVAWHYDEEKIEFEWNTGTNVDTKKMTSNFPVDLSDYPKSLHMYANRLLDHRVPQTDMTFRHVGSKLIVAMSSWLQKASGSLPYTQTLQDHLNSLKEFNLQNMGLPDFHIPENLFLKSDGRVKYTLNKNSLKIEIPLPFGGKSSRDLKMLETVRTPALHFKSVGFHLPSREFQVPTFTIPKLYQLQVPLLGVLDLSTNVYSNLYNWSASYSGGNTSTDHFSLRARYHMKADSVVDLLSYNVQGSGETTYDHKNTFTLSYDGSLRHKFLDSNIKFSHVEKLGNNPVSKGLLIFDASSSWGPQMSASVHLDSKKKQHLFVKEVKIDGQFRVSSFYAKGTYGLSCQRDPNTGRLNGESNLRFNSSYLQGTNQITGRYEDGTLSLTSTSDLQSGIIKNTASLKYENYELTLKSDTNGKYKNFATSNKMDMTFSKQNALLRSEYQADYESLRFFSLLSGSLNSHGLELNADILGTDKINSGAHKATLRIGQDGISTSATTNLKCSLLVLENELNAELGLSGASMKLTTNGRFREHNAKFSLDGKAALTELSLGSAYQAMILGVDSKNIFNFKVSQEGLKLSNDMMGSYAEMKFDHTNSLNIAGLSLDFSSKLDNIYSSDKFYKQTVNLQLQPYSLVTTLNSDLKYNALDLTNNGKLRLEPLKLHVAGNLKGAYQNNEIKHIYAISSAALSASYKADTVAKVQGVEFSHRLNTDIAGLASAIDMSTNYNSDSLHFSNVFRSVMAPFTMTIDAHTNGNGKLALWGEHTGQLYSKFLLKAEPLAFTFSHDYKGSTSHHLVSRKSISAALEHKVSALLTPAEQTGTWKLKTQFNNNEYSQDLDAYNTKDKIGVELTGRTLADLTLLDSPIKVPLLLSEPINIIDALEMRDAVEKPQEFTIVAFVKYDKNQDVHSINLPFFETLQEYFERNRQTIIVVLENVQRNLKHINIDQFVRKYRAALGKLPQQANDYLNSFNWERQVSHAKEKLTALTKKYRITENDIQIALDDAKINFNEKLSQLQTYMIQFDQYIKDSYDLHDLKIAIANIIDEIIEKLKSLDEHYHIRVNLVKTIHDLHLFIENIDFNKSGSSTASWIQNVDTKYQIRIQIQEKLQQLKRHIQNIDIQHLAGKLKQHIEAIDVRVLLDQLGTTISFERINDILEHVKHFVINLIGDFEVAEKINAFRAKVHELIERYEVDQQIQVLMDKLVELAHQYKLKETIQKLSNVLQQVKIKDYFEKLVGFIDDAVKKLNELSFKTFIEDVNKFLDMLIKKLKSFDYHQFVDETNDKIREVTQRLNGEIQALELPQKAEALKLFLEETKATVAVYLESLQDTKITLIINWLQEALSSASLAHMKAKFRETLEDTRDRMYQMDIQQELQRYLSLVGQVYSTLVTYISDWWTLAAKNLTDFAEQYSIQDWAKRMKALVEQGFTVPEIKTILGTMPAFEVSLQALQKATFQTPDFIVPLTDLRIPSVQINFKDLKNIKIPSRFSTPEFTILNTFHIPSFTIDFVEMKVKIIRTIDQMLNSELQWPVPDIYLRDLKVEDIPLARITLPDFRLPEIAIPEFIIPTLNLNDFQVPDLHIPEFQLPHISHTIEVPTFGKLYSILKIQSPLFTLDANADIGNGTTSANEAGIAASITAKGESKLEVLNFDFQANAQLSNPKINPLALKESVKFSSKYLRTEHGSEMLFFGNAIEGKSNTVASLHTEKNTLELSNGVIVKINNQLTLDSNTKYFHKLNIPKLDFSSQADLRNEIKTLLKAGHIAWTSSGKGSWKWACPRFSDEGTHESQISFTIEGPLTSFGLSNKINSKHLRVNQNLVYESGSLNFSKLEIQSQVDSQHVGHSVLTAKGMALFGEGKAEFTGRHDAHLNGKVIGTLKNSLFFSAQPFEITASTNNEGNLKVRFPLRLTGKIDFLNNYALFLSPSAQQASWQVSARFNQYKYNQNFSAGNNENIMEAHVGINGEANLDFLNIPLTIPEMRLPYTIITTPPLKDFSLWEKTGLKEFLKTTKQSFDLSVKAQYKKNKHRHSITNPLAVLCEFISQSIKSFDRHFEKNRNNALDFVTKSYNETKIKFDKYKAEKSHDELPRTFQIPGYTVPVVNVEVSPFTIEMSAFGYVFPKAVSMPSFSILGSDVRVPSYTLILPSLELPVLHVPRNLKLSLPDFKELCTISHIFIPAMGNITYDFSFKSSVITLNTNAELFNQSDIVAHLLSSSSSVIDALQYKLEGTTRLTRKRGLKLATALSLSNKFVEGSHNSTVSLTTKNMEVSVATTTKAQIPILRMNFKQELNGNTKSKPTVSSSMEFKYDFNSSMLYSTAKGAVDHKLSLESLTSYFSIESSTKGDVKGSVLSREYSGTIASEANTYLNSKSTRSSVKLQGTSKIDDIWNLEVKENFAGEATLQRIYSLWEHSTKNHLQLEGLFFTNGEHTSKATLELSPWQMSALVQVHASQPSSFHDFPDLGQEVALNANTKNQKIRWKNEVRIHSGSFQSQVELSNDQEKAHLDIAGSLEGHLRFLKNIILPVYDKSLWDFLKLDVTTSIGRRQHLRVSTAFVYTKNPNGYSFSIPVKVLADKFIIPGLKLNDLNSVLVMPTFHVPFTDLQVPSCKLDFREIQIYKKLRTSSFALNLPTLPEVKFPEVDVLTKYSQPEDSLIPFFEITVPESQLTVSQFTLPKSVSDGIAALDLNAVANKIADFELPTIIVPEQTIEIPSIKFSVPAGIVIPSFQALTARFEVDSPVYNATWSASLKNKADYVETVLDSTCSSTVQFLEYELNVLGTHKIEDGTLASKTKGTFAHRDFSAEYEEDGKYEGLQEWEGKAHLNIKSPAFTDLHLRYQKDKKGISTSAASPAVGTVGMDMDEDDDFSKWNFYYSPQSSPDKKLTIFKTELRVRESDEETQIKVNWEEEAASGLLTSLKDNVPKATGVLYDYVNKYHWEHTGLTLREVSSKLRRNLQNNAEWVYQGAIRQIDDIDVRFQKAASGTTGTYQEWKDKAQNLYQELLTQEGQASFQGLKDNVFDGLVRVTQEFHMKVKHLIDSLIDFLNFPRFQFPGKPGIYTREELCTMFIREVGTVLSQVYSKVHNGSEILFSYFQDLVITLPFELRKHKLIDVISMYRELLKDLSKEAQEVFKAIQSLKTTEVLRNLQDLLQFIFQLIEDNIKQLKEMKFTYLINYIQDEINTIFSDYIPCF

SEQ ID NO: 821 - protein, 265 aa, Homo sapiens
MKKEVCSVAFLKAVFAEFLATLIFVFFGLGSALKWPSALPTILQIALAFGLAIGTLAQALGPVSGGHINPAITLALLVGNQISLLRAFFYVAAQLVGAIAGAGILYGVAPLNARGNLAVNALNNNTTQGQAMVVELILTFQLALCIFASTDSRRTSPVGSPALSIGLSVTLGHLVGIYFTGCSMNPARSFGPAVVMNRFSPAHWVFWVGPIVGAVLAAILYFYLLFPNSLSLSERVAIIKGTYEPDEDWEEQREERKKTMELTTR

SEQ ID NO: 822 - protein, 330 aa, Homo sapiens
MSAKSRTIGIIGAPFSKGQPRGGVEEGPTVLRKAGLLEKLKEQVTQNFLILECDVKDYGDLPFADIPNDSPFQIVKNPRSVGKASEQLAGKVAEVKKNGRISLVLGGDHSLAIGSISGHARVHPDLGVIWVDAHTDINTPLTTTSGNLHGQPVSFLLKELKGKIPDVPGFSWVTPCISAKDIVYIGLRDVDPGEHYILKTLGIKYFSMTEVDRLGIGKVMEETLSYLLGRKKRPIHLSFDVDGLDPSFTPATGTPVVGGLTYREGLYITEEIYKTGLLSGLDIMEVNPSLGKTPEEVTRTVNTAVAITLACFGLAREGNHKPIDYLNPPK

SEQ ID NO: 823 - protein, 322 aa, Homo sapiens
MSAKSRTIGIIGAPFSKGQPRGGVEEGPTVLRKAGLLEKLKEQECDVKDYGDLPFADIPNDSPFQIVKNPRSVGKASEQLAGKVAEVKKNGRISLVLGGDHSLAIGSISGHARVHPDLGVIWVDAHTDINTPLTTTSGNLHGQPVSFLLKELKGKIPDVPGFSWVTPCISAKDIVYIGLRDVDPGEHYILKTLGIKYFSMTEVDRLGIGKVMEETLSYLLGRKKRPIHLSFDVDGLDPSFTPATGTPVVGGLTYREGLYITEEIYKTGLLSGLDIMEVNPSLGKTPEEVTRTVNTAVAITLACFGLAREGNHKPIDYLNPPK

SEQ ID NO: 824 - protein, 236 aa, Homo sapiens
MSAKSRTIGIIGAPFSKGQPRGGVEEGPTVLRKAGLLEKLKEQECDVKDYGDLPFADIPNDSPFQIVKNPRSVGKASEQLAGKVAEVKKNGRISLVLGGDHSLAIGSISGHARVHPDLGVIWVDAHTDINTPLTTTSGNLHGQPVSFLLKELKGKIPDVPGFSWVTPCISAKDIVYIGLRDVDPGEHYILKTLGIKYFSMTEVTRTVNTAVAITLACFGLAREGNHKPIDYLNPPK

SEQ ID NO: 825 - protein, 464 aa, Homo sapiens
MASESGKLWGGRFVGAVDPIMEKFNASIAYDRHLWEVDVQGSKAYSRGLEKAGLLTKAEMDQILHGLDKVAEEWAQGTFKLNSNDEDIHTANERRLKELIGATAGKLHTGRSRNDQVVTDLRLWMRQTCSTLSGLLWELIRTMVDRAEAERDVLFPGYTHLQRAQPIRWSHWILSHAVALTRDSERLLEVRKRINVLPLGSGAIAGNPLGVDRELLRAELNFGAITLNSMDATSERDFVAEFLFWASLCMTHLSRMAEDLILYCTKEFSFVQLSDAYSTGSSLMPQKKNPDSLELIRSKAGRVFGRCAGLLMTLKGLPSTYNKDLQEDKEAVFEVSDTMSAVLQVATGVISTLQIHQENMGQALSPDMLATDLAYYLVRKGMPFRQAHEASGKAVFMAETKGVALNQLSLQELQTISPLFSGDVICVWDYGHSVEQYGALGGTARSSVDWQIRQVRALLQAQQA

SEQ ID NO: 826 - protein, 438 aa, Homo sapiens
MASESGKLWGGRFVGAVDPIMEKFNASIAYDRHLWEVDVQGSKAYSRGLEKAGLLTKAEMDQILHGLDKVAEEWAQGTFKLNSNDEDIHTANERRLKELIGATAGKLHTGRSRNDQVVTDLRLWMRQTCSTLSGLLWELIRTMVDRAEAERDVLFPGYTHLQRAQPIRWSHWILSGAIAGNPLGVDRELLRAELNFGAITLNSMDATSERDFVAEFLFWASLCMTHLSRMAEDLILYCTKEFSFVQLSDAYSTGSSLMPQKKNPDSLELIRSKAGRVFGRCAGLLMTLKGLPSTYNKDLQEDKEAVFEVSDTMSAVLQVATGVISTLQIHQENMGQALSPDMLATDLAYYLVRKGMPFRQAHEASGKAVFMAETKGVALNQLSLQELQTISPLFSGDVICVWDYGHSVEQYGALGGTARSSVDWQIRQVRALLQAQQA

SEQ ID NO: 827 - protein, 444 aa, Homo sapiens
MASESGKLWGGRFVGAVDPIMEKFNASIAYDRHLWEVDVQGSKAYSRGLEKAGLLTKAEMDQILHGLDKVAEEWAQGTFKLNSNDEDIHTANERRLKELIGATAGKLHTGRSRNDQVVTDLRLWMRQTCSTLSGLLWELIRTMVDRAEAERDVLFPGYTHLQRAQPIRWSHWILSHAVALTRDSERLLEVRKRINVLPLGSGAIAGNPLGVDRELLRAELNFGAITLNSMDATSERDFVAEFLFWASLCMTHLSRMAEDLILYCTKEFSFVQLSDAYSTGSSLMPQKKNPDSLELIRSKAGRVFGREDKEAVFEVSDTMSAVLQVATGVISTLQIHQENMGQALSPDMLATDLAYYLVRKGMPFRQAHEASGKAVFMAETKGVALNQLSLQELQTISPLFSGDVICVWDYGHSVEQYGALGGTARSSVDWQIRQVRALLQAQQA

SEQ ID NO: 828 - protein, 464 aa, Homo sapiens; identical to SEQ ID NO: 825

SEQ ID NO: 829 - protein, 98 aa, Homo sapiens
MEKFNASIAYDRHLWEVDVQGSKAYSRGLEKAGLLTKAEMDQILHGLDKVAEEWAQGTFKLNSNDEDIHTANERRLKELIGATAGKLHTGRSRNDQVL

SEQ ID NO: 830 - protein, 412 aa, Homo sapiens
MSSKGSVVLAYSGGLDTSCILVWLKEQGYDVIAYLANIGQKEDFEEARKKALKLGAKKVFIEDVSREFVEEFIWPAIQSSALYEDRYLLGTSLARPCIARKQVEIAQREGAKYVSHGATGKGNDQVRFELSCYSLAPQIKVIAPWRMPEFYNRFKGRNDLMEYAKQHGIPIPVTPKNPWSMDENLMHISYEAGILENPKNQAPPGLYTKTQDPAKAPNTPDILEIEFKKGVPVKVTNVKDGTTHQTSLELFMYLNEVAGKHGVGRIDIVENRFIGMKSRGIYETPAGTILYHAHLDIEAFTMDREVRKIKQGLGLKFAELVYTGFWHSPECEFVRHCIAKSQERVEGKVQVSVLKGQVYILGRESPLSLYNEELVSMNVQGDYEPTDATGFININSLRLKEYHRLQSKVTAK

SEQ ID NO: 831 - protein, 412 aa, Homo sapiens; identical to SEQ ID NO: 830

SEQ ID NO: 832 - protein, 169 aa, Homo sapiens
EPGPLQLMVVAEAQGGKHGVGRIDIVENRFIGMKSRGIYETPAGTILYHAHLDIEAFTMDREVRKIKQGLGLKFAELVYTGFWHSPECEFVRHCIAKSQERVEGKVQVSVLKGQVYILGRESPLSLYNEELVSMNVQGDYEPTDATGFININSLRLKEYHRLQSKVTAK

SEQ ID NO: 833 - protein, 412 aa, Homo sapiens; identical to SEQ ID NO: 830

SEQ ID NO: 834 - protein, 412 aa, Homo sapiens; identical to SEQ ID NO: 830

SEQ ID NO: 835 - protein, 198 aa, Homo sapiens
MSSKGSVVLAYSGGLDTSCILVWLKEQGYDVIAYLANIGQKEDFEEARKKALKLGAKKVFIEDVSREFVEEFIWPAIQSSALYEDRYLLGTSLARPCIARKQVEIAQREGAKYVSHGATGKGNDQVRFELSCYSLAPQIKVIAPWRMPEFYNRFKGRNDLMEYAKQHGIPIPVTPKNPWSMDENLMHISYEAGILENP

SEQ ID NO: 836 - protein, 179 aa, Homo sapiens
MSSKGSVVLAYSGGLDTSCILVWLKEQGYDVIAYLANIGQKEDFEEARKKALKLGAKKVFIEDVSREFVEEFIWPAIQSSALYEDRYLLGTSLARPCIARKQVEIAQREGAKYVSHGATGKVIAPWRMPEFYNRFKGRNDLMEYAKQHGIPIPVTPKNPWSMDENLMHISYEAGILENP

SEQ ID NO: 837 - protein, 220 aa, Homo sapiens
MELGLGGLSTLSHCPWPRQQPALWPTLAALALLSSVAEASLGSAPRSPAPREGPPPVLASPAGHLPGGRTARWCSGRARRPPPQPSRPAPPPPAPPSALPRGGRAARAGGPGSRARAAGARGCRLRSQLVPVRALGLGHRSDELVRFRFCSGSCRRARSPHDLSLASLLGAGALRPPPGSRPVSQPCCRPTRYEAVSFMDVNSTWRTVDRLSATACGCLG

SEQ ID NO: 838 - protein, 220 aa, Homo sapiens; identical to SEQ ID NO: 837

SEQ ID NO: 839 - protein, 228 aa, Homo sapiens
MELGLGGLSTLSHCPWPRQQAPLGLSAQPALWPTLAALALLSSVAEASLGSAPRSPAPREGPPPVLASPAGHLPGGRTARWCSGRARRPPPQPSRPAPPPPAPPSALPRGGRAARAGGPGSRARAAGARGCRLRSQLVPVRALGLGHRSDELVRFRFCSGSCRRARSPHDLSLASLLGAGALRPPPGSRPVSQPCCRPTRYEAVSFMDVNSTWRTVDRLSATACGCLG

SEQ ID NO: 840 - protein, 66 aa, Homo sapiens
MELGLGGLSTLSHCPWPRQQPALWPTLAALALLSSVAEASLGSAPRSPAPREGPPPVLASPAGHLP

SEQ ID NO: 841 - protein, 89 aa, Homo sapiens
MELGLGGLSTLSHCPWPRQQAPLGLSAQPALWPTLAALALLSSVAEASLGSAPRSPAPREGPPPVLASPAGHLPGGRTARWCSGRARRP

SEQ ID NO: 842 - protein, 66 aa, Homo sapiens; identical to SEQ ID NO: 840

SEQ ID NO: 843 - protein, 89 aa, Homo sapiens; identical to SEQ ID NO: 841

SEQ ID NO: 844 - protein, 228 aa, Homo sapiens; identical to SEQ ID NO: 839

SEQ ID NO: 845 - protein, 533 aa, Homo sapiens
MGPRGAASLPRGPGPRRLLLPVVLPLLLLLLLAPPGSGAGASRPPHLVFLLADDLGWNDVGFHGSRIRTPHLDALAAGGVLLDNYYTQPLCTPSRSQLLTGRYQIRTGLQHQIIWPCQPSCVPLDEKLLPQLLKEAGYTTHMVGKWHLGMYRKECLPTRRGFDTYFGYLLGSEDYYSHERCTLIDALNVTRCALDFRDGEEVATGYKNMYSTNIFTKRAIALITNHPPEKPLFLYLALQSVHEPLQVPEEYLKPYDFIQDKNRHHYAGMVSLMDEAVGNVTAALKSSGLWNNTVFIFSTDNGGQTLAGGNNWPLRGRKWSLWEGGVRGVGFVASPLLKQKGVKNRELIHISDWLPTLVKLARGHTNGTKPLDGFDVWKTISEGSPSPRIELLHNIDPNFVDSSPCPRNSMAPAKDDSSLPEYSAFNTSVHAAIRHGNWKLLTGYPGCGYWFPPPSQYNVSEIPSSDPPTKTLWLFDIDRDPEERHDLSREYPHIVTKLLSRLQFYHKHSVPVYFPAQDPRCDPKATGVWGPWM

SEQ ID NO: 846 - protein, 533 aa, Homo sapiens; identical to SEQ ID NO: 845

SEQ ID NO: 847 - protein, 413 aa, Homo sapiens
MGPRGAASLPRGPGPRRLLLPVVLPLLLLLLLAPPGSGAGASRPPHLVFLLADDLGWNDVGFHGSRIRTPHLDALAAGGVLLDNYYTQPLCTPSRSQLLTGRYQIRTGLQHQIIWPCQPSCVPLDEKLLPQLLKEAGYTTHMVGKWHLGMYRKECLPTRRGFDTYFGYLLGSEDYYSHERCTLIDALNVTRCALDFRDGEEVATGYKNMYSTNIFTKRAIALITNHPPEKPLFLYLALQSVHEPLQVPEEYLKPYDFIQDKNRHHYAGMVSLMDEAVGNVTAALKSSGLWNNTVFIFSTDNGGQTLAGGNNWPLRGRKWSLWEGGVRGVGFVASPLLKQKGVKNRELIHISDWLPTLVKLARGHTNGTKPLDGFDVWKTISEGSPSPRIELLHNIDPNFVDSSPYWPECSLLL

SEQ ID NO: 848 - protein, 45 aa, Homo sapiens
MGPRGAASLPRGPGPRRLLLPVVLPLLLLLLLAPPGSGAGASRPP

SEQ ID NO: 849 - protein, 595 aa, Homo sapiens
MAGPSPPLRAGVGRRLLGVAHPDLRPCLCGELQVEGGPGPVPGMLRTCYVRSPWRRGPSSARGEQSGSGHLEQEEVQSGSLLFRLLLFLSRSPASRNQRILYTVLECQPLFDSSDMTIAEWVCLAQTIKRHYEQYHGFVVIHGTDTMAFAASMLSFMLENLQKTVILTGAQVPIHALWSDGRENLLGALLMAGQYVIPEVCLFFQNQLFRGNRATKVDARRFAAFCSPNLLPLATVGADITINRELVRKVDGKAGLVVHSSMEQDVGLLRLYPGIPAALVRAFLQPPLKGVVMETFGSGNGPTKPDLLQELRVATERGLVIVNCTHCLQGAVTTDYAAGMAMAGAGVISGFDMTSEAALAKLSYVLGQPGLSLDVRKELLTKDLRGEMTPPSVEERRPSLQGNTLGGGVSWLLSLSGSQEADALRNALVPSLACAAAHAGDVEALQALVELGSDLGLVDFNGQTPLHAAARGGHTEAVTMLLQRGVDVNTRDTDGFSPLLLAVRGRHPGVIGLLREAGASLSTQELEEAGTELCRLAYRADLEGLQVWWQAGADLGQPGYDGHSALHVAEAAGNLAVVAFLQSLEGAVGAQAPCP

SEQ ID NO: 850 - protein, 579 aa, Homo sapiens
MARAVGPERRLLAVYTGGTIGMRSELGVLVPGTGLAAILRTLPMFHDEEHARARGLSEDTLVLPPASRNQRILYTVLECQPLFDSSDMTIAEWVCLAQTIKRHYEQYHGFVVIHGTDTMAFAASMLSFMLENLQKTVILTGAQVPIHALWSDGRENLLGALLMAGQYVIPEVCLFFQNQLFRGNRATKVDARRFAAFCSPNLLPLATVGADITINRELVRKVDGKAGLVVHSSMEQDVGLLRLYPGIPAALVRAFLQPPLKGVVMETFGSGNGPTKPDLLQELRVATERGLVIVNCTHCLQGAVTTDYAAGMAMAGAGVISGFDMTSEAALAKLSYVLGQPGLSLDVRKELLTKDLRGEMTPPSVEERRPSLQGNTLGGGVSWLLSLSGSQEADALRNALVPSLACAAAHAGDVEALQALVELGSDLGLVDFNGQTPLHAAARGGHTEAVTMLLQRGVDVNTRDTDGFSPLLLAVRGRHPGVIGLLREAGASLSTQELEEAGTELCRLAYRADLEGLQVWWQAGADLGQPGYDGHSALHVAEAAGNLAVVAFLQSLEGAVGAQAPCPEPSCFQEVLPGV

SEQ ID NO: 851 - protein, 140 aa, Homo sapiens
AAARGGHTEAVTMLLQRGVDVNTRDTDGFSPLLLAVRGRHPGVIGLLREAGASLSTQELEEAGTELCRLAYRADLEGLQVWWQAGADLGQPGYDGHSALHVAEAAGNLAVVAFLQSLEGAVGAQAPCPEPSCFQEVLPGV

SEQ ID NO: 852 - protein, 573 aa, Homo sapiens
MARAVGPERRLLAVYTGGTIGMRSELGVLVPGTGLAAILRTLPMFHDEEHARARGLSEDTLVLPPASRNQRILYTVLECQPLFDSSDMTIAEWVCLAQTIKRHYEQYHGFVVIHGTDTMAFAASMLSFMLENLQKTVILTGAQVPIHALWSDGRENLLGALLMAGQYVIPEVCLFFQNQLFRGNRATKVDARRFAAFCSPNLLPLATVGADITINRELVRKVDGKAGLVVHSSMEQDVGLLRLYPGIPAALVRAFLQPPLKGVVMETFGSGNGPTKPDLLQELRVATERGLVIVNCTHCLQGAVTTDYAAGMAMAGAGVISGFDMTSEAALAKLSYVLGQPGLSLDVRKELLTKDLRGEMTPPSVEERRPSLQGNTLGGGVSWLLSLSGSQEADALRNALVPSLACAAAHAGDVEALQALVELGSDLGLVDFNGQTPLHAAARGGHTEAVTMLLQRGVDVNTRDTDGFSPLLLAVRGRHPGVIGLLREAGASLSTQELEEAGTELCRLAYRADLEGLQVWWQAGADLGQPGYDGHSALHVAEAAGNLAVVAFLQSLEGAVGAQAPCPEVLPGV

SEQ ID NO: 853 - protein, 313 aa, Homo sapiens
MTSCHIAEEHIQKVAIFGGTHGNELTGVFLVKHWLENGAEIQRTGLEVKPFITNPRAVKKCTRYIDCDLNRIFDLENLGKKMSEDLPYEVRRAQEINHLFGPKDSEDSYDIIFDLHNTTSNMGCTLILEDSRNNFLIQMFHYIKTSLAPLPCYVYLIEHPSLKYATTRSIAKYPVGIEVGPQPQGVLRADILDQMRKMIKHALDFIHHFNEGKEFPPCAIEVYKIIEKVDYPRDENGEIAAIIHPNLQDQDWKPLHPGDPMFLTLDGKTIPLGGDCTVYPVFVNEAAYYEKKEAFAKTTKLTLNAKSIRCCLH

SEQ ID NO: 854 - protein, 313 aa, Homo sapiens; identical to SEQ ID NO: 853

SEQ ID NO: 855 - protein, 1251 aa, Homo sapiens
MSTERDSETTFDEDSQPNDEVVPYSDDETEDELDDQGSAVEPEQNRVNREAEENREPFRKECTWQVKANDRKYHEQPHFMNTKFLCIKESKYANNAIKTYKYNAFTFIPMNLFEQFKRAANLYFLALLILQAVPQISTLAWYTTLVPLLVVLGVTAIKDLVDDVARHKMDKEINNRTCEVIKDGRFKVAKWKEIQVGDVIRLKKNDFVPADILLLSSSEPNSLCYVETAELDGETNLKFKMSLEITDQYLQREDTLATFDGFIECEEPNNRLDKFTGTLFWRNTSFPLDADKILLRGCVIRNTDFCHGLVIFAGADTKIMKNSGKTRFKRTKIDYLMNYMVYTIFVVLILLSAGLAIGHAYWEAQVGNSSWYLYDGEDDTPSYRGFLIFWGYIIVLNTMVPISLYVSVEVIRLGQSHFINWDLQMYYAEKDTPAKARTTTLNEQLGQIHYIFSDKTGTLTQNIMTFKKCCINGQIYGDHRDASQHNHNKIEQVDFSWNTYADGKLAFYDHYLIEQIQSGKEPEVRQFFFLLAVCHTVMVDRTDGQLNYQAASPDEGALVNAARNFGFAFLARTQNTITISELGTERTYNVLAILDFNSDRKRMSIIVRTPEGNIKLYCKGADTVIYERLHRMNPTKQETQDALDIFANETLRTLCLCYKEIEEKEFTEWNKKFMAASVASTNRDEALDKVYEEIEKDLILLGATAIEDKLQDGVPETISKLAKADIKIWVLTGDKKETAENIGFACELLTEDTTICYGEDINSLLHARMENQRNRGGVYAKFAPPVQESFFPPGGNRALIITGSWLNEILLEKKTKRNKILKLKFPRTEEERRMRTQSKRRLEAKKEQRQKNFVDLACECSAVICCRVTPKQKAMVVDLVKRYKKAITLAIGDGANDVNMIKTAHIGVGISGQEGMQAVMSSDYSFAQFRYLQRLLLVHGRWSYIRMCKFLRYFFYKNFAFTLVHFWYSFFNGYSAQTAYEDWFITLYNVLYTSLPVLLMGLLDQDVSDKLSLRFPGLYIVGQRDLLFNYKRFFVSLLHGVLTSMILFFIPLGAYLQTVGQDGEAPSDYQSFAVTIASALVITVNFQIGLDTSYWTFVNAFSIFGSIALYFGIMFDFHSAGIHVLFPSAFQFTGTASNALRQPYIWLTIILAVAVCLLPVVAIRFLSMTIWPSESDKIQKHRKRLKAEEQWQRRQQVFRRGVSTRRSAYAFSHQRGYADLISSGRSIRKKRSPLDAIVADGTAEYRRTGDS

SEQ ID NO: 856 - protein, 1251 aa, Homo sapiens; identical to SEQ ID NO: 855

SEQ ID NO: 857 - protein, 1465 aa, Homo sapiens
MPEQERQITAREGASRKILSKLSLPTRAWEPAMKKSFAFDNVGYEGGLDGLGPSSQVATSTVRILGMTCQSCVKSIEDRISNLKGIISMKVSLEQGSATVKYVPSVVCLQQVCHQIGDMGFEASIAEGKAASWPSRSLPAQEAVVKLRVEGMTCQSCVSSIEGKVRKLQGVVRVKVSLSNQEAVITYQPYLIQPEDLRDHVNDMGFEAAIKSKVAPLSLGPIDIERLQSTNPKRPLSSANQNFNNSETLGHQGSHVVTLQLRIDGMHCKSCVLNIEENIGQLLGVQSIQVSLENKTAQVKYDPSCTSPVALQRAIEALPPGNFKVSLPDGAEGSGTDHRSSSSHSPGSPPRNQVQGTCSTTLIAIAGMTCASCVHSIEGMISQLEGVQQISVSLAEGTATVLYNPSVISPEELRAAIEDMGFEASVVSESCSTNPLGNHSAGNSMVQTTDGTPTSVQEVAPHTGRLPANHAPDILAKSPQSTRAVAPQKCFLQIKGMTCASCVSNIERNLQKEAGVLSVLVALMAGKAEIKYDPEVIQPLEIAQFIQDLGFEAAVMEDYAGSDGNIELTITGMTCASCVHNIESKLTRTNGITYASVALATSKALVKFDPEIIGPRDIIKIIEEIGFHASLAQRNPNAHHLDHKMEIKQWKKSFLCSLVFGIPVMALMIYMLIPSNEPHQSMVLDHNIIPGLSILNLIFFILCTFVQLLGGWYFYVQAYKSLRHRSANMDVLIVLATSIAYVYSLVILVVAVAEKAERSPVTFFDTPPMLFVFIALGRWLEHLAKSKTSEALAKLMSLQATEATVVTLGEDNLIIREEQVPMELVQRGDIVKVVPGGKFPVDGKVLEGNTMADESLITGEAMPVTKKPGSTVIAGSINAHGSVLIKATHVGNDTTLAQIVKLVEEAQMSKAPIQQLADRFSGYFVPFIIIMSTLTLVVWIVIGFIDFGVVQRYFPNPNKHISQTEVIIRFAFQTSITVLCIACPCSLGLATPTAVMVGTGVAAQNGILIKGGKPLEMAHKIKTVMFDKTGTITHGVPRVMRVLLLGDVATLPLRKVLAVVGTAEASSEHPLGVAVTKYCKEELGTETLGYCTDFQAVPGCGIGCKVSNVEGILAHSERPLSAPASHLNEAGSLPAEKDAVPQTFSVLIGNREWLRRNGLTISSDVSDAMTDHEMKGQTAILVAIDGVLCGMIAIADAVKQEAALAVHTLQSMGVDVVLITGDNRKTARAIATQVGINKVFAEVLPSHKVAKVQELQNKGKKVAMVGDGVNDSPALAQADMGVAIGTGTDVAIEAADVVLIRNDLLDVVASIHLSKRTVRRIRINLVLALIYNLVGIPIAAGVFMPIGIVLQPWMGSAAMAASSVSVVLSSLQLKCYKKPDLERYEAQAHGHMKPLTASQVSVHIGMDDRWRDSPRATPWDQVSYVSQVSLSSLTSDKPSRHSAAADDDGDKWSLLLNGRDEEQYI

SEQ ID NO: 858 - protein, 1258 aa, Homo sapiens
MPEQERQITAREGASRKILSKLSLPTRAWEPAMKKSFAFDNVGYEGGLDGLGPSSQVATSTVRILGMTCQSCVKSIEDRISNLKGIISMKVSLEQGSATVKYVPSVVCLQQVCHQIGDMGFEASIAEGKAASWPSRSLPAQEAVVKLRVEGMTCQSCVSSIEGKVRKLQGVVRVKVSLSNQEAVITYQPYLIQPEDLRDHVNDMGFEAAIKSKVAPLSLGPIDIERLQSTNPKRPLSSANQNFNNSETLGHQGSHVVTLQLRIDGMHCKSCVLNIEENIGQLLGVQSIQVSLENKTAQVKYDPSCTSPVALQRAIEALPPGNFKVSLPDGAEGSGTDHRSSSSHSPGSPPRNQVQGTCSTTLIAIAGMTCASCVHSIEGMISQLEGVQQISVSLAEGTATVLYNPSVISPEELRAAIEDMGFEASVVSESCSTNPLGNHSAGNSMVQTTDGTPTSVQEVAPHTGRLPANHAPDILAKSPQSTRAVAPQKCFLQIKGMTCASCVSNIERNLQKEAGVLSVLVALMAGKAEIKYDPEVIQPLEIAQFIQDLGFEAAVMEDYAGSDGNIELTITGMTCASCVHNIESKLTRTNGITYASVALATSKALVKFDPEIIGPRDIIKIIESKTSEALAKLMSLQATEATVVTLGEDNLIIREEQVPMELVQRGDIVKVVPGGKFPVDGKVLEGNTMADESLITGEAMPVTKKPGSTVIAGSINAHGSVLIKATHVGNDTTLAQIVKLVEEAQMSKNPNKHISQTEVIIRFAFQTSITVLCIACPCSLGLATPTAVMVGTGVAAQNGILIKGGKPLEMAHKIKTVMFDKTGTITHGVPRVMRVLLLGDVATLPLRKVLAVVGTAEASSEHPLGVAVTKYCKEELGTETLGYCTDFQAVPGCGIGCKVSNVEGILAHSERPLSAPASHLNEAGSLPAEKDAVPQTFSVLIGNREWLRRNGLTISSDVSDAMTDHEMKGQTAILVAIDGVLCGMIAIADAVKQEAALAVHTLQSMGVDVVLITGDNRKTARAIATQVGINKVFAEVLPSHKVAKVQELQNKGKKVAMVGDGVNDSPALAQADMGVAIGTGTDVAIEAADVVLIRNDLLDVVASIHLSKRTVRRIRINLVLALIYNLVGIPIAAGVFMPIGIVLQPWMGSAAMAASSVSVVLSSLQLKCYKKPDLERYEAQAHGHMKPLTASQVSVHIGMDDRWRDSPRATPWDQVSYVSQVSLSSLTSDKPSRHSAAADDDGDKWSLLLNGRDEEQYI

SEQ ID NO: 859 - protein, 1354 aa, Homo sapiens
MPEQERQITAREGASRKILSKLSLPTRAWEPAMKKSFAFDNVGYEGGLDGLGPSSQVATSTVRILGMTCQSCVKSIEDRISNLKGIISMKVSLEQGSATVKYVPSVVCLQQVCHQIGDMGFEASIAEGKAASWPSRSLPAQEAVVKLRVEGMTCQSCVSSIEGKVRKLQGVVRVKVSLSNQEAVITYQPYLIQPEDLRDHVNDMGFEAAIKSKVAPLSLGPIDIERLQSTNPKRPLSSANQNFNNSETLGHQGSHVVTLQLRIDGMHCMISQLEGVQQISVSLAEGTATVLYNPSVISPEELRAAIEDMGFEASVVSESCSTNPLGNHSAGNSMVQTTDGTPTSVQEVAPHTGRLPANHAPDILAKSPQSTRAVAPQKCFLQIKGMTCASCVSNIERNLQKEAGVLSVLVALMAGKAEIKYDPEVIQPLEIAQFIQDLGFEAAVMEDYAGSDGNIELTITGMTCASCVHNIESKLTRTNGITYASVALATSKALVKFDPEIIGPRDIIKIIEEIGFHASLAQRNPNAHHLDHKMEIKQWKKSFLCSLVFGIPVMALMIYMLIPSNEPHQSMVLDHNIIPGLSILNLIFFILCTFVQLLGGWYFYVQAYKSLRHRSANMDVLIVLATSIAYVYSLVILVVAVAEKAERSPVTFFDTPPMLFVFIALGRWLEHLAKSKTSEALAKLMSLQATEATVVTLGEDNLIIREEQVPMELVQRGDIVKVVPGGKFPVDGKVLEGNTMADESLITGEAMPVTKKPGSTVIAGSINAHGSVLIKATHVGNDTTLAQIVKLVEEAQMSKAPIQQLADRFSGYFVPFIIIMSTLTLVVWIVIGFIDFGVVQRYFPNPNKHISQTEVIIRFAFQTSITVLCIACPCSLGLATPTAVMVGTGVAAQNGILIKGGKPLEMAHKIKTVMFDKTGTITHGVPRVMRVLLLGDVATLPLRKVLAVVGTAEASSEHPLGVAVTKYCKEELGTETLGYCTDFQAVPGCGIGCKVSNVEGILAHSERPLSAPASHLNEAGSLPAEKDAVPQTFSVLIGNREWLRRNGLTISSDVSDAMTDHEMKGQTAILVAIDGVLCGMIAIADAVKQEAALAVHTLQSMGVDVVLITGDNRKTARAIATQVGINKVFAEVLPSHKVAKVQELQNKGKKVAMVGDGVNDSPALAQADMGVAIGTGTDVAIEAADVVLIRNDLLDVVASIHLSKRTVRRIRINLVLALIYNLVGIPIAAGVFMPIGIVLQPWMGSAAMAASSVSVVLSSLQLKCYKKPDLERYEAQAHGHMKPLTASQVSVHIGMDDRWRDSPRATPWDQVSYVSQVSLSSLTSDKPSRHSAAADDDGDKWSLLLNGRDEEQYI

SEQ ID NO: 860 - protein, 1035 aa, Homo sapiens
MPEQERQITAREGASRKILSKLSLPTRAWEPAMKKSFAFDNVGYEGGLDGLGPSSQVATSTVRILGMTCQSCVKSIEDRISNLKGIISMKVSLEQGSATVKYVPSVVCLQQVCHQIGDMGFEASIAEGKAASWPSRSLPAQEAVVKLRVEGMTCQSCVSSIEGKVRKLQGVVRVKVSLSNQEAVITYQPYLIQPEDLRDHVNDMGFEAAIKSKVAPLSLGPIDIERLQSTNPKRPLSSANQNFNNSETLGHQGSHVVTLQLRIDGMHCKSCVLNIEENIGQLLGVQSIQVSLENKTAQVKYDPSCTSPVALQRAIEALPPGNFKVSLPDGAEGSGTDHRSSSSHSPGSPPRNQVQGTCSTTLIAIAGMTCASCVHSIEGMISQLEGVQQISVSLAEGTATVLYNPSVISPEELRAAIEDMGFEASVVSGEAMPVTKKPGSTVIAGSINAHGSVLIKATHVGNDTTLAQIVKLVEEAQMSKAPIQQLADRFSGYFVPFIIIMSTLTLVVWIVIGFIDFGVVQRYFPNPNKHISQTEVIIRFAFQTSITVLCIACPCSLGLATPTAVMVGTGVAAQNGILIKGGKPLEMAHKIKTVMFDKTGTITHGVPRVMRVLLLGDVATLPLRKVLAVVGTAEASSEHPLGVAVTKYCKEELGTETLGYCTDFQAVPGCGIGCKVSNVEGILAHSERPLSAPASHLNEAGSLPAEKDAVPQTFSVLIGNREWLRRNGLTISSDVSDAMTDHEMKGQTAILVAIDGVLCGMIAIADAVKQEAALAVHTLQSMGVDVVLITGDNRKTARAIATQVGINKVFAEVLPSHKVAKVQELQNKGKKVAMVGDGVNDSPALAQADMGVAIGTGTDVAIEAADVVLIRNDLLDVVASIHLSKRTVRRIRINLVLALIYNLVGIPIAAGVFMPIGIVLQPWMGSAAMAASSVSVVLSSLQLKCYKKPDLERYEAQAHGHMKPLTASQVSVHIGMDDRWRDSPRATPWDQVSYVSQVSLSSLTSDKPSRHSAAADDDGDKWSLLLNGRDEEQYI

SEQ ID NO: 861 - protein, 676 aa, Homo sapiens
MDVLIVLATSIAYVYSLVILVVAVAEKAERSPVTFFDTPPMLFVFIALGRWLEHLAKSKTSEALAKLMSLQATEATVVTLGEDNLIIREEQVPMELVQRGDIVKVVPGGKFPVDGKVLEGNTMADESLITGEAMPVTKKPGSTVIAGSINAHGSVLIKATHVGNDTTLAQIVKLVEEAQMSKAPIQQLADRFSGYFVPFIIIMSTLTLVVWIVIGFIDFGVVQRYFPNPNKHISQTEVIIRFAFQTSITVLCIACPCSLGLATPTAVMVGTGVAAQNGILIKGGKPLEMAHKELGTETLGYCTDFQAVPGCGIGCKVSNVEGILAHSERPLSAPASHLNEAGSLPAEKDAVPQTFSVLIGNREWLRRNGLTISSDVSDAMTDHEMKGQTAILVAIDGVLCGMIAIADAVKQEAALAVHTLQSMGVDVVLITGDNRKTARAIATQVGINKVFAEVLPSHKVAKVQELQNKGKKVAMVGDGVNDSPALAQADMGVAIGTGTDVAIEAADVVLIRNDLLDVVASIHLSKRTVRRIRINLVLALIYNLVGIPIAAGVFMPIGIVLQPWMGSAAMAASSVSVVLSSLQLKCYKKPDLERYEAQAHGHMKPLTASQVSVHIGMDDRWRDSPRATPWDQVSYVSQVSLSSLTSDKPSRHSAAADDDGDKWSLLLNGRDEEQYI

SEQ ID NO: 862 - protein, 1400 aa, Homo sapiens
MPEQERQITAREGASRKILSKLSLPTRAWEPAMKKSFAFDNVGYEGGLDGLGPSSQVATSTVRILGMTCQSCVKSIEDRISNLKGIISMKVSLEQGSATVKYVPSVVCLQQVCHQIGDMGFEASIAEGKAASWPSRSLPAQEAVVKLRVEGMTCQSCVSSIEGKVRKLQGVVRVKVSLSNQEAVITYQPYLIQPEDLRDHVNDMGFEAAIKSKVAPLSLGPIDIERLQSTNPKRPLSSANQNFNNSETLGHQGSHVVTLQLRIDGMHCKSCVLNIEENIGQLLGVQSIQVSLENKTAQVKYDPSCTSPVALQRAIEALPPGNFKVSLPDGAEGSGTDHRSSSSHSPGSPPRNQVQGTCSTTLIAIAGMTCASCVHSIEGMISQLEGVQQISVSLAEGTATVLYNPSVISPEELRAAIEDMGFEASVVSESCSTNPLGNHSAGNSMVQTTDGTPTSVQEVAPHTGRLPANHAPDILAKSPQSTRAVAPQKCFLQIKGMTCASCVSNIERNLQKEAGVLSVLVALMAGKAEIKYDPEVIQPLEIAQFIQDLGFEAAVMEDYAGSDGNIELTITGMTCASCVHNIESKLTRTNGITYASVALATSKALVKFDPEIIGPRDIIKIIEEIGFHASLAQRNPNAHHLDHKMEIKQWKKSFLCSLVFGIPVMALMIYMLIPSNEPHQSMVLDHNIIPGLSILNLIFFILCTFVQLLGGWYFYVQAYKSLRHRSANMDVLIVLATSIAYVYSLVILVVAVAEKAERSPVTFFDTPPMLFVFIALGRWLEHLAKSKTSEALAKLMSLQATEATVVTLGEDNLIIREEQVPMELVQRGDIVKVVPGGKFPVDGKVLEGNTMADESLITGEAMPVTKKPGSTVIAGSINAHGSVLIKATHVGNDTTLAQIVKLVEEAQMSKAPIQQLADRFSGYFVPFIIIMSTLTLVVWIVIGFIDFGVVQRYFPIKTVMFDKTGTITHGVPRVMRVLLLGDVATLPLRKVLAVVGTAEASSEHPLGVAVTKYCKEELGTETLGYCTDFQAVPGCGIGCKVSNVEGILAHSERPLSAPASHLNEAGSLPAEKDAVPQTFSVLIGNREWLRRNGLTISSDVSDAMTDHEMKGQTAILVAIDGVLCGMIAIADAVKQEAALAVHTLQSMGVDVVLITGDNRKTARAIATQVGINKVFAEVLPSHKVAKVQELQNKGKKVAMVGDGVNDSPALAQADMGVAIGTGTDVAIEAADVVLIRNDLLDVVASIHLSKRTVRRIRINLVLALIYNLVGIPIAAGVFMPIGIVLQPWMGSAAMAASSVSVVLSSLQLKCYKKPDLERYEAQAHGHMKPLTASQVSVHIGMDDRWRDSPRATPWDQVSYVSQVSLSSLTSDKPSRHSAAADDDGDKWSLLLNGRDEEQYI

SEQ ID NO: 863 - protein, 1387 aa, Homo sapiens
MPEQERQITAREGASRKILSKLSLPTRAWEPAMKKSFAFDNVGYEGGLDGLGPSSQVATSTVRILGMTCQSCVKSIEDRISNLKGIISMKVSLEQGSATVKYVPSVVCLQQVCHQIGDMGFEASIAEGKAASWPSRSLPAQEAVVKLRVEGMTCQSCVSSIEGKVRKLQGVVRVKVSLSNQEAVITYQPYLIQPEDLRDHVNDMGFEAAIKSKVAPLSLGPIDIERLQSTNPKRPLSSANQNFNNSETLGHQGSHVVTLQLRIDGMHCKSCVLNIEENIGQLLGVQSIQVSLENKTAQVKYDPSCTSPVALQRAIEALPPGNFKVSLPDGAEGSGTDHRSSSSHSPGSPPRNQVQGTCSTTLIAIAGMTCASCVHSIEGMISQLEGVQQISVSLAEGTATVLYNPSVISPEELRAAIEDMGFEASVVSESCSTNPLGNHSAGNSMVQTTDGTPTSVQEVAPHTGRLPANHAPDILAKSPQSTRAVAPQKCFLQIKGMTCASCVSNIERNLQKEAGVLSVLVALMAGKAEIKYDPEVIQPLEIAQFIQDLGFEAAVMEDYAGSDGNIELTITGMTCASCVHNIESKLTRTNGITYASVALATSKALVKFDPEIIGPRDIIKIIEEIGFHASLAQRNPNAHHLDHKMEIKQWKKSFLCSLVFGIPVMALMIYMLIPSNEPHQSMVLDHNIIPGLSILNLIFFILCTFVQSKTSEALAKLMSLQATEATVVTLGEDNLIIREEQVPMELVQRGDIVKVVPGGKFPVDGKVLEGNTMADESLITGEAMPVTKKPGSTVIAGSINAHGSVLIKATHVGNDTTLAQIVKLVEEAQMSKAPIQQLADRFSGYFVPFIIIMSTLTLVVWIVIGFIDFGVVQRYFPNPNKHISQTEVIIRFAFQTSITVLCIACPCSLGLATPTAVMVGTGVAAQNGILIKGGKPLEMAHKIKTVMFDKTGTITHGVPRVMRVLLLGDVATLPLRKVLAVVGTAEASSEHPLGVAVTKYCKEELGTETLGYCTDFQAVPGCGIGCKVSNVEGILAHSERPLSAPASHLNEAGSLPAEKDAVPQTFSVLIGNREWLRRNGLTISSDVSDAMTDHEMKGQTAILVAIDGVLCGMIAIADAVKQEAALAVHTLQSMGVDVVLITGDNRKTARAIATQVGINKVFAEVLPSHKVAKVQELQNKGKKVAMVGDGVNDSPALAQADMGVAIGTGTDVAIEAADVVLIRNDLLDVVASIHLSKRTVRRIRINLVLALIYNLVGIPIAAGVFMPIGIVLQPWMGSAAMAASSVSVVLSSLQLKCYKKPDLERYEAQAHGHMKPLTASQVSVHIGMDDRWRDSPRATPWDQVSYVSQVSLSSLTSDKPSRHSAAADDDGDKWSLLLNGRDEEQYI

SEQ ID NO: 864 - protein, 528 aa, Homo sapiens
MKKSFAFDNVGYEGGLDGLGPSSQVATSTVRILGMTCQSCVKSIEDRISNLKGIISMKVSLEQGSATVKYVPSVVCLQQVCHQIGDMGFEASIAEGKAASWPSRSLPAQEAVVKLRVEGMTCQSCVSSIEGKVRKLQGVVRVKVSLSNQEAVITYQPYLIQPEDLRDHVNDMGFEAAIKSKVAPLSLGPIDIERLQSTNPKRPLSSANQNFNNSETLGHQGSHVVTLQLRIDGMHCKSCVLNIEENIGQLLGVQSIQVSLENKTAQVKYDPSCTSPVALQRAIEALPPGNFKVSLPDGAEGSGTDHRSSSSHSPGSPPRNQVQGTCSTTLIAIAGMTCASCVHSIEGMISQLEGVQQISVSLAEGTATVLYNPSVISPEELRAAIEDMGFEASVVSESCSTNPLGNHSAGNSMVQTTDGTPTSVQEVAPHTGRLPANHAPDILAKSPQSTRAVAPQKCFLQIKGMTCASCVSNIERNLQKEAAPRWVVLLRSGLQISETQVSQHGRAHRPGHKHCLCLFSGHPGGCCG

SEQ ID NO: 865 - protein, 1321 aa, Homo sapiens
MSDSVILRSIKKFGEENDGFESDKSYNNDKKSRLQDEKKGDGVRVGFFQLFRFSSSTDIWLMFVGSLCAFLHGIAQPGVLLIFGTMTDVFIDYDVELQELQIPGKACVNNTIVWTNSSLNQNMTNGTRCGLLNIESEMIKFASYYAGIAVAVLITGYIQICFWVIAAARQIQKMRKFYFRRIMRMEIGWFDCNSVGELNTRFSDDINKINDAIADQMALFIQRMTSTICGFLLGFFRGWKLTLVIISVSPLIGIGAATIGLSVSKFTDYELKAYAKAGVVADEVISSMRTVAAFGGEKREVERYEKNLVFAQRWGIRKGIVMGFFTGFVWCLIFLCYALAFWYGSTLVLDEGEYTPGTLVQIFLSVIVGALNLGNASPCLEAFATGRAAATSIFETIDRKPIIDCMSEDGYKLDRIKGEIEFHNVTFHYPSRPEVKILNDLNMVIKPGEMTALVGPSGAGKSTALQLIQRFYDPCEGMVTVDGHDIRSLNIQWLRDQIGIVEQEPVLFSTTIAENIRYGREDATMEDIVQAAKEANAYNFIMDLPQQFDTLVGEGGGQMSGGQKQRVAIARALIRNPKILLLDMATSALDNESEAMVQEVLSKIQHGHTIISVAHRLSTVRAADTIIGFEHGTAVERGTHEELLERKGVYFTLVTLQSQGNQALNEEDIKDATEDDMLARTFSRGSYQDSLRASIRQRSKSQLSYLVHEPPLAVVDHKSTYEEDRKDKDIPVQEEVEPAPVRRILKFSAPEWPYMLVGSVGAAVNGTVTPLYAFLFSQILGTFSIPDKEEQRSQINGVCLLFVAMGCVSLFTQFLQGYAFAKSGELLTKRLRKFGFRAMLGQDIAWFDDLRNSPGALTTRLATDASQVQGAAGSQIGMIVNSFTNVTVAMIIAFSFSWKLSLVILCFFPFLALSGATQTRMLTGFASRDKQALEMVGQITNEALSNIRTVAGIGKERRFIEALETELEKPFKTAIQKANIYGFCFAFAQCIMFIANSASYRYGGYLISNEGLHFSYVFRVISAVVLSATALGRAFSYTPSYAKAKISAARFFQLLDRQPPISVYNTAGEKWDNFQGKIDFVDCKFTYPSRPDSQVLNGLSVSISPGQTLAFVGSSGCGKSTSIQLLERFYDPDQGKVMIDGHDSKKVNVQFLRSNIGIVSQEPVLFACSIMDNIKYGDNTKEIPMERVIAAAKQAQLHDFVMSLPEKYETNVGSQGSQLSRGEKQRIAIARAIVRDPKILLLDEATSALDTESEKTVQVALDKAREGRTCIVIAHRLSTIQNADIIAVMAQGVVIEKGTHEELMAQKGAYYKLVTTGSPIS

SEQ ID NO: 866 - protein, 1286 aa, Homo sapiens
MDLEAAKNGTAWRPTSAEGDFELGISSKQKRKKTKTVKMIGVLTLFRYSDWQDKLFMSLGTIMAIAHGSGLPLMMIVFGEMTDKFVDTAGNFSFPVNFSLSLLNPGKILEEEMTRYAYYYSGLGAGVLVAAYIQVSFWTLAAGRQIRKIRQKFFHAILRQEIGWFDINDTTELNTRLTDDISKISEGIGDKVGMFFQAVATFFAGFIVGFIRGWKLTLVIMAISPILGLSAAVWAKILSAFSDKELAAYAKAGAVAEEALGAIRTVIAFGGQNKELERYQKHLENAKEIGIKKAISANISMGIAFLLIYASYALAFWYGSTLVISKEYTIGNAMTVFFSILIGAFSVGQAAPCIDAFANARGAAYVIFDIIDNNPKIDSFSERGHKPDSIKGNLEFNDVHFSYPSRANVKILKGLNLKVQSGQTVALVGSSGCGKSTTVQLIQRLYDPDEGTINIDGQDIRNFNVNYLREIIGVVSQEPVLFSTTIAENICYGRGNVTMDEIKKAVKEANAYEFIMKLPQKFDTLVGERGAQLSGGQKQRIAIARALVRNPKILLLDEATSALDTESEAEVQAALDKAREGRTTIVIAHRLSTVRNADVIAGFEDGVIVEQGSHSELMKKEGVYFKLVNMQTSGSQIQSEEFELNDEKAATRMAPNGWKSRLFRHSTQKNLKNSQMCQKSLDVETDGLEANVPPVSFLKVLKLNKTEWPYFVVGTVCAIANGGLQPAFSVIFSEIIAIFGPGDDAVKQQKCNIFSLIFLFLGIISFFTFFLQGFTFGKAGEILTRRLRSMAFKAMLRQDMSWFDDHKNSTGALSTRLATDAAQVQGATGTRLALIAQNIANLGTGIIISFIYGWQLTLLLLAVVPIIAVSGIVEMKLLAGNAKRDKKELEAAGKIATEAIENIRTVVSLTQERKFESMYVEKLYGPYRNSVQKAHIYGITFSISQAFMYFSYAGCFRFGAYLIVNGHMRFRDVILVFSAIVFGAVALGHASSFAPDYAKAKLSAAHLFMLFERQPLIDSYSEEGLKPDKFEGNITFNEVVFNYPTRANVPVLQGLSLEVKKGQTLALVGSSGCGKSTVVQLLERFYDPLAGTVFVDFGFQLLDGQEAKKLNVQWLRAQLGIVSQEPILFDCSIAENIAYGDNSRVVSQDEIVSAAKAANIHPFIETLPHKYETRVGDKGTQLSGGQKQRIAIARALIRQPQILLLDEATSALDTESEKVVQEALDKAREGRTCIVIAHRLSTIQNADLIVVFQNGRVKEHGTHQQLLAQKGIYFSMVSVQAGTQNL

SEQ ID NO: 867 - protein, 1232 aa, Homo sapiens
MDLEAAKNGTAWRPTSAEGDFELGISSKQKRKKTKTVKMIGVLTLFRYSDWQDKLFMSLGTIMAIAHGSGLPLMMIVFGEMTDKFVDTAGNFSFPVNFSLSLLNPGKILEEEMTRYAYYYSGLGAGVLVAAYIQVSFWTLAAGRQIRKIRQKFFHAILRQEIGWFDINDTTELNTRLTDDISKISEGIGDKVGMFFQAVATFFAGFIVGFIRGWKLTLVIMAISPILGLSAAVWAKILSAFSDKELAAYAKAGAVAEEALGAIRTVIAFGGQNKELERYQKHLENAKEIGIKKAISANISMGIAFLLIYASYALAFWYGSTLVISKEYTIGNAMTVFFSILIGAFSVGQAAPCIDAFANARGAAYVIFDIIDNNPKIDSFSERGHKPDSIKGNLEFNDVHFSYPSRANVKILKGLNLKVQSGQTVALVGSSGCGKSTTVQLIQRLYDPDEGTINIDGQDIRNFNVNYLREIIGVVSQEPVLFSTTIAENICYGRGNVTMDEIKKAVKEANAYEFIMKLPQKFDTLVGERGAQLSGGQKQRIAIARALVRNPKILLLDEATSALDTESEAEVQAALDKAREGRTTIVIAHRLSTVRNADVIAGFEDGVIVEQGSHSELMKKEGVYFKLVNMQTSGSQIQSEEFELNDEKAATRMAPNGWKSRLFRHSTQKNLKNSQMCQKSLDVETDGLEANVPPVSFLKVLKLNKTEWPYFVVGTVCAIANGGLQPAFSVIFSEIIAIFGPGDDAVKQQKCNIFSLIFLFLGIISFFTFFLQGFTFGKAGEILTRRLRSMAFKAMLRQDMSWFDDHKNSTGALSTRLATDAAQVQGATGTRLALIAQNIANLGTGIIISFIYGWQLTLLLLAVVPIIAVSGIVEMKLLAGNAKRDKKELEAAGKIATEAIENIRTVVSLTQERKFESMYVEKLYGPYRVFSAIVFGAVALGHASSFAPDYAKAKLSAAHLFMLFERQPLIDSYSEEGLKPDKFEGNITFNEVVFNYPTRANVPVLQGLSLEVKKGQTLALVGSSGCGKSTVVQLLERFYDPLAGTVLLDGQEAKKLNVQWLRAQLGIVSQEPILFDCSIAENIAYGDNSRVVSQDEIVSAAKAANIHPFIETLPHKYETRVGDKGTQLSGGQKQRIAIARALIRQPQILLLDEATSALDTESEKVVQEALDKAREGRTCIVIAHRLSTIQNADLIVVFQNGRVKEHGTHQQLLAQKGIYFSMVSVQAGTQNL

SEQ ID NO: 868 - protein, 1279 aa, Homo sapiens
MDLEAAKNGTAWRPTSAEGDFELGISSKQKRKKTKTVKMIGVLTLFRYSDWQDKLFMSLGTIMAIAHGSGLPLMMIVFGEMTDKFVDTAGNFSFPVNFSLSLLNPGKILEEEMTRYAYYYSGLGAGVLVAAYIQVSFWTLAAGRQIRKIRQKFFHAILRQEIGWFDINDTTELNTRLTDDISKISEGIGDKVGMFFQAVATFFAGFIVGFIRGWKLTLVIMAISPILGLSAAVWAKILSAFSDKELAAYAKAGAVAEEALGAIRTVIAFGGQNKELERYQKHLENAKEIGIKKAISANISMGIAFLLIYASYALAFWYGSTLVISKEYTIGNAMTVFFSILIGAFSVGQAAPCIDAFANARGAAYVIFDIIDNNPKIDSFSERGHKPDSIKGNLEFNDVHFSYPSRANVKILKGLNLKVQSGQTVALVGSSGCGKSTTVQLIQRLYDPDEGTINIDGQDIRNFNVNYLREIIGVVSQEPVLFSTTIAENICYGRGNVTMDEIKKAVKEANAYEFIMKLPQKFDTLVGERGAQLSGGQKQRIAIARALVRNPKILLLDEATSALDTESEAEVQAALDKAREGRTTIVIAHRLSTVRNADVIAGFEDGVIVEQGSHSELMKKEGVYFKLVNMQTSGSQIQSEEFELNDEKAATRMAPNGWKSRLFRHSTQKNLKNSQMCQKSLDVETDGLEANVPPVSFLKVLKLNKTEWPYFVVGTVCAIANGGLQPAFSVIFSEIIAIFGPGDDAVKQQKCNIFSLIFLFLGIISFFTFFLQGFTFGKAGEILTRRLRSMAFKAMLRQDMSWFDDHKNSTGALSTRLATDAAQVQGATGTRLALIAQNIANLGTGIIISFIYGWQLTLLLLAVVPIIAVSGIVEMKLLAGNAKRDKKELEAAGKIATEAIENIRTVVSLTQERKFESMYVEKLYGPYRNSVQKAHIYGITFSISQAFMYFSYAGCFRFGAYLIVNGHMRFRDVILVFSAIVFGAVALGHASSFAPDYAKAKLSAAHLFMLFERQPLIDSYSEEGLKPDKFEGNITFNEVVFNYPTRANVPVLQGLSLEVKKGQTLALVGSSGCGKSTVVQLLERFYDPLAGTVLLDGQEAKKLNVQWLRAQLGIVSQEPILFDCSIAENIAYGDNSRVVSQDEIVSAAKAANIHPFIETLPHKYETRVGDKGTQLSGGQKQRIAIARALIRQPQILLLDEATSALDTESEKVVQEALDKAREGRTCIVIAHRLSTIQNADLIVVFQNGRVKEHGTHQQLLAQKGIYFSMVSVQAGTQNL

SEQ ID NO: 869 - protein, 61 aa, Homo sapiens
MDLEAAKNGTAWRPTSAEGDFELGISSKQKRKKTKTVKMIGVLTLFRYSDWQDKLFMSLGT

SEQ ID NO: 870 - protein, 1232 aa, Homo sapiens; identical to SEQ ID NO: 867

SEQ ID NO: 871 - protein, 1279 aa, Homo sapiens; identical to SEQ ID NO: 868

SEQ ID NO: 872 - protein, 487 aa, Homo sapiens
MRENMARGPCNAPRWASLMVLVAIGTAVTAAVNPGVVVRISQKGLDYASQQGTAALQKELKRIKIPDYSDSFKIKHLGKGHYSFYSMDIREFQLPSSQISMVPNVGLKFSISNANIKISGKWKAQKRFLKMSGNFDLSIEGMSISADLKLGSNPTSGKPTITCSSCSSHINSVHVHISKSKVGWLIQLFHKKIESALRNKMNSQVCEKVTNSVSSELQPYFQTLPVMTKIDSVAGINYGLVAPPATTAETLDVQMKGEFYSENHHNPPPFAPPVMEFPAAHDRMVYLGLSDYFFNTAGLVYQEAGVLKMTLRDDMIPKESKFRLTTKFFGTFLPEVAKKFPNMKIQIHVSASTPPHLSVQPTGLTFYPAVDVQAFAVLPNSSLASLFLIGMHTTGSMEVSAESNRLVGELKLDRLLLELKHSNIGPFPVELLQDIMNYIVPILVLPRVNEKLQKGFPLPTPARVQLYNVVLQPHQNFLLFGADVVYK

SEQ ID NO: 873 - protein, 482 aa, Homo sapiens
MDEGIPHLQERQLLEHRDFIGLDYSSLYMCKPKRSMKRDDTKDTYKLPHRLIEKKRRDRINECIAQLKDLLPEHLKLTTLGHLEKAVVLELTLKHLKALTALTEQQHQKIIALQNGERSLKSPIQSDLDAFHSGFQTCAKEVLQYLSRFESWTPREPRCVQLINHLHAVATQFLPTPQLLTQQVPLSKGTGAPSAAGSAAAPCLERAGQKLEPLAYCVPVIQRTQPSAELAAENDTDTDSGYGGEAEARPDREKGKGAGASRVTIKQEPPGEDSPAPKRMKLDSRGGGSGGGPGGGAAAAAAALLGPDPAAAAALLRPDAALLSSLVAFGGGGGAPFPQPAAAAAPFCLPFCFLSPSAAAAYVQPFLDKSGLEKYLYPAAAAAPFPLLYPGIPAPAAAAAAAAAAAAAAAAFPCLSSVLSPPPEKAGAAAATLLPHEVAPLGAPHPQHPHGRTHLPFAGPREPGNPESSAQEDPSQPGKEAP

SEQ ID NO: 874 - protein, 370 aa, Homo sapiens
MDEGIPHLQERQLLEHRDFIGLDYSSLYMCKPKRSMKRDDTKDTYKLPHRLIEKKRRDRINECIAQLKDLLPEHLKLTTLGHLEKAVVLELTLKHLKALTALTEQQHQKIIALQNGERSLKSPIQSDLDAFHSGFQTCAKEVLQYLSRFESWTPREPRCVQLINHLHAVATQFLPTPQLLTQQVPLSKGTGAPSAAGSAAAPCLERAGQKLEPLAYCVPVIQRTQPSAELAAENDTDTDSGYGGEAEARPDREKGKGAGASRVTIKQEPPGEDSPPPPPRSPACPRCCRPLPRRRAPPPRPSCRTRWRPLGRRTPSTRTAAPTCPSPGPASRGTRRALLRKIPRSQERKLPESLRPEGRRFKQSEKLKYP

SEQ ID NO: 875 - protein, 396 aa, Homo sapiens
MVAGTRCLLALLLPQVLLGGAAGLVPELGRRKFAAASSGRPSSQPSDEVLSEFELRLLSMFGLKQRPTPSRDAVVPPYMLDLYRRHSGQPGSPAPDHRLERAASRANTVRSFHHEESLEELPETSGKTTRRFFFNLSSIPTEEFITSAELQVFREQMQDALGNNSSFHHRINIYEIIKPATANSKFPVTRLLDTRLVNQNASRWESFDVTPAVMRWTAQGHANHGFVVEVAHLEEKQGVSKRHVRISRSLHQDEHSWSQIRPLLVTFGHDGKGHPLHKREKRQAKHKQRKRLKSSCKRHPLYVDFSDVGWNDWIVAPPGYHAFYCHGECPFPLADHLNSTNHAIVQTLVNSVNSKIPKACCVPTELSAISMLYLDENEKVVLKNYQDMVVEGCGCR

SEQ ID NO: 876 - protein, 431 aa, Homo sapiens
MHVRSLRAAAPHSFVALWAPLFLLRSALADFSLDNEVHSSFIHRRLRSQERREMQREILSILGLPHRPRPHLQGKHNSAPMFMLDLYNAMAVEEGGGPGGQGFSYPYKAVFSTQGPPLASLQDSHFLTDADMVMSFVNLVEHDKEFFHPRYHHREFRFDLSKIPEGEAVTAAEFRIYKDYIRERFDNETFRISVYQVLQEHLGRESDLFLLDSRTLWASEEGWLVFDITATSNHWVVNPRHNLGLQLSVETLDGQSINPKLAGLIGRHGPQNKQPFMVAFFKATEVHFRSIRSTGSKQRSQNRSKTPKNQEALRMANVAENSSSDQRQACKKHELYVSFRDLGWQDWIIAPEGYAAYYCEGECAFPLNSYMNATNHAIVQTLVHFINPETVPKPCCAPTQLNAISVLYFDDSSNVILKKYRNMVVRACGCH

SEQ ID NO: 877 - protein, 365 aa, Homo sapiens
MHVRSLRAAAPHSFVALWAPLFLLRSALADFSLDNEVHSSFIHRRLRSQERREMQREILSILGLPHRPRPHLQGKHNSAPMFMLDLYNAMAVEEGGGPGGQGFSYPYKAVFSTQGPPLASLQDSHFLTDADMVMSFVNLVEHDKEFFHPRYHHREFRFDLSKIPEGEAVTAAEFRIYKDYIRERFDNETFRISVYQVLQEHLGRESDLFLLDSRTLWASEEGWLVFDITATSNHWVVNPRHNLGLQLSVETLDENSSSDQRQACKKHELYVSFRDLGWQDWIIAPEGYAAYYCEGECAFPLNSYMNATNHAIVQTLVHFINPETVPKPCCAPTQLNAISVLYFDDSSNVILKKYRNMVVRACGCH

SEQ ID NO: 878 - protein, 1500 aa, Homo sapiens
MTRILTAFKVVRTLKTGFGFTNVTAHQKWKFSRPGIRLLSVKAQTAHIVLEDGTKMKGYSFGHPSSVAGEVVFNTGLGGYPEAITDPAYKGQILTMANPIIGNGGAPDTTALDELGLSKYLESNGIKVSGLLVLDYSKDYNHWLATKSLGQWLQEEKVPAIYGVDTRMLTKIIRDKGTMLGKIEFEGQPVDFVDPNKQNLIAEVSTKDVKVYGKGNPTKVVAVDCGIKNNVIRLLVKRGAEVHLVPWNHDFTKMEYDGILIAGGPGNPALAEPLIQNVRKILESDRKEPLFGISTGNLITGLAAGAKTYKMSMANRGQNQPVLNITNKQAFITAQNHGYALDNTLPAGWKPLFVNVNDQTNEGIMHESKPFFAVQFHPEVTPGPIDTEYLFDSFFSLIKKGKATTITSVLPKPALVASRVEVSKVLILGSGGLSIGQAGEFDYSGSQAVKAMKEENVKTVLMNPNIASVQTNEVGLKQADTVYFLPITPQFVTEVIKAEQPDGLILGMGGQTALNCGVELFKRGVLKEYGVKVLGTSVESIMATEDRQLFSDKLNEINEKIAPSFAVESIEDALKAADTIGYPVMIRSAYALGGLGSGICPNRETLMDLSTKAFAMTNQILVEKSVTGWKEIEYEVVRDADDNCVTVCNMENVDAMGVHTGDSVVVAPAQTLSNAEFQMLRRTSINVVRHLGIVGECNIQFALHPTSMEYCIIEVNARLSRSSALASKATGYPLAFIAAKIALGIPLPEIKNVVSGKTSACFEPSLDYMVTKIPRWDLDRFHGTSSRIGSSMKSVGEVMAIGRTFEESFQKALRMCHPSIEGFTPRLPMNKEWPSNLDLRKELSEPSSTRIYAIAKAIDDNMSLDEIEKLTYIDKWFLYKMRDILNMEKTLKGLNSESMTEETLKRAKEIGFSDKQISKCLGLTEAQTRELRLKKNIHPWVKQIDTLAAEYPSVTNYLYVTYNGQEHDVNFDDHGMMVLGCGPYHIGSSVEFDWCAVSSIRTLRQLGKKTVVVNCNPETVSTDFDECDKLYFEELSLERILDIYHQEACGGCIISVGGQIPNNLAVPLYKNGVKIMGTSPLQIDRAEDRSIFSAVLDELKVAQAPWKAVNTLNEALEFAKSVDYPCLLRPSYVLSGSAMNVVFSEDEMKKFLEEATRVSQEHPVVLTKFVEGAREVEMDAVGKDGRVISHAISEHVEDAGVHSGDATLMLPTQTISQGAIEKVKDATRKIAKAFAISGPFNVQFLVKGNDVLVIECNLRASRSFPFVSKTLGVDFIDVATKVMIGENVDEKHLPTLDHPIIPADYVAIKAPMFSWPRLRDADPILRCEMASTGEVACFGEGIHTAFLKAMLSTGFKIPQKGILIGIQQSFRPRFLGVAEQLHNEGFKLFATEATSDWLNANNVPATPVAWPSQEGQNPSLSSIRKLIRDGSIDLVINLPNNNTKFVHDNYVIRRTAVDSGIPLLTNFQVTKLFAEAVQKSRKVDSKSLFHYRQYSAGKAA

SEQ ID NO: 879 - protein, 121 aa, Homo sapiens
MTRILTAFKVVRTLKTGFGFTNVTAHQKWKFSRPGIRLLSVKAQTAHIVLEDGTKMKGYSFGHPSSVAGEVVFNTGLGGYPEAITDPAYKGQILTMANPIIGNGGAPDTTALDELGLSKYL

SEQ ID NO: 880 - protein, 1506 aa, Homo sapiens
MPQIIKMTRILTAFKVVRTLKTGFGFTNVTAHQKWKFSRPGIRLLSVKAQTAHIVLEDGTKMKGYSFGHPSSVAGEVVFNTGLGGYPEAITDPAYKGQILTMANPIIGNGGAPDTTALDELGLSKYLESNGIKVSGLLVLDYSKDYNHWLATKSLGQWLQEEKVPAIYGVDTRMLTKIIRDKGTMLGKIEFEGQPVDFVDPNKQNLIAEVSTKDVKVYGKGNPTKVVAVDCGIKNNVIRLLVKRGAEVHLVPWNHDFTKMEYDGILIAGGPGNPALAEPLIQNVRKILESDRKEPLFGISTGNLITGLAAGAKTYKMSMANRGQNQPVLNITNKQAFITAQNHGYALDNTLPAGWKPLFVNVNDQTNEGIMHESKPFFAVQFHPEVTPGPIDTEYLFDSFFSLIKKGKATTITSVLPKPALVASRVEVSKVLILGSGGLSIGQAGEFDYSGSQAVKAMKEENVKTVLMNPNIASVQTNEVGLKQADTVYFLPITPQFVTEVIKAEQPDGLILGMGGQTALNCGVELFKRGVLKEYGVKVLGTSVESIMATEDRQLFSDKLNEINEKIAPSFAVESIEDALKAADTIGYPVMIRSAYALGGLGSGICPNRETLMDLSTKAFAMTNQILVEKSVTGWKEIEYEVVRDADDNCVTVCNMENVDAMGVHTGDSVVVAPAQTLSNAEFQMLRRTSINVVRHLGIVGECNIQFALHPTSMEYCIIEVNARLSRSSALASKATGYPLAFIAAKIALGIPLPEIKNVVSGKTSACFEPSLDYMVTKIPRWDLDRFHGTSSRIGSSMKSVGEVMAIGRTFEESFQKALRMCHPSIEGFTPRLPMNKEWPSNLDLRKELSEPSSTRIYAIAKAIDDNMSLDEIEKLTYIDKWFLYKMRDILNMEKTLKGLNSESMTEETLKRAKEIGFSDKQISKCLGLTEAQTRELRLKKNIHPWVKQIDTLAAEYPSVTNYLYVTYNGQEHDVNFDDHGMMVLGCGPYHIGSSVEFDWCAVSSIRTLRQLGKKTVVVNCNPETVSTDFDECDKLYFEELSLERILDIYHQEACGGCIISVGGQIPNNLAVPLYKNGVKIMGTSPLQIDRAEDRSIFSAVLDELKVAQAPWKAVNTLNEALEFAKSVDYPCLLRPSYVLSGSAMNVVFSEDEMKKFLEEATRVSQEHPVVLTKFVEGAREVEMDAVGKDGRVISHAISEHVEDAGVHSGDATLMLPTQTISQGAIEKVKDATRKIAKAFAISGPFNVQFLVKGNDVLVIECNLRASRSFPFVSKTLGVDFIDVATKVMIGENVDEKHLPTLDHPIIPADYVAIKAPMFSWPRLRDADPILRCEMASTGEVACFGEGIHTAFLKAMLSTGFKIPQKGILIGIQQSFRPRFLGVAEQLHNEGFKLFATEATSDWLNANNVPATPVAWPSQEGQNPSLSSIRKLIRDGSIDLVINLPNNNTKFVHDNYVIRRTAVDSGIPLLTNFQVTKLFAEAVQKSRKVDSKSLFHYRQYSAGKAA

SEQ ID NO: 881 - protein, 1049 aa, Homo sapiens
MKEENVKTVLMNPNIASVQTNEVGLKQADTVYFLPITPQFVTEVIKAEQPDGLILGMGGQTALNCGVELFKRGVLKEYGVKVLGTSVESIMATEDRQLFSDKLNEINEKIAPSFAVESIEDALKAADTIGYPVMIRSAYALGGLGSGICPNRETLMDLSTKAFAMTNQILVEKSVTGWKEIEYEVVRDADDNCVTVCNMENVDAMGVHTGDSVVVAPAQTLSNAEFQMLRRTSINVVRHLGIVGECNIQFALHPTSMEYCIIEVNARLSRSSALASKATGYPLAFIAAKIALGIPLPEIKNVVSGKTSACFEPSLDYMVTKIPRWDLDRFHGTSSRIGSSMKSVGEVMAIGRTFEESFQKALRMCHPSIEGFTPRLPMNKEWPSNLDLRKELSEPSSTRIYAIAKAIDDNMSLDEIEKLTYIDKWFLYKMRDILNMEKTLKGLNSESMTEETLKRAKEIGFSDKQISKCLGLTEAQTRELRLKKNIHPWVKQIDTLAAEYPSVTNYLYVTYNGQEHDVNFDDHGMMVLGCGPYHIGSSVEFDWCAVSSIRTLRQLGKKTVVVNCNPETVSTDFDECDKLYFEELSLERILDIYHQEACGGCIISVGGQIPNNLAVPLYKNGVKIMGTSPLQIDRAEDRSIFSAVLDELKVAQAPWKAVNTLNEALEFAKSVDYPCLLRPSYVLSGSAMNVVFSEDEMKKFLEEATRVSQEHPVVLTKFVEGAREVEMDAVGKDGRVISHAISEHVEDAGVHSGDATLMLPTQTISQGAIEKVKDATRKIAKAFAISGPFNVQFLVKGNDVLVIECNLRASRSFPFVSKTLGVDFIDVATKVMIGENVDEKHLPTLDHPIIPADYVAIKAPMFSWPRLRDADPILRCEMASTGEVACFGEGIHTAFLKAMLSTGFKIPQKGILIGIQQSFRPRFLGVAEQLHNEGFKLFATEATSDWLNANNVPATPVAWPSQEGQNPSLSSIRKLIRDGSIDLVINLPNNNTKFVHDNYVIRRTAVDSGIPLLTNFQVTKLFAEAVQKSRKVDSKSLFHYRQYSAGKAA

SEQ ID NO: 882 - protein, 121 aa, Homo sapiens; identical to SEQ ID NO: 879

SEQ ID NO: 883 - protein, 513 aa, Homo sapiens [sequence omitted]

SEQ ID NO: 884 - protein, 1508 aa, Homo sapiens
RPRPQIIKMTRILTAFKVVRTLKTGFGFTNVTAHQKWKFSRPGIRLLSVKAQTAHIVLEDGTKMKGYSFGHPSSVAGEVVFNTGLGGYPEAITDPAYKGQILTMANPIIGNGGAPDTTALDELGLSKYLESNGIKVSGLLVLDYSKDYNHWLATKSLGQWLQEEKVPAIYGVDTRMLTKIIRDKGTMLGKIEFEGQPVDFVDPNKQNLIAEVSTKDVKVYGKGNPTKVVAVDCGIKNNVIRLLVKRGAEVHLVPWNHDFTKMEYDGILIAGGPGNPALAEPLIQNVRKILESDRKEPLFGISTGNLITGLAAGAKTYKMSMANRGQNQPVLNITNKQAFITAQNHGYALDNTLPAGWKPLFVNVNDQTNEGIMHESKPFFAVQFHPEVTPGPIDTEYLFDSFFSLIKKGKATTITSVLPKPALVASRVEVSKVLILGSGGLSIGQAGEFDYSGSQAVKAMKEENVKTVLMNPNIASVQTNEVGLKQADTVYFLPITPQFVTEVIKAEQPDGLILGMGGQTALNCGVELFKRGVLKEYGVKVLGTSVESIMATEDRQLFSDKLNEINEKIAPSFAVESIEDALKAADTIGYPVMIRSAYALGGLGSGICPNRETLMDLSTKAFAMTNQILVEKSVTGWKEIEYEVVRDADDNCVTVCNMENVDAMGVHTGDSVVVAPAQTLSNAEFQMLRRTSINVVRHLGIVGECNIQFALHPTSMEYCIIEVNARLSRSSALASKATGYPLAFIAAKIALGIPLPEIKNVVSGKTSACFEPSLDYMVTKIPRWDLDRFHGTSSRIGSSMKSVGEVMAIGRTFEESFQKALRMCHPSIEGFTPRLPMNKEWPSNLDLRKELSEPSSTRIYAIAKAIDDNMSLDEIEKLTYIDKWFLYKMRDILNMEKTLKGLNSESMTEETLKRAKEIGFSDKQISKCLGLTEAQTRELRLKKNIHPWVKQIDTLAAEYPSVTNYLYVTYNGQEHDVNFDDHGMMVLGCGPYHIGSSVEFDWCAVSSIRTLRQLGKKTVVVNCNPETVSTDFDECDKLYFEELSLERILDIYHQEACGGCIISVGGQIPNNLAVPLYKNGVKIMGTSPLQIDRAEDRSIFSAVLDELKVAQAPWKAVNTLNEALEFAKSVDYPCLLRPSYVLSGSAMNVVFSEDEMKKFLEEATRVSQEHPVVLTKFVEGAREVEMDAVGKDGRVISHAISEHVEDAGVHSGDATLMLPTQTISQGAIEKVKDATRKIAKAFAISGPFNVQFLVKGNDVLVIECNLRASRSFPFVSKTLGVDFIDVATKVMIGENVDEKHLPTLDHPIIPADYVAIKAPMFSWPRLRDADPILRCEMASTGEVACFGEGIHTAFLKAMLSTGFKIPQKGILIGIQQSFRPRFLGVAEQLHNEGFKLFATEATSDWLNANNVPATPVAWPSQEGQNPSLSSIRKLIRDGSIDLVINLPNNNTKFVHDNYVIRRTAVDSGIPLLTNFQVTKLFAEAVQKSRKVDSKSLFHYRQYSAGKAA

SEQ ID NO: 885 - protein, 70 aa, Homo sapiens
MTRILTAFKVVRTLKTGFGFTNVTAHQKWKFSRPGIRLLSVKAQTAHIVLEDRDADTPAPLLNQPEPHVI

SEQ ID NO: 886 - protein, 201 aa, Homo sapiens
MSRREGSLEDPQTDSSVSLLPHLEAKIRQTHSLAHLLTKYAEQLLQEYVQLQGDPFGLPSFSPPRLPVAGLSAPAPSHAGLPVHERLRLDAAALAALPPLLDAVCRRQAELNPRAPRLLRRLEDAARQARALGAAVEALLAALGAANRGPRAEPPAATASAASATGVFPAKVLGLRVCGLYREWLSRTEGDLGQLLPGGSA

SEQ ID NO: 887 - protein, 200 aa, Homo sapiens
MSRREGSLDPQTDSSVSLLPHLEAKIRQTHSLAHLLTKYAEQLLQEYVQLQGDPFGLPSFSPPRLPVAGLSAPAPSHAGLPVHERLRLDAAALAALPPLLDAVCRRQAELNPRAPRLLRRLEDAARQARALGAAVEALLAALGAANRGPRAEPPAATASAASATGVFPAKVLGLRVCGLYREWLSRTEGDLGQLLPGGSA

SEQ ID NO: 888 - protein, 170 aa, Homo sapiens
MKTQRDGHSLGRWSLVLLLLGLVMPLAIIAQVLSYKEAVLRAIDGINQRSSDANLYRLLDLDPRPTMDGDPDTPKPVSFTVKETVCPRTTQQSPEDCDFKKDGLVKRCMGTVTLNQARGSFDISCDKDNKRFALLGDFFRKSKEKIGKEFKRIVQRIKDFLRNLVPRTES

SEQ ID NO: 889 - protein, 170 aa, Homo sapiens; identical to SEQ ID NO: 888

SEQ ID NO: 890 - protein, 184 aa, Homo sapiens
MADHLMLAEGYRLVQRPPSAAAAHGPHALRTLPPYAGPGLDSGLRPRGAPLGPPPPRQPGALAYGAFGPPSSFQPFPAVPPPAAGIAHLQPVATPYPGRAAAPPNAPGGPPGPQPAPSAAAPPPPAHALGGMDAELIDEEALTSLELELGLHRVRELPELFLGQSEFDCFSDLGSAPPAGSVSC

SEQ ID NO: 891 - protein, 1065 aa, Homo sapiens
MKILILGIFLFLCSTPAWAKEKHYYIGIIETTWDYASDHGEKKLISVDTEHSNIYLQNGPDRIGRLYKKALYLQYTDETFRTTIEKPVWLGFLGPIIKAETGDKVYVHLKNLASRPYTFHSHGITYYKEHEGAIYPDNTTDFQRADDKVYPGEQYTYMLLATEEQSPGEGDGNCVTRIYHSHIDAPKDIASGLIGPLIICKKDSLDKEKEKHIDREFVVMFSVVDENFSWYLEDNIKTYCSEPEKVDKDNEDFQESNRMYSVNGYTFGSLPGLSMCAEDRVKWYLFGMGNEVDVHAAFFHGQALTNKNYRIDTINLFPATLFDAYMVAQNPGEWMLSCQNLNHLKAGLQAFFQVQECNKSSSKDNIRGKHVRHYYIAAEEIIWNYAPSGIDIFTKENLTAPGSDSAVFFEQGTTRIGGSYKKLVYREYTDASFTNRKERGPEEEHLGILGPVIWAEVGDTIRVTFHNKGAYPLSIEPIGVRFNKNNEGTYYSPNYNPQSRSVPPSASHVAPTETFTYEWTVPKEVGPTNADPVCLAKMYYSAVEPTKDIFTGLIGPMKICKKGSLHANGRQKDVDKEFYLFPTVFDENESLLLEDNIRMFTTAPDQVDKEDEDFQESNKMHSMNGFMYGNQPGLTMCKGDSVVWYLFSAGNEADVHGIYFSGNTYLWRGERRDTANLFPQTSLTLHMWPDTEGTFNVECLTTDHYTGGMKQKYTVNQCRRQSEDSTFYLGERTYYIAAVEVEWDYSPQREWEKELHHLQEQNVSNAFLDKGEFYIGSKYKKVVYRQYTDSTFRVPVERKAEEEHLGILGPQLHADVGDKVKIIFKNMATRPYSIHAHGVQTESSTVTPTLPGETLTYVWKIPERSGAGTEDSACIPWAYYSTVDQVKDLYSGLIGPLIVCRRPYLKVFNPRRKLEFALLFLVFDENESWYLDDNIKTYSDHPEKVNKDDEEFIESNKMHAINGRMFGNLQGLTMHVGDEVNWYLMGMGNEIDLHTVHFHGHSFQYKHRGVYSSDVFDIFPGTYQTLEMFPRTPGIWLLHCHVTDHIHAGMETTYTVLQNEDTKSG

SEQ ID NO: 892 - protein, 200 aa, Homo sapiens
MAFTEHSPLTPHRRDLCSRSIWLARKIRSDLTALTESYVKHQGLNKNINLDSADGMPVASTDQWSELTEAERLQENLQAYRTFHVLLARLLEDQQVHFTPTEGDFHQAIHTLLLQVAAFAYQIEELMILLEYKIPRNEADGMPINVGDGGLFEKKLWGLKVLQELSQWTVRSIHDLRFISSHQTGIPARGSHYIANNKKM

SEQ ID NO: 893 - protein, 622 aa, Homo sapiens
MAHVRGLQLPGCLALAALCSLVHSQHVFLAPQQARSLLQRVRRANTFLEEVRKGNLERECVEETCSYEEAFEALESSTATDVFWAKYTACETARTPRDKLAACLEGNCAEGLGTNYRGHVNITRSGIECQLWRSRYPHKPEINSTTHPGADLQENFCRNPDSSTTGPWCYTTDPTVRRQECSIPVCGQDQVTVAMTPRSEGSSVNLSPPLEQCVPDRGQQYQGRLAVTTHGLPCLAWASAQAKALSKHQDFNSAVQLVENFCRNPDGDEEGVWCYVAGKPGDFGYCDLNYCEEAVEEETGDGLDEDSDRAIEGRTATSEYQTFFNPRTFGSGEADCGLRPLFEKKSLEDKTERELLESYIDGRIVEGSDAEIGMSPWQVMLFRKSPQELLCGASLISDRWVLTAAHCLLYPPWDKNFTENDLLVRIGKHSRTRYERNIEKISMLEKIYIHPRYNWRENLDRDIALMKLKKPVAFSDYIHPVCLPDRETAASLLQAGYKGRVTGWGNLKETWTANVGKGQPSVLQVVNLPIVERPVCKDSTRIRITDNMFCAGYKPDEGKRGDACEGDSGGPFVMKSPFNNRWYQMGIVSWGEGCDRDGKYGFYTHVFRLKKWIQKVIDQFGE

SEQ ID NO: 894 - protein, 64 aa, Homo sapiens [sequence omitted]

SEQ ID NO: 895 - protein, 583 aa, Homo sapiens
MAHVRGLQLPGCLALAALCSLVHSQHVFLAPQQARSLLQRVRRANTFLEEVRKGNLERECVEETCSYEEAFEALESSTATDVFWAKYTACETARTPRDKLAACLEGNCAEGLGTNYRGHVNITRSGIECQLWRSRYPHKPEINSTTHPGADLQENFCRNPDSSTTGPWCYTTDPTVRRQECSIPVCGQDQVTVAMTPRSEGSSVNLSPPLEQCVPDRGQQYQGRLAVTTHGLPCLAWASAQAKALSKHQDFNSAVQLVENFCRNPDGDEEGVWCYVAGKPGDFGYCDLNYCEEAVEEETGDGLDEDSDRAIEGRTATSEYQTFFNPRTFGSGEADCGLRPLFEKKSLEDKTERELLESYIDGRIVEGSDAEIGMSPWQVMLFRKSPQELLCGASLISDRWVLTAAHCLLYPPWDKNFTENDLLVRIGKHSRTRYERNIEKISMLEKIYIHPSLLQAGYKGRVTGWGNLKETWTANVGKGQPSVLQVVNLPIVERPVCKDSTRIRITDNMFCAGYKPDEGKRGDACEGDSGGPFVMKSPFNNRWYQMGIVSWGEGCDRDGKYGFYTHVFRLKKWIQKVIDQFGE

SEQ ID NO: 896 - protein, 295 aa, Homo sapiens
METPAWPRVPRPETAVARTLLLGWVFAQVAGASGTTNTVAAYNLTWKSTNFKTILEWEPKPVNQVYTVQISTKSGDWKSKCFYTTDTECDLTDEIVKDVKQTYLARVFSYPAGNVESTGSAGEPLYENSPEFTPYLETNLGQPTIQSFEQVGTKVNVTVEDERTLVRRNNTFLSLRDVFGKDLIYTLYYWKSSSSGKKTAKTNTNEFLIDVDKGENYCFSVQAVIPSRTVNRKSTDSPVECMGQEKGEFREIFYIIGAVVFVVIILVIILAISLHKCRKAGVGQSWKENSPLNVS

SEQ ID NO: 897 - protein, 238 aa, Homo sapiens
METPAWPRVPRPETAVARTLLLGWVFAQVAGASGTTNTVAAYNLTWKSTNFKTILEWEPKPVNQVYTVQISTKSGDWKSKCFYTTDTECDLTDEIVKDVKQTYLARVFSYPAGNVESTGSAGEPLYENSPEFTPYLETNLGQPTIQSFEQVGTKVNVTVEDERTLVRRNNTFLSLRDVFGKDLIYTLYYWKSSSSGKKYSTSLELWYLWSSSLSSSWLYLYTSVERQEWGRAGRRTPH

SEQ ID NO: 898 - protein, 461 aa, Homo sapiens
MQRVNMIMAESPGLITICLLGYLLSAECTVFLDHENANKILNRPKRYNSGKLEEFVQGNLERECMEEKCSFEEAREVFENTERTTEFWKQYVDGDQCESNPCLNGGSCKDDINSYECWCPFGFEGKNCELDVTCNIKNGRCEQFCKNSADNKVVCSCTEGYRLAENQKSCEPAVPFPCGRVSVSQTSKLTRAETVFPDVDYVNSTEAETILDNITQSTQSFNDFTRVVGGEDAKPGQFPWQVVLNGKVDAFCGGSIVNEKWIVTAAHCVETGVKITVVAGEHNIEETEHTEQKRNVIRIIPHHNYNAAINKYNHDIALLELDEPLVLNSYVTPICIADKEYTNIFLKFGSGYVSGWGRVFHKGRSALVLQYLRVPLVDRATCLRSTKFTIYNNMFCAGFHEGGRDSCQGDSGGPHVTEVEGTSFLTGIISWGEECAMKGKYGIYTKVSRYVNWIKEKTKLT

SEQ ID NO: 899 - protein, 423 aa, Homo sapiens
MQRVNMIMAESPGLITICLLGYLLSAECTVFLDHENANKILNRPKRYNSGKLEEFVQGNLERECMEEKCSFEEAREVFENTERTTEFWKQYVDVTCNIKNGRCEQFCKNSADNKVVCSCTEGYRLAENQKSCEPAVPFPCGRVSVSQTSKLTRAETVFPDVDYVNSTEAETILDNITQSTQSFNDFTRVVGGEDAKPGQFPWQVVLNGKVDAFCGGSIVNEKWIVTAAHCVETGVKITVVAGEHNIEETEHTEQKRNVIRIIPHHNYNAAINKYNHDIALLELDEPLVLNSYVTPICIADKEYTNIFLKFGSGYVSGWGRVFHKGRSALVLQYLRVPLVDRATCLRSTKFTIYNNMFCAGFHEGGRDSCQGDSGGPHVTEVEGTSFLTGIISWGEECAMKGKYGIYTKVSRYVNWIKEKTKLT

SEQ ID NO: 900 - protein, 2229 aa, Homo sapiens
MFPGCPRLWVLVVLGTSWVGWGSQGTEAAQLRQFYVAAQGISWSYRPEPTNSSLNLSVTSFKKIVYREYEPYFKKEKPQSTISGLLGPTLYAEVGDIIKVHFKNKADKPLSIHPQGIRYSKLSEGASYLDHTFPAEKMDDAVAPGREYTYEWSISEDSGPTHDDPPCLTHIYYSHENLIEDFNSGLIGPLLICKKGTLTEGGTQKTFDKQIVLLFAVFDESKSWSQSSSLMYTVNGYVNGTMPDITVCAHDHISWHLLGMSSGPELFSIHFNGQVLEQNHHKVSAITLVSATSTTANMTVGPEGKWIISSLTPKHLQAGMQAYIDIKNCPKKTRNLKKITREQRRHMKRWEYFIAAEEVIWDYAPVIPANMDKKYRSQHLDNFSNQIGKHYKKVMYTQYEDESFTKHTVNPNMKEDGILGPIIRAQVRDTLKIVFKNMASRPYSIYPHGVTFSPYEDEVNSSFTSGRNNTMIRAVQPGETYTYKWNILEFDEPTENDAQCLTRPYYSDVDIMRDIASGLIGLLLICKSRSLDRQGIQRAADIEQQAVFAVFDENKSWYLEDNINKFCENPDEVKRDDPKFYESNIMSNFTLSAINGYVPESITTLGFCFDDTVQWHFCSVGTQNEILTIHFTGHSFIYGKRHEDTLTLFPMRGESVTVTMDNVGTWMLTSMNSSPRSKKLRLKFRDVKCIPDDDEDSYEIFEPPESTVMATRKMHDRLEPEDEESDADYDYQNRLAAALGIRSFRNSSLNQEEEEFNLTALALENGTEFVSSNTDIIVGSNYSSPSNISKFTVNNLAEPQKAPSHQQATTAGSPLRHLIGKNSVLNSSTAEHSSPYSEDPIEDPLQPDVTGIRLLSLGAGEFKSQEHAKHKGPKVERDQAAKHRFSWMKLLAHKVGRHLSQDTGSPSGMRPWEDLPSQDTGSPSRMRPWKDPPSDLLLLKQSNSSKILVGRWHLASEKGSYEIIQDTDEDTAVNNWLISPQNASRAWGESTPLANKPGKQSGHPKFPRVRHKSLQVRQDGGKSRLKKSQFLIKTRKKKKEKHTHHAPLSPRTFHPLRSEAYNTFSERRLKHSLVLHKSNETSLPTDLNQTLPSMDFGWIASLPDHNQNSSNDTGQASCPPGLYQTVPPEEHYQTFPIQDPDQMHSTSDPSHRSSSPELSEMLEYDRSHKSFPTDISQMSPSSEHEVWQTVISPDLSQVTLSPELSQTNLSPDLSHTTLSPELIQRNLSPALGQMPISPDLSHTTLSPDLSHTTLSLDLSQTNLSPELSQTNLSPALGQMPLSPDLSHTTLSLDFSQTNLSPELSHMTLSPELSQTNLSPALGQMPISPDLSHTTLSLDFSQTNLSPELSQTNLSPALGQMPLSPDPSHTTLSLDLSQTNLSPELSQTNLSPDLSEMPLFADLSQIPLTPDLDQMTLSPDLGETDLSPNFGQMSLSPDLSQVTLSPDISDTTLLPDLSQISPPPDLDQIFYPSESSQSLLLQEFNESFPYPDLGQMPSPSSPTLNDTFLSKEFNPLVIVGLSKDGTDYIEIIPKEEVQSSEDDYAEIDYVPYDDPYKTDVRTNINSSRDPDNIAAWYLRSNNGNRRNYYIAAEEISWDYSEFVQRETDIEDSDDIPEDTTYKKVVFRKYLDSTFTKRDPRGEYEEHLGILGPIIRAEVDDVIQVRFKNLASRPYSLHAHGLSYEKSSEGKTYEDDSPEWFKEDNAVQPNSSYTYVWHATERSGPESPGSACRAWAYYSAVNPEKDIHSGLIGPLLICQKGILHKDSNMPMDMREFVLLFMTFDEKKSWYYEKKSRSSWRLTSSEMKKSHEFHAINGMIYSLPGLKMYEQEWVRLHLLNIGGSQDIHVVHFHGQTLLENGNKQHQLGVWPLLPGSFKTLEMKASKPGWWLLNTEVGENQRAGMQTPFLIMDRDCRMPMGLSTGIISDSQIKASEFLGYWEPRLARLNNGGSYNAWSVEKLAAEFASKPWIQVDMQKEVIITGIQTQGAKHYLKSCYTTEFYVAYSSNQINWQIFKGNSTRNVMYFNGNSDASTIKENQFDPPIVARYIRISPTRAYNRPTLRLELQGCEVNGCSTPLGMENGKIENKQITASSFKKSWWGDYWEPFRARLNAQGRVNAWQAKANNNKQWLEIDLLKIKKITAIITQGCKSLSSEMYVKSYTIHYSEQGVEWKPYRLKSSMVDKIFEGNTNTKGHVKNFFNPPIISRFIRVIPKTWNQSIALRLELFGCDIY

SEQ ID NO: 901 - protein, 2224 aa, Homo sapiens
MFPGCPRLWVLVVLGTSWVGWGSQGTEAAQLRQFYVAAQGISWSYRPEPTNSSLNLSVTSFKKIVYREYEPYFKKEKPQSTISGLLGPTLYAEVGDIIKVHFKNKADKPLSIHPQGIRYSKLSEGASYLDHTFPAEKMDDAVAPGREYTYEWSISEDSGPTHDDPPCLTHIYYSHENLIEDFNSGLIGPLLICKKGTLTEGGTQKTFDKQIVLLFAVFDESKSWSQSSSLMYTVNGYVNGTMPDITVCAHDHISWHLLGMSSGPELFSIHFNGQVLEQNHHKVSAITLVSATSTTANMTVGPEGKWIISSLTPKHLQAGMQAYIDIKNCPKKTRNLKKITREQRRHMKRWEYFIAAEEVIWDYAPVIPANMDKKYRSQHLDNFSNQIGKHYKKVMYTQYEDESFTKHTVNPNMKEDGILGPIIRAQVRDTLKIVFKNMASRPYSIYPHGVTFSPYEDEVNSSFTSGRNNTMIRAVQPGETYTYKWNILEFDEPTENDAQCLTRPYYSDVDIMRDIASGLIGLLLICKSRSLDRQGIQRAADIEQQAVFAVFDENKSWYLEDNINKFCENPDEVKRDDPKFYESNIMSTINGYVPESITTLGFCFDDTVQWHFCSVGTQNEILTIHFTGHSFIYGKRHEDTLTLFPMRGESVTVTMDNVGTWMLTSMNSSPRSKKLRLKFRDVKCIPDDDEDSYEIFEPPESTVMATRKMHDRLEPEDEESDADYDYQNRLAAALGIRSFRNSSLNQEEEEFNLTALALENGTEFVSSNTDIIVGSNYSSPSNISKFTVNNLAEPQKAPSHQQATTAGSPLRHLIGKNSVLNSSTAEHSSPYSEDPIEDPLQPDVTGIRLLSLGAGEFKSQEHAKHKGPKVERDQAAKHRFSWMKLLAHKVGRHLSQDTGSPSGMRPWEDLPSQDTGSPSRMRPWKDPPSDLLLLKQSNSSKILVGRWHLASEKGSYEIIQDTDEDTAVNNWLISPQNASRAWGESTPLANKPGKQSGHPKFPRVRHKSLQVRQDGGKSRLKKSQFLIKTRKKKKEKHTHHAPLSPRTFHPLRSEAYNTFSERRLKHSLVLHKSNETSLPTDLNQTLPSMDFGWIASLPDHNQNSSNDTGQASCPPGLYQTVPPEEHYQTFPIQDPDQMHSTSDPSHRSSSPELSEMLEYDRSHKSFPTDISQMSPSSEHEVWQTVISPDLSQVTLSPELSQTNLSPDLSHTTLSPELIQRNLSPALGQMPISPDLSHTTLSPDLSHTTLSLDLSQTNLSPELSQTNLSPALGQMPLSPDLSHTTLSLDFSQTNLSPELSHMTLSPELSQTNLSPALGQMPISPDLSHTTLSLDFSQTNLSPELSQTNLSPALGQMPLSPDPSHTTLSLDLSQTNLSPELSQTNLSPDLSEMPLFADLSQIPLTPDLDQMTLSPDLGETDLSPNFGQMSLSPDLSQVTLSPDISDTTLLPDLSQISPPPDLDQIFYPSESSQSLLLQEFNESFPYPDLGQMPSPSSPTLNDTFLSKEFNPLVIVGLSKDGTDYIEIIPKEEVQSSEDDYAEIDYVPYDDPYKTDVRTNINSSRDPDNIAAWYLRSNNGNRRNYYIAAEEISWDYSEFVQRETDIEDSDDIPEDTTYKKVVFRKYLDSTFTKRDPRGEYEEHLGILGPIIRAEVDDVIQVRFKNLASRPYSLHAHGLSYEKSSEGKTYEDDSPEWFKEDNAVQPNSSYTYVWHATERSGPESPGSACRAWAYYSAVNPEKDIHSGLIGPLLICQKGILHKDSNMPMDMREFVLLFMTFDEKKSWYYEKKSRSSWRLTSSEMKKSHEFHAINGMIYSLPGLKMYEQEWVRLHLLNIGGSQDIHVVHFHGQTLLENGNKQHQLGVWPLLPGSFKTLEMKASKPGWWLLNTEVGENQRAGMQTPFLIMDRDCRMPMGLSTGIISDSQIKASEFLGYWEPRLARLNNGGSYNAWSVEKLAAEFASKPWIQVDMQKEVIITGIQTQGAKHYLKSCYTTEFYVAYSSNQINWQIFKGNSTRNVMYFNGNSDASTIKENQFDPPIVARYIRISPTRAYNRPTLRLELQGCEVNGCSTPLGMENGKIENKQITASSFKKSWWGDYWEPFRARLNAQGRVNAWQAKANNNKQWLEIDLLKIKKITAIITQGCKSLSSEMYVKSYTIHYSEQGVEWKPYRLKSSMVDKIFEGNTNTKGHVKNFFNPPIISRFIRVIPKTWNQSIALRLELFGCDIY

SEQ ID NO: 902 - protein, 332 aa, Homo sapiens [sequence omitted]

SEQ ID NO: 903 - protein, 444 aa, Homo sapiens
MVSQALRLLCLLLGLQGCLAAVFVTQEEAHGVLHRRRRANAFLEELRPGSLERECKEEQCSFEEAREIFKDAERTKLFWISYSDGDQCASSPCQNGGSCKDQLQSYICFCLPAFEGRNCETHKDDQLICVNENGGCEQYCSDHTGTKRSCRCHEGYSLLADGVSCTPTVEYPCGKIPILEKRNASKPQGRIVGGKVCPKGECPWQVLLLVNGAQLCGGTLINTIWVVSAAHCFDKIKNWRNLIAVLGEHDLSEHDGDEQSRRVAQVIIPSTYVPGTTNHDIALLRLHQPVVLTDHVVPLCLPERTFSERTLAFVRFSLVSGWGQLLDRGATALELMVLNVPRLMTQDCLQQSRKVGDSPNITEYMFCAGYSDGSKDSCKGDSGGPHATHYRGTWYLTGIVSWGQGCATVGHFGVYTRVSQYIEWLQKLMRSEPRPGVLLRAPFP

SEQ ID NO: 904 - protein, 466 aa, Homo sapiens
MVSQALRLLCLLLGLQGCLAAGGVAKASGGETRDMPWKPGPHRVFVTQEEAHGVLHRRRRANAFLEELRPGSLERECKEEQCSFEEAREIFKDAERTKLFWISYSDGDQCASSPCQNGGSCKDQLQSYICFCLPAFEGRNCETHKDDQLICVNENGGCEQYCSDHTGTKRSCRCHEGYSLLADGVSCTPTVEYPCGKIPILEKRNASKPQGRIVGGKVCPKGECPWQVLLLVNGAQLCGGTLINTIWVVSAAHCFDKIKNWRNLIAVLGEHDLSEHDGDEQSRRVAQVIIPSTYVPGTTNHDIALLRLHQPVVLTDHVVPLCLPERTFSERTLAFVRFSLVSGWGQLLDRGATALELMVLNVPRLMTQDCLQQSRKVGDSPNITEYMFCAGYSDGSKDSCKGDSGGPHATHYRGTWYLTGIVSWGQGCATVGHFGVYTRVSQYIEWLQKLMRSEPRPGVLLRAPFP

SEQ ID NO: 905 - protein, 397 aa, Homo sapiens
MGNVNRQGQHCRDFIMVSQALRLLCLLLGLQGCLAADGDQCASSPCQNGGSCKDQLQSYICFCLPAFEGRNCETHKDDQLICVNENGGCEQYCSDHTGTKRSCRCHEGYSLLADGVSCTPTVEYPCGKIPILEKRNASKPQGRIVGGKVCPKGECPWQVLLLVNGAQLCGGTLINTIWVVSAAHCFDKIKNWRNLIAVLGEHDLSEHDGDEQSRRVAQVIIPSTYVPGTTNHDIALLRLHQPVVLTDHVVPLCLPERTFSERTLAFVRFSLVSGWGQLLDRGATALELMVLNVPRLMTQDCLQQSRKVGDSPNITEYMFCAGYSDGSKDSCKGDSGGPHATHYRGTWYLTGIVSWGQGCATVGHFGVYTRVSQYIEWLQKLMRSEPRPGVLLRAPFP

SEQ ID NO: 906 - protein, 216 aa, Homo sapiens
MRIQDPGKVFFGNVDSSGIKHNIFNPPIIARYIRLHPTHYSIRSTLRMELMGCDLNSCSMPLGMESKAISDAQITASSYFTNMFATWSPSKARLHLQGRSNAWRPQVNNPKEWLQVDFQKTMKVTGVTTQGVKSLLTSMYVKEFLISSSQDGHQWTLFFQNGKVKVFQGNQDSFTPVVNSLDPPLLTRYLRIHPQSWVHQIALRMEVLGCEAQDLY

SEQ ID NO: 907 - protein, 2351 aa, Homo sapiens
MQIELSTCFFLCLLRFCFSATRRYYLGAVELSWDYMQSDLGELPVDARFPPRVPKSFPFNTSVVYKKTLFVEFTDHLFNIAKPRPPWMGLLGPTIQAEVYDTVVITLKNMASHPVSLHAVGVSYWKASEGAEYDDQTSQREKEDDKVFPGGSHTYVWQVLKENGPMASDPLCLTYSYLSHVDLVKDLNSGLIGALLVCREGSLAKEKTQTLHKFILLFAVFDEGKSWHSETKNSLMQDRDAASARAWPKMHTVNGYVNRSLPGLIGCHRKSVYWHVIGMGTTPEVHSIFLEGHTFLVRNHRQASLEISPITFLTAQTLLMDLGQFLLFCHISSHQHDGMEAYVKVDSCPEEPQLRMKNNEEAEDYDDDLTDSEMDVVRFDDDNSPSFIQIRSVAKKHPKTWVHYIAAEEEDWDYAPLVLAPDDRSYKSQYLNNGPQRIGRKYKKVRFMAYTDETFKTREAIQHESGILGPLLYGEVGDTLLIIFKNQASRPYNIYPHGITDVRPLYSRRLPKGVKHLKDFPILPGEIFKYKWTVTVEDGPTKSDPRCLTRYYSSFVNMERDLASGLIGPLLICYKESVDQRGNQIMSDKRNVILFSVFDENRSWYLTENIQRFLPNPAGVQLEDPEFQASNIMHSINGYVFDSLQLSVCLHEVAYWYILSIGAQTDFLSVFFSGYTFKHKMVYEDTLTLFPFSGETVFMSMENPGLWILGCHNSDFRNRGMTALLKVSSCDKNTGDYYEDSYEDISAYLLSKNNAIEPRSFSQNSRHPSTRQKQFNATTIPENDIEKTDPWFAHRTPMPKIQNVSSSDLLMLLRQSPTPHGLSLSDLQEAKYETFSDDPSPGAIDSNNSLSEMTHFRPQLHHSGDMVFTPESGLQLRLNEKLGTTAATELKKLDFKVSSTSNNLISTIPSDNLAAGTDNTSSLGPPSMPVHYDSQLDTTLFGKKSSPLTESGGPLSLSEENNDSKLLESGLMNSQESSWGKNVSSTESGRLFKGKRAHGPALLTKDNALFKVSISLLKTNKTSNNSATNRKTHIDGPSLLIENSPSVWQNILESDTEFKKVTPLIHDRMLMDKNATALRLNHMSNKTTSSKNMEMVQQKKEGPIPPDAQNPDMSFFKMLFLPESARWIQRTHGKNSLNSGQGPSPKQLVSLGPEKSVEGQNFLSEKNKVVVGKGEFTKDVGLKEMVFPSSRNLFLTNLDNLHENNTHNQEKKIQEEIEKKETLIQENVVLPQIHTVTGTKNFMKNLFLLSTRQNVEGSYDGAYAPVLQDFRSLNDSTNRTKKHTAHFSKKGEEENLEGLGNQTKQIVEKYACTTRISPNTSQQNFVTQRSKRALKQFRLPLEETELEKRIIVDDTSTQWSKNMKHLTPSTLTQIDYNEKEKGAITQSPLSDCLTRSHSIPQANRSPLPIAKVSSFPSIRPIYLTRVLFQDNSSHLPAASYRKKDSGVQESSHFLQGAKKNNLSLAILTLEMTGDQREVGSLGTSATNSVTYKKVENTVLPKPDLPKTSGKVELLPKVHIYQKDLFPTETSNGSPGHLDLVEGSLLQGTEGAIKWNEANRPGKVPFLRVATESSAKTPSKLLDPLAWDNHYGTQIPKEEWKSQEKSPEKTAFKKKDTILSLNACESNHAIAAINEGQNKPEIEVTWAKQGRTERLCSQNPPVLKRHQREITRTTLQSDQEEIDYDDTISVEMKKEDFDIYDEDENQSPRSFQKKTRHYFIAAVERLWDYGMSSSPHVLRNRAQSGSVPQFKKVVFQEFTDGSFTQPLYRGELNEHLGLLGPYIRAEVEDNIMVTFRNQASRPYSFYSSLISYEEDQRQGAEPRKNFVKPNETKTYFWKVQHHMAPTKDEFDCKAWAYFSDVDLEKDVHSGLIGPLLVCHTNTLNPAHGRQVTVQEFALFFTIFDETKSWYFTENMERNCRAPCNIQMEDPTFKENYRFHAINGYIMDTLPGLVMAQDQRIRWYLLSMGSNENIHSIHFSGHVFTVRKKEEYKMALYNLYPGVFETVEMLPSKAGIWRVECLIGEHLHAGMSTLFLVYSNKCQTPLGMASGHIRDFQITASGQYGQWAPKLARLHYSGSINAWSTKEPFSWIKVDLLAPMIIHGIKTQGARQKFSSLYISQFIIMYSLDGKKWQTYRGNSTGTLMVFFGNVDSSGIKHNIFNPPIIARYIRLHPTHYSIRSTLRMELMGCDLNSCSMPLGMESKAISDAQITASSYFTNMFATWSPSKARLHLQGRSNAWRPQVNNPKEWLQVDFQKTMKVTGVTTQGVKSLLTSMYVKEFLISSSQDGHQWTLFFQNGKVKVFQGNQDSFTPVVNSLDPPLLTRYLRIHPQSWVHQIALRMEVLGCEAQDLY

SEQ ID NO: 908 - protein, 332 aa, Homo sapiens
MGRPLHLVLLSASLAGLLLLGESLFIRREQANNILARVTRANSFLEEMKKGHLERECMEETCSYEEAREVFEDSDKTNEFWNKYKDGDQCETSPCQNQGKCKDGLGEYTCTCLEGFEGKNCELFTRKLCSLDNGDCDQFCHEEQNSVVCSCARGYTLADNGKACIPTGPYPCGKQTLERRKRSVAQATSSSGEAPDSITWKPYDAADLDPTENPFDLLDFNQTQPERGDNNLTRIVGGQECKDGECPWQALLINEENEGFCGGTILSEFYILTAAHCLYQAKRFKGTGTRSRRRAVRRCTRWRWSSSTTGSQRRPMTSTSPCSGSRPPSPSA

SEQ ID NO: 909 - protein, 488 aa, Homo sapiens
MGRPLHLVLLSASLAGLLLLGESLFIRREQANNILARVTRANSFLEEMKKGHLERECMEETCSYEEAREVFEDSDKTNEFWNKYKDGDQCETSPCQNQGKCKDGLGEYTCTCLEGFEGKNCELFTRKLCSLDNGDCDQFCHEEQNSVVCSCARGYTLADNGKACIPTGPYPCGKQTLERRKRSVAQATSSSGEAPDSITWKPYDAADLDPTENPFDLLDFNQTQPERGDNNLTRIVGGQECKDGECPWQALLINEENEGFCGGTILSEFYILTAAHCLYQAKRFKVRVGDRNTEQEEGGEAVHEVEVVIKHNRFTKETYDFDIAVLRLKTPITFRMNVAPACLPERDWAESTLMTQKTGIVSGFGRTHEKGRQSTRLKMLEVPYVDRNSCKLSSSFIITQNMFCAGYDTKQEDACQGDSGGPHVTRFKDTYFVTGIVSWGEGCARKGKYGIYTKVTAFLKWIDRSMKTRGLPKAKSHAPEVITSSPLK

SEQ ID NO: 910 - protein, 334 aa, Homo sapiens
MGRPLHLVLLSASLAGLLLLGESLFIRREQANNILARVTRANSFLEEMKKGHLERECMEETCSYEEAREVFEDSDKTNEFWNKYKDGDQCETSPCQNQGKCKDGLGEYTCTCLEGFEGKNCELFTRKLCSLDNGDCDQFCHEEQNSVVCSCARGYTLADNGKACIPTGPYPCGKQTLERRKRSVAQATSSSGEAPDSITWKPYDAADLDPTENPFDLLDFNQTQPERGDNNLTRIVGGQECKDGECPWQALLINEENEGFCGGTILSEFYILTAAHCLYQAKRFKVRGTGTRSRRRAVRRCTRWRWSSSTTGSQRRPMTSTSPCSGSRPPSPSA

SEQ ID NO: 911 - protein, 573 aa, Homo sapiens
MIFLYQVVHFILFTSVSGECVTQLLKDTCFEGGDITTVFTPSAKYCQVVCTYHPRCLLFTFTAESPSEDPTRWFTCVLKDSVTETLPRVNRTAAISGYSFKQCSHQISVNNICLLKHTQTGTPTRITKLDKVVSGFSLKSCALSNLACIRDIFPNTVFADSNIDSVMAPDAFVCGRICTHHPGCLFFTFFSQEWPKESQRNLCLLKTSESGLPSTRIKKSKALSGFSLQSCRHSIPVFCHSSFYHDTDFLGEELDIVAAKSHEACQKLCTNAVRCQFFTYTPAQASCNEGKGKCYLKLSSNGSPTKILHGRGGISGYTLRLCKMDNECTTKIKPRIVGGTASVRGEWPWQVTLHTTSPTQRHLCGGSIIGNQWILTAAHCFYGVESPKILRVYSGILNQSEIKEDTSFFGVQEIIIHDQYKMAESGYDIALLKLETTVNYTDSQRPICLPSKGDRNVIYTDCWVTGWGYRKLRDKIQNTLQKAKIPLVTNEECQKRYRGHKITHKMICAGYREGGKDACKGDSGGPLSCKHNEVWHLVGITSWGEGCAQRERPGVYTNVVEYVDWILEKTQAV

SEQ ID NO: 912 - protein, 625 aa, Homo sapiens
MIFLYQVVHFILFTSVSGECVTQLLKDTCFEGGDITTVFTPSAKYCQVVCTYHPRCLLFTFTAESPSEDPTRWFTCVLKDSVTETLPRVNRTAAISGYSFKQCSHQISACNKDIYVDLDMKGINYNSSVAKSAQECQERCTDDVHCHFFTYATRQFPSLEHRNICLLKHTQTGTPTRITKLDKVVSGFSLKSCALSNLACIRDIFPNTVFADSNIDSVMAPDAFVCGRICTHHPGCLFFTFFSQEWPKESQRNLCLLKTSESGLPSTRIKKSKALSGFSLQSCRHSIPVFCHSSFYHDTDFLGEELDIVAAKSHEACQKLCTNAVRCQFFTYTPAQASCNEGKGKCYLKLSSNGSPTKILHGRGGISGYTLRLCKMDNECTTKIKPRIVGGTASVRGEWPWQVTLHTTSPTQRHLCGGSIIGNQWILTAAHCFYGVESPKILRVYSGILNQSEIKEDTSFFGVQEIIIHDQYKMAESGYDIALLKLETTVNYTDSQRPICLPSKGDRNVIYTDCWVTGWGYRKLRDKIQNTLQKAKIPLVTNEECQKRYRGHKITHKMICAGYREGGKDACKGDSGGPLSCKHNEVWHLVGITSWGEGCAQRERPGVYTNVVEYVDWILEKTQAV

SEQ ID NO: 913 - protein, 210 aa, Homo sapiens
  VARIANT 1: note = MOD_RES - Any amino acid
XSGFSLKSCALSNLACIRDIFPNTVFADSNIDSVMAPDAFVCGRICTHHPGCLFFTFFSQEWPKESQRNLCLLKTSESGLPSTRIKKSKALSGFSLQSCRHSIPVFCHSSFYHDTDFLGEELDIVAAKSHEACQKLCTNAVRCQFFTYTPAQASCNEGKGKCYLKLSSNGSPTKILHGRGGISGYTLRLCKMDNELRGAPMKISGWLKTS

SEQ ID NO: 914 - protein, 732 aa, Homo sapiens
MSETSRTAFGGRRAVPPNNSNAAEDDLPTVELQGVVPRGVNLQEFLNVTSVHLFKERWDTNKVDHHTDKYENNKLIVRRGQSFYVQIDFSRPYDPRRDLFRVEYVIGRYPQENKGTYIPVPIVSELQSGKWGAKIVMREDRSVRLSIQSSPKCIVGKFRMYVAVWTPYGVLRTSRNPETDTYILFNPWCEDDAVYLDNEKEREEYVLNDIGVIFYGEVNDIKTRSWSYGQFEDGILDTCLYVMDRAQMDLSGRGNPIKVSRVGSAMVNAKDDEGVLVGSWDNIYAYGVPPSAWTGSVDILLEYRSSENPVRYGQCWVFAGVFNTFLRCLGIPARIVTNYFSAHDNDANLQMDIFLEEDGNVNSKLTKDSVWNYHCWNEAWMTRPDLPVGFGGWQAVDSTPQENSDGMYRCGPASVQAIKHGHVCFQFDAPFVFAEVNSDLIYITAKKDGTHVVENVDATHIGKLIVTKQIGGDGMMDITDTYKFQEGQEEERLALETALMYGAKKPLNTEGVMKSRSNVDMDFEVENAVLGKDFKLSITFRNNSHNRYTITAYLSANITFYTGVPKAEFKKETFDVTLEPLSFKKEAVLIQAGEYMGQLLEQASLHFFVTARINETRDVLAKQKSTVLTIPEIIIKVRGTQVVGSDMTVTVEFTNPLKETLRNVWVHLDGPGVTRPMKKMFREIRPNSTVQWEEVCRPWVSGHRKLIASMSSDSLRHVYGELDVQIQRRPSM

SEQ ID NO: 915 - protein, 138 aa, Homo sapiens
MSETSRTAFGGRRAVPPNNSNAAEDDLPTVELQGVVPRGVNLQEFLNVTSVHLFKERWDTNKVDHHTDKYENNKLIVRRGQSFYVQIDFSRPYDPRRDLFRVEYVIGRYPQENKGTYIPVPIVSELQSGKWGAKIVMR

SEQ ID NO: 916 - protein, 626 aa, Homo sapiens
MSETSRTAFGGRRAVPPNNSNAAEDDLPTVELQGVVPRGVNLQGRYPQENKGTYIPVPIVSELQSGKWGAKIVMREDRSVRLSIQSSPKCIVGKFRMYVAVWTPYGVLRTSRNPETDTYILFNPWCEDDAVYLDNEKEREEYVLNDIGVIFYGEVNDIKTRSWSYGQFEDGILDTCLYVMDRAQMDLSGRGNPIKVSRVGSAMVNAKDDEGVLVGSWDNIYAYGVPPSAWTGSVDILLEYRSSENPVRYGQCWVFAGVFNTFLRCLGIPARIVTNYFSAHDNDANLQMDIFLEEDGNVNSKLTKDSVWNYHCWNEAWMTRPDLPVGFGGWQAVDSTPQENSDGMYRCGPASVQAIKHGHVCFQFDAPFVFAEVNSDLIYITAKKDGTHVVENVDATHIGKLIVTKQIGGDGMMDITDTYKFQEGQEEERLALETALMYGAKKPLNTEGVMKSRSNVDMDFEVENAVLGKDFKLSITFRNNSHNRYTITAYLSANITFYTGVPKAEFKKETFDVTLEPLSFKKEAVLIQAGEYMGQLLEQASLHFFVTARINETRDVLAKQKSTVLTIPEIIIKVRGTQVVGSDMTVTEVCRPWVSGHRKLIASMSSDSLRHVYGELDVQIQRRPSM

SEQ ID NO: 917 - protein, 2944 aa, Homo sapiens
MTLRLLVAALCAGILAEAPRVRAQHRERVTCTRLYAADIVFLLDGSSSIGRSNFREVRSFLEGLVLPFSGAASAQGVRFATVQYSDDPRTEFGLDALGSGGDVIRAIRELSYKGGNTRTGAAILHVADHVFLPQLARPGVPKVCILITDGKSQDLVDTAAQRLKGQGVKLFAVGIKNADPEELKRVASQPTSDFFFFVNDFSILRTLLPLVSRRVCTTAGGVPVTRPPDDSTSAPRDLVLSEPSSQSLRVQWTAASGPVTGYKVQYTPLTGLGQPLPSERQEVNVPAGETSVRLRGLRPLTEYQVTVIALYANSIGEAVSGTARTTALEGPELTIQNTTAHSLLVAWRSVPGATGYRVTWRVLSGGPTQQQELGPGQGSVLLRDLEPGTDYEVTVSTLFGRSVGPATSLMARTDASVEQTLRPVILGPTSILLSWNLVPEARGYRLEWRRETGLEPPQKVVLPSDVTRYQLDGLQPGTEYRLTLYTLLEGHEVATPATVVPTGPELPVSPVTDLQATELPGQRVRVSWSPVPGATQYRIIVRSTQGVERTLVLPGSQTAFDLDDVQAGLSYTVRVSARVGPREGSASVLTVRREPETPLAVPGLRVVVSDATRVRVAWGPVPGASGFRISWSTGSGPESSQTLPPDSTATDITGLQPGTTYQVAVSVLRGREEGPAAVIVARTDPLGPVRTVHVTQASSSSVTITWTRVPGATGYRVSWHSAHGPEKSQLVSGEATVAELDGLEPDTEYTVHVRAHVAGVDGPPASVVVRTAPEPVGRVSRLQILNASSDVLRITWVGVTGATAYRLAWGRSEGGPMRHQILPGNTDSAEIRGLEGGVSYSVRVTALVGDREGTPVSIVVTTPPEAPPALGTLHVVQRGEHSLRLRWEPVPRAQGFLLHWQPEGGQEQSRVLGPELSSYHLDGLEPATQYRVRLSVLGPAGEGPSAEVTARTESPRVPSIELRVVDTSIDSVTLAWTPVSRASSYILSWRPLRGPGQEVPGSPQTLPGISSSQRVTGLEPGVSYIFSLTPVLDGVRGPEASVTQTPVCPRGLADVVFLPHATQDNAHRAEATRRVLERLVLALGPLGPQAVQVGLLSYSHRPSPLFPLNGSHDLGIILQRIRDMPYMDPSGNNLGTAVVTAHRYMLAPDAPGRRQHVPGVMVLLVDEPLRGDIFSPIREAQASGLNVVMLGMAGADPEQLRRLAPGMDSVQTFFAVDDGPSLDQAVSGLATALCQASFTTQPRPEPCPVYCPKGQKGEPGEMGLRGQVGPPGDPGLPGRTGAPGPQGPPGSATAKGERGFPGADGRPGSPGRAGNPGTPGAPGLKGSPGLPGPRGDPGERGPRGPKGEPGAPGQVIGGEGPGLPGRKGDPGPSGPPGPRGPLGDPGPRGPPGLPGTAMKGDKGDRGERGPPGPGEGGIAPGEPGLPGLPGSPGPQGPVGPPGKKGEKGDSEDGAPGLPGQPGSPGEQGPRGPPGAIGPKGDRGFPGPLGEAGEKGERGPPGPAGSRGLPGVAGRPGAKGPEGPPGPTGRQGEKGEPGRPGDPAVVGPAVAGPKGEKGDVGPAGPRGATGVQGERGPPGLVLPGDPGPKGDPGDRGPIGLTGRAGPPGDSGPPGEKGDPGRPGPPGPVGPRGRDGEVGEKGDEGPPGDPGLPGKAGERGLRGAPGVRGPVGEKGDQGDPGEDGRNGSPGSSGPKGDRGEPGPPGPPGRLVDTGPGAREKGEPGDRGQEGPRGPKGDPGLPGAPGERGIEGFRGPPGPQGDPGVRGPAGEKGDRGPPGLDGRSGLDGKPGAAGPSGPNGAAGKAGDPGRDGLPGLRGEQGLPGPSGPPGLPGKPGEDGKPGLNGKNGEPGDPGEDGRKGEKGDSGASGREGRDGPKGERGAPGILGPQGPPGLPGPVGPPGQGFPGVPGGTGPKGDRGETGSKGEQGLPGERGLRGEPGSVPNVDRLLETAGIKASALREIVETWDESSGSFLPVPERRRGPKGDSGEQGPPGKEGPIGFPGERGLKGDRGDPGPQGPPGLALGERGPPGPSGLAGEPGKPGIPGLPGRAGGVGEAGRPGERGERGEKGERGEQGRDGPPGLPGTPGPPGPPGPKVSVDEPGPGLSGEQGPPGLKGAKGEPGSNGDQGPKGDRGVPGIKGDRGEPGPRGQDGNPGLPGERGMAGPEGKPGLQGPRGPPGPVGGHGDPGPPGAPGLAGPAGPQGPSGLKGEPGETGPPGRGLTGPTGAVGLPGPPGPSGLVGPQGSPGLPGQVGETGKPGAPGRDGASGKDGDRGSPGVPGSPGLPGPVGPKGEPGPTGAPGQAVVGLPGAKGEKGAPGGLAGDLVGEPGAKGDRGLPGPRGEKGEAGRAGEPGDPGEDGQKGAPGPKGFKGDPGVGVPGSPGPPGPPGVKGDLGLPGLPGAPGVVGFPGQTGPRGEMGQPGPSGERGLAGPPGREGIPGPLGPPGPPGSVGPPGASGLKGDKGDPGVGLPGPRGERGEPGIRGEDGRPGQEGPRGLTGPPGSRGERGEKGDVGSAGLKGDKGDSAVILGPPGPRGAKGDMGERGPRGLDGDKGPRGDNGDPGDKGSKGEPGDKGSAGLPGLRGLLGPQGQPGAAGIPGDPGSPGKDGVPGIRGEKGDVGFMGPRGLKGERGVKGACGLDGEKGDKGEAGPPGRPGLAGHKGEMGEPGVPGQSGAPGKEGLIGPKGDRGFDGQPGPKGDQGEKGERGTPGIGGFPGPSGNDGSAGPPGPPGSVGPRGPEGLQGQKGERGPPGERVVGAPGVPGAPGERGEQGRPGPAGPRGEKGEAALTEDDIRGFVRQEMSQHCACQGQFIASGSRPLPSYAADTAGSQLHAVPVLRVSHAEEEERVPPEDDEYSEYSEYSVEEYQDPEAPWDSDDPCSLPLDEGSCTAYTLRWYHRAVTGSTEACHPFVYGGCGGNANRFGTREACERRCPPRVVQSQGTGTAQD

SEQ ID NO: 918 - protein, 2912 aa, Homo sapiens
MTLRLLVAALCAGILAEAPRVRAQHRERVTCTRLYAADIVFLLDGSSSIGRSNFREVRSFLEGLVLPFSGAASAQGVRFATVQYSDDPRTEFGLDALGSGGDVIRAIRELSYKGGNTRTGAAILHVADHVFLPQLARPGVPKVCILITDGKSQDLVDTAAQRLKGQGVKLFAVGIKNADPEELKRVASQPTSDFFFFVNDFSILRTLLPLVSRRVCTTAGGVPVTRPPDDSTSAPRDLVLSEPSSQSLRVQWTAASGPVTGYKVQYTPLTGLGQPLPSERQEVNVPAGETSVRLRGLRPLTEYQVTVIALYANSIGEAVSGTARTTALEGPELTIQNTTAHSLLVAWRSVPGATGYRVTWRVLSGGPTQQQELGPGQGSVLLRDLEPGTDYEVTVSTLFGRSVGPATSLMARTDASVEQTLRPVILGPTSILLSWNLVPEARGYRLEWRRETGLEPPQKVVLPSDVTRYQLDGLQPGTEYRLTLYTLLEGHEVATPATVVPTGPELPVSPVTDLQATELPGQRVRVSWSPVPGATQYRIIVRSTQGVERTLVLPGSQTAFDLDDVQAGLSYTVRVSARVGPREGSASVLTVRREPETPLAVPGLRVVVSDATRVRVAWGPVPGASGFRISWSTGSGPESSQTLPPDSTATDITGLQPGTTYQVAVSVLRGREEGPAAVIVARTDPLGPVRTVHVTQASSSSVTITWTRVPGATGYRVSWHSAHGPEKSQLVSGEATVAELDGLEPDTEYTVHVRAHVAGVDGPPASVVVRTAPEPVGRVSRLQILNASSDVLRITWVGVTGATAYRLAWGRSEGGPMRHQILPGNTDSAEIRGLEGGVSYSVRVTALVGDREGTPVSIVVTTPPEAPPALGTLHVVQRGEHSLRLRWEPVPRAQGFLLHWQPEGGQEQSRVLGPELSSYHLDGLEPATQYRVRLSVLGPAGEGPSAEVTARTESPRVPSIELRVVDTSIDSVTLAWTPVSRASSYILSWRPLRGPGQEVPGSPQTLPGISSSQRVTGLEPGVSYIFSLTPVLDGVRGPEASVTQTPVCPRGLADVVFLPHATQDNAHRAEATRRVLERLVLALGPLGPQAVQVGLLSYSHRPSPLFPLNGSHDLGIILQRIRDMPYMDPSGNNLGTAVVTAHRYMLAPDAPGRRQHVPGVMVLLVDEPLRGDIFSPIREAQASGLNVVMLGMAGADPEQLRRLAPGMDSVQTFFAVDDGPSLDQAVSGLATALCQASFTTQPRPEPCPVYCPKGQKGEPGEMGLRGQVGPPGDPGLPGRTGAPGPQGPPGSATAKGERGFPGADGRPGSPGRAGNPGTPGAPGLKGSPGLPGPRGDPGERGPRGPKGEPGAPGQVIGGEGPGLPGRKGDPGPSGPPGPRGPLGDPGPRGPPGLPGTAMKGDKGDRGERGPPGPGEGGIAPGEPGLPGLPGSPGPQGPVGPPGKKGEKGDSEDGAPGLPGQPGSPGEQGPRGPPGAIGPKGDRGFPGPLGEAGEKGERGPPGPAGSRGLPGVAGRPGAKGPEGPPGPTGRQGEKGEPGRPGDPAVVGPAVAGPKGEKGDVGPAGPRGATGVQGERGPPGLVLPGDPGPKGDPGDRGPIGLTGRAGPPGDSGPPGEKGDPGRPGPPGPVGPRGRDGEVGEKGDEGPPGDPGLPGKAGERGLRGAPGVRGPVGEKGDQGDPGEDGRNGSPGSSGPKGDRGEPGPPGPPGRLVDTGPGAREKGEPGDRGQEGPRGPKGDPGLPGAPGERGIEGFRGPPGPQGDPGVRGPAGEKGDRGPPGLDGRSGLDGKPGAAGPSGPNGAAGKAGDPGRDGLPGLRGEQGLPGPSGPPGLPGKPGEDGKPGLNGKNGEPGDPGEDGRKGEKGDSGASGREGFPGVPGGTGPKGDRGETGSKGEQGLPGERGLRGEPGSVPNVDRLLETAGIKASALREIVETWDESSGSFLPVPERRRGPKGDSGEQGPPGKEGPIGFPGERGLKGDRGDPGPQGPPGLALGERGPPGPSGLAGEPGKPGIPGLPGRAGGVGEAGRPGERGERGEKGERGEQGRDGPPGLPGTPGPPGPPGPKVSVDEPGPGLSGEQGPPGLKGAKGEPGSNGDQGPKGDRGVPGIKGDRGEPGPRGQDGNPGLPGERGMAGPEGKPGLQGPRGPPGPVGGHGDPGPPGAPGLAGPAGPQGPSGLKGEPGETGPPGRGLTGPTGAVGLPGPPGPSGLVGPQGSPGLPGQVGETGKPGAPGRDGASGKDGDRGSPGVPGSPGLPGPVGPKGEPGPTGAPGQAVVGLPGAKGEKGAPGGLAGDLVGEPGAKGDRGLPGPRGEKGEAGRAGEPGDPGEDGQKGAPGPKGFKGDPGVGVPGSPGPPGPPGVKGDLGLPGLPGAPGVVGFPGQTGPRGEMGQPGPSGERGLAGPPGREGIPGPLGPPGPPGSVGPPGASGLKGDKGDPGVGLPGPRGERGEPGIRGEDGRPGQEGPRGLTGPPGSRGERGEKGDVGSAGLKGDKGDSAVILGPPGPRGAKGDMGERGPRGLDGDKGPRGDNGDPGDKGSKGEPGDKGSAGLPGLRGLLGPQGQPGAAGIPGDPGSPGKDGVPGIRGEKGDVGFMGPRGLKGERGVKGACGLDGEKGDKGEAGPPGRPGLAGHKGEMGEPGVPGQSGAPGKEGLIGPKGDRGFDGQPGPKGDQGEKGERGTPGIGGFPGPSGNDGSAGPPGPPGSVGPRGPEGLQGQKGERGPPGERVVGAPGVPGAPGERGEQGRPGPAGPRGEKGEAALTEDDIRGFVRQEMSQHCACQGQFIASGSRPLPSYAADTAGSQLHAVPVLRVSHAEEEERVPPEDDEYSEYSEYSVEEYQDPEAPWDSDDPCSLPLDEGSCTAYTLRWYHRAVTGSTEACHPFVYGGCGGNANRFGTREACERRCPPRVVQSQGTGTAQD

SEQ ID NO: 919 - protein, 144 aa, Homo sapiens
MWLQSLLLLGTVACSISAPARSPSPSTQPWEHVNAIQEARRLLNLSRDTAAEMNETVEVISEMFDLQEPTCLQTRLELYKQGLRGSLTKLKGPLTMMASHYKQHCPPTPETSCATQIITFESFKENLKDFLLVIPFDCWEPVQE

SEQ ID NO: 920 - protein, 207 aa, Homo sapiens
MAGPATQSPMKLMALQLLLWHSALWTVQEATPLGPASSLPQSFLLKCLEQVRKIQGDGAALQEKLVSECATYKLCHPEELVLLGHSLGIPWAPLSSCPSQALQLAGCLSQLHSGLFLYQGLLQALEGISPELGPTLDTLQLDVADFATTIWQQMEELGMAPALQPTQGAMPAFASAFQRRAGGVLVASHLQSFLEVSYRVLRHLAQP

SEQ ID NO: 921 - protein, 200 aa, Homo sapiens
MSPEPALSPALQLLLWHSALWTVQEATPLGPASSLPQSFLLKCLEQVRKIQGDGAALQEKLCATYKLCHPEELVLLGHSLGIPWAPLSSCPSQALQLAGCLSQLHSGLFLYQGLLQALEGISPELGPTLDTLQLDVADFATTIWQQMEELGMAPALQPTQGAMPAFASAFQRRAGGVLVASHLQSFLEVSYRVLRHLAQP

SEQ ID NO: 922 - protein, 171 aa, Homo sapiens
MAGPATQSPMKLMALQLLLWHSALWTVQEATPLGPASSLPQSFLLKCLEQVRKIQGDGAALQEKLVSEAGCLSQLHSGLFLYQGLLQALEGISPELGPTLDTLQLDVADFATTIWQQMEELGMAPALQPTQGAMPAFASAFQRRAGGVLVASHLQSFLEVSYRVLRHLAQP

SEQ ID NO: 923 - protein, 204 aa, Homo sapiens
MAGPATQSPMKLMALQLLLWHSALWTVQEATPLGPASSLPQSFLLKCLEQVRKIQGDGAALQEKLCATYKLCHPEELVLLGHSLGIPWAPLSSCPSQALQLAGCLSQLHSGLFLYQGLLQALEGISPELGPTLDTLQLDVADFATTIWQQMEELGMAPALQPTQGAMPAFASAFQRRAGGVLVASHLQSFLEVSYRVLRHLAQP

SEQ ID NO: 924 - protein, 1231 aa, Homo sapiens
MRLLAKIICLMLWAICVAEDCNELPPRRNTEILTGSWSDQTYPEGTQAIYKCRPGYRSLGNVIMVCRKGEWVALNPLRKCQKRPCGHPGDTPFGTFTLTGGNVFEYGVKAVYTCNEGYQLLGEINYRECDTDGWTNDIPICEVVKCLPVTAPENGKIVSSAMEPDREYHFGQAVRFVCNSGYKIEGDEEMHCSDDGFWSKEKPKCVEISCKSPDVINGSPISQKIIYKENERFQYKCNMGYEYSERGDAVCTESGWRPLPSCEEKSCDNPYIPNGDYSPLRIKHRTGDEITYQCRNGFYPATRGNTAKCTSTGWIPAPRCTLKPCDYPDIKHGGLYHENMRRPYFPVAVGKYYSYYCDEHFETPSGSYWDHIHCTQDGWSPAVPCLRKCYFPYLENGYNQNHGRKFVQGKSIDVACHPGYALPKAQTTVTCMENGWSPTPRCIRVKTCSKSSIDIENGFISESQYTYALKEKAKYQCKLGYVTADGETSGSITCGKDGWSAQPTCIKSCDIPVFMNARTKNDFTWFKLNDTLDYECHDGYESNTGSTTGSIVCGYNGWSDLPICYERECELPKIDVHLVPDRKKDQYKVGEVLKFSCKPGFTIVGPNSVQCYHFGLSPDLPICKEQVQSCGPPPELLNGNVKEKTKEEYGHSEVVEYYCNPRFLMKGPNKIQCVDGEWTTLPVCIVEESTCGDIPELEHGWAQLSSPPYYYGDSVEFNCSESFTMIGHRSITCIHGVWTQLPQCVAIDKLKKCKSSNLIILEEHLKNKKEFDHNSNIRYRCRGKEGWIHTVCINGRWDPEVNCSMAQIQLCPPPPQIPNSHNMTTTLNYRDGEKVSVLCQENYLIQEGEEITCKDGRWQSIPLCVEKIPCSQPPQIEHGTINSSRSSQESYAHGTKLSYTCEGGFRISEENETTCYMGKWSSPPQCEGLPCKSPPEISHGVVAHMSDSYQYGEEVTYKCFEGFGIDGPAIAKCLGEKWSHPPSCIKTDCLSLPSFENAIPMGEKKDVYKAGEQVTYTCATYYKMDGASNVTCINSRWTGRPTCRDTSCVNPPTVQNAYIVSRQMSKYPSGERVRYQCRSPYEMFGDEEVMCLNGNWTEPPQCKDSTGKCGPPPPIDNGDITSFPLSVYAPASSVEYQCQNLYQLEGNKRITCRNGQWSEPPKCLHPCVISREIMENYNIALRWTAKQKLYSRTGESVEFVCKRGYRLSSRSHTLRTTCWDGKLEYPTCAKR

SEQ ID NO: 925 - protein, 449 aa, Homo sapiens
MRLLAKIICLMLWAICVAEDCNELPPRRNTEILTGSWSDQTYPEGTQAIYKCRPGYRSLGNVIMVCRKGEWVALNPLRKCQKRPCGHPGDTPFGTFTLTGGNVFEYGVKAVYTCNEGYQLLGEINYRECDTDGWTNDIPICEVVKCLPVTAPENGKIVSSAMEPDREYHFGQAVRFVCNSGYKIEGDEEMHCSDDGFWSKEKPKCVEISCKSPDVINGSPISQKIIYKENERFQYKCNMGYEYSERGDAVCTESGWRPLPSCEEKSCDNPYIPNGDYSPLRIKHRTGDEITYQCRNGFYPATRGNTAKCTSTGWIPAPRCTLKPCDYPDIKHGGLYHENMRRPYFPVAVGKYYSYYCDEHFETPSGSYWDHIHCTQDGWSPAVPCLRKCYFPYLENGYNQNHGRKFVQGKSIDVACHPGYALPKAQTTVTCMENGWSPTPRCIRVIFQL

SEQ ID NO: 926 - protein, 449 aa, Homo sapiens
MRLLAKIICLMLWAICVAEDCNELPPRRNTEILTGSWSDQTYPEGTQAIYKCRPGYRSLGNVIMVCRKGEWVALNPLRKCQKRPCGHPGDTPFGTFTLTGGNVFEYGVKAVYTCNEGYQLLGEINYRECDTDGWTNDIPICEVVKCLPVTAPENGKIVSSAMEPDREYHFGQAVRFVCNSGYKIEGDEEMHCSDDGFWSKEKPKCVEISCKSPDVINGSPISQKIIYKENERFQYKCNMGYEYSERGDAVCTESGWRPLPSCEEKSCDNPYIPNGDYSPLRIKHRTGDEITYQCRNGFYPATRGNTAKCTSTGWIPAPRCTLKPCDYPDIKHGGLYHENMRRPYFPVAVGKYYSYYCDEHFETPSGSYWDHIHCTQDGWSPAVPCLRKCYFPYLENGYNQNHGRKFVQGKSIDVACHPGYALPKAQTTVTCMENGWSPTPRCIRVSFTL

SEQ ID NO: 927 - protein, 190 aa, Homo sapiens
MAAGELEGGKPLSGLLNALAQDTFHGYPGITEELLRSQLYPEVPPEEFRPFLAKMRGILKSIASADMDFNQLEAFLTAQTKKQGGITSDQAAVISKFWKSHKTKIRESLMNQSRWNSGLRGLSWRVDGKSQSRHSAQIHTPVAIIELELGKYGQESEFLCLEFDEVKVNQILKTLSEVEESISTLISQPN

SEQ ID NO: 928 - protein, 38 aa, Homo sapiens
  VARIANT 1: note = MOD_RES - Any amino acid
XQESEFLCLEFDEVKVNQILKTLSEVEESISTLISQPN

SEQ ID NO: 929 - protein, 32 aa, Homo sapiens
  VARIANT 1: note = MOD_RES - Any amino acid
XCLEFDEVKVNQILKTLSEVEESISTLISQPN

SEQ ID NO: 930 - protein, 38 aa, Homo sapiens; identical to SEQ ID NO: 928
  VARIANT 1: note = MOD_RES - Any amino acid

SEQ ID NO: 931 - protein, 159 aa, Homo sapiens
MAAGELEGGKPLSGLLNALAQDTFHGYPGITEELLRSQLYPEVPPEEFRPFLAKMRGILKSIASADMDFNQLEAFLTAQTKKQGGITSDQAAVISKFWKSHKTKIRESLMNQSRWNSGLRGLSWRVDGKSQSRHSAQIHTPVAIIELELGKYGQVHCNQ

SEQ ID NO: 932 - protein, 196 aa, Homo sapiens
MRLPLLVSAGVLLVALLPCPPCRALLSRGPVPGARQAPQHPQPLDFFQPPPQSEQPQQPQARPVLLRMGEEYFLRLGNLNKSPAAPLSPASSLLAGGSGSRPSPEQATANFFRVLLQQLLLPRRSLDSPAALAERGARNALGGHQEAPERERRSEEPPISLDLTFHLLREVLEMARAEQLAQQAHSNRKLMEIIGK

SEQ ID NO: 933 - protein, 1480 aa, Homo sapiens
MQRSPLEKASVVSKLFFSWTRPILRKGYRQRLELSDIYQIPSVDSADNLSEKLEREWDRELASKKNPKLINALRRCFFWRFMFYGIFLYLGEVTKAVQPLLLGRIIASYDPDNKEERSIAIYLGIGLCLLFIVRTLLLHPAIFGLHHIGMQMRIAMFSLIYKKTLKLSSRVLDKISIGQLVSLLSNNLNKFDEGLALAHFVWIAPLQVALLMGLIWELLQASAFCGLGFLIVLALFQAGLGRMMMKYRDQRAGKISERLVITSEMIENIQSVKAYCWEEAMEKMIENLRQTELKLTRKAAYVRYFNSSAFFFSGFFVVFLSVLPYALIKGIILRKIFTTISFCIVLRMAVTRQFPWAVQTWYDSLGAINKIQDFLQKQEYKTLEYNLTTTEVVMENVTAFWEEGFGELFEKAKQNNNNRKTSNGDDSLFFSNFSLLGTPVLKDINFKIERGQLLAVAGSTGAGKTSLLMVIMGELEPSEGKIKHSGRISFCSQFSWIMPGTIKENIIFGVSYDEYRYRSVIKACQLEEDISKFAEKDNIVLGEGGITLSGGQRARISLARAVYKDADLYLLDSPFGYLDVLTEKEIFESCVCKLMANKTRILVTSKMEHLKKADKILILHEGSSYFYGTFSELQNLQPDFSSKLMGCDSFDQFSAERRNSILTETLHRFSLEGDAPVSWTETKKQSFKQTGEFGEKRKNSILNPINSIRKFSIVQKTPLQMNGIEEDSDEPLERRLSLVPDSEQGEAILPRISVISTGPTLQARRRQSVLNLMTHSVNQGQNIHRKTTASTRKVSLAPQANLTELDIYSRRLSQETGLEISEEINEEDLKECFFDDMESIPAVTTWNTYLRYITVHKSLIFVLIWCLVIFLAEVAASLVVLWLLGNTPLQDKGNSTHSRNNSYAVIITSTSSYYVFYIYVGVADTLLAMGFFRGLPLVHTLITVSKILHHKMLHSVLQAPMSTLNTLKAGGILNRFSKDIAILDDLLPLTIFDFIQLLLIVIGAIAVVAVLQPYIFVATVPVIVAFIMLRAYFLQTSQQLKQLESEGRSPIFTHLVTSLKGLWTLRAFGRQPYFETLFHKALNLHTANWFLYLSTLRWFQMRIEMIFVIFFIAVTFISILTTGEGEGRVGIILTLAMNIMSTLQWAVNSSIDVDSLMRSVSRVFKFIDMPTEGKPTKSTKPYKNGQLSKVMIIENSHVKKDDIWPSGGQMTVKDLTAKYTEGGNAILENISFSISPGQRVGLLGRTGSGKSTLLSAFLRLLNTEGEIQIDGVSWDSITLQQWRKAFGVIPQKVFIFSGTFRKNLDPYEQWSDQEIWKVADEVGLRSVIEQFPGKLDFVLVDGGCVLSHGHKQLMCLARSVLSKAKILLLDEPSAHLDPVTYQIIRRTLKQAFADCTVILCEHRIEAMLECQQFLVIEENKVRQYDSIQKLLNERSLFRQAISPSDRVKLFPHRNSSKCKSKPQIAALKEETEEEVQDTRL

SEQ ID NO: 934 - protein, 1438 aa, Homo sapiens
MQRSPLEKASVVSKLFFSWTRPILRKGYRQRLELSDIYQIPSVDSADNLSEKLEREWDRELASKKNPKLINALRRCFFWRFMFYGIFLYLGEVTKAVQPLLLGRIIASYDPDNKEERSIAIYLGIGLCLLFIVRTLLLHPAIFGLHHIGMQMRIAMFSLIYKKGLALAHFVWIAPLQVALLMGLIWELLQASAFCGLGFLIVLALFQAGLGRMMMKYRDQRAGKISERLVITSEMIENIQSVKAYCWEEAMEKMIENLRQTELKLTRKAAYVRYFNSSAFFFSGFFVVFLSVLPYALIKGIILRKIFTTISFCIVLRMAVTRQFPWAVQTWYDSLGAINKIQDFLQKQEYKTLEYNLTTTEVVMENVTAFWEEGFGELFEKAKQNNNNRKTSNGDDSLFFSNFSLLGTPVLKDINFKIERGQLLAVAGSTGAGKTSLLMVIMGELEPSEGKIKHSGRISFCSQFSWIMPGTIKENIIFGVSYDEYRYRSVIKACQLEEDISKFAEKDNIVLGEGGITLSGGQRARISLARAVYKDADLYLLDSPFGYLDVLTEKEIFESCVCKLMANKTRILVTSKMEHLKKADKILILHEGSSYFYGTFSELQNLQPDFSSKLMGCDSFDQFSAERRNSILTETLHRFSLEGDAPVSWTETKKQSFKQTGEFGEKRKNSILNPINSIRKFSIVQKTPLQMNGIEEDSDEPLERRLSLVPDSEQGEAILPRISVISTGPTLQARRRQSVLNLMTHSVNQGQNIHRKTTASTRKVSLAPQANLTELDIYSRRLSQETGLEISEEINEEDLKECFFDDMESIPAVTTWNTYLRYITVHKSLIFVLIWCLVIFLAEVAASLVVLWLLGNTPLQDKGNSTHSRNNSYAVIITSTSSYYVFYIYVGVADTLLAMGFFRGLPLVHTLITVSKILHHKMLHSVLQAPMSTLNTLKAGGILNRFSKDIAILDDLLPLTIFDFIQLLLIVIGAIAVVAVLQPYIFVATVPVIVAFIMLRAYFLQTSQQLKQLESEGRSPIFTHLVTSLKGLWTLRAFGRQPYFETLFHKALNLHTANWFLYLSTLRWFQMRIEMIFVIFFIAVTFISILTTGEGEGRVGIILTLAMNIMSTLQWAVNSSIDVDSLMRSVSRVFKFIDMPTEGKPTKSTKPYKNGQLSKVMIIENSHVKKDDIWPSGGQMTVKDLTAKYTEGGNAILENISFSISPGQRVGLLGRTGSGKSTLLSAFLRLLNTEGEIQIDGVSWDSITLQQWRKAFGVIPQKVFIFSGTFRKNLDPYEQWSDQEIWKVADEVGLRSVIEQFPGKLDFVLVDGGCVLSHGHKQLMCLARSVLSKAKILLLDEPSAHLDPVTYQIIRRTLKQAFADCTVILCEHRIEAMLECQQFLVIEENKVRQYDSIQKLLNERSLFRQAISPSDRVKLFPHRNSSKCKSKPQIAALK

SEQ ID NO: 935 - protein, 1419 aa, Homo sapiens
MQRSPLEKASVVSKLFFSWTRPILRKGYRQRLELSDIYQIPSVDSADNLSEKLEREWDRELASKKNPKLINALRRCFFWRFMFYGIFLYLGEVTKAVQPLLLGRIIASYDPDNKEERSIAIYLGIGLCLLFIVRTLLLHPAIFGLHHIGMQMRIAMFSLIYKKTLKLSSRVLDKISIGQLVSLLSNNLNKFDEGLALAHFVWIAPLQVALLMGLIWELLQASAFCGLGFLIVLALFQAGLGRMMMKYRDQRAGKISERLVITSEMIENIQSVKAYCWEEAMEKMIENLRQTELKLTRKAAYVRYFNSSAFFFSGFFVVFLSVLPYALIKGIILRKIFTTISFCIVLRMAVTRQFPWAVQTWYDSLGAINKIQDFLQKQEYKTLEYNLTTTEVVMENVTAFWEETSLLMVIMGELEPSEGKIKHSGRISFCSQFSWIMPGTIKENIIFGVSYDEYRYRSVIKACQLEEDISKFAEKDNIVLGEGGITLSGGQRARISLARAVYKDADLYLLDSPFGYLDVLTEKEIFESCVCKLMANKTRILVTSKMEHLKKADKILILHEGSSYFYGTFSELQNLQPDFSSKLMGCDSFDQFSAERRNSILTETLHRFSLEGDAPVSWTETKKQSFKQTGEFGEKRKNSILNPINSIRKFSIVQKTPLQMNGIEEDSDEPLERRLSLVPDSEQGEAILPRISVISTGPTLQARRRQSVLNLMTHSVNQGQNIHRKTTASTRKVSLAPQANLTELDIYSRRLSQETGLEISEEINEEDLKECFFDDMESIPAVTTWNTYLRYITVHKSLIFVLIWCLVIFLAEVAASLVVLWLLGNTPLQDKGNSTHSRNNSYAVIITSTSSYYVFYIYVGVADTLLAMGFFRGLPLVHTLITVSKILHHKMLHSVLQAPMSTLNTLKAGGILNRFSKDIAILDDLLPLTIFDFIQLLLIVIGAIAVVAVLQPYIFVATVPVIVAFIMLRAYFLQTSQQLKQLESEGRSPIFTHLVTSLKGLWTLRAFGRQPYFETLFHKALNLHTANWFLYLSTLRWFQMRIEMIFVIFFIAVTFISILTTGEGEGRVGIILTLAMNIMSTLQWAVNSSIDVDSLMRSVSRVFKFIDMPTEGKPTKSTKPYKNGQLSKVMIIENSHVKKDDIWPSGGQMTVKDLTAKYTEGGNAILENISFSISPGQRVGLLGRTGSGKSTLLSAFLRLLNTEGEIQIDGVSWDSITLQQWRKAFGVIPQKVFIFSGTFRKNLDPYEQWSDQEIWKVADEVGLRSVIEQFPGKLDFVLVDGGCVLSHGHKQLMCLARSVLSKAKILLLDEPSAHLDPVTYQIIRRTLKQAFADCTVILCEHRIEAMLECQQFLVIEENKVRQYDSIQKLLNERSLFRQAISPSDRVKLFPHRNSSKCKSKPQIAALKEETEEEVQDTRL

SEQ ID NO: 936 - protein, 190 aa, Homo sapiens
  VARIANT 1: note = MOD_RES - Any amino acid
XKGLWTLRAFGRQPYFETLFHKALNLHTANWFLYLSTLRWFQMRIEMIFVIFFIAVTFISILTTGEGEGRVGIILTLAMNIMSTLQWAVNSSIDVDSLMRSVSRVFKFIDMPTEGKPTKSTKPYKNGQLSKVMIIENSHVKKDDIWPSGGQMTVKDLTAKYTEGGNAILENISFSISPGQRVRFEHCLLC

SEQ ID NO: 937 - protein, 400 aa, Homo sapiens
MIRNWLTIFILFPLKLVEKCESSVSLTVPPVVKLENGSSTNVSLTLRPPLNATLVITFEITFRSKNITILELPDEVVVPPGVTNSSFQVTSQNVGQLTVYLHGNHSNQTGPRIRFLVIRSSAISIINQVIGWIYFVAWSISFYPQVIMNWRRKSVIGLSFDFVALNLTGFVAYSVFNIGLLWVPYIKEQFLLKYPNGVNPVNSNDVFFSLHAVVLTLIIIVQCCLYERGGQRVSWPAIGFLVLAWLFAFVTMIVAAVGVTTWLQFLFCFSYIKLAVTLVKYFPQAYMNFYYKSTEGWSIGNVLLDFTGGSFSLLQMFLQSYNNDQWTLIFGDPTKFGLGVFSIVFDVVFFIQHFCLYRKRPGLQAARTGSGSRLRQDWAPSLQPKALPQTTSVSASSLKG

SEQ ID NO: 938 - protein, 367 aa, Homo sapiens
MIRNWLTIFILFPLKLVEKCESSVSLTVPPVVKLENGSSTNVSLTLRPPLNATLVITFEITFRSKNITILELPDEVVVPPGVTNSSFQVTSQNVGQLTVYLHGNHSNQTGPRIRFLVIRSSAISIINQVIGWIYFVAWSISFYPQVIMNWRRKSVIGLSFDFVALNLTGFVAYSVFNIGLLWVPYIKEQFLLKYPNGVNPVNSNDVFFSLHAVVLTLIIIVQCCLYERGGQRVSWPAIGFLVLAWLFAFVTMIVAAVGVTTWLQFLFCFSYIKLAVTLVKYFPQAYMNFYYKSTEGWSIGNVLLDFTGGSFSLLQMFLQSYNNDQWTLIFGDPTKFGLGVFSIVFDVVFFIQHFCLYRKRPGYDQLN

SEQ ID NO: 939 - protein, 220 aa, Homo sapiens
MNWRRKSVIGLSFDFVALNLTGFVAYSVFNIGLLWVPYIKEQFLLKYPNGVNPVNSNDVFFSLHAVVLTLIIIVQCCLYERGGQRVSWPAIGFLVLAWLFAFVTMIVAAVGVTTWLQFLFCFSYIKLAVTLVKYFPQAYMNFYYKSTEGWSIGNVLLDFTGGSFSLLQMFLQSYNNDQWTLIFGDPTKFGLGVFSIVFDVVFFIQHFCLYRKRPGYDQLN

SEQ ID NO: 940 - protein, 292 aa, Homo sapiens
MCPRIRFLVIRSSAISIINQVIGWIYFVAWSISFYPQVIMNWRRKSVIGLSFDFVALNLTGFVAYSVFNIGLLWVPYIKEQFLLKYPNGVNPVNSNDVFFSLHAVVLTLIIIVQCCLYERGGQRVSWPAIGFLVLAWLFAFVTMIVAAVGVTTWLQFLFCFSYIKLAVTLVKYFPQAYMNFYYKSTEGWSIGNVLLDFTGGSFSLLQMFLQSYNNDQWTLIFGDPTKFGLGVFSIVFDVVFFIQHFCLYRKRPGLQAARTGSGSRLRQDWAPSLQPKALPQTTSVSASSLKG

SEQ ID NO: 941 - protein, 75 aa, Homo sapiens
MIRNWLTIFILFPLKLVEKCESSVSLTVPPVVKLENGSSTNVSLTLRPPLNATLVITFEITFRSKNITILELPDE

SEQ ID NO: 942 - protein, 67 aa, Homo sapiens
MRIHYLLFALLFLFLVPVPGHGGIINTLQKYYCRVRGGRCAVLSCLPKEEQIGKCSTRGRKCCRRKK

SEQ ID NO: 943 - protein, 67 aa, Homo sapiens; identical to SEQ ID NO: 942

SEQ ID NO: 944 - protein, 64 aa, Homo sapiens
MRVLYLLFSFLFIFLMPLPGVFGGIGDPVTCLKSGAICHPVFCPRRYKQIGTCGLPGTKCCKKP

SEQ ID NO: 945 - protein, 64 aa, Homo sapiens; identical to SEQ ID NO: 944

SEQ ID NO: 946 - protein, 282 aa, Homo sapiens [sequence omitted]

SEQ ID NO: 947 - protein, 282 aa, Homo sapiens [sequence omitted]

SEQ ID NO: 948 - protein, 187 aa, Homo sapiens
MHQTPITTWSVSHWDGTAIRSATCSCTGLTRCLRWTATTTMMAASPAGTTPSTESQPLSGSSPGSQDVMLMGDFNAGCSYVRPSQWSSIRLWTSPTFQWLIPDSADTTATPTHCAYDRIVVAGMLLRGAVVPDSALPFNFQAAYGLSDQLFSVHTCSGAGLGERHGLPASAALPSNTCRAGTHRVST

SEQ ID NO: 949 - protein, 2080 aa, Homo sapiens
MLRVFILYAENVHTPDTDISDAYCSAVFAGVKKRTKVIKNSVNPVWNEGFEWDLKGIPLDQGSELHVVVKDHETMGRNRFLGEAKVPLREVLATPSLSASFNAPLLDTKKQPTGASLVLQVSYTPLPGAVPLFPPPTPLEPSPTLPDLDVVADTGGEEDTEDQGLTGDEAEPFLDQSGGPGAPTTPRKLPSRPPPHYPGIKRKRSAPTSRKLLSDKPQDFQIRVQVIEGRQLPGVNIKPVVKVTAAGQTKRTRIHKGNSPLFNETLFFNLFDSPGELFDEPIFITVVDSRSLRTDALLGEFRMDVGTIYREPRHAYLRKWLLLSDPDDFSAGARGYLKTSLCVLGPGDEAPLERKDPSEDKEDIESNLLRPTGVALRGAHFCLKVFRAEDLPQMDDAVMDNVKQIFGFESNKKNLVDPFVEVSFAGKMLCSKILEKTANPQWNQNITLPAMFPSMCEKMRIRIIDWDRLTHNDIVATTYLSMSKISAPGGEIEEEPAGAVKPSKASDLDDYLGFLPTFGPCYINLYGSPREFTGFPDPYTELNTGKGEGVAYRGRLLLSLETKLVEHSEQKVEDLPADDILRVEKYLRRRKYSLFAAFYSATMLQDVDDAIQFEVSIGNYGNKFDMTCLPLASTTQYSRAVFDGCHYYYLPWGNVKPVVVLSSYWEDISHRIETQNQLLGIADRLEAGLEQVHLALKAQCSTEDVDSLVAQLTDELIAGCSQPLGDIHETPSATHLDQYLYQLRTHHLSQITEAALALKLGHSELPAALEQAEDWLLRLRALAEEPQNSLPDIVIWMLQGDKRVAYQRVPAHQVLFSRRGANYCGKNCGKLQTIFLKYPMEKVPGARMPVQIRVKLWFGLSVDEKEFNQFAEGKLSVFAETYENETKLALVGNWGTTGLTYPKFSDVTGKIKLPKDSFRPSAGWTWAGDWFVCPEKTLLHDMDAGHLSFVEEVFENQTRLPGGQWIYMSDNYTDVNGEKVLPKDDIECPLGWKWEDEEWSTDLNRAVDEQGWEYSITIPPERKPKHWVPAEKMYYTHRRRRWVRLRRRDLSQMEALKRHRQAEAEGEGWEYASLFGWKFHLEYRKTDAFRRRRWRRRMEPLEKTGPAAVFALEGALGGVMDDKSEDSMSVSTLSFGVNRPTISCIFDYGNRYHLRCYMYQARDLAAMDKDSFSDPYAIVSFLHQSQKTVVVKNTLNPTWDQTLIFYEIEIFGEPATVAEQPPSIVVELYDHDTYGADEFMGRCICQPSLERMPRLAWFPLTRGSQPSGELLASFELIQREKPAIHHIPGFEVQETSRILDESEDTDLPYPPPQREANIYMVPQNIKPALQRTAIEILAWGLRNMKSYQLANISSPSLVVECGGQTVQSCVIRNLRKNPNFDICTLFMEVMLPREELYCPPITVKVIDNRQFGRRPVVGQCTIRSLESFLCDPYSAESPSPQGGPDDVSLLSPGEDVLIDIDDKEPLIPIQEEEFIDWWSKFFASIGEREKCGSYLEKDFDTLKVYDTQLENVEAFEGLSDFCNTFKLYRGKTQEETEDPSVIGEFKGLFKIYPLPEDPAIPMPPRQFHQLAAQGPQECLVRIYIVRAFGLQPKDPNGKCDPYIKISIGKKSVSDQDNYIPCTLEPVFGKMFELTCTLPLEKDLKITLYDYDLLSKDEKIGETVVDLENRLLSKFGARCGLPQTYCVSGPNQWRDQLRPSQLLHLFCQQHRVKAPVYRTDRVMFQDKEYSIEEIEAGRIPNPHLGPVEERLALHVLQQQGLVPEHVESRPLYSPLQPDIEQGKLQMWVDLFPKALGRPGPPFNITPRRARRFFLRCIIWNTRDVILDDLSLTGEKMSDIYVKGWMIGFEEHKQKTDVHYRSLGGEGNFNWRFIFPFDYLPAEQVCTIAKKDAFWRLDKTESKIPARVVFQIWDNDKFSFDDFLGSLQLDLNRMPKPAKTAKKCSLDQLDDAFHPEWFVSLFEQKTVKGWWPCVAEEGEKKILAGKLEMTLEIVAESEHEERPAGQGRDEPNMNPKLEDPRRPDTSFLWFTSPYKTMKFILWRRFRWAIILFIILFILLLFLAIFIYAFPNYAAMKLVKPFS

SEQ ID NO: 950 - protein, 2081 aa, Homo sapiens
MLCCLLVRASNLPSAKKDRRSDPVASLTFRGVKKRTKVIKNSVNPVWNEGFEWDLKGIPLDQGSELHVVVKDHETMGRNRFLGEAKVPLREVLATPSLSASFNAPLLDTKKQPTGASLVLQVSYTPLPGAVPLFPPPTPLEPSPTLPDLDVVADTGGEEDTEDQGLTGDEAEPFLDQSGGPGAPTTPRKLPSRPPPHYPGIKRKRSAPTSRKLLSDKPQDFQIRVQVIEGRQLPGVNIKPVVKVTAAGQTKRTRIHKGNSPLFNETLFFNLFDSPGELFDEPIFITVVDSRSLRTDALLGEFRMDVGTIYREPRHAYLRKWLLLSDPDDFSAGARGYLKTSLCVLGPGDEAPLERKDPSEDKEDIESNLLRPTGVALRGAHFCLKVFRAEDLPQMDDAVMDNVKQIFGFESNKKNLVDPFVEVSFAGKMLCSKILEKTANPQWNQNITLPAMFPSMCEKMRIRIIDWDRLTHNDIVATTYLSMSKISAPGGEIEEEPAGAVKPSKASDLDDYLGFLPTFGPCYINLYGSPREFTGFPDPYTELNTGKGEGVAYRGRLLLSLETKLVEHSEQKVEDLPADDILRVEKYLRRRKYSLFAAFYSATMLQDVDDAIQFEVSIGNYGNKFDMTCLPLASTTQYSRAVFDGCHYYYLPWGNVKPVVVLSSYWEDISHRIETQNQLLGIADRLEAGLEQVHLALKAQCSTEDVDSLVAQLTDELIAGCSQPLGDIHETPSATHLDQYLYQLRTHHLSQITEAALALKLGHSELPAALEQAEDWLLRLRALAEEPQNSLPDIVIWMLQGDKRVAYQRVPAHQVLFSRRGANYCGKNCGKLQTIFLKYPMEKVPGARMPVQIRVKLWFGLSVDEKEFNQFAEGKLSVFAETYENETKLALVGNWGTTGLTYPKFSDVTGKIKLPKDSFRPSAGWTWAGDWFVCPEKTLLHDMDAGHLSFVEEVFENQTRLPGGQWIYMSDNYTDVNGEKVLPKDDIECPLGWKWEDEEWSTDLNRAVDEQGWEYSITIPPERKPKHWVPAEKMYYTHRRRRWVRLRRRDLSQMEALKRHRQAEAEGEGWEYASLFGWKFHLEYRKTDAFRRRRWRRRMEPLEKTGPAAVFALEGALGGVMDDKSEDSMSVSTLSFGVNRPTISCIFDYGNRYHLRCYMYQARDLAAMDKDSFSDPYAIVSFLHQSQKTVVVKNTLNPTWDQTLIFYEIEIFGEPATVAEQPPSIVVELYDHDTYGADEFMGRCICQPSLERMPRLAWFPLTRGSQPSGELLASFELIQREKPAIHHIPGFEVQETSRILDESEDTDLPYPPPQREANIYMVPQNIKPALQRTAIEILAWGLRNMKSYQLANISSPSLVVECGGQTVQSCVIRNLRKNPNFDICTLFMEVMLPREELYCPPITVKVIDNRQFGRRPVVGQCTIRSLESFLCDPYSAESPSPQGGPDDVSLLSPGEDVLIDIDDKEPLIPIQEEEFIDWWSKFFASIGEREKCGSYLEKDFDTLKVYDTQLENVEAFEGLSDFCNTFKLYRGKTQEETEDPSVIGEFKGLFKIYPLPEDPAIPMPPRQFHQLAAQGPQECLVRIYIVRAFGLQPKDPNGKCDPYIKISIGKKSVSDQDNYIPCTLEPVFGKMFELTCTLPLEKDLKITLYDYDLLSKDEKIGETVVDLENRLLSKFGARCGLPQTYCVSGPNQWRDQLRPSQLLHLFCQQHRVKAPVYRTDRVMFQDKEYSIEEIEAGRIPNPHLGPVEERLALHVLQQQGLVPEHVESRPLYSPLQPDIEQGKLQMWVDLFPKALGRPGPPFNITPRRARRFFLRCIIWNTRDVILDDLSLTGEKMSDIYVKGWMIGFEEHKQKTDVHYRSLGGEGNFNWRFIFPFDYLPAEQVCTIAKKDAFWRLDKTESKIPARVVFQIWDNDKFSFDDFLGSLQLDLNRMPKPAKTAKKCSLDQLDDAFHPEWFVSLFEQKTVKGWWPCVAEEGEKKILAGKLEMTLEIVAESEHEERPAGQGRDEPNMNPKLEDPRRPDTSFLWFTSPYKTMKFILWRRFRWAIILFIILFILLLFLAIFIYAFPNYAAMKLVKPFS

SEQ ID NO: 951 - protein, 2102 aa, Homo sapiens
MLCCLLVRASNLPSAKKDRRSDPVASLTFRGVKKRTKVIKNSVNPVWNEGFEWDLKGIPLDQGSELHVVVKDHETMGRNRFLGEAKVPLREVLATPSLSASFNAPLLDTKKQPTGASLVLQVSYTPLPGAVPLFPPPTPLEPSPTLPDLDVVADTGGEEDTEDQGLTGDEAEPFLDQSGGPGAPTTPRKLPSRPPPHYPGIKRKRSAPTSRKLLSDKPQDFQIRVQVIEGRQLPGVNIKPVVKVTAAGQTKRTRIHKGNSPLFNETLFFNLFDSPGELFDEPIFITVVDSRSLRTDALLGEFRMDVGTIYREPRHAYLRKWLLLSDPDDFSAGARGYLKTSLCVLGPGDEAPLERKDPSEDKEDIESNLLRPTGVALRGAHFCLKVFRAEDLPQMDDAVMDNVKQIFGFESNKKNLVDPFVEVSFAGKMLCSKILEKTANPQWNQNITLPAMFPSMCEKMRIRIIDWDRLTHNDIVATTYLSMSKISAPGGEIEEEPAGAVKPSKASDLDDYLGFLPTFGPCYINLYGSPREFTGFPDPYTELNTGKGEGVAYRGRLLLSLETKLVEHSEQKVEDLPADDILRVEKYLRRRKYSLFAAFYSATMLQDVDDAIQFEVSIGNYGNKFDMTCLPLASTTQYSRAVFDGCHYYYLPWGNVKPVVVLSSYWEDISHRIETQNQLLGIADRLEAGLEQVHLALKAQCSTEDVDSLVAQLTDELIAGCSQPLGDIHETPSATHLDQYLYQLRTHHLSQITEAALALKLGHSELPAALEQAEDWLLRLRALAEEPQNSLPDIVIWMLQGDKRVAYQRVPAHQVLFSRRGANYCGKNCGKLQTIFLKYPMEKVPGARMPVQIRVKLWFGLSVDEKEFNQFAEGKLSVFAETYENETKLALVGNWGTTGLTYPKFSDVTGKIKLPKDSFRPSAGWTWAGDWFVCPEKTLLHDMDAGHLSFVEEVFENQTRLPGGQWIYMSDNYTDVNGEKVLPKDDIECPLGWKWEDEEWSTDLNRAVDEQGWEYSITIPPERKPKHWVPAEKMYYTHRRRRWVRLRRRDLSQMEALKRHRQAEAEGEGWEYASLFGWKFHLEYRKTDAFRRRRWRRRMEPLEKTGPAAVFALEGALGGVMDDKSEDSMSVSTLSFGVNRPTISCIFDYGNRYHLRCYMYQARDLAAMDKDSFSDPYAIVSFLHQSQKTVVVKNTLNPTWDQTLIFYEIEIFGEPATVAEQPPSIVVELYDHDTYGADEFMGRCICQPSLERMPRLAWFPLTRGSQPSGELLASFELIQREKPAIHHIPGFEVQETSRILDESEDTDLPYPPPQREANIYMVPQNIKPALQRTAIEILAWGLRNMKSYQLANISSPSLVVECGGQTVQSCVIRNLRKNPNFDICTLFMEVMLPREELYCPPITVKVIDNRQFGRRPVVGQCTIRSLESFLCDPYSAESPSPQGGPDDVSLLSPGEDVLIDIDDKEPLIPIQLADGLSSLAPTNTASPPSSPHEEEFIDWWSKFFASIGEREKCGSYLEKDFDTLKVYDTQLENVEAFEGLSDFCNTFKLYRGKTQEETEDPSVIGEFKGLFKIYPLPEDPAIPMPPRQFHQLAAQGPQECLVRIYIVRAFGLQPKDPNGKCDPYIKISIGKKSVSDQDNYIPCTLEPVFGKMFELTCTLPLEKDLKITLYDYDLLSKDEKIGETVVDLENRLLSKFGARCGLPQTYCVSGPNQWRDQLRPSQLLHLFCQQHRVKAPVYRTDRVMFQDKEYSIEEIEAGRIPNPHLGPVEERLALHVLQQQGLVPEHVESRPLYSPLQPDIEQGKLQMWVDLFPKALGRPGPPFNITPRRARRFFLRCIIWNTRDVILDDLSLTGEKMSDIYVKGWMIGFEEHKQKTDVHYRSLGGEGNFNWRFIFPFDYLPAEQVCTIAKKDAFWRLDKTESKIPARVVFQIWDNDKFSFDDFLGSLQLDLNRMPKPAKTAKKCSLDQLDDAFHPEWFVSLFEQKTVKGWWPCVAEEGEKKILAGKLEMTLEIVAESEHEERPAGQGRDEPNMNPKLEDPRRPDTSFLWFTSPYKTMKFILWRRFRWAIILFIILFILLLFLAIFIYAFPNYAAMKLVKPFS

SEQ ID NO: 952 - protein, 2118 aa, Homo sapiens
MLRVFILYAENVHTPDTDISDAYCSAVFAGVKKRTKVIKNSVNPVWNEGFEWDLKGIPLDQGSELHVVVKDHETMGRNRFLGEAKVPLREVLATPSLSASFNAPLLDTKKQPTGASLVLQVSYTPLPGAVPLFPPPTPLEPSPTLPDLDVVAGGGQSRAETWSLLSDSTMDTRYSGKKWPAPTDTGGEEDTEDQGLTGDEAEPFLDQSGGPGAPTTPRKLPSRPPPHYPGIKRKRSAPTSRKLLSDKPQDFQIRVQVIEGRQLPGVNIKPVVKVTAAGQTKRTRIHKGNSPLFNETLFFNLFDSPGELFDEPIFITVVDSRSLRTDALLGEFRMDVGTIYREPRHAYLRKWLLLSDPDDFSAGARGYLKTSLCVLGPGDEAPLERKDPSEDKEDIESNLLRPTGVALRGAHFCLKVFRAEDLPQMDDAVMDNVKQIFGFESNKKNLVDPFVEVSFAGKMLCSKILEKTANPQWNQNITLPAMFPSMCEKMRIRIIDWDRLTHNDIVATTYLSMSKISAPGGEIEVDDYLGFLPTFGPCYINLYGSPREFTGFPDPYTELNTGKGEGVAYRGRLLLSLETKLVEHSEQKVEDLPADDILRVEKYLRRRKYSLFAAFYSATMLQDVDDAIQFEVSIGNYGNKFDMTCLPLASTTQYSRAVFDGCHYYYLPWGNVKPVVVLSSYWEDISHRIETQNQLLGIADRLEAGLEQVHLALKAQCSTEDVDSLVAQLTDELIAGCSQPLGDIHETPSATHLDQYLYQLRTHHLSQITEAALALKLGHSELPAALEQAEDWLLRLRALAEEPQNSLPDIVIWMLQGDKRVAYQRVPAHQVLFSRRGANYCGKNCGKLQTIFLKYPMEKVPGARMPVQIRVKLWFGLSVDEKEFNQFAEGKLSVFAETYENETKLALVGNWGTTGLTYPKFSDVTGKIKLPKDSFRPSAGWTWAGDWFVCPEKTLLHDMDAGHLSFVEEVFENQTRLPGGQWIYMSDNYTDVNGEKVLPKDDIECPLGWKWEDEEWSTDLNRAVDEQGWEYSITIPPERKPKHWVPAEKMYYTHRRRRWVRLRRRDLSQMEALKRHRQAEAEGEGWEYASLFGWKFHLEYRKTDAFRRRRWRRRMEPLEKTGPAAVFALEGALGGVMDDKSEDSMSVSTLSFGVNRPTISCIFDYGNRYHLRCYMYQARDLAAMDKDSFSDPYAIVSFLHQSQKTVVVKNTLNPTWDQTLIFYEIEIFGEPATVAEQPPSIVVELYDHDTYGADEFMGRCICQPSLERMPRLAWFPLTRGSQPSGELLASFELIQREKPAIHHIPGFEVQETSRILDESEDTDLPYPPPQREANIYMVPQNIKPALQRTAIEILAWGLRNMKSYQLANISSPSLVVECGGQTVQSCVIRNLRKNPNFDICTLFMEVMLPREELYCPPITVKVIDNRQFGRRPVVGQCTIRSLESFLCDPYSAESPSPQGGPDDVSLLSPGEDVLIDIDDKEPLIPIQLADGLSSLAPTNTASPPSSPHEEEFIDWWSKFFASIGEREKCGSYLEKDFDTLKVYDTQLENVEAFEGLSDFCNTFKLYRGKTQEETEDPSVIGEFKGLFKIYPLPEDPAIPMPPRQFHQLAAQGPQECLVRIYIVRAFGLQPKDPNGKCDPYIKISIGKKSVSDQDNYIPCTLEPVFGKMFELTCTLPLEKDLKITLYDYDLLSKDEKIGETVVDLENRLLSKFGARCGLPQTYCVSGPNQWRDQLRPSQLLHLFCQQHRVKAPVYRTDRVMFQDKEYSIEEIEAGRIPNPHLGPVEERLALHVLQQQGLVPEHVESRPLYSPLQPDIEQGKLQMWVDLFPKALGRPGPPFNITPRRARRFFLRCIIWNTRDVILDDLSLTGEKMSDIYVKGWMIGFEEHKQKTDVHYRSLGGEGNFNWRFIFPFDYLPAEQVCTIAKKDAFWRLDKTESKIPARVVFQIWDNDKFSFDDFLGSLQLDLNRMPKPAKTAKKCSLDQLDDAFHPEWFVSLFEQKTVKGWWPCVAEEGEKKILAGKLEMTLEIVAESEHEERPAGQGRDEPNMNPKLEDPRRPDTSFLWFTSPYKTMKFILWRRFRWAIILFIILFILLLFLAIFIYAFPNYAAMKLVKPFS

SEQ ID NO: 953 - protein, 2112 aa, Homo sapiens
MLCCLLVRASNLPSAKKDRRSDPVASLTFRGVKKRTKVIKNSVNPVWNEGFEWDLKGIPLDQGSELHVVVKDHETMGRNRFLGEAKVPLREVLATPSLSASFNAPLLDTKKQPTGASLVLQVSYTPLPGAVPLFPPPTPLEPSPTLPDLDVVAGGGQSRAETWSLLSDSTMDTRYSGKKWPAPTDTGGEEDTEDQGLTGDEAEPFLDQSGGPGAPTTPRKLPSRPPPHYPGIKRKRSAPTSRKLLSDKPQDFQIRVQVIEGRQLPGVNIKPVVKVTAAGQTKRTRIHKGNSPLFNETLFFNLFDSPGELFDEPIFITVVDSRSLRTDALLGEFRMDVGTIYREPRHAYLRKWLLLSDPDDFSAGARGYLKTSLCVLGPGDEAPLERKDPSEDKEDIESNLLRPTGVALRGAHFCLKVFRAEDLPQMDDAVMDNVKQIFGFESNKKNLVDPFVEVSFAGKMLCSKILEKTANPQWNQNITLPAMFPSMCEKMRIRIIDWDRLTHNDIVATTYLSMSKISAPGGEIEEEPAGAVKPSKASDLDDYLGFLPTFGPCYINLYGSPREFTGFPDPYTELNTGKGEGVAYRGRLLLSLETKLVEHSEQKVEDLPADDILRVEKYLRRRKYSLFAAFYSATMLQDVDDAIQFEVSIGNYGNKFDMTCLPLASTTQYSRAVFDGCHYYYLPWGNVKPVVVLSSYWEDISHRIETQNQLLGIADRLEAGLEQVHLALKAQCSTEDVDSLVAQLTDELIAGCSQPLGDIHETPSATHLDQYLYQLRTHHLSQITEAALALKLGHSELPAALEQAEDWLLRLRALAEEPQNSLPDIVIWMLQGDKRVAYQRVPAHQVLFSRRGANYCGKNCGKLQTIFLKYPMEKVPGARMPVQIRVKLWFGLSVDEKEFNQFAEGKLSVFAETYENETKLALVGNWGTTGLTYPKFSDVTGKIKLPKDSFRPSAGWTWAGDWFVCPEKTLLHDMDAGHLSFVEEVFENQTRLPGGQWIYMSDNYTDVNGEKVLPKDDIECPLGWKWEDEEWSTDLNRAVDEQGWEYSITIPPERKPKHWVPAEKMYYTHRRRRWVRLRRRDLSQMEALKRHRQAEAEGEGWEYASLFGWKFHLEYRKTDAFRRRRWRRRMEPLEKTGPAAVFALEGALGGVMDDKSEDSMSVSTLSFGVNRPTISCIFDYGNRYHLRCYMYQARDLAAMDKDSFSDPYAIVSFLHQSQKTVVVKNTLNPTWDQTLIFYEIEIFGEPATVAEQPPSIVVELYDHDTYGADEFMGRCICQPSLERMPRLAWFPLTRGSQPSGELLASFELIQREKPAIHHIPGFEVQETSRILDESEDTDLPYPPPQREANIYMVPQNIKPALQRTAIEILAWGLRNMKSYQLANISSPSLVVECGGQTVQSCVIRNLRKNPNFDICTLFMEVMLPREELYCPPITVKVIDNRQFGRRPVVGQCTIRSLESFLCDPYSAESPSPQGGPDDVSLLSPGEDVLIDIDDKEPLIPIQEEEFIDWWSKFFASIGEREKCGSYLEKDFDTLKVYDTQLENVEAFEGLSDFCNTFKLYRGKTQEETEDPSVIGEFKGLFKIYPLPEDPAIPMPPRQFHQLAAQGPQECLVRIYIVRAFGLQPKDPNGKCDPYIKISIGKKSVSDQDNYIPCTLEPVFGKMFELTCTLPLEKDLKITLYDYDLLSKDEKIGETVVDLENRLLSKFGARCGLPQTYCVSGPNQWRDQLRPSQLLHLFCQQHRVKAPVYRTDRVMFQDKEYSIEEIEAGRIPNPHLGPVEERLALHVLQQQGLVPEHVESRPLYSPLQPDIEQGKLQMWVDLFPKALGRPGPPFNITPRRARRFFLRCIIWNTRDVILDDLSLTGEKMSDIYVKGWMIGFEEHKQKTDVHYRSLGGEGNFNWRFIFPFDYLPAEQVCTIAKKDAFWRLDKTESKIPARVVFQIWDNDKFSFDDFLGSLQLDLNRMPKPAKTAKKCSLDQLDDAFHPEWFVSLFEQKTVKGWWPCVAEEGEKKILAGKLEMTLEIVAESEHEERPAGQGRDEPNMNPKLEDPRRPDTSFLWFTSPYKTMKFILWRRFRWAIILFIILFILLLFLAIFIYAFPNYAAMKLVKPFS

SEQ ID NO: 954 - protein, 2088 aa, Homo sapiens
MLCCLLVRASNLPSAKKDRRSDPVASLTFRGVKKRTKVIKNSVNPVWNEGFEWDLKGIPLDQGSELHVVVKDHETMGRNRFLGEAKVPLREVLATPSLSASFNAPLLDTKKQPTGASLVLQVSYTPLPGAVPLFPPPTPLEPSPTLPDLDVVADTGGEEDTEDQGLTGDEAEPFLDQSGGPGAPTTPRKLPSRPPPHYPGIKRKRSAPTSRKLLSDKPQDFQIRVQVIEGRQLPGVNIKPVVKVTAAGQTKRTRIHKGNSPLFNETLFFNLFDSPGELFDEPIFITVVDSRSLRTDALLGEFRMDVGTIYREPRHAYLRKWLLLSDPDDFSAGARGYLKTSLCVLGPGDEAPLERKDPSEDKEDIESNLLRPTGVALRGAHFCLKVFRAEDLPQMDDAVMDNVKQIFGFESNKKNLVDPFVEVSFAGKMLCSKILEKTANPQWNQNITLPAMFPSMCEKMRIRIIDWDRLTHNDIVATTYLSMSKISAPGGEIEVDDYLGFLPTFGPCYINLYGSPREFTGFPDPYTELNTGKGEGVAYRGRLLLSLETKLVEHSEQKVEDLPADDILRVEKYLRRRKYSLFAAFYSATMLQDVDDAIQFEVSIGNYGNKFDMTCLPLASTTQYSRAVFDGCHYYYLPWGNVKPVVVLSSYWEDISHRIETQNQLLGIADRLEAGLEQVHLALKAQCSTEDVDSLVAQLTDELIAGCSQPLGDIHETPSATHLDQYLYQLRTHHLSQITEAALALKLGHSELPAALEQAEDWLLRLRALAEEPQNSLPDIVIWMLQGDKRVAYQRVPAHQVLFSRRGANYCGKNCGKLQTIFLKYPMEKVPGARMPVQIRVKLWFGLSVDEKEFNQFAEGKLSVFAETYENETKLALVGNWGTTGLTYPKFSDVTGKIKLPKDSFRPSAGWTWAGDWFVCPEKTLLHDMDAGHLSFVEEVFENQTRLPGGQWIYMSDNYTDVNGEKVLPKDDIECPLGWKWEDEEWSTDLNRAVDEQGWEYSITIPPERKPKHWVPAEKMYYTHRRRRWVRLRRRDLSQMEALKRHRQAEAEGEGWEYASLFGWKFHLEYRKTDAFRRRRWRRRMEPLEKTGPAAVFALEGALGGVMDDKSEDSMSVSTLSFGVNRPTISCIFDYGNRYHLRCYMYQARDLAAMDKDSFSDPYAIVSFLHQSQKTVVVKNTLNPTWDQTLIFYEIEIFGEPATVAEQPPSIVVELYDHDTYGADEFMGRCICQPSLERMPRLAWFPLTRGSQPSGELLASFELIQREKPAIHHIPGFEVQETSRILDESEDTDLPYPPPQREANIYMVPQNIKPALQRTAIEILAWGLRNMKSYQLANISSPSLVVECGGQTVQSCVIRNLRKNPNFDICTLFMEVMLPREELYCPPITVKVIDNRQFGRRPVVGQCTIRSLESFLCDPYSAESPSPQGGPDDVSLLSPGEDVLIDIDDKEPLIPIQLADGLSSLAPTNTASPPSSPHEEEFIDWWSKFFASIGEREKCGSYLEKDFDTLKVYDTQLENVEAFEGLSDFCNTFKLYRGKTQEETEDPSVIGEFKGLFKIYPLPEDPAIPMPPRQFHQLAAQGPQECLVRIYIVRAFGLQPKDPNGKCDPYIKISIGKKSVSDQDNYIPCTLEPVFGKMFELTCTLPLEKDLKITLYDYDLLSKDEKIGETVVDLENRLLSKFGARCGLPQTYCVSGPNQWRDQLRPSQLLHLFCQQHRVKAPVYRTDRVMFQDKEYSIEEIEAGRIPNPHLGPVEERLALHVLQQQGLVPEHVESRPLYSPLQPDIEQGKLQMWVDLFPKALGRPGPPFNITPRRARRFFLRCIIWNTRDVILDDLSLTGEKMSDIYVKGWMIGFEEHKQKTDVHYRSLGGEGNFNWRFIFPFDYLPAEQVCTIAKKDAFWRLDKTESKIPARVVFQIWDNDKFSFDDFLGSLQLDLNRMPKPAKTAKKCSLDQLDDAFHPEWFVSLFEQKTVKGWWPCVAEEGEKKILAGKLEMTLEIVAESEHEERPAGQGRDEPNMNPKLEDPRRPDTSFLWFTSPYKTMKFILWRRFRWAIILFIILFILLLFLAIFIYAFPNYAAMKLVKPFS

SEQ ID NO: 955 - protein, 2097 aa, Homo sapiens
MLRVFILYAENVHTPDTDISDAYCSAVFAGVKKRTKVIKNSVNPVWNEGFEWDLKGIPLDQGSELHVVVKDHETMGRNRFLGEAKVPLREVLATPSLSASFNAPLLDTKKQPTGASLVLQVSYTPLPGAVPLFPPPTPLEPSPTLPDLDVVAGGGQSRAETWSLLSDSTMDTRYSGKKWPAPTDTGGEEDTEDQGLTGDEAEPFLDQSGGPGAPTTPRKLPSRPPPHYPGIKRKRSAPTSRKLLSDKPQDFQIRVQVIEGRQLPGVNIKPVVKVTAAGQTKRTRIHKGNSPLFNETLFFNLFDSPGELFDEPIFITVVDSRSLRTDALLGEFRMDVGTIYREPRHAYLRKWLLLSDPDDFSAGARGYLKTSLCVLGPGDEAPLERKDPSEDKEDIESNLLRPTGVALRGAHFCLKVFRAEDLPQMDDAVMDNVKQIFGFESNKKNLVDPFVEVSFAGKMLCSKILEKTANPQWNQNITLPAMFPSMCEKMRIRIIDWDRLTHNDIVATTYLSMSKISAPGGEIEVDDYLGFLPTFGPCYINLYGSPREFTGFPDPYTELNTGKGEGVAYRGRLLLSLETKLVEHSEQKVEDLPADDILRVEKYLRRRKYSLFAAFYSATMLQDVDDAIQFEVSIGNYGNKFDMTCLPLASTTQYSRAVFDGCHYYYLPWGNVKPVVVLSSYWEDISHRIETQNQLLGIADRLEAGLEQVHLALKAQCSTEDVDSLVAQLTDELIAGCSQPLGDIHETPSATHLDQYLYQLRTHHLSQITEAALALKLGHSELPAALEQAEDWLLRLRALAEEPQNSLPDIVIWMLQGDKRVAYQRVPAHQVLFSRRGANYCGKNCGKLQTIFLKYPMEKVPGARMPVQIRVKLWFGLSVDEKEFNQFAEGKLSVFAETYENETKLALVGNWGTTGLTYPKFSDVTGKIKLPKDSFRPSAGWTWAGDWFVCPEKTLLHDMDAGHLSFVEEVFENQTRLPGGQWIYMSDNYTDVNGEKVLPKDDIECPLGWKWEDEEWSTDLNRAVDEQGWEYSITIPPERKPKHWVPAEKMYYTHRRRRWVRLRRRDLSQMEALKRHRQAEAEGEGWEYASLFGWKFHLEYRKTDAFRRRRWRRRMEPLEKTGPAAVFALEGALGGVMDDKSEDSMSVSTLSFGVNRPTISCIFDYGNRYHLRCYMYQARDLAAMDKDSFSDPYAIVSFLHQSQKTVVVKNTLNPTWDQTLIFYEIEIFGEPATVAEQPPSIVVELYDHDTYGADEFMGRCICQPSLERMPRLAWFPLTRGSQPSGELLASFELIQREKPAIHHIPGFEVQETSRILDESEDTDLPYPPPQREANIYMVPQNIKPALQRTAIEILAWGLRNMKSYQLANISSPSLVVECGGQTVQSCVIRNLRKNPNFDICTLFMEVMLPREELYCPPITVKVIDNRQFGRRPVVGQCTIRSLESFLCDPYSAESPSPQGGPDDVSLLSPGEDVLIDIDDKEPLIPIQEEEFIDWWSKFFASIGEREKCGSYLEKDFDTLKVYDTQLENVEAFEGLSDFCNTFKLYRGKTQEETEDPSVIGEFKGLFKIYPLPEDPAIPMPPRQFHQLAAQGPQECLVRIYIVRAFGLQPKDPNGKCDPYIKISIGKKSVSDQDNYIPCTLEPVFGKMFELTCTLPLEKDLKITLYDYDLLSKDEKIGETVVDLENRLLSKFGARCGLPQTYCVSGPNQWRDQLRPSQLLHLFCQQHRVKAPVYRTDRVMFQDKEYSIEEIEAGRIPNPHLGPVEERLALHVLQQQGLVPEHVESRPLYSPLQPDIEQGKLQMWVDLFPKALGRPGPPFNITPRRARRFFLRCIIWNTRDVILDDLSLTGEKMSDIYVKGWMIGFEEHKQKTDVHYRSLGGEGNFNWRFIFPFDYLPAEQVCTIAKKDAFWRLDKTESKIPARVVFQIWDNDKFSFDDFLGSLQLDLNRMPKPAKTAKKCSLDQLDDAFHPEWFVSLFEQKTVKGWWPCVAEEGEKKILAGKLEMTLEIVAESEHEERPAGQGRDEPNMNPKLEDPRRPDTSFLWFTSPYKTMKFILWRRFRWAIILFIILFILLLFLAIFIYAFPNYAAMKLVKPFS

SEQ ID NO: 956 - protein, 2119 aa, Homo sapiens
MLCCLLVRASNLPSAKKDRRSDPVASLTFRGVKKRTKVIKNSVNPVWNEGFEWDLKGIPLDQGSELHVVVKDHETMGRNRFLGEAKVPLREVLATPSLSASFNAPLLDTKKQPTGASLVLQVSYTPLPGAVPLFPPPTPLEPSPTLPDLDVVAGGGQSRAETWSLLSDSTMDTRYSGKKWPAPTDTGGEEDTEDQGLTGDEAEPFLDQSGGPGAPTTPRKLPSRPPPHYPGIKRKRSAPTSRKLLSDKPQDFQIRVQVIEGRQLPGVNIKPVVKVTAAGQTKRTRIHKGNSPLFNETLFFNLFDSPGELFDEPIFITVVDSRSLRTDALLGEFRMDVGTIYREPRHAYLRKWLLLSDPDDFSAGARGYLKTSLCVLGPGDEAPLERKDPSEDKEDIESNLLRPTGVALRGAHFCLKVFRAEDLPQMDDAVMDNVKQIFGFESNKKNLVDPFVEVSFAGKMLCSKILEKTANPQWNQNITLPAMFPSMCEKMRIRIIDWDRLTHNDIVATTYLSMSKISAPGGEIEVDDYLGFLPTFGPCYINLYGSPREFTGFPDPYTELNTGKGEGVAYRGRLLLSLETKLVEHSEQKVEDLPADDILRVEKYLRRRKYSLFAAFYSATMLQDVDDAIQFEVSIGNYGNKFDMTCLPLASTTQYSRAVFDGCHYYYLPWGNVKPVVVLSSYWEDISHRIETQNQLLGIADRLEAGLEQVHLALKAQCSTEDVDSLVAQLTDELIAGCSQPLGDIHETPSATHLDQYLYQLRTHHLSQITEAALALKLGHSELPAALEQAEDWLLRLRALAEEPQNSLPDIVIWMLQGDKRVAYQRVPAHQVLFSRRGANYCGKNCGKLQTIFLKYPMEKVPGARMPVQIRVKLWFGLSVDEKEFNQFAEGKLSVFAETYENETKLALVGNWGTTGLTYPKFSDVTGKIKLPKDSFRPSAGWTWAGDWFVCPEKTLLHDMDAGHLSFVEEVFENQTRLPGGQWIYMSDNYTDVNGEKVLPKDDIECPLGWKWEDEEWSTDLNRAVDEQGWEYSITIPPERKPKHWVPAEKMYYTHRRRRWVRLRRRDLSQMEALKRHRQAEAEGEGWEYASLFGWKFHLEYRKTDAFRRRRWRRRMEPLEKTGPAAVFALEGALGGVMDDKSEDSMSVSTLSFGVNRPTISCIFDYGNRYHLRCYMYQARDLAAMDKDSFSDPYAIVSFLHQSQKTVVVKNTLNPTWDQTLIFYEIEIFGEPATVAEQPPSIVVELYDHDTYGADEFMGRCICQPSLERMPRLAWFPLTRGSQPSGELLASFELIQREKPAIHHIPGFEVQETSRILDESEDTDLPYPPPQREANIYMVPQNIKPALQRTAIEILAWGLRNMKSYQLANISSPSLVVECGGQTVQSCVIRNLRKNPNFDICTLFMEVMLPREELYCPPITVKVIDNRQFGRRPVVGQCTIRSLESFLCDPYSAESPSPQGGPDDVSLLSPGEDVLIDIDDKEPLIPIQLADGLSSLAPTNTASPPSSPHEEEFIDWWSKFFASIGEREKCGSYLEKDFDTLKVYDTQLENVEAFEGLSDFCNTFKLYRGKTQEETEDPSVIGEFKGLFKIYPLPEDPAIPMPPRQFHQLAAQGPQECLVRIYIVRAFGLQPKDPNGKCDPYIKISIGKKSVSDQDNYIPCTLEPVFGKMFELTCTLPLEKDLKITLYDYDLLSKDEKIGETVVDLENRLLSKFGARCGLPQTYCVSGPNQWRDQLRPSQLLHLFCQQHRVKAPVYRTDRVMFQDKEYSIEEIEAGRIPNPHLGPVEERLALHVLQQQGLVPEHVESRPLYSPLQPDIEQGKLQMWVDLFPKALGRPGPPFNITPRRARRFFLRCIIWNTRDVILDDLSLTGEKMSDIYVKGWMIGFEEHKQKTDVHYRSLGGEGNFNWRFIFPFDYLPAEQVCTIAKKDAFWRLDKTESKIPARVVFQIWDNDKFSFDDFLGSLQLDLNRMPKPAKTAKKCSLDQLDDAFHPEWFVSLFEQKTVKGWWPCVAEEGEKKILAGKLEMTLEIVAESEHEERPAGQGRDEPNMNPKLEDPRRPDTSFLWFTSPYKTMKFILWRRFRWAIILFIILFILLLFLAIFIYAFPNYAAMKLVKPFS

SEQ ID NO: 957 - protein, 2098 aa, Homo sapiens
MLCCLLVRASNLPSAKKDRRSDPVASLTFRGVKKRTKVIKNSVNPVWNEGFEWDLKGIPLDQGSELHVVVKDHETMGRNRFLGEAKVPLREVLATPSLSASFNAPLLDTKKQPTGASLVLQVSYTPLPGAVPLFPPPTPLEPSPTLPDLDVVAGGGQSRAETWSLLSDSTMDTRYSGKKWPAPTDTGGEEDTEDQGLTGDEAEPFLDQSGGPGAPTTPRKLPSRPPPHYPGIKRKRSAPTSRKLLSDKPQDFQIRVQVIEGRQLPGVNIKPVVKVTAAGQTKRTRIHKGNSPLFNETLFFNLFDSPGELFDEPIFITVVDSRSLRTDALLGEFRMDVGTIYREPRHAYLRKWLLLSDPDDFSAGARGYLKTSLCVLGPGDEAPLERKDPSEDKEDIESNLLRPTGVALRGAHFCLKVFRAEDLPQMDDAVMDNVKQIFGFESNKKNLVDPFVEVSFAGKMLCSKILEKTANPQWNQNITLPAMFPSMCEKMRIRIIDWDRLTHNDIVATTYLSMSKISAPGGEIEVDDYLGFLPTFGPCYINLYGSPREFTGFPDPYTELNTGKGEGVAYRGRLLLSLETKLVEHSEQKVEDLPADDILRVEKYLRRRKYSLFAAFYSATMLQDVDDAIQFEVSIGNYGNKFDMTCLPLASTTQYSRAVFDGCHYYYLPWGNVKPVVVLSSYWEDISHRIETQNQLLGIADRLEAGLEQVHLALKAQCSTEDVDSLVAQLTDELIAGCSQPLGDIHETPSATHLDQYLYQLRTHHLSQITEAALALKLGHSELPAALEQAEDWLLRLRALAEEPQNSLPDIVIWMLQGDKRVAYQRVPAHQVLFSRRGANYCGKNCGKLQTIFLKYPMEKVPGARMPVQIRVKLWFGLSVDEKEFNQFAEGKLSVFAETYENETKLALVGNWGTTGLTYPKFSDVTGKIKLPKDSFRPSAGWTWAGDWFVCPEKTLLHDMDAGHLSFVEEVFENQTRLPGGQWIYMSDNYTDVNGEKVLPKDDIECPLGWKWEDEEWSTDLNRAVDEQGWEYSITIPPERKPKHWVPAEKMYYTHRRRRWVRLRRRDLSQMEALKRHRQAEAEGEGWEYASLFGWKFHLEYRKTDAFRRRRWRRRMEPLEKTGPAAVFALEGALGGVMDDKSEDSMSVSTLSFGVNRPTISCIFDYGNRYHLRCYMYQARDLAAMDKDSFSDPYAIVSFLHQSQKTVVVKNTLNPTWDQTLIFYEIEIFGEPATVAEQPPSIVVELYDHDTYGADEFMGRCICQPSLERMPRLAWFPLTRGSQPSGELLASFELIQREKPAIHHIPGFEVQETSRILDESEDTDLPYPPPQREANIYMVPQNIKPALQRTAIEILAWGLRNMKSYQLANISSPSLVVECGGQTVQSCVIRNLRKNPNFDICTLFMEVMLPREELYCPPITVKVIDNRQFGRRPVVGQCTIRSLESFLCDPYSAESPSPQGGPDDVSLLSPGEDVLIDIDDKEPLIPIQEEEFIDWWSKFFASIGEREKCGSYLEKDFDTLKVYDTQLENVEAFEGLSDFCNTFKLYRGKTQEETEDPSVIGEFKGLFKIYPLPEDPAIPMPPRQFHQLAAQGPQECLVRIYIVRAFGLQPKDPNGKCDPYIKISIGKKSVSDQDNYIPCTLEPVFGKMFELTCTLPLEKDLKITLYDYDLLSKDEKIGETVVDLENRLLSKFGARCGLPQTYCVSGPNQWRDQLRPSQLLHLFCQQHRVKAPVYRTDRVMFQDKEYSIEEIEAGRIPNPHLGPVEERLALHVLQQQGLVPEHVESRPLYSPLQPDIEQGKLQMWVDLFPKALGRPGPPFNITPRRARRFFLRCIIWNTRDVILDDLSLTGEKMSDIYVKGWMIGFEEHKQKTDVHYRSLGGEGNFNWRFIFPFDYLPAEQVCTIAKKDAFWRLDKTESKIPARVVFQIWDNDKFSFDDFLGSLQLDLNRMPKPAKTAKKCSLDQLDDAFHPEWFVSLFEQKTVKGWWPCVAEEGEKKILAGKLEMTLEIVAESEHEERPAGQGRDEPNMNPKLEDPRRPDTSFLWFTSPYKTMKFILWRRFRWAIILFIILFILLLFLAIFIYAFPNYAAMKLVKPFS

SEQ ID NO: 958 - protein, 2111 aa, Homo sapiens
MLRVFILYAENVHTPDTDISDAYCSAVFAGVKKRTKVIKNSVNPVWNEGFEWDLKGIPLDQGSELHVVVKDHETMGRNRFLGEAKVPLREVLATPSLSASFNAPLLDTKKQPTGASLVLQVSYTPLPGAVPLFPPPTPLEPSPTLPDLDVVAGGGQSRAETWSLLSDSTMDTRYSGKKWPAPTDTGGEEDTEDQGLTGDEAEPFLDQSGGPGAPTTPRKLPSRPPPHYPGIKRKRSAPTSRKLLSDKPQDFQIRVQVIEGRQLPGVNIKPVVKVTAAGQTKRTRIHKGNSPLFNETLFFNLFDSPGELFDEPIFITVVDSRSLRTDALLGEFRMDVGTIYREPRHAYLRKWLLLSDPDDFSAGARGYLKTSLCVLGPGDEAPLERKDPSEDKEDIESNLLRPTGVALRGAHFCLKVFRAEDLPQMDDAVMDNVKQIFGFESNKKNLVDPFVEVSFAGKMLCSKILEKTANPQWNQNITLPAMFPSMCEKMRIRIIDWDRLTHNDIVATTYLSMSKISAPGGEIEEEPAGAVKPSKASDLDDYLGFLPTFGPCYINLYGSPREFTGFPDPYTELNTGKGEGVAYRGRLLLSLETKLVEHSEQKVEDLPADDILRVEKYLRRRKYSLFAAFYSATMLQDVDDAIQFEVSIGNYGNKFDMTCLPLASTTQYSRAVFDGCHYYYLPWGNVKPVVVLSSYWEDISHRIETQNQLLGIADRLEAGLEQVHLALKAQCSTEDVDSLVAQLTDELIAGCSQPLGDIHETPSATHLDQYLYQLRTHHLSQITEAALALKLGHSELPAALEQAEDWLLRLRALAEEPQNSLPDIVIWMLQGDKRVAYQRVPAHQVLFSRRGANYCGKNCGKLQTIFLKYPMEKVPGARMPVQIRVKLWFGLSVDEKEFNQFAEGKLSVFAETYENETKLALVGNWGTTGLTYPKFSDVTGKIKLPKDSFRPSAGWTWAGDWFVCPEKTLLHDMDAGHLSFVEEVFENQTRLPGGQWIYMSDNYTDVNGEKVLPKDDIECPLGWKWEDEEWSTDLNRAVDEQGWEYSITIPPERKPKHWVPAEKMYYTHRRRRWVRLRRRDLSQMEALKRHRQAEAEGEGWEYASLFGWKFHLEYRKTDAFRRRRWRRRMEPLEKTGPAAVFALEGALGGVMDDKSEDSMSVSTLSFGVNRPTISCIFDYGNRYHLRCYMYQARDLAAMDKDSFSDPYAIVSFLHQSQKTVVVKNTLNPTWDQTLIFYEIEIFGEPATVAEQPPSIVVELYDHDTYGADEFMGRCICQPSLERMPRLAWFPLTRGSQPSGELLASFELIQREKPAIHHIPGFEVQETSRILDESEDTDLPYPPPQREANIYMVPQNIKPALQRTAIEILAWGLRNMKSYQLANISSPSLVVECGGQTVQSCVIRNLRKNPNFDICTLFMEVMLPREELYCPPITVKVIDNRQFGRRPVVGQCTIRSLESFLCDPYSAESPSPQGGPDDVSLLSPGEDVLIDIDDKEPLIPIQEEEFIDWWSKFFASIGEREKCGSYLEKDFDTLKVYDTQLENVEAFEGLSDFCNTFKLYRGKTQEETEDPSVIGEFKGLFKIYPLPEDPAIPMPPRQFHQLAAQGPQECLVRIYIVRAFGLQPKDPNGKCDPYIKISIGKKSVSDQDNYIPCTLEPVFGKMFELTCTLPLEKDLKITLYDYDLLSKDEKIGETVVDLENRLLSKFGARCGLPQTYCVSGPNQWRDQLRPSQLLHLFCQQHRVKAPVYRTDRVMFQDKEYSIEEIEAGRIPNPHLGPVEERLALHVLQQQGLVPEHVESRPLYSPLQPDIEQGKLQMWVDLFPKALGRPGPPFNITPRRARRFFLRCIIWNTRDVILDDLSLTGEKMSDIYVKGWMIGFEEHKQKTDVHYRSLGGEGNFNWRFIFPFDYLPAEQVCTIAKKDAFWRLDKTESKIPARVVFQIWDNDKFSFDDFLGSLQLDLNRMPKPAKTAKKCSLDQLDDAFHPEWFVSLFEQKTVKGWWPCVAEEGEKKILAGKLEMTLEIVAESEHEERPAGQGRDEPNMNPKLEDPRRPDTSFLWFTSPYKTMKFILWRRFRWAIILFIILFILLLFLAIFIYAFPNYAAMKLVKPFS

SEQ ID NO: 959 - protein, 2101 aa, Homo sapiens
MLRVFILYAENVHTPDTDISDAYCSAVFAGVKKRTKVIKNSVNPVWNEGFEWDLKGIPLDQGSELHVVVKDHETMGRNRFLGEAKVPLREVLATPSLSASFNAPLLDTKKQPTGASLVLQVSYTPLPGAVPLFPPPTPLEPSPTLPDLDVVADTGGEEDTEDQGLTGDEAEPFLDQSGGPGAPTTPRKLPSRPPPHYPGIKRKRSAPTSRKLLSDKPQDFQIRVQVIEGRQLPGVNIKPVVKVTAAGQTKRTRIHKGNSPLFNETLFFNLFDSPGELFDEPIFITVVDSRSLRTDALLGEFRMDVGTIYREPRHAYLRKWLLLSDPDDFSAGARGYLKTSLCVLGPGDEAPLERKDPSEDKEDIESNLLRPTGVALRGAHFCLKVFRAEDLPQMDDAVMDNVKQIFGFESNKKNLVDPFVEVSFAGKMLCSKILEKTANPQWNQNITLPAMFPSMCEKMRIRIIDWDRLTHNDIVATTYLSMSKISAPGGEIEEEPAGAVKPSKASDLDDYLGFLPTFGPCYINLYGSPREFTGFPDPYTELNTGKGEGVAYRGRLLLSLETKLVEHSEQKVEDLPADDILRVEKYLRRRKYSLFAAFYSATMLQDVDDAIQFEVSIGNYGNKFDMTCLPLASTTQYSRAVFDGCHYYYLPWGNVKPVVVLSSYWEDISHRIETQNQLLGIADRLEAGLEQVHLALKAQCSTEDVDSLVAQLTDELIAGCSQPLGDIHETPSATHLDQYLYQLRTHHLSQITEAALALKLGHSELPAALEQAEDWLLRLRALAEEPQNSLPDIVIWMLQGDKRVAYQRVPAHQVLFSRRGANYCGKNCGKLQTIFLKYPMEKVPGARMPVQIRVKLWFGLSVDEKEFNQFAEGKLSVFAETYENETKLALVGNWGTTGLTYPKFSDVTGKIKLPKDSFRPSAGWTWAGDWFVCPEKTLLHDMDAGHLSFVEEVFENQTRLPGGQWIYMSDNYTDVNGEKVLPKDDIECPLGWKWEDEEWSTDLNRAVDEQGWEYSITIPPERKPKHWVPAEKMYYTHRRRRWVRLRRRDLSQMEALKRHRQAEAEGEGWEYASLFGWKFHLEYRKTDAFRRRRWRRRMEPLEKTGPAAVFALEGALGGVMDDKSEDSMSVSTLSFGVNRPTISCIFDYGNRYHLRCYMYQARDLAAMDKDSFSDPYAIVSFLHQSQKTVVVKNTLNPTWDQTLIFYEIEIFGEPATVAEQPPSIVVELYDHDTYGADEFMGRCICQPSLERMPRLAWFPLTRGSQPSGELLASFELIQREKPAIHHIPGFEVQETSRILDESEDTDLPYPPPQREANIYMVPQNIKPALQRTAIEILAWGLRNMKSYQLANISSPSLVVECGGQTVQSCVIRNLRKNPNFDICTLFMEVMLPREELYCPPITVKVIDNRQFGRRPVVGQCTIRSLESFLCDPYSAESPSPQGGPDDVSLLSPGEDVLIDIDDKEPLIPIQLADGLSSLAPTNTASPPSSPHEEEFIDWWSKFFASIGEREKCGSYLEKDFDTLKVYDTQLENVEAFEGLSDFCNTFKLYRGKTQEETEDPSVIGEFKGLFKIYPLPEDPAIPMPPRQFHQLAAQGPQECLVRIYIVRAFGLQPKDPNGKCDPYIKISIGKKSVSDQDNYIPCTLEPVFGKMFELTCTLPLEKDLKITLYDYDLLSKDEKIGETVVDLENRLLSKFGARCGLPQTYCVSGPNQWRDQLRPSQLLHLFCQQHRVKAPVYRTDRVMFQDKEYSIEEIEAGRIPNPHLGPVEERLALHVLQQQGLVPEHVESRPLYSPLQPDIEQGKLQMWVDLFPKALGRPGPPFNITPRRARRFFLRCIIWNTRDVILDDLSLTGEKMSDIYVKGWMIGFEEHKQKTDVHYRSLGGEGNFNWRFIFPFDYLPAEQVCTIAKKDAFWRLDKTESKIPARVVFQIWDNDKFSFDDFLGSLQLDLNRMPKPAKTAKKCSLDQLDDAFHPEWFVSLFEQKTVKGWWPCVAEEGEKKILAGKLEMTLEIVAESEHEERPAGQGRDEPNMNPKLEDPRRPDTSFLWFTSPYKTMKFILWRRFRWAIILFIILFILLLFLAIFIYAFPNYAAMKLVKPFS

SEQ ID NO: 960 - protein, 148 aa, Homo sapiens
MGYPEVERRELLPAAAPRERGSQGCGCGGAPARAGEGNSCLLFLGFFGLSLALHLLTLCCYLELRSELRRERGAESRLGGSGTPGTSGTLSSLGGLDPDSPITSHLGQPSPKQQPLEPGEAALHSDSQDGHQDFDYIISFSYGLQGFC

SEQ ID NO: 961 - protein, 391 aa, Homo sapiens
MGYPEVERRELLPAAAPRERGSQGCGCGGAPARAGEGNSCLLFLGFFGLSLALHLLTLCCYLELRSELRRERGAESRLGGSGTPGTSGTLSSLGGLDPDSPITSHLGQPSPKQQPLEPGEAALHSDSQDGHQMALLNFFFPDEKPYSEEESRRVRRNKRSKSNEGADGPVKNKKKGKKAGPPGPNGPPGPPGPPGPQGPPGIPGIPGIPGTTVMGPPGPPGPPGPQGPPGLQGPSGAADKAGTRENQPAVVHLQGQGSAIQVKNDLSGGVLNDWSRITMNPKVFKLHPRSGELEVLVDGTYFIYSQVEVYYINFTDFASYEVVVDEKPFLQCTRSIETGKTNYNTCYTAGVCLLKARQKIAVKMVHADISINMSKHTTFFGAIRLGEAPAS

SEQ ID NO: 962 - protein, 389 aa, Homo sapiens
MGYPEVERRELLPAAAPRERGSQGCGCGGAPARAGEGNSCLLFLGFFGLSLALHLLTLCCYLELRSELRRERGAESRLGGSGTPGTSGTLSSLGGLDPDSPITSHLGQPSPKQQPLEPGEAALHSDSQDGHQMALLNFFFPDEKPYSEEESRRVRRNKRSKSNEGADGPVKNKKKGKKAGPPGPNGPPGPPGPPGPQGPPGIPGIPGIPGTTVMGPPGPPGPPGPQGPPGLQGPSGAADKAGTRENQPAVVHLQGQGSAIQVKNDLSGGVLNDWSRITMNPKVFKLHPRSGELEVLVDGTYFIYSQVYYINFTDFASYEVVVDEKPFLQCTRSIETGKTNYNTCYTAGVCLLKARQKIAVKMVHADISINMSKHTTFFGAIRLGEAPAS

SEQ ID NO: 963 - protein, 135 aa, Homo sapiens
MGYPEVERRELLPAAAPRERGSQGCGCGGAPARAGEGNSCLLFLGFFGLSLALHLLTLCCYLELRSELRRERGAESRLGGSGTPGTSGTLSSLGGLDPDSPITSHLGQPSPKQQPLEPGEAALHSDSQDGHQGHQ

SEQ ID NO: 964 - protein, 386 aa, Homo sapiens
MGYPEVERRELLPAAAPRERGSQGCGCGGAPARAGEGNSCLLFLGFFGLSLALHLLTLCCYLELRSELRRERGAESRLGGSGTPGTSGTLSSLGGLDPDSPITSHLGQPSPKQQPLEPGEAALHSDSQDGHQMALLNFFFPDEKPYSEEESRRVRRNKRSKSNEGADGPVKNKKKGKKAGPPGPNGPPGPPGPPGPQGPPGIPGIPGIPGTTVMGPPGPPGPPGPQGPPGLQGPSGAADKAGTRENQPAVVHLQGQGSAIQVKNGGVLNDWSRITMNPKVFKLHPRSGELEVLVDGTYFIYSQVYYINFTDFASYEVVVDEKPFLQCTRSIETGKTNYNTCYTAGVCLLKARQKIAVKMVHADISINMSKHTTFFGAIRLGEAPAS

SEQ ID NO: 965 - protein, 148 aa, Homo sapiens; identical to SEQ ID NO: 960

SEQ ID NO: 966 - protein, 1142 aa, Homo sapiens
MLVLRCRLGTSFPKLDNLVPKGKMKILLVFLGLLGNSVAMPMHMPRMPGFSSKSEEMMRYNQFNFMNGPHMAHLGPFFGNGLPQQFPQYQMPMWPQPPPNTWHPRKSSAPKRHNKTDQTQETQKPNQTQSKKPPQKRPLKQPSHNQPQPEEEAQPPQAFPPFGNGLFPYQQPPWQIPQRLPPPGYGRPPISNEEGGNPYFGYFGYHGFGGRPPYYSEEMFEQDFEKPKEEDPPKAESPGTEPTANSTVTETNSTQPNPKGSQGGNDTSPTGNSTPGLNTGNNPPAQNGIGPLPAVNASGQGGPGSQIPWRPSQPNIRENHPYPNIRNFPSGRQWYFTGTVMGHRQNRPFYRNQQVQRGPRWNFFAWERKQVARPGNPVYHKAYPPTSRGNYPNYAGNPANLRRKPQGPNKHPVGTTVAPLGPKPGPVVRNEKIQNPKEKPLGPKEQIIVPTKNPTSPWRNSQQYEVNKSNYKLPHSEGYMPVPNFNSVDQHENSYYPRGDSRKVPNSDGQTQSQNLPKGIVLGSRRMPYESETNQSELKHSSYQPAVYPEEIPSPAKEHFPAGRNTWDHQEISPPFKEDPGRQEEHLPHPSHGSRGSVFYPEYNPYDPRENSPYLRGNTWDERDDSPNTMGQKESPLYPINTPDQKEIVPYNEEDPVDPTGDEVFPGQNRWGEELSFKGGPTVRHYEGEQYTSNQPKEYLPYSLDNPSKPREDFYYSEFYPWSPDENFPSYNTASTMPPPIESRGYYVNNAAGPEESTLFPSRNSWDHRIQAQGQRERRPYFNRNIWDQATHLQKAPARPPDQKGNQPYYSNTPAGLQKNPIWHEGENLNYGMQITRMNSPEREHSSFPNFIPPSYPSGQKEAHLFHLSQRGSCCAGSSTGPKDNPLALQDYTPSYGLAPGENQDTSPLYTDGSHTKQTRDIISPTSILPGQRNSSEKRESQNPFRDDVSTLRRNTPCSIKNQLGQKEIMPFPEASSLQSKNTPCLKNDLGGDGNNILEQVFEDNQLNERTVDLTPEQLVIGTPDEGSNPEGIQSQVQENESERQQQRPSNILHLPCFGSKLAKHHSSTTGTPSSDGRQSPFDGDSITPTENPNTLVELATEEQFKSINVDPLDADEHSPFEFLQRGTNVQDQVQDCLLLQA

SEQ ID NO: 967 - protein, 193 aa, Homo sapiens
MGVHECPAWLWLLLSLLSLPLGLPVLGAPPRLICDSRVLERYLLEAKEAENITTGCAEHCSLNENITVPDTKVNFYAWKRMEVGQQAVEVWQGLALLSEAVLRGQALLVNSSQPWEPLQLHVDKAVSGLRSLTTLLRALGAQKEAISPPDAASAAPLRTITADTFRKLFRVYSNFLRGKLKLYTGEACRTGDR

SEQ ID NO: 968 - protein, 63 aa, Homo sapiens
MPSSVSWGILLLAGLCCLVPVSLAHGEGTFTSDLSKQMEEEAVRLFIEWLKNGGPSSGAPPPS

SEQ ID NO: 969 - protein, 349 aa, Homo sapiens
MEAVKAEAWEGAAVAQDLLALGYGGVPGAASRGASCPDFRGLCVRLAAELATLGALEQQREAGAEVLSAGDGPGAEEDFLRQLGSLLRELHCPDRALCGGDGAAALREPGAGLRLLRFLCSELQATRLLCLRSLLDPSPRPPLGEGVVEGAGMVQELDLTLQALGLPRPAPGTPASQLLQELHAKISELQPSLPPGSLQPLLSCSLDAPRWEALESLSQSLRDQYRCRRCLLLKRLDLTTSAFHWSDRAEAQGEAMRAVLIPIREVLTPESDISIAHVLAARADLSCLVPATSVAVRRGTCCAINKVLMGNVPDRGGRPNELEPPMPTWRSRREDGGPQCWGRKKKKKK

SEQ ID NO: 970 - protein, 267 aa, Homo sapiens
MEAVKAEAWEGAAVAQDLLALGYGGVPGAASRGASCPDFRGLCVRLAAELATLGALEQQREAGAEVLSAGDGPGAEEDFLRQLGSLLRELHCPDRALCGGDGAAALREPGAGLRLLRFLCSELQATRLLCLRSLLDPSPRPPLGEGVVEGAGMVQELDLTLQALGLPRPAPGTPASQLLQELHAKEALESLSQSLRDQYRCRRCLLLKRLDLTTSAFHWSDRAEVLMGNVPDRGGRPNELEPPMPTWRSRREDGGPQCWGRKKKKKK

SEQ ID NO: 971 - protein, 866 aa, Homo sapiens
MFSMRIVCLVLSVVGTAWTADSGEGDFLAEGGGVRGPRVVERHQSACKDSDWPFCSDEDWNYKCPSGCRMKGLIDEVNQDFTNRINKLKNSLFEYQKNNKDSHSLTTNIMEILRGDFSSANNRDNTYNRVSEDLRSRIEVLKRKVIEKVQHIQLLQKNVRAQLVDMKRLEVDIDIKIRSCRGSCSRALAREVDLKDYEDQQKQLEQVIAKDLLPSRDRQHLPLIKMKPVPDLVPGNFKSQLQKVPPEWKALTDMPQMRMELERPGGNEITRGGSTSYGTGSETESPRNPSSAGSWNSGSSGPGSTGNRNPGSSGTGGTATWKPGSSGPGSTGSWNSGSSGTGSTGNQNPGSPRPGSTGTWNPGSSERGSAGHWTSESSVSGSTGQWHSESGSFRPDSPGSGNARPNNPDWGTFEEVSGNVSPGTRREYHTEKLVTSKGDKELRTGKEKVTSGSTTTTRRSCSKTVTKTVIGPDGHKEVTKEVVTSEDGSDCPEAMDLGTLSGIGTLDGFRHRHPDEAAFFDTASTGKTFPGFFSPMLGEFVSETESRGSESGIFTNTKESSSHHPGIAEFPSRGKSSSYSKQFTSSTSYNRGDSTFESKSYKMADEAGSEADHEGTHSTKRGHAKSRPVRDCDDVLQTHPSGTQSGIFNIKLPGSSKIFSVYCDQETSLGGWLLIQQRMDGSLNFNRTWQDYKRGFGSLNDEGEGEFWLGNDYLHLLTQRGSVLRVELEDWAGNEAYAEYHFRVGSEAEGYALQVSSYEGTAGDALIEGSVEEGAEYTSHNNMQFSTFDRDADQWEENCAEVYGGGWWYNNCQAANLNGIYYPGGSYDPRNNSPYEIENGVVWVSFRGADYSLRAVRMKIRPLVTQ

SEQ ID NO: 972 - protein, 644 aa, Homo sapiens
MFSMRIVCLVLSVVGTAWTADSGEGDFLAEGGGVRGPRVVERHQSACKDSDWPFCSDEDWNYKCPSGCRMKGLIDEVNQDFTNRINKLKNSLFEYQKNNKDSHSLTTNIMEILRGDFSSANNRDNTYNRVSEDLRSRIEVLKRKVIEKVQHIQLLQKNVRAQLVDMKRLEVDIDIKIRSCRGSCSRALAREVDLKDYEDQQKQLEQVIAKDLLPSRDRQHLPLIKMKPVPDLVPGNFKSQLQKVPPEWKALTDMPQMRMELERPGGNEITRGGSTSYGTGSETESPRNPSSAGSWNSGSSGPGSTGNRNPGSSGTGGTATWKPGSSGPGSTGSWNSGSSGTGSTGNQNPGSPRPGSTGTWNPGSSERGSAGHWTSESSVSGSTGQWHSESGSFRPDSPGSGNARPNNPDWGTFEEVSGNVSPGTRREYHTEKLVTSKGDKELRTGKEKVTSGSTTTTRRSCSKTVTKTVIGPDGHKEVTKEVVTSEDGSDCPEAMDLGTLSGIGTLDGFRHRHPDEAAFFDTASTGKTFPGFFSPMLGEFVSETESRGSESGIFTNTKESSSHHPGIAEFPSRGKSSSYSKQFTSSTSYNRGDSTFESKSYKMADEAGSEADHEGTHSTKRGHAKSRPVRGIHTSPLGKPSLSP

SEQ ID NO: 973 - protein, 289 aa, Homo sapiens
MFSMRIVCLVLSVVGTAWTADSGEGDFLAEGGGVRGPRVVERHQSACKDSDWPFCSDEDWNYKCPSGCRMKGLIDEVNQDFTNRINKLKNSLFEYQKNNKDSHSLTTNIMEILRGDFSSANNRDNTYNRVSEDLRSRIEVLKRKVIEKVQHIQLLQKNVRAQLVDMKRLEVDIDIKIRSCRGSCSRALAREVDLKDYEDQQKQLEQVIAKDLLPVVNLQVTANNLLVARVTTEETPHLKARAIKWQMRPEVKPIMKEHIAPREAMLNLALSEVSTLLLWGSLPCPPRLS

SEQ ID NO: 974 - protein, 491 aa, Homo sapiens
MKRMVSWSFHKLKTMKHLLLLLLCVFLVKSQGVNDNEEGFFSARGHRPLDKKREEAPSLRPAPPPISGGGYRARPAKAAATQKKVERKAPDAGGCLHADPDLGVLCPTGCQLQEALLQQERPIRNSVDELNNNVEAVSQTSSSSFQYMYLLKDLWQKRQKQVKDNENVVNEYSSELEKHQLYIDETVNSNIPTNLRVLRSILENLRSKIQKLESDVSAQMEYCRTPCTVSCNIPVVSGKECEEIIRKGGETSEMYLIQPDSSVKPYRVYCDMNTENGGWTVIQNRQDGSVDFGRKWDPYKQGFGNVATNTDGKNYCGLPGEYWLGNDKISQLTRMGPTELLIEMEDWKGDKVKAHYGGFTVQNEANKYQISVNKYRGTAGNALMDGASQLMGENRTMTIHNGMFFSTYDRDNDGWLTSDPRKQCSKEDGGGWWYNRCHAANPNGRYYWGGQYTWDMAKHGTDDGVVWMNWKGSWYSMRKMSMKIRPFFPQQ

SEQ ID NO: 975 - protein, 474 aa, Homo sapiens
MKRMVSWSFHKLKTMKHLLLLLLCVFLVKSQGVNDNEEGFFSARGHRPLDKKREEARPAKAAATQKKVERKAPDAGGCLHADPDLGVLCPTGCQLQEALLQQERPIRNSVDELNNNVEAVSQTSSSSFQYMYLLKDLWQKRQKQVKDNENVVNEYSSELEKHQLYIDETVNSNIPTNLRVLRSILENLRSKIQKLESDVSAQMEYCRTPCTVSCNIPVVSGKECEEIIRKGGETSEMYLIQPDSSVKPYRVYCDMNTENGGWTVIQNRQDGSVDFGRKWDPYKQGFGNVATNTDGKNYCGLPGEYWLGNDKISQLTRMGPTELLIEMEDWKGDKVKAHYGGFTVQNEANKYQISVNKYRGTAGNALMDGASQLMGENRTMTIHNGMFFSTYDRDNDGWLTSDPRKQCSKEDGGGWWYNRCHAANPNGRYYWGGQYTWDMAKHGTDDGVVWMNWKGSWYSMRKMSMKIRPFFPQQ

SEQ ID NO: 976 - protein, 453 aa, Homo sapiens
MSWSLHPRNLILYFYALLFLSSTCVAYVATRDNCCILDERFGSYCPTTCGIADFLSTYQTKVDKDLQSLEDILHQVENKTSEVKQLIKAIQLTYNPDESSKPNMIDAATLKSRKMLEEIMKYEASILTHDSSIRYLQEIYNSNNQKIVNLKEKVAQLEAQCQEPCKDTVQIHDITGKDCQDIANKGAKQSGLYFIKPLKANQQFLVYCEIDGSGNGWTVFQKRLDGSVDFKKNWIQYKEGFGHLSPTGTTEFWLGNEKIHLISTQSAIPYALRVELEDWNGRTSTADYAMFKVGPEADKYRLTYAYFAGGDAGDAFDGFDFGDDPSDKFFTSHNGMQFSTWDNDNDKFEGNCAEQDGSGWWMNKCHAGHLNGVYYQGGTYSKASTPNGYDNGIIWATWKTRWYSMKKTTMKIIPFNRLTIGEGQQHHLGGAKQVRPEHPAETEYDSLYPEDDL

SEQ ID NO: 977 - protein, 437 aa, Homo sapiens
MSWSLHPRNLILYFYALLFLSSTCVAYVATRDNCCILDERFGSYCPTTCGIADFLSTYQTKVDKDLQSLEDILHQVENKTSEVKQLIKAIQLTYNPDESSKPNMIDAATLKSRKMLEEIMKYEASILTHDSSIRYLQEIYNSNNQKIVNLKEKVAQLEAQCQEPCKDTVQIHDITGKDCQDIANKGAKQSGLYFIKPLKANQQFLVYCEIDGSGNGWTVFQKRLDGSVDFKKNWIQYKEGFGHLSPTGTTEFWLGNEKIHLISTQSAIPYALRVELEDWNGRTSTADYAMFKVGPEADKYRLTYAYFAGGDAGDAFDGFDFGDDPSDKFFTSHNGMQFSTWDNDNDKFEGNCAEQDGSGWWMNKCHAGHLNGVYYQGGTYSKASTPNGYDNGIIWATWKTRWYSMKKTTMKIIPFNRLTIGEGQQHHLGGAKQAGDV

SEQ ID NO: 978 - protein, 209 aa, Homo sapiens
MDSDETGFEHSGLWVSVLAGLLLGACQAHPIPDSSPLLQFGGQVRQRYLYTDDAQQTEAHLEIREDGTVGGAADQSPESLLQLKALKPGVIQILGVKTSRFLCQRPDGALYGSLHFDPEACSFRELLLEDGYNVYQSEAHGLPLHLPGNKSPHRDPAPRGPARFLPLPGLPPALPEPPGILAPQPPDVGSSDPLSMVGPSQGRSPSYAS

SEQ ID NO: 979 - protein, 209 aa, Homo sapiens; identical to SEQ ID NO: 978

SEQ ID NO: 980 - protein, 106 aa, Homo sapiens
MLRFIQEVNTTTRSCALWDLEEDTEYIVHVQAISIQGQSPASEPVLFKTPREAEKMASKNKDEVTMKEMGRNQQLRTGEVLIIVVVLFMWAGVIALFCRQYDIIEA

SEQ ID NO: 981 - protein, 137 aa, Homo sapiens
MLRFIQEVNTTTRSCALWDLEEDTEYIVHVQAISIQGQSPASEPVLFKTPREAEKMASKNKDEVTMKEMGRNQQLRTGEVLIIVVVLFMWAGVIALFCRQYDIIKDNEPNNNKEKTKSASETSTPEHQGGGLLRSKI

SEQ ID NO: 982 - protein, 129 aa, Homo sapiens
MKTLQFFFLFCCWKAICCNSCELTNITIAIEKEECRFCISINTTWCAGYCYTRDLVYKDPARPKIQKTCTFKELVYETVRVPGCAHHADSLYTYPVATQCHCGKCDSDSTDCTVRGLGPSYCSFGEMKE

SEQ ID NO: 983 - protein, 129 aa, Homo sapiens; identical to SEQ ID NO: 982

SEQ ID NO: 984 - protein, 129 aa, Homo sapiens; identical to SEQ ID NO: 982

SEQ ID NO: 985 - protein, 419 aa, Homo sapiens
MSFIPVAEDSDFPIHNLPYGVFSTRGDPRPRIGVAIGDQILDLSIIKHLFTGPVLSKHQDVFNQPTLNSFMGLGQAAWKEARVFLQNLLSVSQARLRDDTELRKCAFISQASATMHLPATIGDYTDFYSSRQHATNVGIMFRDKENALMPNWLHLPVGYHGRASSVVVSGTPIRRPMGQMKPDDSKPPVYGACKLLDMELEMAFFVGPGNRLGEPIPISKAHEHIFGMVLMNDWSARDIQKWEYVPLGPFLGKSFGTTVSPWVVPMDALMPFAVPNPKQDPRPLPYLCHDEPYTFDINLSVNLKGEGMSQAATICKSNFKYMYWTMLQQLTHHSVNGCNLRPGDLLASGTISGPEPENFGSMLELSWKGTKPIDLGNGQTRKFLLDGDEVIITGYCQGDGYRIGFGQCAGKVLPALLPS

SEQ ID NO: 986 - protein, 419 aa, Homo sapiens; identical to SEQ ID NO: 985

SEQ ID NO: 987 - protein, 419 aa, Homo sapiens; identical to SEQ ID NO: 985

SEQ ID NO: 988 - protein, 392 aa, Homo sapiens
MAALRQPQVAELLAEARRAFREEFGAEPELAVSAPGRVNLIGEHTDYNQGLVLPMALELMTVLVGSPRKDGLVSLLTTSEGADEPQRLQFPLPTAQRSLEPGTPRWANYVKGVIQYYPAAPLPGFSAVVVSSVPLGGGLSSSASLEVATYTFLQQLCPDSGTIAARAQVCQQAEHSFAGMPCGIMDQFISLMGQKGHALLIDCRSLETSLVPLSDPKLAVLITNSNVRHSLASSEYPVRRRQCEEVARALGKESLREVQLEELEAARDLVSKEGFRRARHVVGEIRRTAQAAAALRRGDYRAFGRLMVESHRSLRDDYEVSCPELDQLVEAALAVPGVYGSRMTGGGFGGCTVTLLEASAAPHAMRHIQEHYGGTATFYLSQAADGAKVLCL

SEQ ID NO: 989 - protein, 400 aa, Homo sapiens
MAALRQPQVAELLAEARRAFREEFGAEPELAVSAPGRVNLIGEHTDYNQGLVLPMRDRLFPTLEGRKRGSGRERVRGRLLAQARPLGAGAPRLQPGSMFPLNCEALCATQKGTLRASGHRGAPTADLGERSLLAQPVQFTEEETGGAFRPICSLGSAQASSPPCPTAQGRVQDGLVSLLTTSEGADEPQRLQFPLPTAQRSLEPGTPRWANYVKGVIQYYPAAPLPGFSAVVVSSVPLGGGLSSSASLEVATYTFLQQLCPDSGTIAARAQVCQQAEHSFAGMPCGIMDQFISLMGQKGHALLIDCRSLETSLVPLSDPKLAVLITNSNVRHSLASSEYPVRRRQCEEVARALGKESLREVQLEELEAARDLVSKEGFRRARHVVGEIRRTADGAKVLCL

SEQ ID NO: 990 - protein, 422 aa, Homo sapiens
MCAPPRGAPPEHPAPTGLCRSSCAELQARVMAALRQPQVAELLAEARRAFREEFGAEPELAVSAPGRVNLIGEHTDYNQGLVLPMALELMTVLVGSPRKDGLVSLLTTSEGADEPQRLQFPLPTAQRSLEPGTPRWANYVKGVIQYYPAAPLPGFSAVVVSSVPLGGGLSSSASLEVATYTFLQQLCPDSGTIAARAQVCQQAEHSFAGMPCGIMDQFISLMGQKGHALLIDCRSLETSLVPLSDPKLAVLITNSNVRHSLASSEYPVRRRQCEEVARALGKESLREVQLEELEAARDLVSKEGFRRARHVVGEIRRTAQAAAALRRGDYRAFGRLMVESHRSLRDDYEVSCPELDQLVEAALAVPGVYGSRMTGGGFGGCTVTLLEASAAPHAMRHIQEHYGGTATFYLSQAADGAKVLCL

SEQ ID NO: 991 - protein, 392 aa, Homo sapiens; identical to SEQ ID NO: 988

SEQ ID NO: 992 - protein, 522 aa, Homo sapiens
MAAVVAATRWWQLLLVLSAAGMGASGAPQPPNILLLLMDDMGWGDLGVYGEPSRETPNLDRMAAEGLLFPNFYSANPLCSPSRAALLTGRLPIRNGFYTTNAHARNAYTPQEIVGGIPDSEQLLPELLKKAGYVSKIVGKWHLGHRPQFHPLKHGFDEWFGSPNCHFGPYDNKARPNIPVYRDWEMVGRYYEEFPINLKTGEANLTQIYLQEALDFIKRQARHHPFFLYWAVDATHAPVYASKPFLGTSQRGRYGDAVREIDDSIGKILELLQDLHVADNTFVFFTSDNGAALISAPEQGGSNGPFLCGKQTTFEGGMREPALAWWPGHVTAGQVSHQLGSIMDLFTTSLALAGLTPPSDRAIDGLNLLPTLLQGRLMDRPIFYYRGDTLMAATLGQHKAHFWTWTNSWENFRQGIDFCPGQNVSGVTTHNLEDHTKLPLIFHLGRDPGERFPLSFASAEYQEALSRITSVVQQHQEALVPAQPQLNVCNWAVMNWAPPGCEKLGKCLTPPESIPKKCLWSH

SEQ ID NO: 993 - protein, 86 aa, Homo sapiens
MAAVVAATRWWQLLLVLSAAGMGASGAPQPPNILLLLMDDRGRHCSQDGYPSAMASTPPTPMPETPTHRRRLWAASQTRSSSCRSF

SEQ ID NO: 994 - protein, 447 aa, Homo sapiens
MAAVVAATRWWQLLLVLSAAGMGASGAPGQRAYTPQEIVGGIPDSEQLLPELLKKAGYVSKIVGKWHLGHRPQFHPLKHGFDEWFGSPNCHFGPYDNKARPNIPVYRDWEMVGRYYEEFPINLKTGEANLTQIYLQEALDFIKRQARHHPFFLYWAVDATHAPVYASKPFLGTSQRGRYGDAVREIDDSIGKILELLQDLHVADNTFVFFTSDNGAALISAPEQGGSNGPFLCGKQTTFEGGMREPALAWWPGHVTAGQVSHQLGSIMDLFTTSLALAGLTPPSDRAIDGLNLLPTLLQGRLMDRPIFYYRGDTLMAATLGQHKAHFWTWTNSWENFRQGIDFCPGQNVSGVTTHNLEDHTKLPLIFHLGRDPGERFPLSFASAEYQEALSRITSVVQQHQEALVPAQPQLNVCNWAVMNWAPPGCEKLGKCLTPPESIPKKCLWSH

SEQ ID NO: 995 - protein, 379 aa, Homo sapiens
MSRSGTDPQQRQQASEADAAAATFRANDHQHIRYNPLQDEWVLVSAHRMKRPWQGQVEPQLLKTVPRHDPLNPLCPGAIRANGEVNPQYDSTFLFDNDFPALQPDAPSPGPSDHPLFQAKSARGVCKVMCFHPWSDVTLPLMSVPEIRAVVDAWASVTEELGAQYPWVQIFENKGAMMGCSNPHPHCQVWASSFLPDIAQREERSQQAYKSQHGEPLLMEYSRQELLRKERLVLTSEHWLVLVPFWATWPYQTLLLPRRHVRRLPELTPAERDDLASIMKKLLTKYDNLFETSFPYSMGWHGAPTGSEAGANWNHWQLHAHYYPPLLRSATVRKFMVGYEMLAQAQRDLTPEQAAERLRALPEVHYHLGQKDRETATIA

SEQ ID NO: 996 - protein, 270 aa, Homo sapiens
MTLSTLCVLGPSEPTESKVMCFHPWSDVTLPLMSVPEIRAVVDAWASVTEELGAQYPWVQIFENKGAMMGCSNPHPHCQVWASSFLPDIAQREERSQQAYKSQHGEPLLMEYSRQELLRKERLVLTSEHWLVLVPFWATWPYQTLLLPRRHVRRLPELTPAERDDLASIMKKLLTKYDNLFETSFPYSMGWHGAPTGSEAGANWNHWQLHAHYYPPLLRSATVRKFMVGYEMLAQAQRDLTPEQAAERLRALPEVHYHLGQKDRETATIA

SEQ ID NO: 997 - protein, 84 aa, Homo sapiens
MSRSGTDPQQRQQASEADAAAATFRANDHQHIRYNPLQDEWVLVSAHRMKRPWQGQVEPQLLKTVPRHDPLNPLCPGAIRANGE

SEQ ID NO: 998 - protein, 429 aa, Homo sapiens
MQLRNPELHLGCALALRFLALVSWDIPGARALDNGLARTPTMGWLHWERFMCNLDCQEEPDSCISEKLFMEMAELMVSEGWKDAGYEYLCIDDCWMAPQRDSEGRLQADPQRFPHGIRQLANYVHSKGLKLGIYADVGNKTCAGFPGSFGYYDIDAQTFADWGVDLLKFDGCYCDSLENLADGYKHMSLALNRTGRSIVYSCEWPLYMWPFQKPNYTEIRQYCNHWRNFADIDDSWKSIKSILDWTSFNQERIVDVAGPGGWNDPDMLVIGNFGLSWNQQVTQMALWAIMAAPLFMSNDLRHISPQAKALLQDKDVIAINQDPLGKQGYQLRQGDNFEVWERPLSGLAWAVAMINRQEIGGPRSYTIAVASLGKGVACNPACFITQLLPVKRKLGFYEWTSRLRSHINPTGTVLLQLENTMQMSLKDLL

SEQ ID NO: 999 - protein, 15 aa, Homo sapiens
PQNSKIPGPTFLDPH

SEQ ID NO: 1000 - protein, 16 aa, Homo sapiens
ANTPCGPYTHDCPVKR

SEQ ID NO: 1001 - protein, 211 aa, Homo sapiens
MKLWDVVAVCLVLLHTASAFPLPAGKRPPEAPAEDRSLGRRRAPFALSSDSNMPEDYPDQFDDVMDFIQATIKRLKRSPDKQMAVLPRRERNRQAAAANPENSRGKGRRGQRGKNRGCVLTAIHLNVTDLGLGYETKEELIFRYCSGSCDAAETTYDKILKNLSRNRRLVSDKVGQACCRPIAFDDDLSFLDDNLVYHILRKHSAKRCGCI

SEQ ID NO: 1002 - protein, 185 aa, Homo sapiens
MKLWDVVAVCLVLLHTASAFPLPAANMPEDYPDQFDDVMDFIQATIKRLKRSPDKQMAVLPRRERNRQAAAANPENSRGKGRRGQRGKNRGCVLTAIHLNVTDLGLGYETKEELIFRYCSGSCDAAETTYDKILKNLSRNRRLVSDKVGQACCRPIAFDDDLSFLDDNLVYHILRKHSAKRCGCI

SEQ ID NO: 1003 - protein, 228 aa, Homo sapiens
MQSLPNSNGAAAGRDFKMKLWDVVAVCLVLLHTASAFPLPAGKRPPEAPAEDRSLGRRRAPFALSSDSNMPEDYPDQFDDVMDFIQATIKRLKRSPDKQMAVLPRRERNRQAAAANPENSRGKGRRGQRGKNRGCVLTAIHLNVTDLGLGYETKEELIFRYCSGSCDAAETTYDKILKNLSRNRRLVSDKVGQACCRPIAFDDDLSFLDDNLVYHILRKHSAKRCGCI

SEQ ID NO: 1004 - protein, 61 aa, Homo sapiens
MKLWDVVAVCLVLLHTASAFPLPAANMPEDYPDQFDDVMDFIQATIKRLKRSPDKQMAVLP

SEQ ID NO: 1005 - protein, 61 aa, Homo sapiens; identical to SEQ ID NO: 1004

SEQ ID NO: 1006 - protein, 185 aa, Homo sapiens; identical to SEQ ID NO: 1002

SEQ ID NO: 1007 - protein, 202 aa, Homo sapiens
MQSLPNSNGAAAGRDFKMKLWDVVAVCLVLLHTASAFPLPAANMPEDYPDQFDDVMDFIQATIKRLKRSPDKQMAVLPRRERNRQAAAANPENSRGKGRRGQRGKNRGCVLTAIHLNVTDLGLGYETKEELIFRYCSGSCDAAETTYDKILKNLSRNRRLVSDKVGQACCRPIAFDDDLSFLDDNLVYHILRKHSAKRCGCI

SEQ ID NO: 1008 - protein, 180 aa, Homo sapiens
MKSIYFVAGLFVMLVQGSWQRSLQDTEEKSRSFSASQADPLSDPDQMNEDKRHSQGTFTSDYSKYLDSRRAQDFVQWLMNTKRNRNNIAKRHDEFERHAEGTFTSDVSSYLEGQAAKEFIAWLVKGRGRRDFPEEVAIVEELGRRHADGSFSDEMNTILDNLAARDFINWLIQTKITDRK

SEQ ID NO: 1009 - protein, 180 aa, Homo sapiens; identical to SEQ ID NO: 1008

SEQ ID NO: 1010 - protein, 753 aa, Homo sapiens
RAPDRRGSPRLASTRLGALRLRPSRRVPARAPAPAQAPLPLGPRLLGLRRNMAAPMTPAARPEDYEAALNAALADVPELARLLEIDPYLKPYAVDFQRRYKQFSQILKNIGENEGGIDKFSRGYESFGVHRCADGGLYCKEWAPGAEGVFLTGDFNGWNPFSYPYKKLDYGKWELYIPPKQNKSVLVPHGSKLKVVITSKSGEILYRISPWAKYVVREGDNVNYDWIHWDPEHSYEFKHSRPKKPRSLRIYESHVGISSHEGKVASYKHFTCNVLPRIKGLGYNCIQLMAIMEHAYYASFGYQITSFFAASSRYGTPEELQELVDTAHSMGIIVLLDVVHSHASKNSADGLNMFDGTDSCYFHSGPRGTHDLWDSRLFAYSSWEILRFLLSNIRWWLEEYRFDGFRFDGVTSMLYHHHGVGQGFSGDYSEYFGLQVDEDALTYLMLANHLVHTLCPDSITIAEDVSGMPALCSPISQGGGGFDYRLAMAIPDKWIQLLKEFKDEDWNMGDIVYTLTNRRYLEKCIAYAESHDQALVGDKSLAFWLMDAEMYTNMSVLTPFTPVIDRGIQLHKMIRLITHGLGGEGYLNFMGNEFGHPEWLDFPRKGNNESYHYARRQFHLTDDDLLRYKFLNNFDRDMNRLEERYGWLAAPQAYVSEKHEGNKIIAFERAGLLFIFNFHPSKSYTDYRVGTALPGKFKIVLDSDAAEYGGHQRLDHSTDFFSEAFEHNGRPYSLLVYIPSRVALILQNVDLPN

SEQ ID NO: 1011 - protein, 702 aa, Homo sapiens
MAAPMTPAARPEDYEAALNAALADVPELARLLEIDPYLKPYAVDFQRRYKQFSQILKNIGENEGGIDKFSRGYESFGVHRCADGGLYCKEWAPGAEGVFLTGDFNGWNPFSYPYKKLDYGKWELYIPPKQNKSVLVPHGSKLKVVITSKSGEILYRISPWAKYVVREGDNVNYDWIHWDPEHSYEFKHSRPKKPRSLRIYESHVGISSHEGKVASYKHFTCNVLPRIKGLGYNCIQLMAIMEHAYYASFGYQITSFFAASSRYGTPEELQELVDTAHSMGIIVLLDVVHSHASKNSADGLNMFDGTDSCYFHSGPRGTHDLWDSRLFAYSSWEILRFLLSNIRWWLEEYRFDGFRFDGVTSMLYHHHGVGQGFSGDYSEYFGLQVDEDALTYLMLANHLVHTLCPDSITIAEDVSGMPALCSPISQGGGGFDYRLAMAIPDKWIQLLKEFKDEDWNMGDIVYTLTNRRYLEKCIAYAESHDQALVGDKSLAFWLMDAEMYTNMSVLTPFTPVIDRGIQLHKMIRLITHGLGGEGYLNFMGNEFGHPEWLDFPRKGNNESYHYARRQFHLTDDDLLRYKFLNNFDRDMNRLEERYGWLAAPQAYVSEKHEGNKIIAFERAGLLFIFNFHPSKSYTDYRVGTALPGKFKIVLDSDAAEYGGHQRLDHSTDFFSEAFEHNGRPYSLLVYIPSRVALILQNVDLPN

SEQ ID NO: 1012 - protein, 465 aa, Homo sapiens
MAIMEHAYYASFGYQITSFFAASSRYGTPEELQELVDTAHSMGIIVLLDVVHSHASKNSADGLNMFDGTDSCYFHSGPRGTHDLWDSRLFAYSSWEILRFLLSNIRWWLEEYRFDGFRFDGVTSMLYHHHGVGQGFSGDYSEYFGLQVDEDALTYLMLANHLVHTLCPDSITIAEDVSGMPALCSPISQGGGGFDYRLAMAIPDKWIQLLKEFKDEDWNMGDIVYTLTNRRYLEKCIAYAESHDQALVGDKSLAFWLMDAEMYTNMSVLTPFTPVIDRGIQLHKMIRLITHGLGGEGYLNFMGNEFGHPEWLDFPRKGNNESYHYARRQFHLTDDDLLRYKFLNNFDRDMNRLEERYGWLAAPQAYVSEKHEGNKIIAFERAGLLFIFNFHPSKSYTDYRVGTALPGKFKIVLDSDAAEYGGHQRLDHSTDFFSEAFEHNGRPYSLLVYIPSRVALILQNVDLPN

SEQ ID NO: 1013 - protein, 357 aa, Homo sapiens
MEEGMNVLHDFGIQSTHYLQVNYQDSQDWFILVSVIADLRNAFYVLFPIWFHLQEAVGIKLLWVAVIGDWLNLVFKWILFGQRPYWWVLDTDYYSNTSVPLIKQFPVTCETGPGSPSGHAMGTAGVYYVMVTSTLSIFQGKIKPTYRFRCLNVILWLGFWAVQLNVCLSRIYLAAHFPHQVVAGVLSGIAVAETFSHIHSIYNASLKKYFLITFFLFSFAIGFYLLLKGLGVDLLWTLEKAQRWCEQPEWVHIDTTPFASLLKNLGTLFGLGLALNSSMYRESCKGKLSKWLPFRLSSIVASLVLLHVFDSLKPPSQVELVFYVLSFCKSAVVPLASVSVIPYCLAQVLGQPHKKSL

SEQ ID NO: 1014 - protein, 952 aa, Homo sapiens
MGVRHPPCSHRLLAVCALVSLATAALLGHILLHDFLLVPRELSGSSPVLEETHPAHQQGASRPGPRDAQAHPGRPRAVPTQCDVPPNSRFDCAPDKAITQEQCEARGCCYIPAKQGLQGAQMGQPWCFFPPSYPSYKLENLSSSEMGYTATLTRTTPTFFPKDILTLRLDVMMETENRLHFTIKDPANRRYEVPLETPHVHSRAPSPLYSVEFSEEPFGVIVRRQLDGRVLLNTTVAPLFFADQFLQLSTSLPSQYITGLAEHLSPLMLSTSWTRITLWNRDLAPTPGANLYGSHPFYLALEDGGSAHGVFLLNSNAMDVVLQPSPALSWRSTGGILDVYIFLGPEPKSVVQQYLDVVGYPFMPPYWGLGFHLCRWGYSSTAITRQVVENMTRAHFPLDVQWNDLDYMDSRRDFTFNKDGFRDFPAMVQELHQGGRRYMMIVDPAISSSGPAGSYRPYDEGLRRGVFITNETGQPLIGKVWPGSTAFPDFTNPTALAWWEDMVAEFHDQVPFDGMWIDMNEPSNFIRGSEDGCPNNELENPPYVPGVVGGTLQAATICASSHQFLSTHYNLHNLYGLTEAIASHRALVKARGTRPFVISRSTFAGHGRYAGHWTGDVWSSWEQLASSVPEILQFNLLGVPLVGADVCGFLGNTSEELCVRWTQLGAFYPFMRNHNSLLSLPQEPYSFSEPAQQAMRKALTLRYALLPHLYTLFHQAHVAGETVARPLFLEFPKDSSTWTVDHQLLWGEALLITPVLQAGKAEVTGYFPLGTWYDLQTVPVEALGSLPPPPAAPREPAIHSEGQWVTLPAPLDTINVHLRAGYIIPLQGPGLTTTESRQQPMALAVALTKGGEARGELFWDDGESLEVLERGAYTQVIFLARNNTIVNELVRVTSEGAGLQLQKVTVLGVATAPQQVLSNGVPVSNFTYSPDTKVLDICVSLLMGEQFLVSWC

SEQ ID NO: 1015 - protein, 952 aa, Homo sapiens; identical to SEQ ID NO: 1014

SEQ ID NO: 1016 - protein, 536 aa, Homo sapiens
MEFSSPSREECPKPLSRVSIMAGSLTGLLLLQAVSWASGARPCIPKSFGYSSVVCVCNATYCDSFDPPTFPALGTFSRYESTRSGRRMELSMGPIQANHTGTGLLLTLQPEQKFQKVKGFGGAMTDAAALNILALSPPAQNLLLKSYFSEEGIGYNIIRVPMASCDFSIRTYTYADTPDDFQLHNFSLPEEDTKLKIPLIHRALQLAQRPVSLLASPWTSPTWLKTNGAVNGKGSLKGQPGDIYHQTWARYFVKFLDAYAEHKLQFWAVTAENEPSAGLLSGYPFQCLGFTPEHQRDFIARDLGPTLANSTHHNVRLLMLDDQRLLLPHWAKVVLTDPEAAKYVHGIAVHWYLDFLAPAKATLGETHRLFPNTMLFASEACVGSKFWEQSVRLGSWDRGMQYSHSIITNLLYHVVGWTDWNLALNPEGGPNWVRNFVDSPIIVDITKDTFYKQPMFYHLGHFSKFIPEGSQRVGLVASQKNDLDAVALMHPDGSAVVVVLNRSSKDVPLTIKDPAVGFLETISPGYSIHTYLWRRQ

SEQ ID NO: 1017 - protein, 536 aa, Homo sapiens; identical to SEQ ID NO: 1016

SEQ ID NO: 1018 - protein, 521 aa, Homo sapiens
MEFSSPSREECPKPLSRVSIMAGSLTGLLLLQAVSWASGARPCIPKSFGYSSVVCVCNATYCDSFDPPTFPALGTFSRYESTRSGRRMELSMGPIQANHTGTGLLLTLQPDAAALNILALSPPAQNLLLKSYFSEEGIGYNIIRVPMASCDFSIRTYTYADTPDDFQLHNFSLPEEDTKLKIPLIHRALQLAQRPVSLLASPWTSPTWLKTNGAVNGKGSLKGQPGDIYHQTWARYFVKFLDAYAEHKLQFWAVTAENEPSAGLLSGYPFQCLGFTPEHQRDFIARDLGPTLANSTHHNVRLLMLDDQRLLLPHWAKVVLTDPEAAKYVHGIAVHWYLDFLAPAKATLGETHRLFPNTMLFASEACVGSKFWEQSVRLGSWDRGMQYSHSIITNLLYHVVGWTDWNLALNPEGGPNWVRNFVDSPIIVDITKDTFYKQPMFYHLGHFSKFIPEGSQRVGLVASQKNDLDAVALMHPDGSAVVVVLNRSSKDVPLTIKDPAVGFLETISPGYSIHTYLWRRQ

SEQ ID NO: 1019 - protein, 487 aa, Homo sapiens
MEFSSPSREECPKPLSRVSIMAGSLTGLLLLQAVSWASGARPCIPKSFGYSSVVCVCNATYCDSFDPPTFPALGTFSRYESTRSGRRMELSMGPIQANHTGTGIGYNIIRVPMASCDFSIRTYTYADTPDDFQLHNFSLPEEDTKLKIPLIHRALQLAQRPVSLLASPWTSPTWLKTNGAVNGKGSLKGQPGDIYHQTWARYFVKFLDAYAEHKLQFWAVTAENEPSAGLLSGYPFQCLGFTPEHQRDFIARDLGPTLANSTHHNVRLLMLDDQRLLLPHWAKVVLTDPEAAKYVHGIAVHWYLDFLAPAKATLGETHRLFPNTMLFASEACVGSKFWEQSVRLGSWDRGMQYSHSIITNLLYHVVGWTDWNLALNPEGGPNWVRNFVDSPIIVDITKDTFYKQPMFYHLGHFSKFIPEGSQRVGLVASQKNDLDAVALMHPDGSAVVVVLNRSSKDVPLTIKDPAVGFLETISPGYSIHTYLWRRQ

SEQ ID NO: 1020 - protein, 449 aa, Homo sapiens
MELSMGPIQANHTGTGLLLTLQPEQKFQKVKGFGGAMTDAAALNILALSPPAQNLLLKSYFSEEGIGYNIIRVPMASCDFSIRTYTYADTPDDFQLHNFSLPEEDTKLKIPLIHRALQLAQRPVSLLASPWTSPTWLKTNGAVNGKGSLKGQPGDIYHQTWARYFVKFLDAYAEHKLQFWAVTAENEPSAGLLSGYPFQCLGFTPEHQRDFIARDLGPTLANSTHHNVRLLMLDDQRLLLPHWAKVVLTDPEAAKYVHGIAVHWYLDFLAPAKATLGETHRLFPNTMLFASEACVGSKFWEQSVRLGSWDRGMQYSHSIITNLLYHVVGWTDWNLALNPEGGPNWVRNFVDSPIIVDITKDTFYKQPMFYHLGHFSKFIPEGSQRVGLVASQKNDLDAVALMHPDGSAVVVVLNRSSKDVPLTIKDPAVGFLETISPGYSIHTYLWRRQ

SEQ ID NO: 1021 - protein, 493 aa, Homo sapiens
MTLRGWSFQVLPESNATYCDSFDPPTFPALGTFSRYESTRSGRRMELSMGPIQANHTGTGLLLTLQPEQKFQKVKGFGGAMTDAAALNILALSPPAQNLLLKSYFSEEGIGYNIIRVPMASCDFSIRTYTYADTPDDFQLHNFSLPEEDTKLKIPLIHRALQLAQRPVSLLASPWTSPTWLKTNGAVNGKGSLKGQPGDIYHQTWARYFVKFLDAYAEHKLQFWAVTAENEPSAGLLSGYPFQCLGFTPEHQRDFIARDLGPTLANSTHHNVRLLMLDDQRLLLPHWAKVVLTDPEAAKYVHGIAVHWYLDFLAPAKATLGETHRLFPNTMLFASEACVGSKFWEQSVRLGSWDRGMQYSHSIITNLLYHVVGWTDWNLALNPEGGPNWVRNFVDSPIIVDITKDTFYKQPMFYHLGHFSKFIPEGSQRVGLVASQKNDLDAVALMHPDGSAVVVVLNRSSKDVPLTIKDPAVGFLETISPGYSIHTYLWRRQ

SEQ ID NO: 1022 - protein, 423 aa, Homo sapiens
MEFSSPSREECPKPLSRVSIMAGSLTGLLLLQAVSWASGIGYNIIRVPMASCDFSIRTYTYADTPDDFQLHNFSLPEEDTKLKIPLIHRALQLAQRPVSLLASPWTSPTWLKTNGAVNGKGSLKGQPGDIYHQTWARYFVKFLDAYAEHKLQFWAVTAENEPSAGLLSGYPFQCLGFTPEHQRDFIARDLGPTLANSTHHNVRLLMLDDQRLLLPHWAKVVLTDPEAAKYVHGIAVHWYLDFLAPAKATLGETHRLFPNTMLFASEACVGSKFWEQSVRLGSWDRGMQYSHSIITNLLYHVVGWTDWNLALNPEGGPNWVRNFVDSPIIVDITKDTFYKQPMFYHLGHFSKFIPEGSQRVGLVASQKNDLDAVALMHPDGSAVVVVLNRSSKDVPLTIKDPAVGFLETISPGYSIHTYLWRRQ

SEQ ID NO: 1023 - protein, 703 aa, Homo sapiens
MLRGRSLSVTSLGGLPQWEVEELPVEELLLFEVAWEVTNKVGGIYTVIQTKAKTTADEWGENYFLIGPYFEHNMKTQVEQCEPVNDAVRRAVDAMNKHGCQVHFGRWLIEGSPYVVLFDIGYSAWNLDRWKGDLWEACSVGIPYHDREANDMLIFGSLTAWFLKEVTDHADGKYVVAQFHEWQAGIGLILSRARKLPIATIFTTHATLLGRYLCAANIDFYNHLDKFNIDKEAGERQIYHRYCMERASVHCAHVFTTVSEITAIEAEHMLKRKPDVVTPNGLNVKKFSAVHEFQNLHAMYKARIQDFVRGHFYGHLDFDLEKTLFLFIAGRYEFSNKGADIFLESLSRLNFLLRMHKSDITVMVFFIMPAKTNNFNVETLKGQAVRKQLWDVAHSVKEKFGKKLYDALLRGEIPDLNDILDRDDLTIMKRAIFSTQRQSLPPVTTHNMIDDSTDPILSTIRRIGLFNNRTDRVKVILHPEFLSSTSPLLPMDYEEFVRGCHLGVFPSYYEPWGYTPAECTVMGIPSVTTNLSGFGCFMQEHVADPTAYGIYIVDRRFRSPDDSCNQLTKFLYGFCKQSRRQRIIQRNRTERLSDLLDWRYLGRYYQHARHLTLSRAFPDKFHVELTSPPTTEGFKYPRPSSVPPSPSGSQASSPQSSDVEDEVEDERYDEEEEAERDRLNIKSPFSLSHVPHGKKKLHGEYKN

SEQ ID NO: 1024 - protein, 116 aa, Homo sapiens
MDYYRKYAAIFLVTLSVFLHVLHSAPDVQDCPECTLQENPFFSQPGAPILQCMGCCFSRAYPTPLRSKKTMLVQKNVTSESTCCVAKSYNRVTVMGGFKVENHTACHCSTCYYHKS

SEQ ID NO: 1025 - protein, 217 aa, Homo sapiens
MATGSRTSLLLAFGLLCLPWLQEGSAFPTIPLSRLFDNAMLRAHRLHQLAFDTYQEFEEAYIPKEQKYSFLQNPQTSLCFSESIPTPSNREETQQKSNLELLRISLLLIQSWLEPVQFLRSVFANSLVYGASDSNVYDLLKDLEEGIQTLMGRLEDGSPRTGQIFKQTYSKFDTNSHNDDALLKNYGLLYCFRKDMDKVETFLRIVQCRSVEGSCGF

SEQ ID NO: 1026 - protein, 122 aa, Homo sapiens
MATGSRTSLLLAFGLLCLPWLQEGSAFPTIPLSRLFDNAMLRAHRLHQLAFDTYQEFRLEDGSPRTGQIFKQTYSKFDTNSHNDDALLKNYGLLYCFRKDMDKVETFLRIVQCRSVEGSCGF

SEQ ID NO: 1027 - protein, 177 aa, Homo sapiens
MATGSRTSLLLAFGLLCLPWLQEGSAFPTIPLSRLFDNAMLRAHRLHQLAFDTYQEFNLELLRISLLLIQSWLEPVQFLRSVFANSLVYGASDSNVYDLLKDLEEGIQTLMGRLEDGSPRTGQIFKQTYSKFDTNSHNDDALLKNYGLLYCFRKDMDKVETFLRIVQCRSVEGSCGF

SEQ ID NO: 1028 - protein, 202 aa, Homo sapiens
MATGSRTSLLLAFGLLCLPWLQEGSAFPTIPLSRLFDNAMLRAHRLHQLAFDTYQEFNPQTSLCFSESIPTPSNREETQQKSNLELLRISLLLIQSWLEPVQFLRSVFANSLVYGASDSNVYDLLKDLEEGIQTLMGRLEDGSPRTGQIFKQTYSKFDTNSHNDDALLKNYGLLYCFRKDMDKVETFLRIVQCRSVEGSCGF

SEQ ID NO: 1029 - protein, 256 aa, Homo sapiens
MAAGSRTSLLLAFGLLCLSWLQEGSAFPTIPLSRLFDNAMLRARRLYQLAYDTYQEFEEAYILKEQKYSFLQNPQTSLCFSESIPTPSNRVKTQQKSNLELLRISLLLIQSWLEPVQLLRSVFANSLVYGASDSNVYRHLKDLEEGIQTLMWVRVAPGIPNPGAPLASRDWGEKHCCPLFSSQALTQENSPYSSFPLVNPPGLSLQPGGEGGKWMNERGREQCPSAWPLLLFLHFAEAGRWQPPDWADLQSVLQQV

SEQ ID NO: 1030 - protein, 217 aa, Homo sapiens
MAAGSRTSLLLAFGLLCLSWLQEGSAFPTIPLSRLFDNAMLRARRLYQLAYDTYQEFEEAYILKEQKYSFLQNPQTSLCFSESIPTPSNRVKTQQKSNLELLRISLLLIQSWLEPVQLLRSVFANSLVYGASDSNVYRHLKDLEEGIQTLMWRLEDGSPRTGQIFNQSYSKFDTKSHNDDALLKNYGLLYCFRKDMDKVETFLRIVQCRSVEGSCGF

SEQ ID NO: 1031 - protein, 202 aa, Homo sapiens
MAAGSRTSLLLAFGLLCLSWLQEGSAFPTIPLSRLFDNAMLRARRLYQLAYDTYQEFNPQTSLCFSESIPTPSNRVKTQQKSNLELLRISLLLIQSWLEPVQLLRSVFANSLVYGASDSNVYRHLKDLEEGIQTLMWRLEDGSPRTGQIFNQSYSKFDTKSHNDDALLKNYGLLYCFRKDMDKVETFLRIVQCRSVEGSCGF

SEQ ID NO: 1032 - protein, 245 aa, Homo sapiens
MAAGSRTSLLLAFGLLCLSWLQEGSAFPTIPLSRLFDNAMLRARRLYQLAYDTYQEFEEAYILKEQKYSFLQNPQTSLCFSESIPTPSNRVKTQQKSNLELLRISLLLIQSWLEPVQLLRSVFANSLVYGASDSNVYRHLKDLEEGIQTLIGWKMAAPGLGRSSISPTASLTQNRTTMTHCSRTTGCSTASGRTWTRSRHSCASCSAALWRAAVASSCPGGIPVTPPQCLSWSWKVLLQCPPALS

SEQ ID NO: 1033 - protein, 250 aa, Homo sapiens
MEKGPVRAPAEKPRGARCSNGFPERDPPRPGPSRPAEKPPRPEAKSAQPADGWKGERPRSEEDNELNLPNLAAAYSSILSSLGENPQRQGLLKTPWRAASAMQFFTKGYQETISDVLNDAIFDEDHDEMVIVKDIDMFSMCEHHLVPFVGKVHIGYLPNKQVLGLSKLARIVEIYSRRLQVQERLTKQIAVAITEALRPAGVGVVVEATHMCMVMRGVQKMNSKTVTSTMLGVFREDPKTREEFLTLIRS

SEQ ID NO: 1034 - protein, 230 aa, Homo sapiens
MEKGPVRAPAEKPRGARCSNGFPERDPPRPGPSRPAEKPPRPEAKSAQPADGWKGERPRSEEDNELNLPNLAAAYSSILSSLGENPQRQGLLKTPWRAASAMQFFTKGYQETISDVLNDAIFDEDHDEMVIVKDIDMFSMCEHHLVPFVGKVHIGYLPNKQVLGLSKLARIVEIYSRRLQVQERLTKQIAVAITEALRPAGVGVVVEATKSNKYNKGLSYFLLATFLWQY

SEQ ID NO: 1035 - protein, 250 aa, Homo sapiens; identical to SEQ ID NO: 1033

SEQ ID NO: 1036 - protein, 213 aa, Homo sapiens
MEKGPVRAPAEKPRGARCSNGFPERDPPRPGPSRPAEKPPRPEAKSAQPADGWKGERPRSEEDNELNLPNLAAAYSSILSSLGENPQRQGLLKTPWRAASAMQFFTKGYQETISDVLNDAIFDEDHDEMVIVKDIDMFSMCEHHLVPFVGKVHIGYLPNKQVLGLSKLARIVEIYSRRLQVQERLTKQIAVAITEALRPAGVGVVVEATSAEP

SEQ ID NO: 1037 - protein, 233 aa, Homo sapiens
MEKGPVRAPAEKPRGARCSNGFPERDPPRPGPSRPAEKPPRPEAKSAQPADGWKGERPRSEEDNELNLPNLAAAYSSILSSLGENPQRQGLLKTPWRAASAMQFFTKGYQETISDVLNDAIFDEDHDEMVIVKDIDMFSMCEHHLVPFVGKVHIGYLPNKQVLGLSKLARIVEIYSRRLQVQERLTKQIAVAITEALRPAGVGVVVEATKSNKYNKGLSPLLSSCHLFVAILK

SEQ ID NO: 1038 - protein, 337 aa, Homo sapiens
MGPRARPALLLLMLLQTAVLQGRLLRSHSLHYLFMGASEQDLGLSLFEALGYVDDQLFVFYDHESRRVEPRTPWVSSRISSQMWLQLSQSLKGWDHMFTVDFWTIMENHNHSKESHTLQVILGCEMQEDNSTEGYWKYGYDGQDHLEFCPDTLDWRAAEPRAWPTKLEWERHKIRARQNRAYLERDCPAQLQQLLELGRGVLDQQVPPLVKVTHHVTSSVTTLRCRALNYYPQNITMKWLKDKQPMDAKEFEPKDVLPNGDGTYQGWITLAVPPGEEQRYTCQVEHPGLDQPLIVIWEPSPSGTLVIGVISGIAVFVVILFIGILFIILRKRQGSSF

SEQ ID NO: 1039 - protein, 256 aa, Homo sapiens
MGPRARPALLLLMLLQTAVLQGRLLRSHSLHYLFMGASEQDLGLSLFEALGYVDDQLFVFYDHESRRVEPRTPWVSSRISSQMWLQLSQSLKGWDHMFTVDFWTIMENHNHSKVPPLVKVTHHVTSSVTTLRCRALNYYPQNITMKWLKDKQPMDAKEFEPKDVLPNGDGTYQGWITLAVPPGEEQRYTCQVEHPGLDQPLIVIWEPSPSGTLVIGVISGIAVFVVILFIGILFIILRKRQGSRGAMGHYVLAERE

SEQ ID NO: 1040 - protein, 242 aa, Homo sapiens
MGPRARPALLLLMLLQTAVLQGRLLRSHSLHYLFMGASEQDLGLSLFEALGYVDDQLFVFYDHESRRVEPRTPWVSSRISSQMWLQLSQSLKGWDHMFTVDFWTIMENHNHSKVTTLRCRALNYYPQNITMKWLKDKQPMDAKEFEPKDVLPNGDGTYQGWITLAVPPGEEQRYTCQVEHPGLDQPLIVIWEPSPSGTLVIGVISGIAVFVVILFIGILFIILRKRQGSRGAMGHYVLAERE

SEQ ID NO: 1041 - protein, 260 aa, Homo sapiens
MGPRARPALLLLMLLQTAVLQGRLLQSHTLQVILGCEMQEDNSTEGYWKYGYDGQDHLEFCPDTLDWRAAEPRAWPTKLEWERHKIRARQNRAYLERDCPAQLQQLLELGRGVLDQQVPPLVKVTHHVTSSVTTLRCRALNYYPQNITMKWLKDKQPMDAKEFEPKDVLPNGDGTYQGWITLAVPPGEEQRYTCQVEHPGLDQPLIVIWEPSPSGTLVIGVISGIAVFVVILFIGILFIILRKRQGSRGAMGHYVLAERE

SEQ ID NO: 1042 - protein, 76 aa, Homo sapiens
MGPRARPALLLLMLLQTAVLQGRLLQPSPSGTLVIGVISGIAVFVVILFIGILFIILRKRQGSRGAMGHYVLAERE

SEQ ID NO: 1043 - protein, 168 aa, Homo sapiens
MGPRARPALLLLMLLQTAVLQGRLLLPPLVKVTHHVTSSVTTLRCRALNYYPQNITMKWLKDKQPMDAKEFEPKDVLPNGDGTYQGWITLAVPPGEEQRYTCQVEHPGLDQPLIVIWEPSPSGTLVIGVISGIAVFVVILFIGILFIILRKRQGSRGAMGHYVLAERE

SEQ ID NO: 1044 - protein, 348 aa, Homo sapiens
MGPRARPALLLLMLLQTAVLQGRLLRSHSLHYLFMGASEQDLGLSLFEALGYVDDQLFVFYDHESRRVEPRTPWVSSRISSQMWLQLSQSLKGWDHMFTVDFWTIMENHNHSKESHTLQVILGCEMQEDNSTEGYWKYGYDGQDHLEFCPDTLDWRAAEPRAWPTKLEWERHKIRARQNRAYLERDCPAQLQQLLELGRGVLDQQVPPLVKVTHHVTSSVTTLRCRALNYYPQNITMKWLKDKQPMDAKEFEPKDVLPNGDGTYQGWITLAVPPGEEQRYTCQVEHPGLDQPLIVIWEPSPSGTLVIGVISGIAVFVVILFIGILFIILRKRQGSRGAMGHYVLAERE

SEQ ID NO: 1045 - protein, 325 aa, Homo sapiens
MGPRARPALLLLMLLQTAVLQGRLLPLGYVDDQLFVFYDHESRRVEPRTPWVSSRISSQMWLQLSQSLKGWDHMFTVDFWTIMENHNHSKESHTLQVILGCEMQEDNSTEGYWKYGYDGQDHLEFCPDTLDWRAAEPRAWPTKLEWERHKIRARQNRAYLERDCPAQLQQLLELGRGVLDQQVPPLVKVTHHVTSSVTTLRCRALNYYPQNITMKWLKDKQPMDAKEFEPKDVLPNGDGTYQGWITLAVPPGEEQRYTCQVEHPGLDQPLIVIWEPSPSGTLVIGVISGIAVFVVILFIGILFIILRKRQGSRGAMGHYVLAERE

SEQ ID NO: 1046 - protein, 334 aa, Homo sapiens
MGPRARPALLLLMLLQTAVLQGRLLRSHSLHYLFMGASEQDLGLSLFEALGYVDDQLFVFYDHESRRVEPRTPWVSSRISSQMWLQLSQSLKGWDHMFTVDFWTIMENHNHSKESHTLQVILGCEMQEDNSTEGYWKYGYDGQDHLEFCPDTLDWRAAEPRAWPTKLEWERHKIRARQNRAYLERDCPAQLQQLLELGRGVLDQQVTTLRCRALNYYPQNITMKWLKDKQPMDAKEFEPKDVLPNGDGTYQGWITLAVPPGEEQRYTCQVEHPGLDQPLIVIWEPSPSGTLVIGVISGIAVFVVILFIGILFIILRKRQGSRGAMGHYVLAERE

SEQ ID NO: 1047 - protein, 345 aa, Homo sapiens
MGPRARPALLLLMLLQTAVLQGRLLRSHSLHYLFMGASEQDLGLSLFEALGYVDDQLFVFYDHESRRVEPRTPWVSSRISSQMWLQLSQSLKGWDHMFTVDFWTIMENHNHSKESHTLQVILGCEMQEDNSTEGYWKYGYDGQDHLEFCPDTLDWRAAEPRAWPTKLEWERHKIRARQNRAYLERDCPAQLQQLLELGRGVLDQQEGSESSSLPGKVTTLRCRALNYYPQNITMKWLKDKQPMDAKEFEPKDVLPNGDGTYQGWITLAVPPGEEQRYTCQVEHPGLDQPLIVIWEPSPSGTLVIGVISGIAVFVVILFIGILFIILRKRQGSRGAMGHYVLAERE

SEQ ID NO: 1048 - protein, 246 aa, Homo sapiens
MGPRARPALLLLMLLQTAVLQGRLLQSHTLQVILGCEMQEDNSTEGYWKYGYDGQDHLEFCPDTLDWRAAEPRAWPTKLEWERHKIRARQNRAYLERDCPAQLQQLLELGRGVLDQQVTTLRCRALNYYPQNITMKWLKDKQPMDAKEFEPKDVLPNGDGTYQGWITLAVPPGEEQRYTCQVEHPGLDQPLIVIWEPSPSGTLVIGVISGIAVFVVILFIGILFIILRKRQGSRGAMGHYVLAERE

SEQ ID NO: 1049 - protein, 161 aa, Homo sapiens
MGPRARPALLLLMLLQTAVLQGRLLRSHSLHYLFMGASEQDLGLSLFEALGYVDDQLFVFYDHESRRVEPRTPWVSSRISSQMWLQLSQSLKGWDHMFTVDFWTIMENHNHSKESHTLQVILGCEMQEDNSTEGYWKYGYDGQVLQDTIYSSEVSSLGIKF

SEQ ID NO: 1050 - protein, 121 aa, Homo sapiens
MENHNHSKESHTLQVILGCEMQEDNSTEGYWKYGYDGQDHLEFCPDTLDWRAAEPRAWPTKLEWERHKIRARQNRAYLERDCPAQLQQLLELGRGVLDQQVPPLVKVTHHVSHPAQPSKES

SEQ ID NO: 1051 - protein, 426 aa, Homo sapiens
MGEPGQSPSPRSSHGSPPTLSTLTLLLLLCGHAHSQCKILRCNAEYVSSTLSLRGGGSSGALRGGGGGGRGGGVGSGGLCRALRSYALCTRRTARTCRGDLAFHSAVHGIEDLMIQHNCSRQGPTAPPPPRGPALPGAGSGLPAPDPCDYEGRFSRLHGRPPGFLHCASFGDPHVRSFHHHFHTCRVQGAWPLLDNDFLFVQATSSPMALGANATATRKLTIIFKNMQECIDQKVYQAEVDNLPVAFEDGSINGGDRPGGSSLSIQTANPGNHVEIQAAYIGTTIIIRQTAGQLSFSIKVAEDVAMAFSAEQDLQLCVGGCPPSQRLSRSERNRRGAITIDTARRLCKEGLPVEDAYFHSCVFDVLISGDPNFTVAAQAALEDARAFLPDLEKLHLFPSDAGVPLSSATLLAPLLSGLFVLWLCIQ

SEQ ID NO: 1052 - protein, 313 aa, Homo sapiens
MIQHNCSRQGPTAPPPPRGPALPGAGSGLPAPDPCDYEGRFSRLHGRPPGFLHCASFGDPHVRSFHHHFHTCRVQGAWPLLDNDFLFVQATSSPMALGANATATRKLTIIFKNMQECIDQKVYQAEVDNLPVAFEDGSINGGDRPGGSSLSIQTANPGNHVEIQAAYIGTTIIIRQTAGQLSFSIKVAEDVAMAFSAEQDLQLCVGGCPPSQRLSRSERNRRGAITIDTARRLCKEGLPVEDAYFHSCVFDVLISGDPNFTVAAQAALEDARAFLPDLEKLHLFPSDAGVPLSSATLLAPLLSGLFVLWLCIQ

SEQ ID NO: 1053 - protein, 93 aa, Homo sapiens
MGEPGQSPSPRSSHGSPPTLSTLTLLLLLCGHAHSQCKILRCNAEYVSSTLSLRGGGSSGALRGGGGGGRGGGVGSGGLCRALRSYALCTRRT

SEQ ID NO: 1054 - protein, 200 aa, Homo sapiens
MQECIDQKVYQAEVDNLPVAFEDGSINGGDRPGGSSLSIQTANPGNHVEIQAAYIGTTIIIRQTAGQLSFSIKVAEDVAMAFSAEQDLQLCVGGCPPSQRLSRSERNRRGAITIDTARRLCKEGLPVEDAYFHSCVFDVLISGDPNFTVAAQAALEDARAFLPDLEKLHLFPSDAGVPLSSATLLAPLLSGLFVLWLCIQ

SEQ ID NO: 1055 - protein, 200 aa, Homo sapiens; identical to SEQ ID NO: 1054

SEQ ID NO: 1056 - protein, 200 aa, Homo sapiens; identical to SEQ ID NO: 1054

SEQ ID NO: 1057 - protein, 200 aa, Homo sapiens; identical to SEQ ID NO: 1054

SEQ ID NO: 1058 - protein, 728 aa, Homo sapiens
MWVTKLLPALLLQHVLLHLLLLPIAIPYAEGQRKRRNTIHEFKKSAKTTLIKIDPALKIKTKKVNTADQCANRCTRNKGLPFTCKAFVFDKARKQCLWFPFNSMSSGVKKEFGHEFDLYENKDYIRNCIIGKGRSYKGTVSITKSGIKCQPWSSMIPHEHSFLPSSYRGKDLQENYCRNPRGEEGGPWCFTSNPEVRYEVCDIPQCSEVECMTCNGESYRGLMDHTESGKICQRWDHQTPHRHKFLPERYPDKGFDDNYCRNPDGQPRPWCYTLDPHTRWEYCAIKTCADNTMNDTDVPLETTECIQGQGEGYRGTVNTIWNGIPCQRWDSQYPHEHDMTPENFKCKDLRENYCRNPDGSESPWCFTTDPNIRVGYCSQIPNCDMSHGQDCYRGNGKNYMGNLSQTRSGLTCSMWDKNMEDLHRHIFWEPDASKLNENYCRNPDDDAHGPWCYTGNPLIPWDYCPISRCEGDTTPTIVNLDHPVISCAKTKQLRVVNGIPTRTNIGWMVSLRYRNKHICGGSLIKESWVLTARQCFPSRDLKDYEAWLGIHDVHGRGDEKCKQVLNVSQLVYGPEGSDLVLMKLARPAVLDDFVSTIDLPNYGCTIPEKTSCSVYGWGYTGLINYDGLLRVAHLYIMGNEKCSQHHRGKVTLNESEICAGAEKIGSGPCEGDYGGPLVCEQHKMRMVLGVIVPGRGCAIPNRPGIFVRVAYYAKWIHKIILTYKVPQS

SEQ ID NO: 1059 - protein, 184 aa, Homo sapiens
MWVTKLLPALLLQHVLLHLLLLPIAIPYAEGQRKRRNTIHEFKKSAKTTLIKIDPALKIKTKKVNTADQCANRCTRNKGLPFTCKAFVFDKARKQCLWFPFNSMSSGVKKEFGHEFDLYENKDYIRNCIIGKGRSYKGTVSITKSGIKCQPWSSMIPHEHSGGDDCLVESTFYSIPFWGHNSAR

SEQ ID NO: 1060 - protein, 296 aa, Homo sapiens
MWVTKLLPALLLQHVLLHLLLLPIAIPYAEGQRKRRNTIHEFKKSAKTTLIKIDPALKIKTKKVNTADQCANRCTRNKGLPFTCKAFVFDKARKQCLWFPFNSMSSGVKKEFGHEFDLYENKDYIRNCIIGKGRSYKGTVSITKSGIKCQPWSSMIPHEHSFLPSSYRGKDLQENYCRNPRGEEGGPWCFTSNPEVRYEVCDIPQCSEVECMTCNGESYRGLMDHTESGKICQRWDHQTPHRHKFLPERYPDKGFDDNYCRNPDGQPRPWCYTLDPHTRWEYCAIKTCGDITWALN

SEQ ID NO: 1061 - protein, 141 aa, Homo sapiens
MWVTKLLPALLLQHVLLHLLLLPIAIPYAEGQRKRRNTIHEFKKSAKTTLIKIDPALKIKTKKVNTADQCANRCTRNKGLPFTCKAFVFDKARKQCLWFPFNSMSSGVKKEFGHEFDLYENKDYIRNCIIGKGRSYKGTVS

SEQ ID NO: 1062 - protein, 118 aa, Homo sapiens
MWVTKLLPALLLQHVLLHLLLLPIAIPYAEGQRKRRNTIHEFKKSAKTTLIKIDPALKIKTKKVNTADQCANRCTRNKGLPFTCKAFVFDKARKQCLWFPFNSMSSGVKKEFGHEFDL

SEQ ID NO: 1063 - protein, 210 aa, Homo sapiens
MWVTKLLPALLLQHVLLHLLLLPIAIPYAEGQRKRRNTIHEFKKSAKTTLIKIDPALKIKTKKVNTADQCANRCTRNKGLPFTCKAFVFDKARKQCLWFPFNSMSSGVKKEFGHEFDLYENKDYIRNCIIGKGRSYKGTVSITKSGIKCQPWSSMIPHEHSFLPSSYRGKDLQENYCRNPRGEEGGPWCFTSNPEVRYEVCDIPQCSEGK

SEQ ID NO: 1064 - protein, 290 aa, Homo sapiens
MWVTKLLPALLLQHVLLHLLLLPIAIPYAEGQRKRRNTIHEFKKSAKTTLIKIDPALKIKTKKVNTADQCANRCTRNKGLPFTCKAFVFDKARKQCLWFPFNSMSSGVKKEFGHEFDLYENKDYIRNCIIGKGRSYKGTVSITKSGIKCQPWSSMIPHEHSFLPSSYRGKDLQENYCRNPRGEEGGPWCFTSNPEVRYEVCDIPQCSEVECMTCNGESYRGLMDHTESGKICQRWDHQTPHRHKFLPERYPDKGFDDNYCRNPDGQPRPWCYTLDPHTRWEYCAIKTCET

SEQ ID NO: 1065 - protein, 285 aa, Homo sapiens
MWVTKLLPALLLQHVLLHLLLLPIAIPYAEGQRKRRNTIHEFKKSAKTTLIKIDPALKIKTKKVNTADQCANRCTRNKGLPFTCKAFVFDKARKQCLWFPFNSMSSGVKKEFGHEFDLYENKDYIRNCIIGKGRSYKGTVSITKSGIKCQPWSSMIPHEHSYRGKDLQENYCRNPRGEEGGPWCFTSNPEVRYEVCDIPQCSEVECMTCNGESYRGLMDHTESGKICQRWDHQTPHRHKFLPERYPDKGFDDNYCRNPDGQPRPWCYTLDPHTRWEYCAIKTCET

SEQ ID NO: 1066 - protein, 723 aa, Homo sapiens
MWVTKLLPALLLQHVLLHLLLLPIAIPYAEGQRKRRNTIHEFKKSAKTTLIKIDPALKIKTKKVNTADQCANRCTRNKGLPFTCKAFVFDKARKQCLWFPFNSMSSGVKKEFGHEFDLYENKDYIRNCIIGKGRSYKGTVSITKSGIKCQPWSSMIPHEHSYRGKDLQENYCRNPRGEEGGPWCFTSNPEVRYEVCDIPQCSEVECMTCNGESYRGLMDHTESGKICQRWDHQTPHRHKFLPERYPDKGFDDNYCRNPDGQPRPWCYTLDPHTRWEYCAIKTCADNTMNDTDVPLETTECIQGQGEGYRGTVNTIWNGIPCQRWDSQYPHEHDMTPENFKCKDLRENYCRNPDGSESPWCFTTDPNIRVGYCSQIPNCDMSHGQDCYRGNGKNYMGNLSQTRSGLTCSMWDKNMEDLHRHIFWEPDASKLNENYCRNPDDDAHGPWCYTGNPLIPWDYCPISRCEGDTTPTIVNLDHPVISCAKTKQLRVVNGIPTRTNIGWMVSLRYRNKHICGGSLIKESWVLTARQCFPSRDLKDYEAWLGIHDVHGRGDEKCKQVLNVSQLVYGPEGSDLVLMKLARPAVLDDFVSTIDLPNYGCTIPEKTSCSVYGWGYTGLINYDGLLRVAHLYIMGNEKCSQHHRGKVTLNESEICAGAEKIGSGPCEGDYGGPLVCEQHKMRMVLGVIVPGRGCAIPNRPGIFVRVAYYAKWIHKIILTYKVPQS

SEQ ID NO: 1067 - protein, 84 aa, Homo sapiens
MALSSQIWAACLLLLLLLASLTSGSVFPQQTGQLAELQPQDRAGARASWMPMFQRRRRRDTHFPICIFCCGCCHRSKCGMCCKT

SEQ ID NO: 1068 - protein, 84 aa, Homo sapiens; identical to SEQ ID NO: 1067

SEQ ID NO: 1069 - protein, 473 aa, Homo sapiens
MAVMAPRTLVLLLSGALALTQTWAEVQLVESGGGLVQPGGSLRLSCAASGFNIKDTYIHWVRQAPGKGLEWVARIYPTNGYTRYADSVKGRFTISADTSKNTAYLQMNSLRAEDTAVYYCSRWGGDGFYAMDYWGQGTLVTVSSASTKGPSVFPLAPSSKSTSGGTAALGCLVKDYFPEPVTVSWNSGALTSGVHTFPAVLQSSGLYSLSSVVTVPSSSLGTQTYICNVNHKPSNTKVDKKVEPKSCDKTHTCPPCPAPELLGGPSVFLFPPKPKDTLMISRTPEVTCVVVDVSHEDPEVKFNWYVDGVEVHNAKTKPREEQYNSTYRVVSVLTVLHQDWLNGKEYKCKVSNKALPAPIEKTISKAKGQPREPQVYTLPPSRDELTKNQVSLTCLVKGFYPSDIAVEWESNGQPENNYKTTPPVLDSDGSFFLYSKLTVDKSRWQQGNVFSCSVMHEALHNHYTQKSLSLSPG

SEQ ID NO: 1070 - protein, 238 aa, Homo sapiens
MAVMAPRTLVLLLSGALALTQTWADIQMTQSPSSLSASVGDRVTITCRASQDVNTAVAWYQQKPGKAPKLLIYSASFLYSGVPSRFSGSRSGTDFTLTISSLQPEDFATYYCQQHYTTPPTFGQGTKVEIKRTVAAPSVFIFPPSDEQLKSGTASVVCLLNNFYPREAKVQWKVDNALQSGNSQESVTEQDSKDSTYSLSSTLTLSKADYEKHKVYACEVTHQGLSSPVTKSFNRGEC

SEQ ID NO: 1071 - protein, 218 aa, Homo sapiens
MATRSPGVVISDDEPGYDLDLFCIPNHYAEDLERVFIPHGLIMDRTERLARDVMKEMGGHHIVALCVLKGGYKFFADLLDYIKALNRNSDRSIPMTVDFIRLKSYCNDQSTGDIKVIGGDDLSTLTGKNVLIVEDIIDTGKTMQTLLSLVRQYNPKMVKVASLLVKRTPRSVGYKPDFVGFEIPDKFVVGYALDYNEYFRDLNHVCVISETGKAKYKA

SEQ ID NO: 1072 - protein, 218 aa, Homo sapiens
MATRSPGVVISDDEPGYDLDLFCIPNHYAEDLERVFIPHGLIMDRTERLARDVMKEMGGHHIVALCVLKGGYKFFADLLDYIKALNRNSDRSIPMTVDFIRLKSYCNDQSTGDIKVIGGDDLSTLTGKSRLLAEDIIDTGKTMQTLLSLVRQYNPKMVKVASLLVKRTPRSVGYKPDFVGFEIPDKFVVGYALDYNEYFRDLNHVCVISETGKAKYKA

SEQ ID NO: 1073 - protein, 550 aa, Homo sapiens
MPPPRTGRGLLWLGLVLSSVCVALGSETQANSTTDALNVLLIIVDDLRPSLGCYGDKLVRSPNIDQLASHSLLFQNAFAQQAVCAPSRVSFLTGRRPDTTRLYDFNSYWRVHAGNFSTIPQYFKENGYVTMSVGKVFHPGISSNHTDDSPYSWSFPPYHPSSEKYENTKTCRGPDGELHANLLCPVDVLDVPEGTLPDKQSTEQAIQLLEKMKTSASPFFLAVGYHKPHIPFRYPKEFQKLYPLENITLAPDPEVPDGLPPVAYNPWMDIRQREDVQALNISVPYGPIPVDFQRKIRQSYFASVSYLDTQVGRLLSALDDLQLANSTIIAFTSDHGWALGEHGEWAKYSNFDVATHVPLIFYVPGRTASLPEAGEKLFPYLDPFDSASQLMEPGRQSMDLVELVSLFPTLAGLAGLQVPPRCPVPSFHVELCREGKNLLKHFRFRDLEEDPYLPGNPRELIAYSQYPRPSDIPQWNSDKPSLKDIKIMGYSIRTIDYRYTVWVGFNPDEFLANFSDIHAGELYFVDSDPLQDHNMYNDSQGGDLFQLLMP

SEQ ID NO: 1074 - protein, 343 aa, Homo sapiens
MPPPRTGRGLLWLGLVLSSVCVALGSETQANSTTDALNVLLIIVDDLRPSLGCYGDKLVRSPNIDQLASHSLLFQNAFAQQAVCAPSRVSFLTGRRPDTTRLYDFNSYWRVHAGNFSTIPQYFKENGYVTMSVGKVFHPGISSNHTDDSPYSWSFPPYHPSSEKYENTKTCRGPDGELHANLLCPVDVLDVPEGTLPDKQSTEQAIQLLEKMKTSASPFFLAVGYHKPHIPFRYPKEFQKLYPLENITLAPDPEVPDGLPPVAYNPWMDIRQREDVQALNISVPYGPIPVDFQRKIRQSYFASVSYLDTQVGRLLSALDDLQLANSTIIAFTSDHGFLMRTNT

SEQ ID NO: 1075 - protein, 312 aa, Homo sapiens
MPPPRTGRGLLWLGLVLSSVCVALGSETQANSTTDALNVLLIIVDDLRPSLGCYGDKLVRSPNIDQLASHSLLFQNAFAQQAVCAPSRVSFLTGRRPDTTRLYDFNSYWRVHAGNFSTIPQYFKENGYVTMSVGKVFHPGISSNHTDDSPYSWSFPPYHPSSEKYENTKTCRGPDGELHANLLCPVDVLDVPEGTLPDKQSTEQAIQLLEKMKTSASPFFLAVGYHKPHIPFRYPKEFQKLYPLENITLAPDPEVPDGLPPVAYNPWMDIRQREDVQALNISVPYGPIPVDFQEDQSSTGFRLKTSSTRKYK

SEQ ID NO: 1076 - protein, 179 aa, Homo sapiens
MPPPRTGRGLLWLGLVLSSVCVALGSETQANSTTDALNVLLIIVDDLRPSLGCYGDKLVRSPNIDQLASHSLLFQNAFAQQAVCAPSRVSFLTGRRPDTTRLYDFNSYWRVHAGNFSTIPQYFKENGYVTMSVGKVFHPGTAPCPESGFSWFVVSESSIPILGMGLSLQSPLLAGRVPR

SEQ ID NO: 1077 - protein, 86 aa, Homo sapiens
MPPPRTGRGLLWLGLVLSSVCVALGSETQANSTTDALNVLLIIVDDLRPSLGCYGDKLVRSPNIDQLASHSLLFQNAFAQQAVCAP

SEQ ID NO: 1078 - protein, 153 aa, Homo sapiens
MDLVELVSLFPTLAGLAGLQVPPRCPVPSFHVELCREGKNLLKHFRFRDLEEDPYLPGNPRELIAYSQYPRPSDIPQWNSDKPSLKDIKIMGYSIRTIDYRYTVWVGFNPDEFLANFSDIHAGELYFVDSDPLQDHNMYNDSQGGDLFQLLMP

SEQ ID NO: 1079 - protein, 339 aa, Homo sapiens
MKTSASPFFLAVGYHKPHIPFRYPKEFQKLYPLENITLAPDPEVPDGLPPVAYNPWMDIRQREDVQALNISVPYGPIPVDFQRKIRQSYFASVSYLDTQVGRLLSALDDLQLANSTIIAFTSDHGWALGEHGEWAKYSNFDVATHVPLIFYVPGRTASLPEAGEKLFPYLDPFDSASQLMEPGRQSMDLVELVSLFPTLAGLAGLQVPPRCPVPSFHVELCREGKNLLKHFRFRDLEEDPYLPGNPRELIAYSQYPRPSDIPQWNSDKPSLKDIKIMGYSIRTIDYRYTVWVGFNPDEFLANFSDIHAGELYFVDSDPLQDHNMYNDSQGGDLFQLLMP

SEQ ID NO: 1080 - protein, 653 aa, Homo sapiens
MRPLRPRAALLALLASLLAAPPVAPAEAPHLVHVDAARALWPLRRFWRSTGFCPPLPHSQADQYVLSWDQQLNLAYVGAVPHRGIKQVRTHWLLELVTTRGSTGRGLSYNFTHLDGYLDLLRENQLLPGFELMGSASGHFTDFEDKQQVFEWKDLVSSLARRYIGRYGLAHVSKWNFETWNEPDHHDFDNVSMTMQGFLNYYDACSEGLRAASPALRLGGPGDSFHTPPRSPLSWGLLRHCHDGTNFFTGEAGVRLDYISLHRKGARSSISILEQEKVVAQQIRQLFPKFADTPIYNDEADPLVGWSLPQPWRADVTYAAMVVKVIAQHQNLLLANTTSAFPYALLSNDNAFLSYHPHPFAQRTLTARFQVNNTRPPHVQLLRKPVLTAMGLLALLDEEQLWAEVSQAGTVLDSNHTVGVLASAHRPQGPADAWRAAVLIYASDDTRAHPNRSVAVTLRLRGVPPGPGLVYVTRYLDNGLCSPDGEWRRLGRPVFPTAEQFRRMRAAEDPVAAAPRPLPAGGRLTLRPALRLPSLLLVHVCARPEKPPGQVTRLRALPLTQGQLVLVWSDEHVGSKCLWTYEIQFSQDGKAYTPVSRKPSTFNLFVFSPDTGAVSGSYRVRALDYWARPGPFSDPVPYLEVPVPRGPPSPGNP

SEQ ID NO: 1081 - protein, 675 aa, Homo sapiens
MRPLRPRAALLALLASLLAAPPVAPAEAPHLVHVDAARALWPLRRFWRSTGFWGSTGRGLSYNFTHLDGYLDLLRENQLLPGFELMGSASGHFTDFEDKQQVFEWKDLVSSLARRYIGRYGLAHVSKWNFETWNEPDHHDFDNVSMTMQGFLNYYDACSEGLRAASPALRLGGPGDSFHTPPRSPLSWGLLRHCHDGTNFFTGEAGVRLDYISLHRKVRPAPPSAPVFCALSRCAPGRADPGGAEAAPPAGCAQLHLHPGAGEGRRAADPAALPQVRGHPHLQRRGGPAGGLVPATAVEGGRDLRGHGGEGGPAQRPARPPATFLPRRDRRAVAAPPGPSCPGHPQVIAQHQNLLLANTTSAFPYALLSNDNAFLSYHPHPFAQRTLTARFQVNNTRPPHVQLLRKPVLTAMGLLALLDEEQLWAEVSQAGTVLDSNHTVGVLASAHRPQGPADAWRAAVLIYASDDTRAHPNRSVAVTLRLRGVPPGPGLVYVTRYLDNGLCSPDGEWRRLGRPVFPTAEQFRRMRAAEDPVAAAPRPLPAGGRLTLRPALRLPSLLLVHVCARPEKPPGQVTRLRALPLTQGQLVLVWSDEHVGSKCLWTYEIQFSQDGKAYTPVSRKPSTFNLFVFSPDTGAVSGSYRVRALDYWARPGPFSDPVPYLEVPVPRGPPSPGNP

SEQ ID NO: 1082 - protein, 200 aa, Homo sapiens
MALWMRLLPLLALLALWGPDPAAAFVNQHLCGSHLVEALYLVCGERGFFYTPKTRREAEDLQASALSLSSSTSTWPEGLDATARAPPALVVTANIGQAGGSSSRQFRQRALGTSDSPVLFIHCPGAAGTAQGLEYRGRRVTTELVWEEVDSSPQPQGSESLPAQPPAQPAPQPEPQQAREPSPEVSCCGLWPRRPQRSQN

SEQ ID NO: 1083 - protein, 110 aa, Homo sapiens
MALWMRLLPLLALLALWGPDPAAAFVNQHLCGSHLVEALYLVCGERGFFYTPKTRREAEDLQVGQVELGGGPGAGSLQPLALEGSLQKRGIVEQCCTSICSLYQLENYCN

SEQ ID NO: 1084 - protein, 110 aa, Homo sapiens; identical to SEQ ID NO: 1083

SEQ ID NO: 1085 - protein, 110 aa, Homo sapiens; identical to SEQ ID NO: 1083

SEQ ID NO: 1086 - protein, 98 aa, Homo sapiens
MALWMRLLPLLALLALWGPDPAAAFVNQHLCGSHLVEALYLVCGERGFFYTPKTRREAEDLQGSLQPLALEGSLQKRGIVEQCCTSICSLYQLENYCN

SEQ ID NO: 1087 - protein, 110 aa, Homo sapiens
MALWMRLLPLLALLALWGPDPAAAFVNQHLCGSHLVEALYLVCGERGFFYTDKTRREAEDLQVGQVELGGGPGAGSLQPLALEGSLQKRGIVEQCCTSICSLYQLENYCN

SEQ ID NO: 1088 - protein, 110 aa, Homo sapiens
MALWMRLLPLLALLALWGPDPAAAFVNQHLCGSHLVEALYLVCGERGFFYTPKTRREAEDLQVGQVELGGGPGAGSLQPLALEGSLQKRGIVEQCCTSICSLYQLENYCG

SEQ ID NO: 1089 - protein, 110 aa, Homo sapiens
MALWMRLLPLLALLALWGPDPAAAFVKQHLCGSHLVEALYLVCGERGFFYTPETRREAEDLQVGQVELGGGPGAGSLQPLALEGSLQKRGIVEQCCTSICSLYQLENYCN

SEQ ID NO: 1090 - protein, 110 aa, Homo sapiens
MALWMRLLPLLALLALWGPDPAAAFVNQHLCGSHLVEALYLVCGERGFFYTKPTRREAEDLQVGQVELGGGPGAGSLQPLALEGSLQKRGIVEQCCTSICSLYQLENYCN

SEQ ID NO: 1091 - protein, 189 aa, Homo sapiens
MALSFSLLMAVLVLSYKSICSLGCDLPQTHSLGNRRALILLGQMGRISPFSCLKDRHDFRIPQEEFDGNQFQKAQAISVLHEMIQQTFNLFSTEDSSAAWEQSLLEKFSTELYQQLNDLEACVIQEVGVEETPLMNEDSILAVRKYFQRITLYLIERKYSPCAWEVVRAEIMRSLSFSTNLQKRLRRKD

SEQ ID NO: 1092 - protein, 190 aa, Homo sapiens
MMASPFALLMALVVLSCKSSCSLGCDLPETHSLDNRRTLMLLAQMSRISPSSCLMDRHDFGFPQEEFDGNQFQKAPAISVLHELIQQIFNLFTTKDSSAAWDEDLLDKFCTELYQQLNDLEACVMQEERVGETPLMNADSILAVKKYFRRITLYLTEKKYSPCAWEVVRAEIMRSLSLSTNLQERLRRKE

SEQ ID NO: 1093 - protein, 189 aa, Homo sapiens
MALPFALMMALVVLSCKSSCSLGCNLSQTHSLNNRRTLMLMAQMRRISPFSCLKDRHDFEFPQEEFDGNQFQKAQAISVLHEMMQQTFNLFSTKNSSAAWDETLLEKFYIELFQQMNDLEACVIQEVGVEETPLMNEDSILAVKKYFQRITLYLMEKKYSPCAWEVVRAEIMRSLSFSTNLQKRLRRKD

SEQ ID NO: 1094 - protein, 189 aa, Homo sapiens
MALSFSLLMAVLVLSYKSICSLGCDLPQTHSLGNRRALILLAQMGRISHFSCLKDRYDFGFPQEVFDGNQFQKAQAISAFHEMIQQTFNLFSTKDSSAAWDETLLDKFYIELFQQLNDLEACVTQEVGVEEIALMNEDSILAVRKYFQRITLYLMGKKYSPCAWEVVRAEIMRSFSFSTNLQKGLRRKD

SEQ ID NO: 1095 - protein, 189 aa, Homo sapiens
MALSFSLLMAVLVLSYKSICSLGCDLPQTHSLGNRRALILLAQMGRISPFSCLKDRHDFGLPQEEFDGNQFQKTQAISVLHEMIQQTFNLFSTEDSSAAWEQSLLEKFSTELYQQLNNLEACVIQEVGMEETPLMNEDSILAVRKYFQRITLYLTEKKYSPCAWEVVRAEIMRSLSFSTNLQKILRRKD

SEQ ID NO: 1096 - protein, 188 aa, Homo sapiens
MALTFALLVALLVLSCKSSCSVGCDLPQTHSLGSRRTLMLLAQMRRISLFSCLKDRHDFGFPQEEFGNQFQKAETIPVLHEMIQQIFNLFSTKDSSAAWDETLLDKFYTELYQQLNDLEACVIQGVGVTETPLMKEDSILAVRKYFQRITLYLKEKKYSPCAWEVVRAEIMRSFSLSTNLQESLRSKE

SEQ ID NO: 1097 - protein, 189 aa, Homo sapiens
MALSFSLLMAVLVLSYKSICSLGCDLPQTHSLGNRRALILLAQMGRISPFSCLKDRHDFGFPQEEFDGNQFQKAQAISVLHEMIQQTFNLFSTKDSSATWEQSLLEKFSTELNQQLNDLEACVIQEVGVEETPLMNVDSILAVKKYFQRITLYLTEKKYSPCAWEVVRAEIMRSFSLSKIFQERLRRKE

SEQ ID NO: 1098 - protein, 189 aa, Homo sapiens
MALSFSLLMAVLVLSYKSICSLGCDLPQTHSLGNRRALILLAQMGRISHFSCLKDRHDFGFPEEEFDGHQFQKAQAISVLHEMIQQTFNLFSTEDSSAAWEQSLLEKFSTELYQQLNDLEACVIQEVGVEETPLMNEDSILAVRKYFQRITLYLTEKKYSPCAWEVVRAEIMRSLSFSTNLQKRLRRKD

SEQ ID NO: 1099 - protein, 189 aa, Homo sapiens
MALPFVLLMALVVLNCKSICSLGCDLPQTHSLSNRRTLMIMAQMGRISPFSCLKDRHDFGFPQEEFDGNQFQKAQAISVLHEMIQQTFNLFSTKDSSATWDETLLDKFYTELYQQLNDLEACMMQEVGVEDTPLMNVDSILTVRKYFQRITLYLTEKKYSPCAWEVVRAEIMRSFSLSANLQERLRRKE

SEQ ID NO: 1100 - protein, 189 aa, Homo sapiens
MALPFALLMALVVLSCKSSCSLDCDLPQTHSLGHRRTMMLLAQMRRISLFSCLKDRHDFRFPQEEFDGNQFQKAEAISVLHEVIQQTFNLFSTKDSSVAWDERLLDKLYTELYQQLNDLEACVMQEVWVGGTPLMNEDSILAVRKYFQRITLYLTEKKYSPCAWEVVRAEIMRSFSSSRNLQERLRRKE

SEQ ID NO: 1101 - protein, 189 aa, Homo sapiens
MARSFSLLMVVLVLSYKSICSLGCDLPQTHSLRNRRALILLAQMGRISPFSCLKDRHEFRFPEEEFDGHQFQKTQAISVLHEMIQQTFNLFSTEDSSAAWEQSLLEKFSTELYQQLNDLEACVIQEVGVEETPLMNEDFILAVRKYFQRITLYLMEKKYSPCAWEVVRAEIMRSFSFSTNLKKGLRRKD

SEQ ID NO: 1102 - protein, 189 aa, Homo sapiens
MALTFYLLVALVVLSYKSFSSLGCDLPQTHSLGNRRALILLAQMRRISPFSCLKDRHDFEFPQEEFDDKQFQKAQAISVLHEMIQQTFNLFSTKDSSAALDETLLDEFYIELDQQLNDLESCVMQEVGVIESPLMYEDSILAVRKYFQRITLYLTEKKYSSCAWEVVRAEIMRSFSLSINLQKRLKSKE

SEQ ID NO: 1103 - protein, 187 aa, Homo sapiens
MTNKCLLQIALLLCFSTTALSMSYNLLGFLQRSSNFQCQKLLWQLNGRLEYCLKDRMNFDIPEEIKQLQQFQKEDAALTIYEMLQNIFAIFRQDSSSTGWNETIVENLLANVYHQINHLKTVLEEKLEKEDFTRGKLMSSLHLKRYYGRILHYLKAKEYSHCAWTIVRVEILRNFYFINRLTGYLRN

SEQ ID NO: 1104 - protein, 178 aa, Homo sapiens
MHSSALLCCLVLLTGVRASPGQGTQSENSCTHFPGNLPNMLRDLRDAFSRVKTFFQMKDQLDNLLLKESLLEDFKGYLGCQALSEMIQFYLEEVMPQAENQDPDIKAHVNSLGENLKTLRLRLRRCHRFLPCENKSKAVEQVKNAFNKLQEKGIYKAMSEFDIFINYIEAYMTMKIRN

SEQ ID NO: 1105 - protein, 162 aa, Homo sapiens
MRSSPGNMERIVICLMVIFLGTLVHKSSSQGQDRHMIRMRQLIDIVDQLKNYVNDLVPEFLPAPEDVETNCEWSAFSCFQKAQLKSANTGNNERIINVSIKKLKRKPPSTNAGRRQKHRLTCPSCDSYEKKPPKEFLERFKSLLQKMIHQHLSSRTHGSEDS

SEQ ID NO: 1106 - protein, 177 aa, Homo sapiens
MFHVSFRYIFGLPPLILVLLPVASSDCDIEGKDGKQYESVLMVSIDQLLDSMKEIGSNCLNNEFNFFKRHICDANKEGMFLFRAARKLRQFLKMNSTGDFDLHLLKVSEGTTILLNCTGQVKGRKPAALGEAQPTKSLEENKSLKEQKKLNDLCFLKRLLQEIKTCWNKILMGTKEH

SEQ ID NO: 1107 - protein, 71 aa, Homo sapiens
MFHVSFRYIFGLPPLILVLLPVASSDCDIEGKDGKQYESVLMVSIDQLLNQPYKKKEKRTERKQQSAMSNN

SEQ ID NO: 1108 - protein, 130 aa, Homo sapiens
VSFRYIFGLPPLILVLLPVASSDCDIEGKDGKQYESVLMVSIDQLLDSMKEIGSNCLNNEFNFFKRHICDANKVKGRKPAALGEAQPTKSLEENKSLKEQKKLNDLCFLKRLLQEIKTCWNKILMGTKEH

SEQ ID NO: 1109 - protein, 71 aa, Homo sapiens; identical to SEQ ID NO: 1107

SEQ ID NO: 1110 - protein, 37 aa, Homo sapiens
MFHVSFRYIFGLPPLILVLLPVASSDCDIEGQHERNW

SEQ ID NO: 1111 - protein, 133 aa, Homo sapiens
MFHVSFRYIFGLPPLILVLLPVASSDCDIEGKDGKQYESVLMVSIDQLLDSMKEIGSNCLNNEFNFFKRHICDANKVKGRKPAALGEAQPTKSLEENKSLKEQKKLNDLCFLKRLLQEIKTCWNKILMGTKEH

SEQ ID NO: 1112 - protein, 37 aa, Homo sapiens; identical to SEQ ID NO: 1110

SEQ ID NO: 1113 - protein, 64 aa, Homo sapiens
MKEIGSNCLNNEFNFFKRHICDANKEENKSLKEQKKLNDLCFLKRLLQEIKTCWNKILMGTKEH

SEQ ID NO: 1114 - protein, 273 aa, Homo sapiens
MKKTQTWILTCIYLQLLLFNPLVKTEGICRNRVTNNVKDVTKLVANLPKDYMITLKYVPGMDVLPSHCWISEMVVQLSDSLTDLLDKFSNISEGLSNYSIIDKLVNIVDDLVECVKENSSKDLKKSFKSPEPRLFTPEEFFRIFNRSIDAFKDFVVASETSDCVVSSTLSPEKDSRVSVTKPFMLPPVAASSLRNDSSSSNRKAKNPPGDSSLHWAAMALPALFSLIIGFAFGALYWKKRQPSLTRAVENIQINEEDNEISMLQEKEREFQEV

SEQ ID NO: 1115 - protein, 245 aa, Homo sapiens
MKKTQTWILTCIYLQLLLFNPLVKTEGICRNRVTNNVKDVTKLVANLPKDYMITLKYVPGMDVLPSHCWISEMVVQLSDSLTDLLDKFSNISEGLSNYSIIDKLVNIVDDLVECVKENSSKDLKKSFKSPEPRLFTPEEFFRIFNRSIDAFKDFVVASETSDCVVSSTLSPEKGKAKNPPGDSSLHWAAMALPALFSLIIGFAFGALYWKKRQPSLTRAVENIQINEEDNEISMLQEKEREFQEV

SEQ ID NO: 1116 - protein, 30 aa, Homo sapiens
GMDVLGRPKIPLETPAYTGQPWHCQHCFLL

SEQ ID NO: 1117 - protein, 1012 aa, Homo sapiens
MPASAPPRRPRPPPPSLSLLLVLLGLGGRRLRAEPGDGAQTWARFSRPPAPEAAGLFQGTFPDGFLWAVGSAAYQTEGGWQQHGKGASIWDTFTHHPLAPPGDSRNASLPLGAPSPLQPATGDVASDSYNNVFRDTEALRELGVTHYRFSISWARVLPNGSAGVPNREGLRYYRRLLERLRELGVQPVVTLYHWDLPQRLQDAYGGWANRALADHFRDYAELCFRHFGGQVKYWITIDNPYVVAWHGYATGRLAPGIRGSPRLGYLVAHNLLLAHAKVWHLYNTSFRPTQGGQVSIALSSHWINPRRMTDHSIKECQKSLDFVLGWFAKPVFIDGDYPESMKNNLSSILPDFTESEKKFIKGTADFFALCFGPTLSFQLLDPHMKFRQLESPNLRQLLSWIDLEFNHPQIFIVENGWFVSGTTKRDDAKYMYYLKKFIMETLKAIKLDGVDVIGYTAWSLMDGFEWHRGYSIRRGLFYVDFLSQDKMLLPKSSALFYQKLIEKNGFPPLPENQPLEGTFPCDFAWGVVDNYIQVDTTLSQFTDLNVYLWDVHHSKRLIKVDGVVTKKRKSYCVDFAAIQPQIALLQEMHVTHFRFSLDWALILPLGNQSQVNHTILQYYRCMASELVRVNITPVVALWQPMAPNQGLPRLLARQGAWENPYTALAFAEYARLCFQELGHHVKLWITMNEPYTRNMTYSAGHNLLKAHALAWHVYNEKFRHAQNGKISIALQADWIEPACPFSQKDKEVAERVLEFDIGWLAEPIFGSGDYPWVMRDWLNQRNNFLLPYFTEDEKKLIQGTFDFLALSHYTTILVDSEKEDPIKYNDYLEVQEMTDITWLNSPSQVAVVPWGLRKVLNWLKFKYGDLPMYIISNGIDDGLHAEDDQLRVYYMQNYINEALKAHILDGINLCGYFAYSFNDRTAPRFGLYRYAADQFEPKASMKHYRKIIDSNGFPGPETLERFCPEEFTVCTECSFFHTRKSLLAFIAFLFFASIISLSLIFYYSKKGRRSYK

SEQ ID NO: 1118 - protein, 242 aa, Homo sapiens
MTDHSIKECQKSLDFVLGWFAKPVFIDGDYPESMKNNLSSILPDFTESEKKFIKGTADFFALCFGPTLSFQLLDPHMKFRQLESPNLRQLLSWIDLEFNHPQIFIVENGWFVSGTTKRDDAKYMYYLKKFIMETLKAIKLDGVDVIGYTAWSLMDGFEWHRGYSIRRGLFYVDFLSQDKMLLPKSSALFYQKLIEKNGFPPLPENQPLEGTFPCDFAWGVVDNYIQVSQLTKPISSLTKPYH

SEQ ID NO: 1119 - protein, 479 aa, Homo sapiens
MRQPPGESDMAVSDALLPSFSTFASGPAGREKTLRQAGAPNNRWREELSHMKRLPPVLPGRPYDLAAATVATDLESGGAGAACGGSNLAPLPRRETEEFNDLLDLDFILSNSLTHPPESVAATVSSSASASSSSSPSSSGPASAPSTCSFTYPIRAGNDPGVAPGGTGGGLLYGRESAPPPTAPFNLADINDVSPSGGFVAELLRPELDPVYIPPQQPQPPGGGLMGKFVLKASLSAPGSEYGSPSVISVSKGSPDGSHPVVVAPYNGGPPRTCPKIKQEAVSSCTHLGAGPPLSNGHRPAAHDFPLGRQLPSRTTPTLGLEEVLSSRDCHPALPLPPGFHPHPGPNYPSFLPDQMQPQVPPLHYQELMPPGSCMPEEPKPKRGRRSWPRKRTATHTCDYAGCGKTYTKSSHLKAHLRTHTGEKPYHCDWDGCGWKFARSDELTRHYRKHTGHRPFQCQKCDRAFSRSDHLALHMKRHF

SEQ ID NO: 1120 - protein, 232 aa, Homo sapiens
MAVSDALLPSFSTFASGPAGREKTLRQAGAPNNRWREELSHMKRLPPVLPGRPYDLAAATVATDLESGGAGAACGGSNLAPLPRRETEEFNDLLDLDFILSNSLTHPPESVAATVSSSASASSSSSPSSSGPASAPSTCSFTYPIRAGNDPGVAPGGTGGGLLYGRESAPPPTAPFNLADINDVSPSGGFVAELLRPELDPVYIPPQQPQPPGGGLMGKFVLKASLSAPGSE

SEQ ID NO: 1121 - protein, 22 aa, Homo sapiens
MRQPPGESDMAVSDALLPSFST

SEQ ID NO: 1122 - protein, 38 aa, Homo sapiens
MRQPPGESDMAVSDALLPSFSTFASGPAGREKTLRQAG

SEQ ID NO: 1123 - protein, 440 aa, Homo sapiens
MGPPGSPWQWVTLLLGLLLPPAAPFWLLNVLFPPHTTPKAELSNHTRPVILVPGCLGNQLEAKLDKPDVVNWMCYRKTEDFFTIWLDLNMFLPLGVDCWIDNTRVVYNRSSGLVSNAPGVQIRVPGFGKTYSVEYLDSSKLAGYLHTLVQNLVNNGYVRDETVRAAPYDWRLEPGQQEEYYRKLAGLVEEMHAAYGKPVFLIGHSLGCLHLLYFLLRQPQAWKDRFIDGFISLGAPWGGSIKPMLVLASGDNQGIPIMSSIKLKEEQRITTTSPWMFPSRMAWPEDHVFISTPSFNYTGRDFQRFFADLHFEEGWYMWLQSRDLLAGLPAPGVEVYCLYGVGLPTPRTYIYDHGFPYTDPVGVLYEDGDDTVATRSTELCGLWQGRQPQPVHLLPLHGIQHLNMVFSNLTLEHINAILLGAYRQGPPASPTASPEPPPPE

SEQ ID NO: 1124 - protein, 250 aa, Homo sapiens [sequence omitted]

SEQ ID NO: 1125 - protein, 209 aa, Homo sapiens
MGSVSNQQFAGGCAKAAEEAPEEAPEDAARAADEPQLLHGAGICKWFNVRMGFGFLSMTARAGVALDPPVDVFVHQSKLHMEGFRSLKEGEAVEFTFKKSAKGLESIRVTGPGGVFCIGSERRPKGKSMQKRRSKGDRCYNCGGLDHHAKECKLPPQPKKCHFCQSISHMVASCPLKAQQGPSAQGKPTYFREEEEEIHSPTLLPEAQN

SEQ ID NO: 1126 - protein, 209 aa, Homo sapiens; identical to SEQ ID NO: 1125

SEQ ID NO: 1127 - protein, 219 aa, Homo sapiens
MKMRFLGLVVCLVLWTLHSEGSGGKLTAVDPETNMNVSEIISYWGFPSEEYLVETEDGYILCLNRIPHGRKNHSDKGPKPVVFLQHGLLADSSNWVTNLANSSLGFILADAGFDVWMGNSRGNTWSRKHKTLSVSQDEFWAFSYDEMAKYDLPASINFILNKTGQEQVYYVGHSQGTTIGFIAFSQIPELAKRIKMFFALGPVASVAFCTSPMAKLGRL

SEQ ID NO: 1128 - protein, 399 aa, Homo sapiens
MKMRFLGLVVCLVLWTLHSEGSGGKLTAVDPETNMNVSEIISYWGFPSEEYLVETEDGYILCLNRIPHGRKNHSDKGPKPVVFLQHGLLADSSNWVTNLANSSLGFILADAGFDVWMGNSRGNTWSRKHKTLSVSQDEFWAFSYDEMAKYDLPASINFILNKTGQEQVYYVGHSQGTTIGFIAFSQIPELAKRIKMFFALGPVASVAFCTSPMAKLGRLPDHLIKDLFGDKEFLPQSAFLKWLGTHVCTHVILKELCGNLCFLLCGFNERNLNMSRVDVYTTHSPAGTSVQNMLHWSQAVKFQKFQAFDWGSSAKNYFHYNQSYPPTYNVKDMLVPTAVWSGGHDWLADVYDVNILLTQITNLVFHESIPEWEHLDFIWGLDAPWRLYNKIINLMRKYQ

SEQ ID NO: 1129 - protein, 357 aa, Homo sapiens
MKLRTLAVSATVVKDGVSGVCSFRCSDVSGVLPSGPKPVVFLQHGLLADSSNWVTNLANSSLGFILADAGFDVWMGNSRGNTWSRKHKTLSVSQDEFWAFSYDEMAKYDLPASINFILNKTGQEQVYYVGHSQGTTIGFIAFSQIPELAKRIKMFFALGPVASVAFCTSPMAKLGRLPDHLIKDLFGDKEFLPQSAFLKWLGTHVCTHVILKELCGNLCFLLCGFNERNLNMSRVDVYTTHSPAGTSVQNMLHWSQAVKFQKFQAFDWGSSAKNYFHYNQSYPPTYNVKDMLVPTAVWSGGHDWLADVYDVNILLTQITNLVFHESIPEWEHLDFIWGLDAPWRLYNKIINLMRKYQ

SEQ ID NO: 1130 - protein, 399 aa, Homo sapiens; identical to SEQ ID NO: 1128

SEQ ID NO: 1131 - protein, 343 aa, Homo sapiens
MACLEFVPFDVQMCLEFLPSGPKPVVFLQHGLLADSSNWVTNLANSSLGFILADAGFDVWMGNSRGNTWSRKHKTLSVSQDEFWAFSYDEMAKYDLPASINFILNKTGQEQVYYVGHSQGTTIGFIAFSQIPELAKRIKMFFALGPVASVAFCTSPMAKLGRLPDHLIKDLFGDKEFLPQSAFLKWLGTHVCTHVILKELCGNLCFLLCGFNERNLNMSRVDVYTTHSPAGTSVQNMLHWSQAVKFQKFQAFDWGSSAKNYFHYNQSYPPTYNVKDMLVPTAVWSGGHDWLADVYDVNILLTQITNLVFHESIPEWEHLDFIWGLDAPWRLYNKIINLMRKYQ

SEQ ID NO: 1132 - protein, 401 aa, Homo sapiens
MACLEFVPFDVQMCLEFLPSGEFVVLLTSGVQLQTFTVSVTDLKGGASGVVRSSRWVRGFTDFRSKAVDLCGPKPVVFLQHGLLADSSNWVTNLANSSLGFILADAGFDVWMGNSRGNTWSRKHKTLSVSQDEFWAFRVPFLDYSYDEMAKYDLPASINFILNKTGQEQVYYVGHSQGTTIGFIAFSQIPELAKRIKMFFALGPVASVAFCTSPMAKLGRLPDHLIKDLFGDKEFLPQSAFLKWLGTHVCTHVILKELCGNLCFLLCGFNERNLNMSRVDVYTTHSPAGTSVQNMLHWSQAVKFQKFQAFDWGSSAKNYFHYNQSYPPTYNVKDMLVPTAVWSGGHDWLADVYDVNILLTQITNLVFHESIPEWEHLDFIWGLDAPWRLYNKIINLMRKYQ

SEQ ID NO: 1133 - protein, 290 aa, Homo sapiens
MKMRFLGLVVCLVLWTLHSEGSGGKLTAVDPETNMNVSEIISYWGFPSEEYLVETEDGYILCLNRIPHGRKNHSDKGPKPVVFLQHGLLADSSNWVTNLANSSLGFILADAGFDVWMGNSRGNTWSRKHKTLSVSQDEFWAFSYDEMAKYDLPASINFILNKTGQEQVYYVGHSQGTTIGFIAFSQIPELAKRIKMFFALGPVASVAFCTSPMAKLGRLPDHLIKDLFGDKEFLPQSAFLKWLGTHVCTHVILKELCGNLCFLLCGFNERNLNMSRVDVYTTHSPAGTSV

SEQ ID NO: 1134 - protein, 399 aa, Homo sapiens; identical to SEQ ID NO: 1128

SEQ ID NO: 1135 - protein, 28 aa, Homo sapiens
LCFLLCGFNERNLNMAVKFQKFQAFDWG

SEQ ID NO: 1136 - protein, 399 aa, Homo sapiens; identical to SEQ ID NO: 1128

SEQ ID NO: 1137 - protein, 136 aa, Homo sapiens
MKMRFLGLVVCLVLWTLHSEGSGGKLTAVDPETNMNVSEIISYWGFPSEEYLVETEDGYILCLNRIPHGRKNHSDKGPKPVVFLQHGLLADSSNWVTNLANSSLGFILADAGFDVWMGNSRGNTWSRKHVTLEPGC

SEQ ID NO: 1138 - protein, 475 aa, Homo sapiens
MESKALLVLTLAVWLQSLTASRGGVAAADQRRDFIDIESKFALRTPEDTAEDTCHLIPGVAESVATCHFNHSSKTFMVIHGWTVTGMYESWVPKLVAALYKREPDSNVIVVDWLSRAQEHYPVSAGYTKLVGQDVARFINWMEEEFNYPLDNVHLLGYSLGAHAAGIAGSLTNKKVNRITGLDPAGPNFEYAEAPSRLSPDDADFVDVLHTFTRGSPGRSIGIQKPVGHVDIYPNGGTFQPGCNIGEAIRVIAERGLGDVDQLVKCSHERSIHLFIDSLLNEENPSKAYRCSSKEAFEKGLCLSCRKNRCNNLGYEINKVRAKRSSKMYLKTRSQMPYKVFHYQVKIHFSGTESETHTNQAFEISLYGTVAESENIPFTLPEVSTNKTYSFLIYTEVDIGELLMLKLKWKSDSYFSWSDWWSSPGFAIQKIRVKAGETQKKVIFCSREKVSHLQKGKAPAVFVKCHDKSLNKKSG

SEQ ID NO: 1139 - protein, 115 aa, Homo sapiens
MVIHGWTVTGMYESWVPKLVAALYKREPDSNVIVVDWLSRAQEHYPVSAGYTKLVGQDVARFINWMEEEFNYPLDNVHLLGYSLGAHAAGIAGSLTNKKVNRITGLDPAGPNFEY

SEQ ID NO: 1140 - protein, 106 aa, Homo sapiens
MESKALLVLTLAVWLQSLTASRGGVAAADQRRDFIDIESKFALRTPEDTAEDTCHLIPGVAESVATCHFNHSSKTFMVIHGWTVTGMYESWVPKLVAALYKREPDS

SEQ ID NO: 1141 - protein, 130 aa, Homo sapiens
MESKALLVLTLAVWLQSLTASRGGVAAADQRRDFIDIESKFALRTPEDTAEDTCHLIPGVAESVATCHFNHSSKTFMVIHGWTVTGMYESWVPKLVAALYKREPDSNVIVVDWLSRAQEHYPVSAGYTKL

SEQ ID NO: 1142 - protein, 461 aa, Homo sapiens
MESKALLVLTLAAADQRRDFIDIESKFALRTPEDTAEDTCHLIPGVAESVATCHFNHSSKTFMVIHGWTVTGMYESWVPKLVAALYKREPDSNVIVVDWLSRAQEHYPVSAGYTKLVGQDVARFINWMEEEFNYPLDNVHLLGYSLGAHAAGIAGSLTNKKVNRITGLDPAGPNFEYAEAPSRLSPDDADFVDVLHTFTRGSPGRSIGIQKPVGHVDIYPNGGTFQPGCNIGEAIRVIAERGLGDVDQLVKCSHERSIHLFIDSLLNEENPSKAYRCSSKEAFEKGLCLSCRKNRCNNLGYEINKVRAKRSSKMYLKTRSQMPYKVFHYQVKIHFSGTESETHTNQAFEISLYGTVAESENIPFTLPEVSTNKTYSFLIYTEVDIGELLMLKLKWKSDSYFSWSDWWSSPGFAIQKIRVKAGETQKKVIFCSREKVSHLQKGKAPAVFVKCHDKSLNKKSG

SEQ ID NO: 1143 - protein, 275 aa, Homo sapiens
MVIHGWTVTGMYESWVPKLVAALYKREPDSNVIVVDWLSRAQEHYPVSAGYTKLVGQDVARFINWMEEEFNYPLDNVHLLGYSLGAHAAGIAGSLTNKKVNRITGLDPAGPNFEYAEAPSRLSPDDADFVDVLHTFTRGSPGRSIGIQKPVGHVDIYPNGGTFQPGCNIGEAIRVIAERGLGDVDQLVKCSHERSIHLFIDSLLNEENPSKAYRCSSKEAFEKGLCLSCRKNRCNNLGYEINKVRAKRSSKMYEDSFSDALQSLPLPSKDSFFWD

SEQ ID NO: 1144 - protein, 37 aa, Homo sapiens
LLGDFFRKSKEKIGKEFKRIVQRIKDFLRNLVPRTES

SEQ ID NO: 1145 - protein, 692 aa, Homo sapiens
MGPWGWKLRWTVALLLAAAGTAVGDRCERNEFQCQDGKCISYKWVCDGSAECQDGSDESQETCLSVTCKSGDFSCGGRVNRCIPQFWRCDGQVDCDNGSDEQGCLTLCEGPNKFKCHSGECITLDKVCNMARDCRDWSDEPIKECGTNECLDNNGGCSHVCNDLKIGYECLCPDGFQLVAQRRCEDIDECQDPDTCSQLCVNLEGGYKCQCEEGFQLDPHTKACKAVGSIAYLFFTNRHEVRKMTLDRSEYTSLIPNLRNVVALDTEVASNRIYWSDLSQRMICSTQLDRAHGVSSYDTVISRDIQAPDGLAVDWIHSNIYWTDSVLGTVSVADTKGVKRKTLFRENGSKPRAIVVDPVHGFMYWTDWGTPAKIKKGGLNGVDIYSLVTENIQWPNGITLDLLSGRLYWVDSKLHSISSIDVNGGNRKTILEDEKRLAHPFSLAVFEDKVFWTDIINEAIFSANRLTGSDVNLLAENLLSPEDMVLFHNLTQPRGVNWCERTTLSNGGCQYLCLPAPQINPHSPKFTCACPDGMLLARDMRSCLTEAEAAVATQETSTVRLKVSSTAVRTQHTTTRPVPDTSRLPGATPGLTTVEIVTMSHQALGDVAGRGNEKKPSSVRALSIVLPIVLLVFLCLGVFLLWKNWRLKNINSINFDNPVYQKTTEDEVHICHNQDGYSYPSRQMVSLEDDVA

SEQ ID NO: 1146 - protein, 819 aa, Homo sapiens
MGPWGWKLRWTVALLLAAAGTAVGDRCERNEFQCQDGKCISYKWVCDGSAECQDGSDESQETCSPKTCSQDEFRCHDGKCISRQFVCDSDRDCLDGSDEASCPVLTCGPASFQCNSSTCIPQLWACDNDPDCEDGSDEWPQRCRGLYVFQGDSSPCSAFEFHCLSGECIHSSWRCDGGPDCKDKSDEENCAVATCRPDEFQCSDGNCIHGSRQCDREYDCKDMSDEVGCVNVTLCEGPNKFKCHSGECITLDKVCNMARDCRDWSDEPIKECGTNECLDNNGGCSHVCNDLKIGYECLCPDGFQLVAQRRCEDIDECQDPDTCSQLCVNLEGGYKCQCEEGFQLDPHTKACKAVGSIAYLFFTNRHEVRKMTLDRSEYTSLIPNLRNVVALDTEVASNRIYWSDLSQRMICSTQLDRAHGVSSYDTVISRDIQAPDGLAVDWIHSNIYWTDSVLGTVSVADTKGVKRKTLFRENGSKPRAIVVDPVHGFMYWTDWGTPAKIKKGGLNGVDIYSLVTENIQWPNGITLDLLSGRLYWVDSKLHSISSIDVNGGNRKTILEDEKRLAHPFSLAVFEDKVFWTDIINEAIFSANRLTGSDVNLLAENLLSPEDMVLFHNLTQPRGVNWCERTTLSNGGCQYLCLPAPQINPHSPKFTCACPDGMLLARDMRSCLTEAEAAVATQETSTVRLKVSSTAVRTQHTTTRPVPDTSRLPGATPGLTTVEIVTMSHQALGDVAGRGNEKKPSSVRALSIVLPIVLLVFLCLGVFLLWKNWRLKNINSINFDNPVYQKTTEDEVHICHNQDGYSYPSRQMVSLEDDVA

SEQ ID NO: 1147 - protein, 682 aa, Homo sapiens
MGPWGWKLRWTVALLLAAAGTAVGDRCERNEFQCQDGKCISYKWVCDGSAECQDGSDESQETCLSVTCKSGDFSCGGRVNRCIPQFWRCDGQVDCDNGSDEQGCPVATCRPDEFQCSDGNCIHGSRQCDREYDCKDMSDEVGCVNVTLCEGPNKFKCHSGECITLDKVCNMARDCRDWSDEPIKECGTNECLDNNGGCSHVCNDLKIGYECLCPDGFQLVAQRRCEDIDECQDPDTCSQLCVNLEGGYKCQCEEGFQLDPHTKACKAVGSIAYLFFTNRHEVRKMTLDRSEYTSLIPNLRNVVALDTEVASNRIYWSDLSQRMICSTQLDRAHGVSSYDTVISRDIQAPDGLAVDWIHSNIYWTDSVLGTVSVADTKGVKRKTLFRENGSKPRAIVVDPVHGFMYWTDWGTPAKIKKGGLNGVDIYSLVTENIQWPNGITLDLLSGRLYWVDSKLHSISSIDVNGGNRKTILEDEKRLAHPFSLAVFEDKVFWTDIINEAIFSANRLTGSDVNLLAENLLSPEDMVLFHNLTQPREAEAAVATQETSTVRLKVSSTAVRTQHTTTRPVPDTSRLPGATPGLTTVEIVTMSHQALGDVAGRGNEKKPSSVRALSIVLPIVLLVFLCLGVFLLWKNWRLKNINSINFDNPVYQKTTEDEVHICHNQDGYSYPSRQMVSLEDDVA

SEQ ID NO: 1148 - protein, 858 aa, Homo sapiens
MGPWGWKLRWTVALLLAAAGTAVGDRCERNEFQCQDGKCISYKWVCDGSAECQDGSDESQETCLSVTCKSGDFSCGGRVNRCIPQFWRCDGQVDCDNGSDEQGCPPKTCSQDEFRCHDGKCISRQFVCDSDRDCLDGSDEASCPVLTCGPASFQCNSSTCIPQLWACDNDPDCEDGSDEWPQRCRGLYVFQGDSSPCSAFEFHCLSGECIHSSWRCDGGPDCKDKSDEENCAVATCRPDEFQCSDGNCIHGSRQCDREYDCKDMSDEVGCVNVTLCEGPNKFKCHSGECITLDKVCNMARDCRDWSDEPIKECGTNECLDNNGGCSHVCNDLKIGYECLCPDGFQLVAQRRCEDIDECQDPDTCSQLCVNLEGGYKCQCEEGFQLDPHTKACKAVGSIAYLFFTNRHEVRKMTLDRSEYTSLIPNLRNVVALDTEVASNRIYWSDLSQRMICSTQLDRAHGVSSYDTVISRDIQAPDGLAVDWIHSNIYWTDSVLGTVSVADTKGVKRKTLFRENGSKPRAIVVDPVHGFMYWTDWGTPAKIKKGGLNGVDIYSLVTENIQWPNGITLDLLSGRLYWVDSKLHSISSIDVNGGNRKTILEDEKRLAHPFSLAVFEDKVFWTDIINEAIFSANRLTGSDVNLLAENLLSPEDMVLFHNLTQPRGVNWCERTTLSNGGCQYLCLPAPQINPHSPKFTCACPDGMLLARDMRSCLTEAEAAVATQETSTVRLKVSSTAVRTQHTTTRPVPDTSRLPGATPGLTTVEIVTMSHQALGDVAGRGNEKKPSSVRALSIVLPIVLLVFLCLGVFLLWKNWRLKNINSINFDNPVYQKTTEDEVHICHNQDGYSYPSMVSLEDDVA

SEQ ID NO: 1149 - protein, 860 aa, Homo sapiens [sequence omitted]

SEQ ID NO: 1150 - protein, 739 aa, Homo sapiens
MGPWGWKLRWTVALLLAAAGTAVGDRCERNDFQCNSSTCIPQLWACDNDPDCEDGSDEWPQRCRGLYVFQGDSSPCSAFEFHCLSGECIHSSWRCDGGPDCKDKSDEENCAVATCRPDEFQCSDGNCIHGSRQCDREYDCKDMSDEVGCVNVTLCEGPNKFKCHSGECITLDKVCNMARDCRDWSDEPIKECGTNECLDNNGGCSHVCNDLKIGYECLCPDGFQLVAQRRCEDIDECQDPDTCSQLCVNLEGGYKCQCEEGFQLDPHTKACKAVGSIAYLFFTNRHEVRKMTLDRSEYTSLIPNLRNVVALDTEVASNRIYWSDLSQRMICSTQLDRAHGVSSYDTVISRDIQAPDGLAVDWIHSNIYWTDSVLGTVSVADTKGVKRKTLFRENGSKPRAIVVDPVHGFMYWTDWGTPAKIKKGGLNGVDIYSLVTENIQWPNGITLDLLSGRLYWVDSKLHSISSIDVNGGNRKTILEDEKRLAHPFSLAVFEDKVFWTDIINEAIFSANRLTGSDVNLLAENLLSPEDMVLFHNLTQPRGVNWCERTTLSNGGCQYLCLPAPQINPHSPKFTCACPDGMLLARDMRSCLTEAEAAVATQETSTVRLKVSSTAVRTQHTTTRPVPDTSRLPGATPGLTTVEIVTMSHQALGDVAGRGNEKKPSSVRALSIVLPIVLLVFLCLGVFLLWKNWRLKNINSINFDNPVYQKTTEDEVHICHNQDGYSYPSRQMVSLEDDVA

SEQ ID NO: 1151 - protein, 945 aa, Homo sapiens
  VARIANT 1: note = MOD_RES - Any amino acid
XGRPGVPPRFLSQRRRQVPGPRSRLRDIHESPSVILGPPGEVPGFRCALWRHLRPHLVLGGALAPPAPIKFTEGPPATLKASVPYEVETLPQNLPAPPWSAAEIFSHVGDRCERNEFQCQDGKCISYKWVCDGSAECQDGSDESQETCLSVTCKSGDFSCGGRVNRCIPQFWRCDGQVDCDNGSDEQGCPPKTCSQDEFRCHDGKCISRQFVCDSDRDCLDGSDEASCPVLTCGPASFQCNSSTCIPQLWACDNDPDCEDGSDEWPQRCRGLYVFQGDSSPCSAFEFHCLSGECIHSSWRCDGGPDCKDKSDEENCAVATCRPDEFQCSDGNCIHGSRQCDREYDCKDMSDEVGCVNVTLCEGPNKFKCHSGECITLDKVCNMARDCRDWSDEPIKECGTNECLDNNGGCSHVCNDLKIGYECLCPDGFQLVAQRRCEDIDECQDPDTCSQLCVNLEGGYKCQCEEGFQLDPHTKACKAVGSIAYLFFTNRHEVRKMTLDRSEYTSLIPNLRNVVALDTEVASNRIYWSDLSQRMICSTQLDRAHGVSSYDTVISRDIQAPDGLAVDWIHSNIYWTDSVLGTVSVADTKGVKRKTLFRENGSKPRAIVVDPVHGFMYWTDWGTPAKIKKGGLNGVDIYSLVTENIQWPNGITLDLLSGRLYWVDSKLHSISSIDVNGGNRKTILEDEKRLAHPFSLAVFEDKVFWTDIINEAIFSANRLTGSDVNLLAENLLSPEDMVLFHNLTQPRGVNWCERTTLSNGGCQYLCLPAPQINPHSPKFTCACPDGMLLARDMRSCLTEAEAAVATQETSTVRLKVSSTAVRTQHTTTRPVPDTSRLPGATPGLTTVEIVTMSHQALGDVAGRGNEKKPSSVRALSIVLPIVLLVFLCLGVFLLWKNWRLKNINSINFDNPVYQKTTEDEVHICHNQDGYSYPSRQMVSLEDDVA

SEQ ID NO: 1152 - protein, 141 aa, Homo sapiens
MEMLQGLLLLLLLSMGGAWASREPLRPWCHPINAILAVEKEGCPVCITVNTTICAGYCPTMMRVLQAVLPPLPQVVCTYRDVRFESIRLPGCPRGVDPVVSFPVALSCRCGPCRRSTSDCGGPKDHPLTCDHPQLSGLLFL

SEQ ID NO: 1153 - protein, 179 aa, Homo sapiens
MGRPGLGAAVSDLGEAVSLSQGLLLLLLLSMGGAWASREPLRPWCHPINAILAVEKEGCPVCITVNTTICAGYCPTMMRVLQAVLPPLPQVVCTYRDVRFESIRLPGCPRGVDPVVSFPVALSCRCGPCRRSTSDCGGPKDHPLTCDHPQQASSSSKDPPRSLPSPSRLLEPDTPILPQ

SEQ ID NO: 1154 - protein, 97 aa, Homo sapiens
MQLGTGLLLAAVLSLQLAAAEAIWCHQCTGFGGCSHGSRCLRDSTHCVTTATRVLSNTEDLPLVTKMCHIGCPDIPSLGLGPYVSIACCQTSLCNHD

SEQ ID NO: 1155 - protein, 1010 aa, Homo sapiens
MGAYARASGVCARGCLDSAGPWTMSRALRPPLPPLCFFLLLLAAAGARAGGYETCPTVQPNMLNVHLLPHTHDDVGWLKTVDQYFYGIKNDIQHAGVQYILDSVISALLADPTRRFIYVEIAFFSRWWHQQTNATQEVVRDLVRQGRLEFANGGWVMNDEAATHYGAIVDQMTLGLRFLEDTFGNDGRPRVAWHIDPFGHSREQASLFAQMGFDGFFFGRLDYQDKWVRMQKLEMEQVWRASTSLKPPTADLFTGVLPNGYNPPRNLCWDVLCVDQPLVEDPRSPEYNAKELVDYFLNVATAQGRYYRTNHTVMTMGSDFQYENANMWFKNLDKLIRLVNAQAKGSSVHVLYSTPACYLWELNKANLTWSVKHDDFFPYADGPHQFWTGYFSSRPALKRYERLSYNFLQVCNQLEALVGLAANVGPYGSGDSAPLNEAMAVLQHHDAVSGTSRQHVANDYARQLAAGWGPCEVLLSNALARLRGFKDHFTFCQQLNISICPLSQTAARFQVIVYNPLGRKVNWMVRLPVSEGVFVVKDPNGRTVPSDVVIFPSSDSQAHPPELLFSASLPALGFSTYSVAQVPRWKPQARAPQPIPRRSWSPALTIENEHIRATFDPDTGLLMEIMNMNQQLLLPVRQTFFWYNASIGDNESDQASGAYIFRPNQQKPLPVSRWAQIHLVKTPLVQEVHQNFSAWCSQVVRLYPGQRHLELEWSVGPIPVGDTWGKEVISRFDTPLETKGRFYTDSNGREILERRRDYRPTWKLNQTEPVAGNYYPVNTRIYITDGNMQLTVLTDRSQGGSSLRDGSLELMVHRRLLKDDGRGVSEPLMENGSGAWVRGRHLVLLDTAQAAAAGHRLLAEQEVLAPQVVLAPGGGAAYNLGAPPRTQFSGLRRDLPPSVHLLTLASWGPEMVLLRLEHQFAVGEDSGRNLSAPVTLNLRDLFSTFTITRLQETTLVANQLREAASRLKWTTNTGPTPHQTPYQLDPANITLEPMEIRTFLASVQWKEVDG

SEQ ID NO: 1156 - protein, 187 aa, Homo sapiens
  VARIANT 1: note = MOD_RES - Any amino acid
XRGGGDSYGVLLSNALARLRGFKDHFTFCQQLNISICPLSQTAARFQVIVYNPLGRKVNWMVRLPVSEGVFVVKDPNGRTVPSDVVIFPSSDSQAHPPELLFSASLPALGFSTYSVAQVPRWKPQARAPQPIPRRSWSPALTIENEHIRATFDPDTGLLMEIMNMNQQLLLPVRQTFFWYNASIGDN

SEQ ID NO: 1157 - protein, 1011 aa, Homo sapiens
MGAYARASGVCARGCLDSAGPWTMSRALRPPLPPLCFFLLLLAAAGARAGGYETCPTVQPNMLNVHLLPHTHDDVGWLKTVDQYFYGIKNDIQHAGVQYILDSVISALLADPTRRFIYVEIAFFSRWWHQQTNATQEVVRDLVRQGRLEFANGGWVMNDEAATHYGAIVDQMTLGLRFLEDTFGNDGRPRVAWHIDPFGHSREQASLFAQMGFDGFFFGRLDYQDKWVRMQKLEMEQVWRASTSLKPPTADLFTGVLPNGYNPPRNLCWDVLCVDQPLVEDPRSPEYNAKELVDYFLNVATAQGRYYRTNHTVMTMGSDFQYENANMWFKNLDKLIRLVNAQQAKGSSVHVLYSTPACYLWELNKANLTWSVKHDDFFPYADGPHQFWTGYFSSRPALKRYERLSYNFLQVCNQLEALVGLAANVGPYGSGDSAPLNEAMAVLQHHDAVSGTSRQHVANDYARQLAAGWGPCEVLLSNALARLRGFKDHFTFCQQLNISICPLSQTAARFQVIVYNPLGRKVNWMVRLPVSEGVFVVKDPNGRTVPSDVVIFPSSDSQAHPPELLFSASLPALGFSTYSVAQVPRWKPQARAPQPIPRRSWSPALTIENEHIRATFDPDTGLLMEIMNMNQQLLLPVRQTFFWYNASIGDNESDQASGAYIFRPNQQKPLPVSRWAQIHLVKTPLVQEVHQNFSAWCSQVVRLYPGQRHLELEWSVGPIPVGDTWGKEVISRFDTPLETKGRFYTDSNGREILERRRDYRPTWKLNQTEPVAGNYYPVNTRIYITDGNMQLTVLTDRSQGGSSLRDGSLELMVHRRLLKDDGRGVSEPLMENGSGAWVRGRHLVLLDTAQAAAAGHRLLAEQEVLAPQVVLAPGGGAAYNLGAPPRTQFSGLRRDLPPSVHLLTLASWGPEMVLLRLEHQFAVGEDSGRNLSAPVTLNLRDLFSTFTITRLQETTLVANQLREAASRLKWTTNTGPTPHQTPYQLDPANITLEPMEIRTFLASVQWKEVDG

SEQ ID NO: 1158 - protein, 950 aa, Homo sapiens
MLNVHLLPHTHDDVGWLKTVDQYFYGIKNDIQHAGVQYILDSVISALLADPTRRFIYVEIAFFSRWWHQQTNATQEVVRDLVRQGRLEFANGGWVMNDEAATHYGAIVDQMTLGLRFLEDTFGNDGRPRVAWHIDPFGHSREQASLFAQMGFDGFFFGRLDYQDKWVRMQKLEMEQVWRASTSLKPPTADLFTGVLPNGYNPPRNLCWDVLCVDQPLVEDPRSPEYNAKELVDYFLNVATAQGRYYRTNHTVMTMGSDFQYENANMWFKNLDKLIRLVNAQQAKGSSVHVLYSTPACYLWELNKANLTWSVKHDDFFPYADGPHQFWTGYFSSRPALKRYERLSYNFLQVCNQLEALVGLAANVGPYGSGDSAPLNEAMAVLQHHDAVSGTSRQHVANDYARQLAAGWGPCEVLLSNALARLRGFKDHFTFCQQLNISICPLSQTAARFQVIVYNPLGRKVNWMVRLPVSEGVFVVKDPNGRTVPSDVVIFPSSDSQAHPPELLFSASLPALGFSTYSVAQVPRWKPQARAPQPIPRRSWSPALTIENEHIRATFDPDTGLLMEIMNMNQQLLLPVRQTFFWYNASIGDNESDQASGAYIFRPNQQKPLPVSRWAQIHLVKTPLVQEVHQNFSAWCSQVVRLYPGQRHLELEWSVGPIPVGDTWGKEVISRFDTPLETKGRFYTDSNGREILERRRDYRPTWKLNQTEPVAGNYYPVNTRIYITDGNMQLTVLTDRSQGGSSLRDGSLELMVHRRLLKDDGRGVSEPLMENGSGAWVRGRHLVLLDTAQAAAAGHRLLAEQEVLAPQVVLAPGGGAAYNLGAPPRTQFSGLRRDLPPSVHLLTLASWGPEMVLLRLEHQFAVGEDSGRNLSAPVTLNLRDLFSTFTITRLQETTLVANQLREAASRLKWTTNTGPTPHQTPYQLDPANITLEPMEIRTFLASVQWKEVDG

SEQ ID NO: 1159 - protein, 293 aa, Homo sapiens
MGFPAAALLCALCCGLLAPAARAGYSEERCSWRGSGLTQEPGSVGQLALACAEGAVEWLYPAGALRLTLGGPDPRARPGIACLRPVRPFAGAQVFAERAGGALELLLAEGPGPAGGRCVRWGPRERRALFLQATPHQDISRRVAAFRFELREDGRPELPPQAHGLGVDGACRPCSDAELLLAACTSDFVIHGIIHGVTHDVELQESVITVVAARVLRQTPPLFQAGRSGDQGLTSIRTPLRCGVHPGPGTFLFMGWSRFGEARLGCAPRFQEFRRAYEAARAAHLHPCEVALH

SEQ ID NO: 1160 - protein, 293 aa, Homo sapiens; identical to SEQ ID NO: 1159

SEQ ID NO: 1161 - protein, 750 aa, Homo sapiens
MLRAKNQLFLLSPHYLRQVKESSGSRLIQQRLLHQQQPLHPEWAALAKKQLKGKNPEDLIWHTPEGISIKPLYSKRDTMDLPEELPGVKPFTRGPYPTMYTFRPWTIRQYAGFSTVEESNKFYKDNIKAGQQGLSVAFDLATHRGYDSDNPRVRGDVGMAGVAIDTVEDTKILFDGIPLEKMSVSMTMNGAVIPVLANFIVTGEEQGVPKEKLTGTIQNDILKEFMVRNTYIFPPEPSMKIIADIFEYTAKHMPKFNSISISGYHMQEAGADAILELAYTLADGLEYSRTGLQAGLTIDEFAPRLSFFWGIGMNFYMEIAKMRAGRRLWAHLIEKMFQPKNSKSLLLRAHCQTSGWSLTEQDPYNNIVRTAIEAMAAVFGGTQSLHTNSFDEALGLPTVKSARIARNTQIIIQEESGIPKVADPWGGSYMMECLTNDVYDAALKLINEIEEMGGMAKAVAEGIPKLRIEECAARRQARIDSGSEVIVGVNKYQLEKEDAVEVLAIDNTSVRNRQIEKLKKIKSSRDQALAERCLAALTECAASGDGNILALAVDASRARCTVGEITDALKKVFGEHKANDRMVSGAYRQEFGESKEITSAIKRVHKFMEREGRRPRLLVAKMGQDGHDRGAKVIATGFADLGFDVDIGPLFQTPREVAQQAVDADVHAVGISTLAAGHKTLVPELIKELNSLGRPDILVMCGGVIPPQDYEFLFEVGVSNVFGPGTRIPKAAVQVLDDIEKCLEKKQQSV

SEQ ID NO: 1162 - protein, 197 aa, Homo sapiens
TRYLARCTVGEITDALKKVFGEHKANDRMVSGAYRQEFGESKEITSAIKRVHKFMEREGRRPRLLVAKMGQDGHDRGAKVIATGFADLGFDVDIGPLFQTPREVAQQAVDADVHAVGISTLAAGHKTLVPELIKELNSLGRPDILVMCGGVIPPQDYEFLFEVGVSNVFGPGTRIPKAAVQVLDDIEKCLEKKQQSV

SEQ ID NO: 1163 - protein, 894 aa, Homo sapiens
MILLAVLFLCFISSYSASVKGHTTGLSLNNDRLYKLTYSTEVLLDRGKGKLQDSVGYRISSNVDVALLWRNPDGDDDQLIQITMKDVNVENVNQQRGEKSIFKGKSPSKIMGKENLEALQRPTLLHLIHGKVKEFYSYQNEAVAIENIKRGLASLFQTQLSSGTTNEVDISGNCKVTYQAHQDKVIKIKALDSCKIARSGFTTPNQVLGVSSKATSVTTYKIEDSFVIAVLAEETHNFGLNFLQTIKGKIVSKQKLELKTTEAGPRLMSGKQAAAIIKAVDSKYTAIPIVGQVFQSHCKGCPSLSELWRSTRKYLQPDNLSKAEAVRNFLAFIQHLRTAKKEEILQILKMENKEVLPQLVDAVTSAQTSDSLEAILDFLDFKSDSSIILQERFLYACGFASHPNEELLRALISKFKGSIGSSDIRETVMIITGTLVRKLCQNEGCKLKAVVEAKKLILGGLEKAEKKEDTRMYLLALKNALLPEGIPSLLKYAEAGEGPISHLATTALQRYDLPFITDEVKKTLNRIYHQNRKVHEKTVRTAAAAIILNNNPSYMDVKNILLSIGELPQEMNKYMLAIVQDILRFEMPASKIVRRVLKEMVAHNYDRFSRSGSSSAYTGYIERSPRSASTYSLDILYSGSGILRRSNLNIFQYIGKAGLHGSQVVIEAQGLEALIAATPDEGEENLDSYAGMSAILFDVQLRPVTFFNGYSDLMSKMLSASGDPISVVKGLILLIDHSQELQLQSGLKANIEVQGGLAIDISGAMEFSLWYRESKTRVKNRVTVVITTDITVDSSFVKAGLETSTETEAGLEFISTVQFSQYPFLVCMQMDKDEAPFRQFEKKYERLSTGRGYVSQKRKESVLAGCEFPLHQENSEMCKVVFAPQPDSTSSGWF

SEQ ID NO: 1164 - protein, 894 aa, Homo sapiens; identical to SEQ ID NO: 1163

SEQ ID NO: 1165 - protein, 178 aa, Homo sapiens
MARAPLRPENTIVRGSANQCQDTYRAEELTGHTTGLSLNNDRLYKLTYSTEVLLDRGKGKLQDSVGYRISSNVDVALLWRNPDGDDDQLIQITMKDVNVENVNQQRGEKSIFKGKSPSKIMGKENLEALQRPTLLHLIHGKVKEFYSYQNEAVAIENIKRGLASLFQTQLSSGTTNEV

SEQ ID NO: 1166 - protein, 516 aa, Homo sapiens
MILLAVLFLCFISSYSASVKGHTTGLSLNNDRLYKLTYSTEVLLDRGKGKLQDSVGYRISSNVDVALLWRNPDGDDDQLIQITMKDVNVENVNQQRGEKSIFKGKSPSKIMGKENLEALQRPTLLHLIHGKVKEFYSYQNEAVAIENIKRGLASLFQTQLSSGTTNEVDISGNCKVTYQAHQDKVIKIKALDSCKIARSGFTTPNQVLGVSSKATSVTTYKIEDSFVIAVLAEETHNFGLNFLQTIKGKIVSKQKLELKTTEAGPRLMSGKQAAAIIKAVDSKYTAIPIVGQVFQSHCKGCPSLSELWRSTRKYLQPDNLSKAEAVRNFLAFIQHLRTAKKEEILQILKMENKEVLPQLVDAVTSAQTSDSLEAILDFLDFKSDSSIILQERFLYACGFASHPNEELLRALISKFKGSIGSSDIRETVMIITGTLVRKLCQNEGCKLKAVVEAKKLILGGLEKAEKKEDTRMYLLALKNALLPEGIPSLLKYAEAGEGPISHLATTALQRYDLFHN

SEQ ID NO: 1167 - protein, 1256 aa, Homo sapiens
MLFKLLQRQTYTCLSHRYGLYVCFLGVVVTIVSAFQFGEVVLEWSRDQYHVLFDSYRDNIAGKSFQNRLCLPMPIDVVYTWVNGTDLELLKELQQVREQMEEEQKAMREILGKNTTEPTKKSEKQLECLLTHCIKVPMLVLDPALPANITLKDLPSLYPSFHSASDIFNVAKPKNPSTNVSVVVFDSTKDVEDAHSGLLKGNSRQTVWRGYLTTDKEVPGLVLMQDLAFLSGFPPTFKETNQLKTKLPENLSSKVKLLQLYSEASVALLKLNNPKDFQELNKQTKKNMTIDGKELTISPAYLLWDLSAISQSKQDEDISASRFEDNEELRYSLRSIERHAPWVRNIFIVTNGQIPSWLNLDNPRVTIVTHQDVFRNLSHLPTFSSPAIESHIHRIEGLSQKFIYLNDDVMFGKDVWPDDFYSHSKGQKVYLTWPVPNCAEGCPGSWIKDGYCDKACNNSACDWDGGDCSGNSGGSRYIAGGGGTGSIGVGQPWQFGGGINSVSYCNQGCANSWLADKFCDQACNVLSCGFDAGDCGQDHFHELYKVILLPNQTHYIIPKGECLPYFSFAEVAKRGVEGAYSDNPIIRHASIANKWKTIHLIMHSGMNATTIHFNLTFQNTNDEEFKMQITVEVDTREGPKLNSTAQKGYENLVSPITLLPEAEILFEDIPKEKRFPKFKRHDVNSTRRAQEEVKIPLVNISLLPKDAQLSLNTLDLQLEHGDITLKGYNLSKSALLRSFLMNSQHAKIKNQAIITDETNDSLVAPQEKQVHKSILPNSLGVSERLQRLTFPAVSVKVNGHDQGQNPPLDLETTARFRVETHTQKTIGGNVTKEKPPSLIVPLESQMTKEKKITGKEKENSRMEENAENHIGVTEVLLGRKLQHYTDSYLGFLPWEKKKYFQDLLDEEESLKTQLAYFTDSKNTGRQLKDTFADSLRYVNKILNSKFGFTSRKVPAHMPHMIDRIVMQELQDMFPEEFDKTSFHKVRHSEDMQFAFSYFYYLMSAVQPLNISQVFDEVDTDQSGVLSDREIRTLATRIHELPLSLQDLTGLEHMLINCSKMLPADITQLNNIPPTQESYYDPNLPPVTKSLVTNCKPVTDKIHKAYKDKNKYRFEIMGEEEIAFKMIRTNVSHVVGQLDDIRKNPRKFVCLNDNIDHNHKDAQTVKAVLRDFYESMFPIPSQFELPREYRNRFLHMHELQEWRAYRDKLKFWTHCVLATLIMFTIFSFFAEQLIALKRKIFPRRRIHKEASPNRIRV

SEQ ID NO: 1168 - protein, 490 aa, Homo sapiens
MLFKLLQRQTYTCLSHRYGLYVCFLGVVVTIVSAFQFGEVVLEWSRDQYHVLFDSYRDNIAGKSFQNRLCLPMPIDVVYTWVNGTDLELLKELQQVREQMEEEQKAMREILGKNTTEPTKKSEKQLECLLTHCIKVPMLVLDPALPANITLKDLPSLYPSFHSASDIFNVAKPKNPSTNVSVVVFDSTKDVEDAHSGLLKGNSRQTVWRGYLTTDKEVPGLVLMQDLAFLSGFPPTFKETNQLKTKLPENLSSKVKLLQLYSEASVALLKLNNPKDFQELNKQTKKNMTIDGKELTISPAYLLWDLSAISQSKQDEDISASRFEDNEELRYSLRSIERHAPWVRNIFIVTNGQIPSWLNLDNPRVTIVTHQDVFRNLSHLPTFSSPAIESHIHRIEGLSQKFIYLNDDVMFGKDVWPDDFYSHSKGQKVYLTWPVPNCAEGCPGSWIKDGYCDKACNNSACDWDGGDCSGKDVLNCNSFIFMEYFLLNHY

SEQ ID NO: 1169 - protein, 534 aa, Homo sapiens
MATALMAVVLRAAAVAPRLRGRGGTGGARRLSCGARRRAARGTSPGRRLSTAWSQPQPPPEEYAGADDVSQSPVAEEPSWVPSPRPPVPHESPEPPSGRSLVQRDIQAFLNQCGASPGEARHWLTQFQTCHHSADKPFAVIEVDEEVLKCQQGVSSLAFALAFLQRMDMKPLVVLGLPAPTAPSGCLSFWEAKAQLAKSCKVLVDALRHNAAAAVPFFGGGSVLRAAEPAPHASYGGIVSVETDLLQWCLESGSIPILCPIGETAARRSVLLDSLEVTASLAKALRPTKIIFLNNTGGLRDSSHKVLSNVNLPADLDLVCNAEWVSTKERQQMRLIVDVLSRLPHHSSAVITAASTLLTELFSNKGSGTLFKNAERMLRVRSLDKLDQGRLVDLVNASFGKKLRDDYLASLRPRLHSIYVSEGYNAAAILTMEPVLGGTPYLDKFVVSSSRQGQGSGQMLWECLRRDLQTLFWRSRVTNPINPWYFKHSDGSFSNKQWIFFWFGLADIRDSYELVNHAKGLPDSFHKPASDPGS

SEQ ID NO: 1170 - protein, 368 aa, Homo sapiens
MDMKPLVVLGLPAPTAPSGCLSFWEAKAQLAKSCKVLVDALRHNAAAAVPFFGGGSVLRAAEPAPHASYGGIVSVETDLLQWCLESGSIPILCPIGETAARRSVLLDSLEVTASLAKALRPTKIIFLNNTGGLRDSSHKVLSNVNLPADLDLVCNAEWVSTKERQQMRLIVDVLSRLPHHSSAVITAASTLLTELFSNKGSGTLFKNAERMLRVRSLDKLDQGRLVDLVNASFGKKLRDDYLASLRPRLHSIYVSEGYNAAAILTMEPVLGGTPYLDKFVVSSSRQGQGSGQMLWECLRRDLQTLFWRSRVTNPINPWYFKHSDGSFSNKQWIFFWFGLADIRDSYELVNHAKGLPDSFHKPASDPGS

SEQ ID NO: 1171 - protein, 395 aa, Homo sapiens
MPGRSCVALVLLAAAVSCAVAQHAPPWTEDCRKSTYPPSGPTYRGAVPWYTINLDLPPYKRWHELMLDKAPVLKVIVNSLKNMINTFVPSGKIMQVVDEKLPGLLGNFPGPFEEEMKGIAAVTDIPLGEIISFNIFYELFTICTSIVAEDKKGHLIHGRNMDFGVFLGWNINNDTWVITEQLKPLTVNLDFQRNNKTVFKASSFAGYVGMLTGFKPGLFSLTLNERFSINGGYLGILEWILGKKDVMWIGFLTRTVLENSTSYEEAKNLLTKTKILAPAYFILGGNQSGEGCVITRDRKESLDVYELDAKQGRWYVVQTNYDRWKHPFFLDDRRTPAKMCLNRTSQENISFETMYDVLSTKPVLNKLTVYTTLIDVTKGQFETYLRDCPDPCIGW

SEQ ID NO: 1172 - protein, 389 aa, Homo sapiens
MNCCIGLGEKARGSHRASYPSLSALFTEASILGFGSFAVKAQWTEDCRKSTYPPSGPTVFPAVIRYRGAVPWYTINLDLPPYKRWHELMLDKAPVPGLLGNFPGPFEEEMKGIAAVTDIPLGEIISFNIFYELFTICTSIVAEDKKGHLIHGRNMDFGVFLGWNINNDTWVITEQLKPLTVNLDFQRNNKTVFKASSFAGYVGMLTGFKPGLFSLTLNERFSINGGYLGILEWILGKKDVMWIGFLTRTVLENSTSYEEAKNLLTKTKILAPAYFILGGNQSGEGCVITRDRKESLDVYELDAKQGRWYVVQTNYDRWKHPFFLDDRRTPAKMCLNRTSQENISFETMYDVLSTKPVLNKLTVYTTLIDVTKGQFETYLRDCPDPCIGW

SEQ ID NO: 1173 - protein, 411 aa, Homo sapiens
MNCCIGLGEKARGSHRASYPSLSALFTEASILGFGSFAVKAQWTEDCRKSTYPPSGPTYRGAVPWYTINLDLPPYKRWHELMLDKAPVLKVIVNSLKNMINTFVPSGKIMQVVDEKLPGLLGNFPGPFEEEMKGIAAVTDIPLGEIISFNIFYELFTICTSIVAEDKKGHLIHGRNMDFGVFLGWNINNDTWVITEQLKPLTVNLDFQRNNKTVFKASSFAGYVGMLTGFKPGLFSLTLNERFSINGGYLGILEWILGKKDVMWIGFLTRTVLENSTSYEEAKNLLTKTKILAPAYFILGGNQSGEGCVITRDRKESLDVYELDAKQGRWYVVQTNYDRWKHPFFLDDRRTPAKMCLNRTSQENISFETMYDVLSTKPVLNKLTVYTTLIDVTKGQFETYLRDCPDPCIGW

SEQ ID NO: 1174 - protein, 305 aa, Homo sapiens
MLDKAPVLKVIVNSLKNMINTFVPSGKIMQVVDEKLPGLLGNFPGPFEEEMKGIAAVTDIPLGHLIHGRNMDFGVFLGWNINNDTWVITEQLKPLTVNLDFQRNNKTVFKASSFAGYVGMLTGFKPGLFSLTLNERFSINGGYLGILEWILGKKDVMWIGFLTRTVLENSTSYEEAKNLLTKTKILAPAYFILGGNQSGEGCVITRDRKESLDVYELDAKQGRWYVVQTNYDRWKHPFFLDDRRTPAKMCLNRTSQENISFETMYDVLSTKPVLNKLTVYTTLIDVTKGQFETYLRDCPDPCIGW

SEQ ID NO: 1175 - protein, 370 aa, Homo sapiens
MPGRSCVALVLLAAAVSCAVAQHAPPWTEDCRKSTYPPSGPTYRGAVPWYTINLDLPPYKRWHELMLDKAPVLKVIVNSLKNMINTFVPSGKIMQVVDEKLPGLLGNFPGPFEEEMKGIAAVTDIPLGHLIHGRNMDFGVFLGWNINNDTWVITEQLKPLTVNLDFQRNNKTVFKASSFAGYVGMLTGFKPGLFSLTLNERFSINGGYLGILEWILGKKDVMWIGFLTRTVLENSTSYEEAKNLLTKTKILAPAYFILGGNQSGEGCVITRDRKESLDVYELDAKQGRWYVVQTNYDRWKHPFFLDDRRTPAKMCLNRTSQENISFETMYDVLSTKPVLNKLTVYTTLIDVTKGQFETYLRDCPDPCIGW

SEQ ID NO: 1176 - protein, 134 aa, Homo sapiens
MDPQTAPSRALLLLLFLHLAFLGGRSHPLGSPGSASDLETSGLQEQRNHLQGKLSELQVEQTSLEPLQESPRPTGVWKSREVATEGIRGHRKMVLYTLRAPRSPKMVQGSGCFGRKMDRISSSSGLGCKVLRRH

SEQ ID NO: 1177 - protein, 241 aa, Homo sapiens
MSMLFYTLITAFLIGIQAEPHSESNVPAGHTIPQAHWTKLQHSLDTALRRARSAPAAAIAARVAGQTRNITVDPRLFKKRRLRSPRVLFSTQPPREAADTQDLDFEVGGAAPFNRTHRSKRSSSHPIFHRGEFSVCDSVSVWVGDKTTATDIKGKEVMVLGEVNINNSVFKQYFFETKCRDPNPVDSGCRGIDSKHWNSYCTTTHTFVKALTMDGKQAAWRFIRIDTACVCVLSRKAVRRA

SEQ ID NO: 1178 - protein, 640 aa, Homo sapiens
MSERKEGRGKGKGKKKERGSGKKPESAAGSQSPALPPRLKEMKSQESAAGSKLVLRCETSSEYSSLRFKWFKNGNELNRKNKPQNIKIQKKPGKSELRINKASLADSGEYMCKVISKLGNDSASANITIVESNEIITGMPASTEGAYVSSESPIRISVSTEGANTSSSTSTSTTGTSHLVKCAEKEKTFCVNGGECFMVKDLSNPSRYLCKCQPGFTGARCTENVPMKVQNQEKAEELYQKRVLTITGICIALLVVGIMCVVAYCKTKKQRKKLHDRLRQSLRSERNNMMNIANGPHHPNPPPENVQLVNQYVSKNVISSEHIVEREAETSFSTSHYTSTAHHSTTVTQTPSHSWSNGHTESILSESHSVIVMSSVENSRHSSPTGGPRGRLNGTGGPRECNSFLRHARETPDSYRDSPHSERYVSAMTTPARMSPVDFHTPSSPKSPPSEMSPPVSSMTVSMPSMAVSPFMEEERPLLLVTPPRLREKKFDHHPQQFSSFHHNPAHDSNSLPASPLRIVEDEEYETTQEYEPAQEPVKKLANSRRAKRTKPNGHIANRLEVDSNTSSQSSNSESETEDERVGEDTPFLGIQNPLAASLEATPAFRLADSRTNPAGRFSTQEEIQARLSSVIANQDPIAV

SEQ ID NO: 1179 - protein, 637 aa, Homo sapiens
MSERKEGRGKGKGKKKERGSGKKPESAAGSQSPALPPRLKEMKSQESAAGSKLVLRCETSSEYSSLRFKWFKNGNELNRKNKPQNIKIQKKPGKSELRINKASLADSGEYMCKVISKLGNDSASANITIVESNEIITGMPASTEGAYVSSESPIRISVSTEGANTSSSTSTSTTGTSHLVKCAEKEKTFCVNGGECFMVKDLSNPSRYLCKCPNEFTGDRCQNYVMASFYKAEELYQKRVLTITGICIALLVVGIMCVVAYCKTKKQRKKLHDRLRQSLRSERNNMMNIANGPHHPNPPPENVQLVNQYVSKNVISSEHIVEREAETSFSTSHYTSTAHHSTTVTQTPSHSWSNGHTESILSESHSVIVMSSVENSRHSSPTGGPRGRLNGTGGPRECNSFLRHARETPDSYRDSPHSERYVSAMTTPARMSPVDFHTPSSPKSPPSEMSPPVSSMTVSMPSMAVSPFMEEERPLLLVTPPRLREKKFDHHPQQFSSFHHNPAHDSNSLPASPLRIVEDEEYETTQEYEPAQEPVKKLANSRRAKRTKPNGHIANRLEVDSNTSSQSSNSESETEDERVGEDTPFLGIQNPLAASLEATPAFRLADSRTNPAGRFSTQEEIQARLSSVIANQDPIAV

SEQ ID NO: 1180 - protein, 611 aa, Homo sapiens
MSERKEGRGKGKGKKKERGSGKKPESAAGSQSPALPPRLKEMKSQESAAGSKLVLRCETSSEYSSLRFKWFKNGNELNRKNKPQNIKIQKKPGKSELRINKASLADSGEYMCKVISKLGNDSASANITIVESNATSTSTTGTSHLVKCAEKEKTFCVNGGECFMVKDLSNPSRYLCKCPNEFTGDRCQNYVMASFYKHLGIEFMEAEELYQKRVLTITGICIALLVVGIMCVVAYCKTKKQRKKLHDRLRQSLRSERNNMMNIANGPHHPNPPPENVQLVNQYVSKNVISSEHIVEREAETSFSTSHYTSTAHHSTTVTQTPSHSWSNGHTESILSESHSVIVMSSVENSRHSSPTGGPRGRLNGTGGPRECNSFLRHARETPDSYRDSPHSERYVSAMTTPARMSPVDFHTPSSPKSPPSEMSPPVSSMTVSMPSMAVSPFMEEERPLLLVTPPRLREKKFDHHPQQFSSFHHNPAHDSNSLPASPLRIVEDEEYETTQEYEPAQEPVKKLANSRRAKRTKPNGHIANRLEVDSNTSSQSSNSESETEDERVGEDTPFLGIQNPLAASLEATPAFRLADSRTNPAGRFSTQEEIQARLSSVIANQDPIAV

SEQ ID NO: 1181 - protein, 648 aa, Homo sapiens
MSERKEGRGKGKGKKKERGSGKKPESAAGSQSPALPPRLKEMKSQESAAGSKLVLRCETSSEYSSLRFKWFKNGNELNRKNKPQNIKIQKKPGKSELRINKASLADSGEYMCKVISKLGNDSASANITIVESNEIITGMPASTEGAYVSSESPIRISVSTEGANTSSSTSTSTTGTSHLVKCAEKEKTFCVNGGECFMVKDLSNPSRYLCKCQPGFTGARCTENVPMKVQNQEKHSGEPFPEAEELYQKRVLTITGICIALLVVGIMCVVAYCKTKKQRKKLHDRLRQSLRSERNNMMNIANGPHHPNPPPENVQLVNQYVSKNVISSEHIVEREAETSFSTSHYTSTAHHSTTVTQTPSHSWSNGHTESILSESHSVIVMSSVENSRHSSPTGGPRGRLNGTGGPRECNSFLRHARETPDSYRDSPHSERYVSAMTTPARMSPVDFHTPSSPKSPPSEMSPPVSSMTVSMPSMAVSPFMEEERPLLLVTPPRLREKKFDHHPQQFSSFHHNPAHDSNSLPASPLRIVEDEEYETTQEYEPAQEPVKKLANSRRAKRTKPNGHIANRLEVDSNTSSQSSNSESETEDERVGEDTPFLGIQNPLAASLEATPAFRLADSRTNPAGRFSTQEEIQARLSSVIANQDPIAV

SEQ ID NO: 1182 - protein, 247 aa, Homo sapiens
MSERKEGRGKGKGKKKERGSGKKPESAAGSQSPALPPRLKEMKSQESAAGSKLVLRCETSSEYSSLRFKWFKNGNELNRKNKPQNIKIQKKPGKSELRINKASLADSGEYMCKVISKLGNDSASANITIVESNEIITGMPASTEGAYVSSESPIRISVSTEGANTSSSTSTSTTGTSHLVKCAEKEKTFCVNGGECFMVKDLSNPSRYLCKCQPGFTGARCTENVPMKVQNQESAQMSLLVIAAKTT

SEQ ID NO: 1183 - protein, 645 aa, Homo sapiens
MSERKEGRGKGKGKKKERGSGKKPESAAGSQSPALPPRLKEMKSQESAAGSKLVLRCETSSEYSSLRFKWFKNGNELNRKNKPQNIKIQKKPGKSELRINKASLADSGEYMCKVISKLGNDSASANITIVESNEIITGMPASTEGAYVSSESPIRISVSTEGANTSSSTSTSTTGTSHLVKCAEKEKTFCVNGGECFMVKDLSNPSRYLCKCPNEFTGDRCQNYVMASFYKHLGIEFMEAEELYQKRVLTITGICIALLVVGIMCVVAYCKTKKQRKKLHDRLRQSLRSERNNMMNIANGPHHPNPPPENVQLVNQYVSKNVISSEHIVEREAETSFSTSHYTSTAHHSTTVTQTPSHSWSNGHTESILSESHSVIVMSSVENSRHSSPTGGPRGRLNGTGGPRECNSFLRHARETPDSYRDSPHSERYVSAMTTPARMSPVDFHTPSSPKSPPSEMSPPVSSMTVSMPSMAVSPFMEEERPLLLVTPPRLREKKFDHHPQQFSSFHHNPAHDSNSLPASPLRIVEDEEYETTQEYEPAQEPVKKLANSRRAKRTKPNGHIANRLEVDSNTSSQSSNSESETEDERVGEDTPFLGIQNPLAASLEATPAFRLADSRTNPAGRFSTQEEIQARLSSVIANQDPIAV

SEQ ID NO: 1184 - protein, 640 aa, Homo sapiens; identical to SEQ ID NO: 1178

SEQ ID NO: 1185 - protein, 590 aa, Homo sapiens
MGKGRAGRVGTTALPPRLKEMKSQESAAGSKLVLRCETSSEYSSLRFKWFKNGNELNRKNKPQNIKIQKKPGKSELRINKASLADSGEYMCKVISKLGNDSASANITIVESNATSTSTTGTSHLVKCAEKEKTFCVNGGECFMVKDLSNPSRYLCKCPNEFTGDRCQNYVMASFYKHLGIEFMEAEELYQKRVLTITGICIALLVVGIMCVVAYCKTKKQRKKLHDRLRQSLRSERNNMMNIANGPHHPNPPPENVQLVNQYVSKNVISSEHIVEREAETSFSTSHYTSTAHHSTTVTQTPSHSWSNGHTESILSESHSVIVMSSVENSRHSSPTGGPRGRLNGTGGPRECNSFLRHARETPDSYRDSPHSERYVSAMTTPARMSPVDFHTPSSPKSPPSEMSPPVSSMTVSMPSMAVSPFMEEERPLLLVTPPRLREKKFDHHPQQFSSFHHNPAHDSNSLPASPLRIVEDEEYETTQEYEPAQEPVKKLANSRRAKRTKPNGHIANRLEVDSNTSSQSSNSESETEDERVGEDTPFLGIQNPLAASLEATPAFRLADSRTNPAGRFSTQEEIQARLSSVIANQDPIAV

SEQ ID NO: 1186 - protein, 422 aa, Homo sapiens
MRWRRAPRRSGRPGPRAQRPGSAARSSPPLPLLPLLLLLGTAALAPGAAAGNEAAPAGASVCYSSPPSVGSVQELAQRAAVVIEGKVHPQRRQQGALDRKAAAAAGEAGAWGGDREPPAAGPRALGPPAEEPLLAANGTVPSWPTAPVPSAGEPGEEAPYLVKVHQVWAVKAGGLKKDSLLTVRLGTWGHPAFPSCGRLKEDSRYIFFMEPDANSTSRAPAAFRASFPPLETGRNLKKEVSRVLCKRCALPPRLKEMKSQESAAGSKLVLRCETSSEYSSLRFKWFKNGNELNRKNKPQNIKIQKKPGKSELRINKASLADSGEYMCKVISKLGNDSASANITIVESNATSTSTTGTSHLVKCAEKEKTFCVNGGECFMVKDLSNPSRYLCKCPNEFTGDRCQNYVMASFYSTSTPFLSLPE

SEQ ID NO: 1187 - protein, 296 aa, Homo sapiens
MEIYSPDMSEVAAERSSSPSTQLSADPSLDGLPAAEDMPEPQTEDGRTPGLVGLAVPCCACLEAERLRGCLNSEKICIVPILACLVSLCLCIAGLKWVFVDKIFEYDSPTHLDPGGLGQDPIISLDATAASAVWVSSEAYTSPVSRAQSESEVQVTVQGDKAVVSFEPSAAPTPKNRIFAFSFLPSTAPSFPSPTRNPEVRTPKSATQPQTTETNLQTAPKLSTSTSTTGTSHLVKCAEKEKTFCVNGGECFMVKDLSNPSRYLCKCPNEFTGDRCQNYVMASFYSTSTPFLSLPE

SEQ ID NO: 1188 - protein, 462 aa, Homo sapiens
MSERKEGRGKGKGKKKERGSGKKPESAAGSQSPALPPRLKEMKSQESAAGSKLVLRCETSSEYSSLRFKWFKNGNELNRKNKPQNIKIQKKPGKSELRINKASLADSGEYMCKVISKLGNDSASANITIVESNEIITGMPASTEGAYVSSESPIRISVSTEGANTSSSTSTSTTGTSHLVKCAEKEKTFCVNGGECFMVKDLSNPSRYLCKCQPGFTGARCTENVPMKVQNQEKAEELYQKRVLTITGICIALLVVGIMCVVAYCKTKKQRKKLHDRLRQSLRSERNNMMNIANGPHHPNPPPENVQLVNQYVSKNVISSEHIVEREAETSFSTSHYTSTAHHSTTVTQTPSHSWSNGHTESILSESHSVIVMSSVENSRHSSPTGGPRGRLNGTGGPRECNSFLRHARETPDSYRDSPHSERHNLIAELRRNKAHRSKCMQIQLSATHLRSSSIPHLGFIL

SEQ ID NO: 1189 - protein, 483 aa, Homo sapiens
MQIPKHISIEDITATSTSTTGTSHLVKCAEKEKTFCVNGGECFMVKDLSNPSRYLCKCPNEFTGDRCQNYVMASFYKAEELYQKRVLTITGICIALLVVGIMCVVAYCKTKKQRKKLHDRLRQSLRSERNNMMNIANGPHHPNPPPENVQLVNQYVSKNVISSEHIVEREAETSFSTSHYTSTAHHSTTVTQTPSHSWSNGHTESILSESHSVIVMSSVENSRHSSPTGGPRGRLNGTGGPRECNSFLRHARETPDSYRDSPHSERYVSAMTTPARMSPVDFHTPSSPKSPPSEMSPPVSSMTVSMPSMAVSPFMEEERPLLLVTPPRLREKKFDHHPQQFSSFHHNPAHDSNSLPASPLRIVEDEEYETTQEYEPAQEPVKKLANSRRAKRTKPNGHIANRLEVDSNTSSQSSNSESETEDERVGEDTPFLGIQNPLAASLEATPAFRLADSRTNPAGRFSTQEEIQARLSSVIANQDPIAV

SEQ ID NO: 1190 - protein, 420 aa, Homo sapiens
MSERKEGRGKGKGKKKERGSGKKPESAAGSQSPALPPRLKEMKSQESAAGSKLVLRCETSSEYSSLRFKWFKNGNELNRKNKPQNIKIQKKPGKSELRINKASLADSGEYMCKVISKLGNDSASANITIVESNEIITGMPASTEGAYVSSESPIRISVSTEGANTSSSTSTSTTGTSHLVKCAEKEKTFCVNGGECFMVKDLSNPSRYLCKCPNEFTGDRCQNYVMASFYKAEELYQKRVLTITGICIALLVVGIMCVVAYCKTKKQRKKLHDRLRQSLRSERNNMMNIANGPHHPNPPPENVQLVNQYVSKNVISSEHIVEREAETSFSTSHYTSTAHHSTTVTQTPSHSWSNGHTESILSESHSVIVMSSVENSRHSSPTGGPRGRLNGTGGPRECNSFLRHARETPDSYRDSPHSER

SEQ ID NO: 1191 - protein, 439 aa, Homo sapiens
MPLNVSFTNRNYDLDYDSVQPYFYCDEEENFYQQQQQSELQPPAPSEDIWKKFELLPTPPLSPSRRSGLCSPSYVAVTPFSLRGDNDGGGGSFSTADQLEMVTELLGGDMVNQSFICDPDDETFIKNIIIQDCMWSGFSAAAKLVSEKLASYQAARKDSGSPNPARGHSVCSTSSLYLQDLSAAASECIDPSVVFPYPLNDSSSPKSCASQDSSAFSPSSDSLLSSTESSPQGSPEPLVLHEETPPTTSSDSEEEQEDEEEIDVVSVEKRQAPGKRSESGSPSAGGHSKPPHSPLVLKRCHVSTHQHNYAAPPSTRKDYPAAKRVKLDSVRVLRQISNNRKCTSPRSSDTEENVKRRTHNVLERQRRNELKRSFFALRDQIPELENNEKAPKVVILKKATAYILSVQAETQKLISEIDLLRKQNEQLKHKLEQLRNSCA

SEQ ID NO: 1192 - protein, 354 aa, Homo sapiens
MLFNLRILLNNAAFRNGHNFMVRNFRCGQPLQNKVQLKGRDLLTLKNFTGEEIKYMLWLSADLKFRIKQKGEYLPLLQGKSLGMIFEKRSTRTRLSTETGFALLGGHPCFLTTQDIHLGVNESLTDTARVLSSMADAVLARVYKQSDLDTLAKEASIPIINGLSDLYHPIQILADYLTLQEHYSSLKGLTLSWIGDGNNILHSIMMSAAKFGMHLQAATPKGYEPDASVTKLAEQYAKENGTKLLLTNDPLEAAHGGNVLITDTWISMGQEEEKKKRLQAFQGYQVTMKTAKVAASDWTFLHCLPRKPEEVDDEVFYSPRSLVFPEAENRKWTIMAVMVSLLTDYSPQLQKPKF

SEQ ID NO: 1193 - protein, 115 aa, Homo sapiens
MIPAKDMAKVMIVMLAICFLTKSDGKSVKKRSVSEIQLMHNLGKHLNSMERVEWLRKKLQDVHNFVALGAPLAPRDAGSQRPRKKEDNVLVESHEKSLGEADKADVNVLTKAKSQ

SEQ ID NO: 1194 - protein, 115 aa, Homo sapiens; identical to SEQ ID NO: 1193

SEQ ID NO: 1195 - protein, 117 aa, Homo sapiens
MSTAVLENPGLGRKLSDFGQETSYIEDNCNQNGAISLIFSLKEEVGALAKVLRLFEENDVNLTHIESRPSRLKKDEYEFFTHLDKRSLPALTNIIKILRHDIGATVHELSRDKKKDT

SEQ ID NO: 1196 - protein, 136 aa, Homo sapiens
MSTAVLENPGLGRKLSDFGQETSYIEDNCNQNGAISLIFSLKEEVGALAKVLRLFEENDVNLTHIESRPSRLKKDEYEFFTHLDKRSLPALTNIIKILRHDIGATVHELSRDKKKDTVPWFPRTIQELDRFANQIL

SEQ ID NO: 1197 - protein, 452 aa, Homo sapiens
MSTAVLENPGLGRKLSDFGQETSYIEDNCNQNGAISLIFSLKEEVGALAKVLRLFEENDVNLTHIESRPSRLKKDEYEFFTHLDKRSLPALTNIIKILRHDIGATVHELSRDKKKDTVPWFPRTIQELDRFANQILSYGAELDADHPGFKDPVYRARRKQFADIAYNYRHGQPIPRVEYMEEEKKTWGTVFKTLKSLYKTHACYEYNHIFPLLEKYCGFHEDNIPQLEDVSQFLQTCTGFRLRPVAGLLSSRDFLGGLAFRVFHCTQYIRHGSKPMYTPEPDICHELLGHVPLFSDRSFAQFSQEIGLASLGAPDEYIEKLATIYWFTVEFGLCKQGDSIKAYGAGLLSSFGELQYCLSEKPKLLPLELEKTAIQNYTVTEFQPLYYVAESFNDAKEKVRNFAATIPRPFSVRYDPYTQRIEVLDNTQQLKILADSINSEIGILCSALQKIK

SEQ ID NO: 1198 - protein, 1086 aa, Homo sapiens
MACSPDAVVSPSSAFLRSGSVYEPLKSINLPRPDNETLWDKLDHYYRIVKSTLLLYQSPTTGLFPTKTCGGDQKAKIQDSLYCAAGAWALALAYRRIDDDKGRTHELEHSAIKCMRGILYCYMRQADKVQQFKQDPRPTTCLHSVFNVHTGDELLSYEEYGHLQINAVSLYLLYLVEMISSGLQIIYNTDEVSFIQNLVFCVERVYRVPDFGVWERGSKYNNGSTELHSSSVGLAKAALEAINGFNLFGNQGCSWSVIFVDLDAHNRNRQTLCSLLPRESRSHNTDAALLPCISYPAFALDDEVLFSQTLDKVVRKLKGKYGFKRFLRDGYRTSLEDPNRCYYKPAEIKLFDGIECEFPIFFLYMMIDGVFRGNPKQVQEYQDLLTPVLHHTTEGYPVVPKYYYVPADFVEYEKNNPGSQKRFPSNCGRDGKLFLWGQALYIIAKLLADELISPKDIDPVQRYVPLKDQRNVSMRFSNQGPLENDLVVHVALIAESQRLQVFLNTYGIQTQTPQQVEPIQIWPQQELVKAYLQLGINEKLGLSGRPDRPIGCLGTSKIYRILGKTVVCYPIIFDLSDFYMSQDVFLLIDDIKNALQFIKQYWKMHGRPLFLVLIREDNIRGSRFNPILDMLAALKKGIIGGVKVHVDRLQTLISGAVVEQLDFLRISDTEELPEFKSFEELEPPKHSKVKRQSSTPSAPELGQQPDVNISEWKDKPTHEILQKLNDCSCLASQAILLGILLKREGPNFITKEGTVSDHIERVYRRAGSQKLWSVVRRAASLLSKVVDSLAPSITNVLVQGKQVTLGAFGHEEEVISNPLSPRVIQNIIYYKCNTHDEREAVIQQELVIHIGWIISNNPELFSGMLKIRIGWIIHAMEYELQIRGGDKPALDLYQLSPSEVKQLLLDILQPQQNGRCWLNRRQIDGSLNRTPTGFYDRVWQILERTPNGIIVAGKHLPQQPTLSDMTMYEMNFSLLVEDTLGNIDQPQYRQIVVELLMVVSIVLERNPELEFQDKVDLDRLVKEAFNEFQKDQSRLKEIEKQDDMTSFYNTPPLGKRGTCSYLTKAVMNLLLEGEVKPNNDDPCLIS

SEQ ID NO: 1199 - protein, 406 aa, Homo sapiens
MTLDVGPEDELPDWAAAKEFYQKYDPKDVIGRGVSSVVRRCVHRATGHEFAVKIMEVTAERLSPEQLEEVREATRRETHILRQVAGHPHIITLIDSYESSSFMFLVFDLMRKGELFDYLTEKVALSEKETRSIMRSLLEAVSFLHANNIVHRDLKPENILLDDNMQIRLSDFGFSCHLEPGEKLRELCGTPGYLAPEILKCSMDETHPGYGKEVDLWACGVILFTLLAGSPPFWHRRQILMLRMIMEGQYQFSSPEWDDRSSTVKDLISRLLQVDPEARLTAEQALQHPFFERCEGSQPWNLTPRQRFRVAVWTVLAAGRVALSTHRVRPLTKNALLRDPYALRSVRHLIDNCAFRLYGHWVKKGEQQNRAALFQHRPPGPFPIMGPEEEGDSAAITEDEAVLVLG

SEQ ID NO: 1200 - protein, 1235 aa, Homo sapiens
MRSRSNSGVRLDGYARLVQQTILCYQNPVTGLLSASHEQKDAWVRDNIYSILAVWGLGMAYRKNADRDEDKAKAYELEQNVVKLMRGLLQCMMRQVAKVEKFKHTQSTKDSLHAKYNTATCGTVVGDDQWGHLQVDATSLFLLFLAQMTASGLRIIFTLDEVAFIQNLVFYIEAAYKVADYGMWERGDKTNQGIPELNASSVGMAKAALEAIDELDLFGAHGGRKSVIHVLPDEVEHCQSILFSMLPRASTSKEIDAGLLSIISFPAFAVEDVNLVNVTKNEIISKLQGRYGCCRFLRDGYKTPREDPNRLHYDPAELKLFENIECEWPVFWTYFIIDGVFSGDAVQVQEYREALEGILIRGKNGIRLVPELYAVPPNKVDEEYKNPHTVDRVPMGKVPHLWGQSLYILSSLLAEGFLAAGEIDPLNRRFSTSVKPDVVVQVTVLAENNHIKDLLRKHGVNVQSIADIHPIQVQPGRILSHIYAKLGRNKNMNLSGRPYRHIGVLGTSKLYVIRNQIFTFTPQFTDQHHFYLALDNEMIVEMLRIELAYLCTCWRMTGRPTLTFPISRTMLTNDGSDIHSAVLSTIRKLEDGYFGGARVKLGNLSEFLTTSFYTYLTFLDPDCDEKLFDNASEGTFSPDSDSDLVGYLEDTCNQESQDELDHYINHLLQSTSLRSYLPPLCKNTEDRHVFSAIHSTRDILSVMAKAKGLEVPFVPMTLPTKVLSAHRKSLNLVDSPQPLLEKVPESDFQWPRDDHGDVDCEKLVEQLKDCSNLQDQADILYILYVIKGPSWDTNLSGQHGVTVQNLLGELYGKAGLNQEWGLIRYISGLLRKKVEVLAEACTDLLSHQKQLTVGLPPEPREKIISAPLPPEELTKLIYEASGQDISIAVLTQEIVVYLAMYVRAQPSLFVEMLRLRIGLIIQVMATELARSLNCSGEEASESLMNLSPFDMKNLLHHILSGKEFGVERSVRPIHSSTSSPTISIHEVGHTGVTKTERSGINRLRSEMKQMTRRFSADEQFFSVGQAASSSAHSSKSARSSTPSSPTGTSSSDSGGHHIGWGERQGQWLRRRRLDGAINRVPVGFYQRVWKILQKCHGLSIDGYVLPSSTTREMTPHEIKFAVHVESVLNRVPQPEYRQLLVEAIMVLTLLSDTEMTSIGGIIHVDQIVQMASQLFLQDQVSIGAMDTLEKDQATGICHFFYDSAPSGAYGTMTYLTRAVASYLQELLPNSGCQMQ

SEQ ID NO: 1201 - protein, 1086 aa, Homo sapiens; identical to SEQ ID NO: 1198

SEQ ID NO: 1202 - protein, 1093 aa, Homo sapiens
MAGAAGLTAEVSWKVLERRARTKRSGSVYEPLKSINLPRPDNETLWDKLDHYYRIVKSTLLLYQSPTTGLFPTKTCGGDQKAKIQDSLYCAAGAWALALAYRRIDDDKGRTHELEHSAIKCMRGILYCYMRQADKVQQFKQDPRPTTCLHSVFNVHTGDELLSYEEYGHLQINAVSLYLLYLVEMISSGLQIIYNTDEVSFIQNLVFCVERVYRVPDFGVWERGSKYNNGSTELHSSSVGLAKAALEAINGFNLFGNQGCSWSVIFVDLDAHNRNRQTLCSLLPRESRSHNTDAALLPCISYPAFALDDEVLFSQTLDKVVRKLKGKYGFKRFLRDGYRTSLEDPNRCYYKPAEIKLFDGIECEFPIFFLYMMIDGVFRGNPKQVQEYQDLLTPVLHHTTEGYPVVPKYYYVPADFVEYEKNNPGSQKRFPSNCGRDGKLFLWGQALYIIAKLLADELISPKDIDPVQRYVPLKDQRNVSMRFSNQGPLENDLVVHVALIAESQRLQVFLNTYGIQTQTPQQVEPIQIWPQQELVKAYLQLGINEKLGLSGRPDRPIGCLGTSKIYRILGKTVVCYPIIFDLSDFYMSQDVFLLIDDIKNALQFIKQYWKMHGRPLFLVLIREDNIRGSRFNPILDMLAALKKGIIGGVKVHVDRLQTLISGAVVEQLDFLRISDTEELPEFKSFEELEPPKHSKVKRQSSTPSAPELGQQPDVNISEWKDKPTHEILQKLNDCSCLASQAILLGILLKREGPNFITKEGTVSDHIERVYRRAGSQKLWLAVRYGAAFTQKFSSSIAPHITTFLVHGKQVTLGAFGHEEEVISNPLSPRVIQNIIYYKCNTHDEREAVIQQELVIHIGWIISNNPELFSGMLKIRIGWIIHAMEYELQIRGGDKPALDLYQLSPSEVKQLLLDILQPQQNGRCWLNRRQIDGSLNRTPTGFYDRVWQILERTPNGIIVAGKHLPQQPTLSDMTMYEMNFSLLVEDTLGNIDQPQYRQIVVELLMVVSIVLERNPELEFQDKVDLDRLVKEAFNEFQKDQSRLKEIEKQDDMTSFYNTPPLGKRGTCSYLTKAVMNLLLEGEVKPNNDDPCLIS

SEQ ID NO: 1203 - protein, 1086 aa, Homo sapiens
MACSPDAVVSPSSAFLRSGSVYEPLKSINLPRPDNETLWDKLDHYYRIVKSTLLLYQSPTTGLFPTKTCGGDQKAKIQDSLYCAAGAWALALAYRRIDDDKGRTHELEHSAIKCMRGILYCYMRQADKVQQFKQDPRPTTCLHSVFNVHTGDELLSYEEYGHLQINAVSLYLLYLVEMISSGLQIIYNTDEVSFIQNLVFCVERVYRVPDFGVWERGSKYNNGSTELHSSSVGLAKAALEAINGFNLFGNQGCSWSVIFVDLDAHNRNRQTLCSLLPRESRSHNTDAALLPCISYPAFALDDEVLFSQTLDKVVRKLKGKYGFKRFLRDGYRTSLEDPNRCYYKPAEIKLFDGIECEFPIFFLYMMIDGVFRGNPKQVQEYQDLLTPVLHHTTEGYPVVPKYYYVPADFVEYEKNNPGSQKRFPSNCGRDGKLFLWGQALYIIAKLLADELISPKDIDPVQRYVPLKDQRNVSMRFSNQGPLENDLVVHVALIAESQRLQVFLNTYGIQTQTPQQVEPIQIWPQQELVKAYLQLGINEKLGLSGRPDRPIGCLGTSKIYRILGKTVVCYPIIFDLSDFYMSQDVFLLIDDIKNALQFIKQYWKMHGRPLFLVLIREDNIRGSRFNPILDMLAALKKGIIGGVKVHVDRLQTLISGAVVEQLDFLRISDTEELPEFKSFEELEPPKHSKVKRQSSTPSAPELGQQPDVNISEWKDKPTHEILQKLNDCSCLASQAILLGILLKREGPNFITKEGTVSDHIERVYRRAGSQKLWLAVRYGAAFTQKFSSSIAPHITTFLVHGKQVTLGAFGHEEEVISNPLSPRVIQNIIYYKCNTHDEREAVIQQELVIHIGWIISNNPELFSGMLKIRIGWIIHAMEYELQIRGGDKPALDLYQLSPSEVKQLLLDILQPQQNGRCWLNRRQIDGSLNRTPTGFYDRVWQILERTPNGIIVAGKHLPQQPTLSDMTMYEMNFSLLVEDTLGNIDQPQYRQIVVELLMVVSIVLERNPELEFQDKVDLDRLVKEAFNEFQKDQSRLKEIEKQDDMTSFYNTPPLGKRGTCSYLTKAVMNLLLEGEVKPNNDDPCLIS

SEQ ID NO: 1204 - protein, 406 aa, Homo sapiens; identical to SEQ ID NO: 1199

SEQ ID NO: 1205 - protein, 374 aa, Homo sapiens
MTLDVGPEDELPDWAAAKEFYQKYDPKDVIGRGVSSVVRRCVHRATGHEFAVKIMEVTAERLSPEQLEEVREATRRETHILRQVAGHPHIITLIDSYESSSFMFLVFDLMRKGELFDYLTEKVALSEKETRSIMRSLLEAVSFLHANNIVHRDLKPENILLDDNMQIRLSDFGFSCHLEPGEKLRELCGTPGYLAPEILKCSMDETHPGYGKEVDLWACGVILFTLLAGSPPFWHRRQILMLRMIMEGQYQFSSPEWDDRSSTVKDLISRLLQVDPEARLTAEQALQHPFFERCEGSQPWNLTPRQRFRVAVWTVLAAGRVALSTHRVRPLTKNALLRDPYALRSVRHLIDNCAFRLYGHWIRKQWIGKLMACV

SEQ ID NO: 1206 - protein, 847 aa, Homo sapiens
MAKPLTDQEKRRQISIRGIVGVENVAELKKSFNRHLHFTLVKDRNVATTRDYYFALAHTVRDHLVGRWIRTQQHYYDKCPKRVYYLSLEFYMGRTLQNTMINLGLQNACDEAIYQLGLDIEELEEIEEDAGLGNGGLGRLAACFLDSMATLGLAAYGYGIRYEYGIFNQKIRDGWQVEEADDWLRYGNPWEKSRPEFMLPVHFYGKVEHTNTGTKWIDTQVVLALPYDTPVPGYMNNTVNTMRLWSARAPNDFNLRDFNVGDYIQAVLDRNLAENISRVLYPNDNFFEGKELRLKQEYFVVAATLQDIIRRFKASKFGSTRGAGTVFDAFPDQVAIQLNDTHPALAIPELMRIFVDIEKLPWSKAWELTQKTFAYTNHTVLPEALERWPVDLVEKLLPRHLEIIYEINQKHLDRIVALFPKDVDRLRRMSLIEEEGSKRINMAHLCIVGSHAVNGVAKIHSDIVKTKVFKDFSELEPDKFQNKTNGITPRRWLLLCNPGLAELIAEKIGEDYVKDLSQLTKLHSFLGDDVFLRELAKVKQENKLKFSQFLETEYKVKINPSSMFDVQVKRIHEYKRQLLNCLHVITMYNRIKKDPKKLFVPRTVIIGGKAAPGYHMAKMIIKLITSVADVVNNDPMVGSKLKVIFLENYRVSLAEKVIPATDLSEQISTAGTEASGTGNMKFMLNGALTIGTMDGANVEMAEEAGEENLFIFGMRIDDVAALDKKGYEAKEYYEALPELKLVIDQIDNGFFSPKQPDLFKDIINMLFYHDRFKVFADYEAYVKCQDKVSQLYMNPKAWNTMVLKNIAASGKFSSDRTIKEYAQNIWNVEPSDLKISLSNESNKVNGN

SEQ ID NO: 1207 - protein, 813 aa, Homo sapiens
MAKPLTDQEKRRQISIRGIVGVENVAELKKSFNRHLHFTLVKDRNVATTRDYYFALAHTVRDHLVGRWIRTQQHYYDKCPKLGLDIEELEEIEEDAGLGNGGLGRLAACFLDSMATLGLAAYGYGIRYEYGIFNQKIRDGWQVEEADDWLRYGNPWEKSRPEFMLPVHFYGKVEHTNTGTKWIDTQVVLALPYDTPVPGYMNNTVNTMRLWSARAPNDFNLRDFNVGDYIQAVLDRNLAENISRVLYPNDNFFEGKELRLKQEYFVVAATLQDIIRRFKASKFGSTRGAGTVFDAFPDQVAIQLNDTHPALAIPELMRIFVDIEKLPWSKAWELTQKTFAYTNHTVLPEALERWPVDLVEKLLPRHLEIIYEINQKHLDRIVALFPKDVDRLRRMSLIEEEGSKRINMAHLCIVGSHAVNGVAKIHSDIVKTKVFKDFSELEPDKFQNKTNGITPRRWLLLCNPGLAELIAEKIGEDYVKDLSQLTKLHSFLGDDVFLRELAKVKQENKLKFSQFLETEYKVKINPSSMFDVQVKRIHEYKRQLLNCLHVITMYNRIKKDPKKLFVPRTVIIGGKAAPGYHMAKMIIKLITSVADVVNNDPMVGSKLKVIFLENYRVSLAEKVIPATDLSEQISTAGTEASGTGNMKFMLNGALTIGTMDGANVEMAEEAGEENLFIFGMRIDDVAALDKKGYEAKEYYEALPELKLVIDQIDNGFFSPKQPDLFKDIINMLFYHDRFKVFADYEAYVKCQDKVSQLYMNPKAWNTMVLKNIAASGKFSSDRTIKEYAQNIWNVEPSDLKISLSNESNKVNGN

SEQ ID NO: 1208 - protein, 810 aa, Homo sapiens
MEHKEVVLLLLLFLKSGQGEPLDDYVNTQGASLFSVTKKQLGAGSIEECAAKCEEDEEFTCRAFQYHSKEQQCVIMAENRKSSIIIRMRDVVLFEKKVYLSECKTGNGKNYRGTMSKTKNGITCQKWSSTSPHRPRFSPATHPSEGLEENYCRNPDNDPQGPWCYTTDPEKRYDYCDILECEEECMHCSGENYDGKISKTMSGLECQAWDSQSPHAHGYIPSKFPNKNLKKNYCRNPDRELRPWCFTTDPNKRWELCDIPRCTTPPPSSGPTYQCLKGTGENYRGNVAVTVSGHTCQHWSAQTPHTHNRTPENFPCKNLDENYCRNPDGKRAPWCHTTNSQVRWEYCKIPSCDSSPVSTEQLAPTAPPELTPVVQDCYHGDGQSYRGTSSTTTTGKKCQSWSSMTPHRHQKTPENYPNAGLTMNYCRNPDADKGPWCFTTDPSVRWEYCNLKKCSGTEASVVAPPPVVLLPDVETPSEEDCMFGNGKGYRGKRATTVTGTPCQDWAAQEPHRHSIFTPETNPRAGLEKNYCRNPDGDVGGPWCYTTNPRKLYDYCDVPQCAAPSFDCGKPQVEPKKCPGRVVGGCVAHPHSWPWQVSLRTRFGMHFCGGTLISPEWVLTAAHCLEKSPRPSSYKVILGAHQEVNLEPHVQEIEVSRLFLEPTRKDIALLKLSSPAVITDKVIPACLPSPNYVVADRTECFITGWGETQGTFGAGLLKEAQLPVIENKVCNRYEFLNGRVQSTELCAGHLAGGTDSCQGDSGGPLVCFEKDKYILQGVTSWGLGCARPNKPGVYVRVSRFVTWIEGVMRNN

SEQ ID NO: 1209 - protein, 210 aa, Homo sapiens
RFGMHFCGGTLISPEWVLTAAHCLEKSPRPSSYKVILGAHQEVNLEPHVQEIEVSRLFLEPTRKDIALLKLSSPAVITDKVIPACLPSPNYVVADRTECFITGWGETQGTFGAGLLKEAQLPVIENKVCNRYEFLNGRVQSTELCAGHLAGGTDSCQGDSGGPLVCFEKDKYILQGVTSWGLGCARPNKPGVYVRVSRFVTWIEGVMRNN

SEQ ID NO: 1210 - protein, 136 aa, Homo sapiens
MEHKEVVLLLLLFLKSGQGEPLDDYVNTQGASLFSVTKKQLGAGSIEECAAKCEEDEEFTCRAFQYHSKEQQCVIMAENRKSSIIIRMRDVVLFEKKVYLSECKTGNGKNYRGTMSKTKNGITCQKWSSTSPHRPR

SEQ ID NO: 1211 - protein, 562 aa, Homo sapiens
MDAMKRGLCCVLLLCGAVFVSPSQEIHARFRRGARSYQVICRDEKTQMIYQQHQSWLRPVLRSNRVEYCWCNSGRAQCHSVPVKSCSEPRCFNGGTCQQALYFSDFVCQCPEGFAGKCCEIDTRATCYEDQGISYRGTWSTAESGAECTNWNSSALAQKPYSGRRPDAIRLGLGNHNYCRNPDRDSKPWCYVFKAGKYSSEFCSTPACSEGNSDCYFGNGSAYRGTHSLTESGASCLPWNSMILIGKVYTAQNPSAQALGLGKHNYCRNPDGDAKPWCHVLKNRRLTWEYCDVPSCSTCGLRQYSQPQFRIKGGLFADIASHPWQAAIFAKHRRSPGERFLCGGILISSCWILSAAHCFQERFPPHHLTVILGRTYRVVPGEEEQKFEVEKYIVHKEFDDDTYDNDIALLQLKSDSSRCAQESSVVRTVCLPPADLQLPDWTECELSGYGKHEALSPFYSERLKEAHVRLYPSSRCTSQHLLNRTVTDNMLCAGDTRSGGPQANLHDACQGDSGGPLVCLNDGRMTLVGIISWGLGCGQKDVPGVYTKVTNYLDWIRDNMRP

SEQ ID NO: 1212 - protein, 293 aa, Homo sapiens
MDAMKRGLCCVLLLCGAVFVSPSQEIHARFRRGARSYQVICRDEKTQMIYQQHQSWLRPVLRSNRVEYCWCNSGRAQCHSVPVKSCSEPRCFNGGTCQQALYFSDFVCQCPEGFAGKCCEIDTRATCYEDQGISYRGTWSTAESGAECTNWNSSALAQKPYSGRRPDAIRLGLGNHNYCRNPDRDSKPWCYVFKAGKYSSEFCSTPACSEGNSDCYFGNGSAYRGTHSLTESGASCLPWNSMILIGKVYTAQNPSAQALGLGKHNYCRCRTGRSVSSPATASMRPCLLSIRSG

SEQ ID NO: 1213 - protein, 516 aa, Homo sapiens
MDAMKRGLCCVLLLCGAVFVSPSQEIHARFRRGARSYQGCSEPRCFNGGTCQQALYFSDFVCQCPEGFAGKCCEIDTRATCYEDQGISYRGTWSTAESGAECTNWNSSALAQKPYSGRRPDAIRLGLGNHNYCRNPDRDSKPWCYVFKAGKYSSEFCSTPACSEGNSDCYFGNGSAYRGTHSLTESGASCLPWNSMILIGKVYTAQNPSAQALGLGKHNYCRNPDGDAKPWCHVLKNRRLTWEYCDVPSCSTCGLRQYSQPQFRIKGGLFADIASHPWQAAIFAKHRRSPGERFLCGGILISSCWILSAAHCFQERFPPHHLTVILGRTYRVVPGEEEQKFEVEKYIVHKEFDDDTYDNDIALLQLKSDSSRCAQESSVVRTVCLPPADLQLPDWTECELSGYGKHEALSPFYSERLKEAHVRLYPSSRCTSQHLLNRTVTDNMLCAGDTRSGGPQANLHDACQGDSGGPLVCLNDGRMTLVGIISWGLGCGQKDVPGVYTKVTNYLDWIRDNMRP

SEQ ID NO: 1214 - protein, 562 aa, Homo sapiens; identical to SEQ ID NO: 1211

SEQ ID NO: 1215 - protein, 436 aa, Homo sapiens
MDAMKRGLCCVLLLCGAVFVSPSQEIHARFRRGARSYQVICRDEKTQMIYQQHQSWLRPVLRSNRVEYCWCNSGRAQCHSVPVKRNSDCYFGNGSAYRGTHSLTESGASCLPWNSMILIGKVYTAQNPSAQALGLGKHNYCRNPDGDAKPWCHVLKNRRLTWEYCDVPSCSTCGLRQYSQPQFRIKGGLFADIASHPWQAAIFAKHRRSPGERFLCGGILISSCWILSAAHCFQERFPPHHLTVILGRTYRVVPGEEEQKFEVEKYIVHKEFDDDTYDNDIALLQLKSDSSRCAQESSVVRTVCLPPADLQLPDWTECELSGYGKHEALSPFYSERLKEAHVRLYPSSRCTSQHLLNRTVTDNMLCAGDTRSGGPQANLHDACQGDSGGPLVCLNDGRMTLVGIISWGLGCGQKDVPGVYTKVTNYLDWIRDNMRP

SEQ ID NO: 1216 - protein, 499 aa, Homo sapiens
MDAMKRGLCCVLLLCGAVFVSPSQEIHARFRRGARSYQVICRDEKTQMIYQQHQSWLRPVLRSNRVEYCWCNSGRAQCHSVPVKSCSEPRCFNGGTCQQALYFSDFVCQCPEGFAGKCCEIDSKPWCYVFKAGKYSSEFCSTPACSEGNSDCYFGNGSAYRGTHSLTESGASCLPWNSMILIGKVYTAQNPSAQALGLGKHNYCRNPDGDAKPWCHVLKNRRLTWEYCDVPSCSTCGLRQYSQPQFRIKGGLFADIASHPWQAAIFAKHRRSPGERFLCGGILISSCWILSAAHCFQERFPPHHLTVILGRTYRVVPGEEEQKFEVEKYIVHKEFDDDTYDNDIALLQLKSDSSRCAQESSVVRTVCLPPADLQLPDWTECELSGYGKHEALSPFYSERLKEAHVRLYPSSRCTSQHLLNRTVTDNMLCAGDTRSGGPQANLHDACQGDSGGPLVCLNDGRMTLVGIISWGLGCGQKDVPGVYTKVTNYLDWIRDNMRP

SEQ ID NO: 1217 - protein, 178 aa, Homo sapiens
MDAMKRGLCCVLLLCGAVFVSPSQEIHARFRRGARSYQVICRDEKTQMIYQQHQSWLRPVLRSNRVEYCWCNSGRAQCHSVPVKSCSEPRCFNGGTCQQALYFSDFVCQCPEGFAGKCCEIDTRATCYEDQGISYRGTWSTAESGAECTNWNSSALAQKPYSGRRPDAIRLGLGNHNY

SEQ ID NO: 1218 - protein, 157 aa, Homo sapiens
MDAMKRGLCCVLLLCGAVFVSPSQEIHARFRRGARSYQVICRDEKTQMIYQQHQSWLRPVLRSNRVEYCWCNSGRAQCHSVPVKSCSEPRCFNGGTCQQALYFSDFVCQCPEGFAGKCCEIDTRATCYEDQGISYRGTWSTAESGAECTNWNSSALA

SEQ ID NO: 1219 - protein, 473 aa, Homo sapiens
MDAMKRGLCCVLLLCGAVFVSPSQEIHARFRRGARSYQVICRDEKTQMIYQQHQSWLRPVLRSNRVEYCWCNSGRAQCHSVPVKSCSEPRCFNGGTCQQALYFSDFVCQCPEGFAGKCCEIGNSDCYFGNGSAYRGTHSLTESGASCLPWNSMILIGKVYTAQNPSAQALGLGKHNYCRNPDGDAKPWCHVLKNRRLTWEYCDVPSCSTCGLRQYSQPQFRIKGGLFADIASHPWQAAIFAKHRRSPGERFLCGGILISSCWILSAAHCFQERFPPHHLTVILGRTYRVVPGEEEQKFEVEKYIVHKEFDDDTYDNDIALLQLKSDSSRCAQESSVVRTVCLPPADLQLPDWTECELSGYGKHEALSPFYSERLKEAHVRLYPSSRCTSQHLLNRTVTDNMLCAGDTRSGGPQANLHDACQGDSGGPLVCLNDGRMTLVGIISWGLGCGQKDVPGVYTKVTNYLDWIRDNMRP

SEQ ID NO: 1220 - protein, 360 aa, Homo sapiens
MAGHLASDFAFSPPPGGGGDGPGGPEPGWVDPRTWLSFQGPPGGPGIGPGVGPGSEVWGIPPCPPPYEFCGGMAYCGPQVGVGLVPQGGLETSQPEGEAGVGVESNSDGASPEPCTVTPGAVKLEKEKLEQNPEESQDIKALQKELEQFAKLLKQKRITLGYTQADVGLTLGVLFGKVFSQTTICRFEALQLSFKNMCKLRPLLQKWVEEADNNENLQEICKAETLVQARKRKRTSIENRVRGNLENLFLQCPKPTLQQISHIAQQLGLEKDVVRVWFCNRRQKGKRSSSDYAQREDFEAAGSPFSGGPVSFPLAPGPHFGTPGYGSPHFTALYSSVPFPEGEAFPPVSVTTLGSPMHSN

SEQ ID NO: 1221 - protein, 265 aa, Homo sapiens
MHFYRLFLGATRRFLNPEWKGEIDNWCVYVLTSLLPFKIQSQDIKALQKELEQFAKLLKQKRITLGYTQADVGLTLGVLFGKVFSQTTICRFEALQLSFKNMCKLRPLLQKWVEEADNNENLQEICKAETLVQARKRKRTSIENRVRGNLENLFLQCPKPTLQQISHIAQQLGLEKDVVRVWFCNRRQKGKRSSSDYAQREDFEAAGSPFSGGPVSFPLAPGPHFGTPGYGSPHFTALYSSVPFPEGEAFPPVSVTTLGSPMHSN

SEQ ID NO: 1222 - protein, 360 aa, Homo sapiens; identical to SEQ ID NO: 1220

SEQ ID NO: 1223 - protein, 265 aa, Homo sapiens; identical to SEQ ID NO: 1221

SEQ ID NO: 1224 - protein, 265 aa, Homo sapiens; identical to SEQ ID NO: 1221

SEQ ID NO: 1225 - protein, 360 aa, Homo sapiens; identical to SEQ ID NO: 1220

SEQ ID NO: 1226 - protein, 360 aa, Homo sapiens; identical to SEQ ID NO: 1220

SEQ ID NO: 1227 - protein, 265 aa, Homo sapiens; identical to SEQ ID NO: 1221

SEQ ID NO: 1228 - protein, 360 aa, Homo sapiens; identical to SEQ ID NO: 1220

SEQ ID NO: 1229 - protein, 122 aa, Homo sapiens
MAGHLASDFAFSPPPGGGGDGPGGPEPGWVDPRTWLSFQGPPGGPGIGPGVGPGSEVWGIPPCPPPYEFCGGMAYCGPQVGVGLVPQGGLETSQPEGEAGGGEQLRWGLPGALHRHPWCREA

SEQ ID NO: 1230 - protein, 265 aa, Homo sapiens; identical to SEQ ID NO: 1221

SEQ ID NO: 1231 - protein, 360 aa, Homo sapiens; identical to SEQ ID NO: 1220

SEQ ID NO: 1232 - protein, 123 aa, Homo sapiens
MAGHLASDFAFSPPPGGGGDGPGGPEPGWVDPRTWLSFQGPPGGPGIGPGVGPGSEVWGIPPCPPPYEFCGGMAYCGPQVGVGLVPQGGLETSQPEGEAGVGVETPMGPPRSPAPHPFPFPLL

SEQ ID NO: 1233 - protein, 185 aa, Homo sapiens
MAGHLASDFAFSPPPGGGGDGPGGPEPGWVDPRTWLSFQGPPGGPGIGPGVGPGSEVWGIPPCPPPYEFCGGMAYCGPQVGVGLVPQGGLETSQPEGEAGVGVESNSDGASPEPCTVTPGAVKLEKEKLEQNPEESQDIKALQKELEQFAKLLKQKRITLGYTQADVHPGGSIWEGIQPNDHLPL

SEQ ID NO: 1234 - protein, 123 aa, Homo sapiens; identical to SEQ ID NO: 1232

SEQ ID NO: 1235 - protein, 185 aa, Homo sapiens; identical to SEQ ID NO: 1233

SEQ ID NO: 1236 - protein, 123 aa, Homo sapiens; identical to SEQ ID NO: 1232

SEQ ID NO: 1237 - protein, 185 aa, Homo sapiens; identical to SEQ ID NO: 1233

SEQ ID NO: 1238 - protein, 185 aa, Homo sapiens; identical to SEQ ID NO: 1233

SEQ ID NO: 1239 - protein, 123 aa, Homo sapiens; identical to SEQ ID NO: 1232

SEQ ID NO: 1240 - protein, 123 aa, Homo sapiens; identical to SEQ ID NO: 1232

SEQ ID NO: 1241 - protein, 692 aa, Homo sapiens
MGTVSSRRSWWPLPLLLLLLLLLGPAGARAQEDEDGDYEELVLALRSEEDGLAEAPEHGTTATFHRCAKDPWRLPGTYVVVLKEETHLSQSERTARRLQAQAARRGYLTKILHVFHGLLPGFLVKMSGDLLELALKLPHVDYIEEDSSVFAQSIPWNLERITPPRYRADEYQPPDGGSLVEVYLLDTSIQSDHREIEGRVMVTDFENVPEEDGTRFHRQASKCDSHGTHLAGVVSGRDAGVAKGASMRSLRVLNCQGKGTVSGTLIGLEFIRKSQLVQPVGPLVVLLPLAGGYSRVLNAACQRLARAGVVLVTAAGNFRDDACLYSPASAPEVITVGATNAQDQPVTLGTLGTNFGRCVDLFAPGEDIIGASSDCSTCFVSQSGTSQAAAHVAGIAAMMLSAEPELTLAELRQRLIHFSAKDVINEAWFPEDQRVLTPNLVAALPPSTHGAGWQLFCRTVWSAHSGPTRMATAVARCAPDEELLSCSSFSRSGKRRGERMEAQGGKLVCRAHNAFGGEGVYAIARCCLLPQANCSVHTAPPAEASMGTRVHCHQQGHVLTGCSSHWEVEDLGTHKPPVLRPRGQPNQCVGHREASIHASCCHAPGLECKVKEHGIPAPQEQVTVACEEGWTLTGCSALPGTSHVLGAYAVDNTCVVRSRDVSTTGSTSEGAVTAVAICCRSRHLAQASQELQ

SEQ ID NO: 1242 - protein, 205 aa, Homo sapiens
MGTVSSRRSWWPLPLLLLLLLLLGPAGARAQEDEDGDYEELVLALRSEEDGLAEAPEHGTTATFHRCAKDPWRLPGTYVVVLKEETHLSQSERTARRLQAQAARRGYLTKILHVFHGLLPGFLVKMSGDLLELALKLPHVDYIEEDSSVFAQSIPWNLERITPPRYRADEYQPPAYLEDHCGGHRGAVQMALQKTQETLGQEQFD

SEQ ID NO: 1243 - protein, 266 aa, Homo sapiens
MVTDFENVPEEDGTRFHRQASKCDSHGTHLAGVVSGRDAGVAKGASMRSLRVLNCQGKGTVSGTLIGLEFIRKSQLVQPVGPLVVLLPLAGGYSRVLNAACQRLARAGVVLVTAAGNFRDDACLYSPASAPEVITVGATNAQDQPVTLGTLGTNFGRCVDLFAPGEDIIGASSDCSTCFVSQSGTSQAAAHVAGIAAMMLSAEPELTLAELRQRLIHFSAKDVINEAWFPEDQRVGSCFAGLYGQHTRGLHGWPQPSPAAPQMRSC

SEQ ID NO: 1244 - protein, 461 aa, Homo sapiens
MWQLTSLLLFVATWGISGTPAPLDSVFSSSERAHQVLRIRKRANSFLEELRHSSLERECIEEICDFEEAKEIFQNVDDTLAFWSKHVDGDQCLVLPLEHPCASLCCGHGTCIDGIGSFSCDCRSGWEGRFCQREVSFLNCSLDNGGCTHYCLEEVGWRRCSCAPGYKLGDDLLQCHPAVKFPCGRPWKRMEKKRSHLKRDTEDQEDQVDPRLIDGKMTRRGDSPWQVVLLDSKKKLACGAVLIHPSWVLTAAHCMDESKKLLVRLGEYDLRRWEKWELDLDIKEVFVHPNYSKSTTDNDIALLHLAQPATLSQTIVPICLPDSGLAERELNQAGQETLVTGWGYHSSREKEAKRNRTFVLNFIKIPVVPHNECSEVMSNMVSENMLCAGILGDRQDACEGDSGGPMVASFHGTWFLVGLVSWGEGCGLLHNYGVYTKVSRYLDWIHGHIRDKEAPQKSWAP

SEQ ID NO: 1245 - protein, 495 aa, Homo sapiens
MWQLTSLLLFVATWGISGTPAPLDSVFSSSERAHQVLRIRKRANSFLEELRHSSLERECIEEICDFEEAKEIFQNVDDTLAFWSKHVDGDQCLVLPLEHPCASLCCGHGTCIDGIGSFSCDCRSGWEGRFCQRGEGERWMLAGGGAGLGPGWGRGTSTSCPRPPLPAEVSFLNCSLDNGGCTHYCLEEVGWRRCSCAPGYKLGDDLLQCHPAVKFPCGRPWKRMEKKRSHLKRDTEDQEDQVDPRLIDGKMTRRGDSPWQVVLLDSKKKLACGAVLIHPSWVLTAAHCMDESKKLLVRLGEYDLRRWEKWELDLDIKEVFVHPNYSKSTTDNDIALLHLAQPATLSQTIVPICLPDSGLAERELNQAGQETLVTGWGYHSSREKEAKRNRTFVLNFIKIPVVPHNECSEVMSNMVSENMLCAGILGDRQDACEGDSGGPMVASFHGTWFLVGLVSWGEGCGLLHNYGVYTKVSRYLDWIHGHIRDKEAPQKSWAP

SEQ ID NO: 1246 - protein, 461 aa, Homo sapiens; identical to SEQ ID NO: 1244

SEQ ID NO: 1247 - protein, 116 aa, Homo sapiens
MWQLTSLLLFVATWGISGTPAPLDSVFSSSERAHQVLRIRKRANSFLEELRHSSLERECIEEICDFEEAKEIFQNVDDTLAFWSKHVDGDQCLVLPLEHPCASLCCGHGTCIDGIG

SEQ ID NO: 1248 - protein, 126 aa, Homo sapiens
MWQLTSLLLFVATWGISGTPAPLDSVFSSSERAHQVLRIRKRANSFLEELRHSSLERECIEEICDFEEAKEIFQNVDDTLAFWSKHVDGDQCLVLPLEHPCASLCCGHGTCIDGIGSFSCDCRSGW

SEQ ID NO: 1249 - protein, 516 aa, Homo sapiens
MAAGRRTCSISTTRPCASASRMWQLTSLLLFVATWGISGTPAPLDSVFSSSERAHQVLRIRKRANSFLEELRHSSLERECIEEICDFEEAKEIFQNVDDTLAFWSKHVDGDQCLVLPLEHPCASLCCGHGTCIDGIGSFSCDCRSGWEGRFCQRGEGERWMLAGGGAGLGPGWGRGTSTSCPRPPLPAEVSFLNCSLDNGGCTHYCLEEVGWRRCSCAPGYKLGDDLLQCHPAVKFPCGRPWKRMEKKRSHLKRDTEDQEDQVDPRLIDGKMTRRGDSPWQVVLLDSKKKLACGAVLIHPSWVLTAAHCMDESKKLLVRLGEYDLRRWEKWELDLDIKEVFVHPNYSKSTTDNDIALLHLAQPATLSQTIVPICLPDSGLAERELNQAGQETLVTGWGYHSSREKEAKRNRTFVLNFIKIPVVPHNECSEVMSNMVSENMLCAGILGDRQDACEGDSGGPMVASFHGTWFLVGLVSWGEGCGLLHNYGVYTKVSRYLDWIHGHIRDKEAPQKSWAP

SEQ ID NO: 1250 - protein, 420 aa, Homo sapiens
MWMTHWPSGPSTSTVTSAWSCPWSTRAPACAAGTARASTASAASAATAAAAGRAASASAVRGRGGCWRGGAGLGPGWGRGTSTSCPRPPLPAEVSFLNCSLDNGGCTHYCLEEVGWRRCSCAPGYKLGDDLLQCHPAVKFPCGRPWKRMEKKRSHLKRDTEDQEDQVDPRLIDGKMTRRGDSPWQVVLLDSKKKLACGAVLIHPSWVLTAAHCMDESKKLLVRLGEYDLRRWEKWELDLDIKEVFVHPNYSKSTTDNDIALLHLAQPATLSQTIVPICLPDSGLAERELNQAGQETLVTGWGYHSSREKEAKRNRTFVLNFIKIPVVPHNECSEVMSNMVSENMLCAGILGDRQDACEGDSGGPMVASFHGTWFLVGLVSWGEGCGLLHNYGVYTKVSRYLDWIHGHIRDKEAPQKSWAP

SEQ ID NO: 1251 - protein, 117 aa, Homo sapiens
MPRLFFFHLLGVCLLLNQFSRAVADSWMEEVIKLCGRELVRAQIAICGMSTWSKRSLSQEDAPQTPRPVAGDFIQTVSLGISPDGGKALRTGSCFTREFLGALSKLCHPSSTKIQKP

SEQ ID NO: 1252 - protein, 185 aa, Homo sapiens
MPRLFFFHLLGVCLLLNQFSRAVADSWMEEVIKLCGRELVRAQIAICGMSTWSKRSLSQEDAPQTPRPVAEIVPSFINKDTETINMMSEFVANLPQELKLTLSEMQPALPQLQQHVPVLKDSSLLFEEFKKLIRNRQSEAADSSPSELKYLGLDTHSRKKRQLYSALANKCCHVGCTKRSLARFC

SEQ ID NO: 1253 - protein, 348 aa, Homo sapiens [sequence omitted]

SEQ ID NO: 1254 - protein, 418 aa, Homo sapiens
MPSSVSWGILLLAGLCCLVPVSLAEDPQGDAAQKTDTSHHDQDHPTFNKITPNLAEFAFSLYRQLAHQSNSTNIFFSPVSIATAFAMLSLGTKADTHDEILEGLNFNLTEIPEAQIHEGFQELLRTLNQPDSQLQLTTGNGLFLSEGLKLVDKFLEDVKKLYHSEAFTVNFGDTEEAKKQINDYVEKGTQGKIVDLVKELDRDTVFALVNYIFFKGKWERPFEVKDTEEEDFHVDQVTTVKVPMMKRLGMFNIQHCKKLSSWVLLMKYLGNATAIFFLPDEGKLQHLENELTHDIITKFLENEDRRSASLHLPKLSITGTYDLKSVLGQLGITKVFSNGADLSGVTEEAPLKLSKAVHKAVLTIDEKGTEAAGAMFLEAIPMSIPPEVKFNKPFVFLMIEQNTKSPLFMGKVVNPTQK

SEQ ID NO: 1255 - protein, 418 aa, Homo sapiens; identical to SEQ ID NO: 1254

SEQ ID NO: 1256 - protein, 418 aa, Homo sapiens; identical to SEQ ID NO: 1254

SEQ ID NO: 1257 - protein, 359 aa, Homo sapiens
MPSSVSWGILLLAGLCCLVPVSLAEDPQGDAAQKTDTSHHDQDHPTFNKITPNLAEFAFSLYRQLAHQSNSTNIFFSPVSIATAFAMLSLGTKADTHDEILEGLNFNLTEIPEAQIHEGFQELLRTLNQPDSQLQLTTGNGLFLSEGLKLVDKFLEDVKKLYHSEAFTVNFGDTEEAKKQINDYVEKGTQGKIVDLVKELDRDTVFALVNYIFFKGKWERPFEVKDTEEEDFHVDQVTTVKVPMMKRLGMFNIQHCKKLSSWVLLMKYLGNATAIFFLPDEGKLQHLENELTHDIITKFLENEDRRSASLHLPKLSITGTYDLKSVLGQLGITKVFSNGADLSGVTEEAPLKLSKVRSP

SEQ ID NO: 1258 - protein, 418 aa, Homo sapiens; identical to SEQ ID NO: 1254

SEQ ID NO: 1259 - protein, 418 aa, Homo sapiens; identical to SEQ ID NO: 1254

SEQ ID NO: 1260 - protein, 418 aa, Homo sapiens; identical to SEQ ID NO: 1254

SEQ ID NO: 1261 - protein, 418 aa, Homo sapiens; identical to SEQ ID NO: 1254

SEQ ID NO: 1262 - protein, 418 aa, Homo sapiens; identical to SEQ ID NO: 1254

SEQ ID NO: 1263 - protein, 92 aa, Homo sapiens
MPSSVSWGILLLAGLCCLVPVSLAEDPQGDAAQKTDTSHHDQDHPTFNKITPNLAEFAFSLYRQLAHQSNSTNIFFSPVSIATAFAMLSLGT

SEQ ID NO: 1264 - protein, 156 aa, Homo sapiens
MPSSVSWGILLLAGLCCLVPVSLAEDPQGDAAQKTDTSHHDQDHPTFNKITPNLAEFAFSLYRQLAHQSNSTNIFFSPVSIATAFAMLSLGTKADTHDEILEGLNFNLTEIPEAQIHEGFQELLRTLNQPDSQLQLTTGNGLFLSEGLKLVDKFLE

SEQ ID NO: 1265 - protein, 117 aa, Homo sapiens
MPSSVSWGILLLAGLCCLVPVSLAEDPQGDAAQKTDTSHHDQDHPTFNKITPNLAEFAFSLYRQLAHQSNSTNIFFSPVSIATAFAMLSLGTKADTHDEILEGLNFNLTEIPEAQIH

SEQ ID NO: 1266 - protein, 22 aa, Homo sapiens
MPSSVSWGILLLAGLCCLVPVS

SEQ ID NO: 1267 - protein, 144 aa, Homo sapiens
MPSSVSWGILLLAGLCCLVPVSLAEDPQGDAAQKTDTSHHDQDHPTFNKITPNLAEFAFSLYRQLAHQSNSTNIFFSPVSIATAFAMLSLGTKADTHDEILEGLNFNLTEIPEAQIHEGFQELLRTLNQPDSQLQLTTGNGLFL

SEQ ID NO: 1268 - protein, 259 aa, Homo sapiens
MYSNVIGTVTSGKRKVYLLSLLLIGFWDCVTCHGSPVDICTAKPRDIPMNPMCIYRSPEKKATEDEGSEQKIPEATNRRVWELSKANSRFATTFYQHLADSKNDNDNIFLSPLSISTAFAMTKLGACNDTLQQLMEVFKFDTISEKTSDQIHFFFAKLNCRLYRKANKSSKLVSANRLFGDKSLTFNDLYVSDAFHKAFLEVNEEGSEAAASTAVVIAGRSLNPNRVTFKANRPFLVFIREVPLNTIIFMGRVANPCVK

SEQ ID NO: 1269 - protein, 464 aa, Homo sapiens
MYSNVIGTVTSGKRKVYLLSLLLIGFWDCVTCHGSPVDICTAKPRDIPMNPMCIYRSPEKKATEDEGSEQKIPEATNRRVWELSKANSRFATTFYQHLADSKNDNDNIFLSPLSISTAFAMTKLGACNDTLQQLMEVFKFDTISEKTSDQIHFFFAKLNCRLYRKANKSSKLVSANRLFGDKSLTFNETYQDISELVYGAKLQPLDFKENAEQSRAAINKWVSNKTEGRITDVIPSEAINELTVLVLVNTIYFKGLWKSKFSPENTRKELFYKADGESCSASMMYQEGKFRYRRVAEGTQVLELPFKGDDITMVLILPKPEKSLAKVEKELTPEVLQEWLDELEEMMLVVHMPRFRIEDGFSLKEQLQDMGLVDLFSPEKSKLPGIVAEGRDDLYVSDAFHKAFLEVNEEGSEAAASTAVVIAGRSLNPNRVTFKANRPFLVFIREVPLNTIIFMGRVANPCVK

SEQ ID NO: 1270 - protein, 491 aa, Homo sapiens
MALLWGLLVLSWSCLQGPCSVFSPVSAMEPLGRQLTSGPNQEQVSPLTLLKLGNQEPGGQTALKSPPGVCSRDPTPEQTHRLARAMMAFTADLFSLVAQTSTCPNLILSPLSVALALSHLALGAQNHTLQRLQQVLHAGSGPCLPHLLSRLCQDLGPGAFRLAARMYLQKGFPIKEDFLEQSEQLFGAKPVSLTGKQEDDLANINQWVKEATEGKIQEFLSGLPEDTVLLLLNAIHFQGFWRNKFDPSLTQRDSFHLDEQFTVPVEMMQARTYPLRWFLLEQPEIQVAHFPFKNNMSFVVLVPTHFEWNVSQVLANLSWDTLHPPLVWERPTKVRLPKLYLKHQMDLVATLSQLGLQELFQAPDLRGISEQSLVVSGVQHQSTLELSEVGVEAAAATSIAMSRMSLSSFSVNRPFLFFIFEDTTGLPLFVGSVRNPNPSAPRELKEQQDSPGNKDFLQSLKGFPRGDKLFGPDLKLVPPMEEDYPQFGSPK

SEQ ID NO: 1271 - protein, 491 aa, Homo sapiens; identical to SEQ ID NO: 1270

SEQ ID NO: 1272 - protein, 427 aa, Homo sapiens
MALLWGLLVLSWSCLQGPCSVFSPVSAMEPLGRQLTSGPNQEQVSPLTLLKLGNQVQPGAQNHTLQRLQQVLHAGSGPCLPHLLSRLCQDLGPGAFRLAARMYLQKGFPIKEDFLEQSEQLFGAKPVSLTGKQEDDLANINQWVKEATEGKIQEFLSGLPEDTVLLLLNAIHFQGFWRNKFDPSLTQRDSFHLDEQFTVPVEMMQARTYPLRWFLLEQPEIQVAHFPFKNNMSFVVLVPTHFEWNVSQVLANLSWDTLHPPLVWERPTKVRLPKLYLKHQMDLVATLSQLGLQELFQAPDLRGISEQSLVVSGVQHQSTLELSEVGVEAAAATSIAMSRMSLSSFSVNRPFLFFIFEDTTGLPLFVGSVRNPNPSAPRELKEQQDSPGNKDFLQSLKGFPRGDKLFGPDLKLVPPMEEDYPQFGSPK

SEQ ID NO: 1273 - protein, 255 aa, Homo sapiens
MALLWGLLVLSWSCLQGPCSVFSPVSAMEPLGRQLTSGPNQEQVSPLTLLKLGNQEPGGQTALKSPPGVCSRDPTPEQTHRLARAMMAFTADLFSLVAQTSTCPNLILSPLSVALALSHLALGAQNHTLQRLQQVLHAGSGPCLPHLLSRLCQDLGPGAFRLAARMYLQKGFPIKEDFLEQSEQLFGAKPVSLTGKQEDDLANINQWVKEATEGKIQEFLSGLPEDTVLLLLNAIHFQGFWRNKFDPSLTQRDSF

SEQ ID NO: 1274 - protein, 500 aa, Homo sapiens
MASRLTLLTLLLLLLAGDRASSNPNATSSSSQDPESLQDRGEGKVATTVISKMLFVEPILEVSSLPTTNSTTNSATKITANTTDEPTTQPTTEPTTQPTIQPTQPTTQLPTDSPTQPTTGSFCPGPVTLCSDLESHSTEAVLGDALVDFSLKLYHAFSAMKKVETNMAFSPFSIASLLTQVLLGAGENTKTNLESILSYPKDFTCVHQALKGFTTKGVTSVSQIFHSPDLAIRDTFVNASRTLYSSSPRVLSNNSDANLELINTWVAKNTNNKISRLLDSLPSDTRLVLLNAIYLSAKWKTTFDPKKTRMEPFHFKNSVIKVPMMNSKKYPVAHFIDQTLKAKVGQLQLSHNLSLVILVPQNLKHRLEDMEQALSPSVFKAIMEKLEMSKFQPTLLTLPRIKVTTSQDMLSIMEKLEFFDFSYDLNLCGLTEDPDLQVSAMQHQTVLELTETGVEAAAASAISVARTLLVFEVQQPFLFVLWDQQHKFPVFMGRVYDPRA

SEQ ID NO: 1275 - protein, 505 aa, Homo sapiens
MASRLTLLTLLLLLLAGFLEPQDRASSNPNATSSSSQDPESLQDRGEGKVATTVISKMLFVEPILEVSSLPTTNSTTNSATKITANTTDEPTTQPTTEPTTQPTIQPTQPTTQLPTDSPTQPTTGSFCPGPVTLCSDLESHSTEAVLGDALVDFSLKLYHAFSAMKKVETNMAFSPFSIASLLTQVLLGAGENTKTNLESILSYPKDFTCVHQALKGFTTKGVTSVSQIFHSPDLAIRDTFVNASRTLYSSSPRVLSNNSDANLELINTWVAKNTNNKISRLLDSLPSDTRLVLLNAIYLSAKWKTTFDPKKTRMEPFHFKNSVIKVPMMNSKKYPVAHFIDQTLKAKVGQLQLSHNLSLVILVPQNLKHRLEDMEQALSPSVFKAIMEKLEMSKFQPTLLTLPRIKVTTSQDMLSIMEKLEFFDFSYDLNLCGLTEDPDLQVSAMQHQTVLELTETGVEAAAASAISVARTLLVFEVQQPFLFVLWDQQHKFPVFMGRVYDPRA

SEQ ID NO: 1276 - protein, 448 aa, Homo sapiens
MLFVEPILEVSSLPTTNSTTNSATKITANTTDEPTTQPTTEPTTQPTIQPTQPTTQLPTDSPTQPTTGSFCPGPVTLCSDLESHSTEAVLGDALVDFSLKLYHAFSAMKKVETNMAFSPFSIASLLTQVLLGAGENTKTNLESILSYPKDFTCVHQALKGFTTKGVTSVSQIFHSPDLAIRDTFVNASRTLYSSSPRVLSNNSDANLELINTWVAKNTNNKISRLLDSLPSDTRLVLLNAIYLSAKWKTTFDPKKTRMEPFHFKNSVIKVPMMNSKKYPVAHFIDQTLKAKVGQLQLSHNLSLVILVPQNLKHRLEDMEQALSPSVFKAIMEKLEMSKFQPTLLTLPRIKVTTSQDMLSIMEKLEFFDFSYDLNLCGLTEDPDLQVSAMQHQTVLELTETGVEAAAASAISVARTLLVFEVQQPFLFVLWDQQHKFPVFMGRVYDPRA

SEQ ID NO: 1277 - protein, 160 aa, Homo sapiens
MASRLTLLTLLLLLLAGDRASSNPNATSSSSQDPESLQDRGEGKVATTVISKMLFVEPILEVSSLPTTNSTTNSATKITANTTDEPTTQPTTEPTTQPTIQPTQPTTQLPTDSPTQPTTGSFCPGPVTLCSDLESHSTEAVLGDALVDFSLKLYHAFSAM

SEQ ID NO: 1278 - protein, 133 aa, Homo sapiens [sequence omitted]

SEQ ID NO: 1279 - protein, 747 aa, Homo sapiens
MADEAALALQPGGSPSAAGADREAASSPAGEPLRKRPRRDGPGLERSPGEPGGAAPEREVPAAARGCPGAAAAALWREAEAEAAAAGGEQEAQATAAAGEGDNGPGLQGPSREPPLADNLYDEDDDDEGEEEEEAAAAAIGYRDNLLFGDEIITNGFHSCESDEEDRASHASSSDWTPRPRIGPYTFVQQHLMIGTDPRTILKDLLPETIPPPELDDMTLWQIVINILSEPPKRKKRKDINTIEDAVKLLQECKKIIVLTGAGVSVSCGIPDFRSRDGIYARLAVDFPDLPDPQAMFDIEYFRKDPRPFFKFAKEIYPGQFQPSLCHKFIALSDKEGKLLRNYTQNIDTLEQVAGIQRIIQCHGSFATASCLICKYKVDCEAVRGDIFNQVVPRCPRCPADEPLAIMKPEIVFFGENLPEQFHRAMKYDKDEVDLLIVIGSSLKVRPVALIPSSIPHEVPQILINREPLPHLHFDVELLGDCDVIINELCHRLGGEYAKLCCNPVKLSEITEKPPRTQKELAYLSELPPTPLHVSEDSSSPERTSPPDSSVIVTLLDQAAKSNDDLDVSESKGCMEEKPQEVQTSRNVESIAEQMENPDLKNVGSSTGEKNERTSVAGTVRKCWPNRVAKEQISRRLDGNQYLFLPPNRYIFHGAEVYSDSEDDVLSSSSCGSNSDSGTCQSPSLEEPMEDESEIEEFYNGLEDEPDVPERAGGAGFGTDGDDQEAINEAISVKQEVTDMNYPSNKS

SEQ ID NO: 1280 - protein, 444 aa, Homo sapiens
MCLCSGRKTILEIYPGQFQPSLCHKFIALSDKEGKLLRNYTQNIDTLEQVAGIQRIIQCHGSFATASCLICKYKVDCEAVRGDIFNQVVPRCPRCPADEPLAIMKPEIVFFGENLPEQFHRAMKYDKDEVDLLIVIGSSLKVRPVALIPSSIPHEVPQILINREPLPHLHFDVELLGDCDVIINELCHRLGGEYAKLCCNPVKLSEITEKPPRTQKELAYLSELPPTPLHVSEDSSSPERTSPPDSSVIVTLLDQAAKSNDDLDVSESKGCMEEKPQEVQTSRNVESIAEQMENPDLKNVGSSTGEKNERTSVAGTVRKCWPNRVAKEQISRRLDGNQYLFLPPNRYIFHGAEVYSDSEDDVLSSSSCGSNSDSGTCQSPSLEEPMEDESEIEEFYNGLEDEPDVPERAGGAGFGTDGDDQEAINEAISVKQEVTDMNYPSNKS

SEQ ID NO: 1281 - protein, 444 aa, Homo sapiens; identical to SEQ ID NO: 1280

SEQ ID NO: 1282 - protein, 452 aa, Homo sapiens
MFDIEYFRKDPRPFFKFAKEIYPGQFQPSLCHKFIALSDKEGKLLRNYTQNIDTLEQVAGIQRIIQCHGSFATASCLICKYKVDCEAVRGDIFNQVVPRCPRCPADEPLAIMKPEIVFFGENLPEQFHRAMKYDKDEVDLLIVIGSSLKVRPVALIPSSIPHEVPQILINREPLPHLHFDVELLGDCDVIINELCHRLGGEYAKLCCNPVKLSEITEKPPRTQKELAYLSELPPTPLHVSEDSSSPERTSPPDSSVIVTLLDQAAKSNDDLDVSESKGCMEEKPQEVQTSRNVESIAEQMENPDLKNVGSSTGEKNERTSVAGTVRKCWPNRVAKEQISRRLDGNQYLFLPPNRYIFHGAEVYSDSEDDVLSSSSCGSNSDSGTCQSPSLEEPMEDESEIEEFYNGLEDEPDVPERAGGAGFGTDGDDQEAINEAISVKQEVTDMNYPSNKS

SEQ ID NO: 1283 - protein, 328 aa, Homo sapiens
MSVNYAAGLSPYADKGKCGLPEIFDPPEELERKVWELARLVWQSSSVVFHTGAGISTASGIPDFRGPHGVWTMEERGLAPKFDTTFESARPTQTHMALVQLERVGLLRFLVSQNVDGLHVRSGFPRDKLAELHGNMFVEECAKCKTQYVRDTVVGTMGLKATGRLCTVAKARGLRACRNADLSITLGTSLQIRPSGNLPLATKRRGGRLVIVNLQPTKHDRHADLRIHGYVDEVMTRLMKHLGLEIPAWDGPRVLERALPPLPRPPTPKLEPKEESPTRINGSIPAGPKQEPCAQHNGSEPASPKRERPTSPAPHRPPKRVKAKAVPS

SEQ ID NO: 1284 - protein, 355 aa, Homo sapiens
MSVNYAAGLSPYADKGKCGLPEIFDPPEELERKVWELARLVWQSSSVVFHTGAGISTASGIPDFRGPHGVWTMEERGLAPKFDTTFESARPTQTHMALVQLERVGLLRFLVSQNVDGLHVRSGFPRDKLAELHGNMFVEECAKCKTQYVRDTVVGTMGLKATGRLCTVAKARGLRACRGELRDTILDWEDSLPDRDLALADEASRNADLSITLGTSLQIRPSGNLPLATKRRGGRLVIVNLQPTKHDRHADLRIHGYVDEVMTRLMKHLGLEIPAWDGPRVLERALPPLPRPPTPKLEPKEESPTRINGSIPAGPKQEPCAQHNGSEPASPKRERPTSPAPHRPPKRVKAKAVPS

SEQ ID NO: 1285 - protein, 283 aa, Homo sapiens
MEERGLAPKFDTTFESARPTQTHMALVQLERVGLLRFLVSQNVDGLHVRSGFPRDKLAELHGNMFVEECAKCKTQYVRDTVVGTMGLKATGRLCTVAKARGLRACRGELRDTILDWEDSLPDRDLALADEASRNADLSITLGTSLQIRPSGNLPLATKRRGGRLVIVNLQPTKHDRHADLRIHGYVDEVMTRLMKHLGLEIPAWDGPRVLERALPPLPRPPTPKLEPKEESPTRINGSIPAGPKQEPCAQHNGSEPASPKRERPTSPAPHRPPKRVKAKAVPS

SEQ ID NO: 1286 - protein, 524 aa, Homo sapiens
MTEDKVTGTLVFTVITAVLGSFQFGYDIGVINAPQQVIISHYRHVLGVPLDDRKAINNYVINSTDELPTISYSMNPKPTPWAEEETVAAAQLITMLWSLSVSSFAVGGMTASFFGGWLGDTLGRIKAMLVANILSLVGALLMGFSKLGPSHILIIAGRSISGLYCGLISGLVPMYIGEIAPTALRGALGTFHQLAIVTGILISQIIGLEFILGNYDLWHILLGLSGVRAILQSLLLFFCPESPRYLYIKLDEEVKAKQSLKRLRGYDDVTKDINEMRKEREEASSEQKVSIIQLFTNSSYRQPILVALMLHVAQQFSGINGIFYYSTSIFQTAGISKPVYATIGVGAVNMVFTAVSVFLVEKAGRRSLFLIGMSGMFVCAIFMSVGLVLLNKFSWMSYVSMIAIFLFVSFFEIGPGPIPWFMVAEFFSQGPRPAALAIAAFSNWTCNFIVALCFQYIADFCGPYVFFLFAGVLLAFTLFTFFKVPETKGKSFEEIAAEFQKKSGSAHRPKAAVEMKFLGATETV

SEQ ID NO: 1287 - protein, 405 aa, Homo sapiens
MHLNRIKAMLVANILSLVGALLMGFSKLGPSHILIIAGRSISGLYCGLISGLVPMYIGEIAPTALRGALGTFHQLAIVTGILISQIIGLEFILGNYDLWHILLGLSGVRAILQSLLLFFCPESPRYLYIKLDEEVKAKQSLKRLRGYDDVTKDINEMRKEREEASSEQKVSIIQLFTNSSYRQPILVALMLHVAQQFSGINGIFYYSTSIFQTAGISKPVYATIGVGAVNMVFTAVSVFLVEKAGRRSLFLIGMSGMFVCAIFMSVGLVLLNKFSWMSYVSMIAIFLFVSFFEIGPGPIPWFMVAEFFSQGPRPAALAIAAFSNWTCNFIVALCFQYIADFCGPYVFFLFAGVLLAFTLFTFFKVPETKGKSFEEIAAEFQKKSGSAHRPKAAVEMKFLGATETV

SEQ ID NO: 1288 - protein, 429 aa, Homo sapiens
MAAQGYGYYRTVIFSAMFGGYSLYYFNRKTFSFVMPSLVEEIPLDKDDLGFITSSQSAAYAISKFVSGVLSDQMSARWLFSSGLLLVGLVNIFFAWSSTVPVFAALWFLNGLAQGLGWPPCGKVLRKWFEPSQFGTWWAILSTSMNLAGGLGPILATILAQSYSWRSTLALSGALCVVVSFLCLLLIHNEPADVGLRNLDPMPSEGKKGSLKEESTLQELLLSPYLWVLSTGYLVVFGVKTCCTDWGQFFLIQEKGQSALVGSSYMSALEVGGLVGSIAAGYLSDRAMAKAGLSNYGNPRHGLLLFMMAGMTVSMYLFRVTVTSDSPKLWILVLGAVFGFSSYGPIALFGVIANESAPPNLCGTSHAIVGLMANVGGFLAGLPFSTIAKHYSWSTAFWVAEVICAASTAAFFLLRNIRTKMGRVSKKAE

SEQ ID NO: 1289 - protein, 451 aa, Homo sapiens
MAAQGYGYYRTVIFSAMFGGYSLYYFNRKTFSFVMPSLVEEIPLDKDDLGFITSSQSAAYAISKFVSGVLSDQMSARWLFSSGLLLVGLVNIFFAWSSTVPVFAALWFLNGLAQGLGWPPCGKVLRKWFEPSQFGTWWAILSTSMNLAGGLGPILATILAQSYSWRSTLALSGALCVVVSFLCLLLIHNEPADVGLRNLDPMPSEGKKGSLKEESTLQELLLSPYLWVLSTGYLVVFGVKTCCTDWGQFFLIQEKGQSALVGSSYMSALEVGGLVGSIAAGYLSDRAMAKAGLSNYGNPRHGLLLFMMAGMTVSMYLFRVTVTSDSPKDVAFWTLALHPLAELTGFTEHELWILVLGAVFGFSSYGPIALFGVIANESAPPNLCGTSHAIVGLMANVGGFLAGLPFSTIAKHYSWSTAFWVAEVICAASTAAFFLLRNIRTKMGRVSKKAE

SEQ ID NO: 1290 - protein, 571 aa, Homo sapiens
MTRAGDHNRQRGCCGSLADYLTSAKFLLYLGHSLSTWGDRMWHFAVSVFLVELYGNSLLLTAVYGLVVAGSVLVLGAIIGDWVDKNARLKVAQTSLVVQNVSVILCGIILMMVFLHKHELLTMYHGWVLTSCYILIITIANIANLASTATAITIQRDWIVVVAGEDRSKLANMNATIRRIDQLTNILAPMAVGQIMTFGSPVIGCGFISGWNLVSMCVEYVLLWKVYQKTPALAVKAGLKEEETELKQLNLHKDTEPKPLEGTHLMGVKDSNIHELEHEQEPTCASQMAEPFRTFRDGWVSYYNQPVFLAGMGLAFLYMTVLGFDCITTGYAYTQGLSGSILSILMGASAITGIMGTVAFTWLRRKCGLVRTGLISGLAQLSCLILCVISVFMPGSPLDLSVSPFEDIRSRFIQGESITPTKIPEITTEIYMSNGSNSANIVPETSPESVPIISVSLLFAGVIAARIGLWSFDLTVTQLLQENVIESERGIINGVQNSMNYLLDLLHFIMVILAPNPEAFGLLVLISVSFVAMGHIMYFRFAQNTLGNKLFACGPDAKEVRKENQANTSVV

SEQ ID NO: 1291 - protein, 200 aa, Homo sapiens
MTRAGDHNRQRGCCGSLADYLTSAKFLLYLGHSLSTWGDRMWHFAVSVFLVELYGNSLLLTAVYGLVVAGSVLVLGAIIGDWVDKNARLKVAQTSLVVQNVSVILCGIILMMVFLHKHELLTMYHGWVLTSCYILIITIANIANLASTATAITIQRDWIVVVAGEDRSKLANMNATIRRIDQLTNILAPMAVGQIMTFGS

SEQ ID NO: 1292 - protein, 25 aa, Homo sapiens
MTRAGDHNRQRGCCGSLADYLTSAK

SEQ ID NO: 1293 - protein, 25 aa, Homo sapiens
MTRAGDHNRQRGCCGSLADYLTSAK

SEQ ID NO: 1294 - protein, 55 aa, Homo sapiens
MTRAGDHNRQRGCCGSLADYLTSAKFLLYLGHSLSTWGDRMWHFAVSVFLVELYG

SEQ ID NO: 1295 - protein, 99 aa, Homo sapiens
MRASIHKKLRKSSGIVTILYSAFVLVSTSDMAEETEDAWPRCYLQFLALLLTSTSARAAAAIAAAEEPAGSPSVMTRAGDHNRQRGCCGSLADYLTSAK

SEQ ID NO: 1296 - protein, 167 aa, Homo sapiens [sequence omitted]

SEQ ID NO: 1297 - protein, 831 aa, Homo sapiens
MERPWGAADGLSRWPHGLGLLLLLQLLPPSTLSQDRLDAPPPPAAPLPRWSGPIGVSWGLRAAAAGGAFPRGGRWRRSAPGEDEECGRVRDFVAKLANNTHQHVFDDLRGSVSLSWVGDSTGVILVLTTFHVPLVIMTFGQSKLYRSEDYGKNFKDITDLINNTFIRTEFGMAIGPENSGKVVLTAEVSGGSRGGRIFRSSDFAKNFVQTDLPFHPLTQMMYSPQNSDYLLALSTENGLWVSKNFGGKWEEIHKAVCLAKWGSDNTIFFTTYANGSCKADLGALELWRTSDLGKSFKTIGVKIYSFGLGGRFLFASVMADKDTTRRIHVSTDQGDTWSMAQLPSVGQEQFYSILAANDDMVFMHVDEPGDTGFGTIFTSDDRGIVYSKSLDRHLYTTTGGETDFTNVTSLRGVYITSVLSEDNSIQTMITFDQGGRWTHLRKPENSECDATAKNKNECSLHIHASYSISQKLNVPMAPLSEPNAVGIVIAHGSVGDAISVMVPDVYISDDGGYSWTKMLEGPHYYTILDSGGIIVAIEHSSRPINVIKFSTDEGQCWQTYTFTRDPIYFTGLASEPGARSMNISIWGFTESFLTSQWVSYTIDFKDILERNCEEKDYTIWLAHSTDPEDYEDGCILGYKEQFLRLRKSSVCQNGRDYVVTKQPSICLCSLEDFLCDFGYYRPENDSKCVEQPELKGHDLEFCLYGREEHLTTNGYRKIPGDKCQGGVNPVREVKDLKKKCTSNFLSPEKQNSKSNSVPIILAIVGLMLVTVVAGVLIVKKYVCGGRFLVHRYSVLQQHAEANGVDGVDALDTASHTNKSGYHDDSDEDLLE

SEQ ID NO: 1298 - protein, 694 aa, Homo sapiens
MTFGQSKLYRSEDYGKNFKDITDLINNTFIRTEFGMAIGPENSGKVVLTAEVSGGSRGGRIFRSSDFAKNFVQTDLPFHPLTQMMYSPQNSDYLLALSTENGLWVSKNFGGKWEEIHKAVCLAKWGSDNTIFFTTYANGSCTDLGALELWRTSDLGKSFKTIGVKIYSFGLGGRFLFASVMADKDTTRRIHVSTDQGDTWSMAQLPSVGQEQFYSILAANDDMVFMHVDEPGDTGFGTIFTSDDRGIVYSKSLDRHLYTTTGGETDFTNVTSLRGVYITSVLSEDNSIQTMITFDQGGRWTHLRKPENSECDATAKNKNECSLHIHASYSISQKLNVPMAPLSEPNAVGIVIAHGSVGDAISVMVPDVYISDDGGYSWTKMLEGPHYYTILDSGGIIVAIEHSSRPINVIKFSTDEGQCWQTYTFTRDPIYFTGLASEPGARSMNISIWGFTESFLTSQWVSYTIDFKDILERNCEEKDYTIWLAHSTDPEDYEDGCILGYKEQFLRLRKSSVCQNGRDYVVTKQPSICLCSLEDFLCDFGYYRPENDSKCVEQPELKGHDLEFCLYGREEHLTTNGYRKIPGDKCQGGVNPVREVKDLKKKCTSNFLSPEKQNSKSNSVPIILAIVGLMLVTVVAGVLIVKKYVCGGRFLVHRYSVLQQHAEANGVDGVDALDTASHTNKSGYHDDSDEDLLE

SEQ ID NO: 1299 - protein, 509 aa, Homo sapiens
MGVLKFKHIFFRSFVKSSGVSQIVFTFLLIPCCLTLNFRAPPVIPNVPFLWAWNAPSEFCLGKFDEPLDMSLFSFIGSPRINATGQGVTIFYVDRLGYYPYIDSITGVTVNGGIPQKISLQDHLDKAKKDITFYMPVDNLGMAVIDWEEWRPTWARNWKPKDVYKNRSIELVQQQNVQLSLTEATEKAKQEFEKAGKDFLVETIKLGKLLRPNHLWGYYLFPDCYNHHYKKPGYNGSCFNVEIKRNDDLSWLWNESTALYPSIYLNTQQSPVAATLYVRNRVREAIRVSKIPDAKSPLPVFAYTRIVFTDQVLKFLSQDELVYTFGETVALGASGIVIWGTLSIMRSMKSCLLLDNYMETILNPYIINVTLAAKMCSQVLCQEQGVCIRKNWNSSDYLHLNPDNFAIQLEKGGKFTVRGKPTLEDLEQFSEKFYCSCYSTLSCKEKADVKDTDAVDVCIADGVCIDAFLKPPMETEEPQIFYNASPSTLSATMFIVSILFLIISSVASL

SEQ ID NO: 1300 - protein, 511 aa, Homo sapiens
MGVLKFKHIFFRSFVKSSGVSQIVFTFLLIPCCLTLNFRAPPVIPNVPFLWAWNAPSEFCLGKFDEPLDMSLFSFIGSPRINATGQGVTIFYVDRLGYYPYIDSITGVTVNGGIPQKISLQDHLDKAKKDITFYMPVDNLGMAVIDWEEWRPTWARNWKPKDVYKNRSIELVQQQNVQLSLTEATEKAKQEFEKAGKDFLVETIKLGKLLRPNHLWGYYLFPDCYNHHYKKPGYNGSCFNVEIKRNDDLSWLWNESTALYPSIYLNTQQSPVAATLYVRNRVREAIRVSKIPDAKSPLPVFAYTRIVFTDQVLKFLSQDELVYTFGETVALGASGIVIWGTLSIMRSMKSCLLLDNYMETILNPYIINVTLAAKMCSQVLCQEQGVCIRKNWNSSDYLHLNPDNFAIQLEKGGKFTVRGKPTLEDLEQFSEKFYCSCYSTLSCKEKADVKDTDAVDVCIADGVCIDAFLKPPMETEEPQIFYNASPSTLSATMFIWRLEVWDQGISRIGFF

SEQ ID NO: 1301 - protein, 509 aa, Homo sapiens; identical to SEQ ID NO: 1299

SEQ ID NO: 1302 - protein, 80 aa, Homo sapiens
MGVLKFKHIFFRSFVKSSGVSQIVFTFLLIPCCLTLNFRAPPVIPNVPFLWAWNAPSEFCLGKFDEPLDMSLFSFIGSPR

SEQ ID NO: 1303 - protein, 509 aa, Homo sapiens; identical to SEQ ID NO: 1299

SEQ ID NO: 1304 - protein, 509 aa, Homo sapiens; identical to SEQ ID NO: 1299

SEQ ID NO: 1305 - protein, 587 aa, Homo sapiens
MPRYGASLRQSCPRSGREQGQDGTAGAPGLLWMGLVLALALALALALALSDSRVLWAPAEAHPLSPQGHPARLHRIVPRLRDVFGWGNLTCPICKGLFTAINLGLKKEPNVARVGSVAIKLCNLLKIAPPAVCQSIVHLFEDDMVEVWRRSVLSPSEACGLLLGSTCGHWDIFSSWNISLPTVPKPPPKPPSPPAPGAPVSRILFLTDLHWDHDYLEGTDPDCADPLCCRRGSGLPPASRPGAGYWGEYSKCDLPLRTLESLLSGLGPAGPFDMVYWTGDIPAHDVWHQTRQDQLRALTTVTALVRKFLGPVPVYPAVGNHESTPVNSFPPPFIEGNHSSRWLYEAMAKAWEPWLPAEALRTLRYLSSVETQEGKRKVHIIGHIPPGHCLKSWSWNYYRIVARYENTLAAQFFGHTHVDEFEVFYDEETLSRPLAVAFLAPSATTYIGLNPGYRVYQIDGNYSGSSHVVLDHETYILNLTQANIPGAIPHWQLLYRARETYGLPNTLPTAWHNLVYRMRGDMQLFQTFWFLYHKGHPPSEPCGTPCRLATLCAQLSARADSPALCRHLMPDGSLPEAQSLWPRPLFC

SEQ ID NO: 1306 - protein, 631 aa, Homo sapiens
MPRYGASLRQSCPRSGREQGQDGTAGAPGLLWMGLVLALALALALALALSDSRVLWAPAEAHPLSPQGHPARLHRIVPRLRDVFGWGNLTCPICKGLFTAINLGLKKEPNVARVGSVAIKLCNLLKIAPPAVCQSIVHLFEDDMVEVWRRSVLSPSEACGLLLGSTCGHWDIFSSWNISLPTVPKPPPKPPSPPAPGAPVSRILFLTDLHWDHDYLEGTDPDCADPLCCRRGSGLPPASRPGAGYWGEYSKCDLPLRTLESLLSGLGPAGPFDMVYWTGDIPAHDVWHQTRQDQLRALTTVTALVRKFLGPVPVYPAVGNHESTPVNSFPPPFIEGNHSSRWLYEAMAKAWEPWLPAEALRTLRIGGFYALSPYPGLRLISLNMNFCSRENFWLLINSTDPAGQLQWLVGELQAAEDRGDKVHIIGHIPPGHCLKSWSWNYYRIVARYENTLAAQFFGHTHVDEFEVFYDEETLSRPLAVAFLAPSATTYIGLNPGYRVYQIDGNYSGSSHVVLDHETYILNLTQANIPGAIPHWQLLYRARETYGLPNTLPTAWHNLVYRMRGDMQLFQTFWFLYHKGHPPSEPCGTPCRLATLCAQLSARADSPALCRHLMPDGSLPEAQSLWPRPLFC

SEQ ID NO: 1307 - protein, 575 aa, Homo sapiens
MPRYGASLRQSCPRSGREQGQDGTAGAPGLLWMGLVLALALALALALALSDSRVLWAPAEAHPLSPQGHPARLHRIVPRLRDVFGWGNLTCPICKGLFTAINLGLKKEPNVARVGSVAIKLCNLLKIAPPAVCQSIVHLFEDDMVEVWRRSVLSPSEACGLLLGSTCGHWDIFSSWNISLPTVPKPPPKPPSPPAPGAPVSRILFLTDLHWDHDYLEGTDPDCADPLCCRRGSGLPPASRPGAGYWGEYSKCDLPLRTLESLLSGLGPAGPFDMVYWTGDIPAHDVWHQTRQDQLRALTTVTALVRKFLGPVPVYPAVGNHESTPVNSFPPPFIEGNHSSRWLYEAMAKAWEPWLPAEALRTLRKVHIIGHIPPGHCLKSWSWNYYRIVARYENTLAAQFFGHTHVDEFEVFYDEETLSRPLAVAFLAPSATTYIGLNPGYRVYQIDGNYSGSSHVVLDHETYILNLTQANIPGAIPHWQLLYRARETYGLPNTLPTAWHNLVYRMRGDMQLFQTFWFLYHKGHPPSEPCGTPCRLATLCAQLSARADSPALCRHLMPDGSLPEAQSLWPRPLFC

SEQ ID NO: 1308 - protein, 630 aa, Homo sapiens
MPRYGASLRQSCPRSGREQGQDGTAGAPGLLWMGLVLALALALALALALSDSRVLWAPAEAHPLSPQGHPARLHRIVPRLRDVFGWGNLTCPICKGLFTAINLGLKEPNVARVGSVAIKLCNLLKIAPPAVCQSIVHLFEDDMVEVWRRSVLSPSEACGLLLGSTCGHWDIFSSWNISLPTVPKPPPKPPSPPAPGAPVSRILFLTDLHWDHDYLEGTDPDCADPLCCRRGSGLPPASRPGAGYWGEYSKCDLPLRTLESLLSGLGPAGPFDMVYWTGDIPAHDVWHQTRQDQLRALTTVTALVRKFLGPVPVYPAVGNHESTPVNSFPPPFIEGNHSSRWLYEAMAKAWEPWLPAEALRTLRIGGFYALSPYPGLRLISLNMNFCSRENFWLLINSTDPAGQLQWLVGELQAAEDRGDKVHIIGHIPPGHCLKSWSWNYYRIVARYENTLAAQFFGHTHVDEFEVFYDEETLSRPLAVAFLAPSATTYIGLNPGYRVYQIDGNYSGSSHVVLDHETYILNLTQANIPGAIPHWQLLYRARETYGLPNTLPTAWHNLVYRMRGDMQLFQTFWFLYHKGHPPSEPCGTPCRLATLCAQLSARADSPALCRHLMPDGSLPEAQSLWPRPLFC

SEQ ID NO: 1309 - protein, 366 aa, Homo sapiens
MPRYGASLRQSCPRSGREQGQDGTAGAPGLLWMGLVLALALALALALALSDSRVLWAPAEAHPLSPQGHPARLHRIVPRLRDVFGWGNLTCPICKGLFTAINLGLKKEPNVARVGSVAIKLCNLLKIAPPAVCQSIVHLFEDDMVEVWRRSVLSPSEACGLLLGSTCGHWDIFSSWNISLPTVPKPPPKPPSPPAPGAPVSRILFLTDLHWDHDYLEGTDPDCADPLCCRRGSGLPPASRPGAGYWGEYSKCDLPLRTLESLLSGLGPAGPFDMVYWTGDIPAHDVWHQTRQDQLRALTTVTALVRKFLGPVPVYPAVGNHESTPVNSFPPPFIEGNHSSRWLYEAMAKAWEPWLPAEALRTLRCI

SEQ ID NO: 1310 - protein, 402 aa, Homo sapiens
MPRYGASLRQSCPRSGREQGQDGTAGAPGLLWMGLVLALALALALALALSDSRVLWAPAEAHPLSPQGHPARLHRIVPRLRDVFGWGNLTCPICKGLFTAINLGLKKEPNVARVGSVAIKLCNLLKIAPPAVCQSIVHLFEDDMVEVWRRSVLSPSEACGLLLGSTCGHWDIFSSWNISLPTVPKPPPKPPSPPAPGAPVSRILFLTDLHWDHDYLEGTDPDCADPLCCRRGSGLPPASRPGAGYWGEYSKCDLPLRTLESLLSGLGPAGPFDMVYWTGDIPAHDVWHQTRQDQLRALTTVTALVRKFLGPVPVYPAVGNHESTPVNSFPPPFIEGNHSSRWLYEAMAKAWEPWLPAEALRTLRYLSSVETQEGKRKNWGVLCSFPIPRSPPHLSQYEFLFP

SEQ ID NO: 1311 - protein, 317 aa, Homo sapiens
MYNMMETELKPPGPQQTSGGGGGNSTAAAAGGNQKNSPDRVKRPMNAFMVWSRGQRRKMAQENPKMHNSEISKRLGAEWKLLSETEKRPFIDEAKRLRALHMKEHPDYKYRPRRKTKTLMKKDKYTLPGGLLAPGGNSMASGVGVGAGLGAGVNQRMDSYAHMNGWSNGSYSMMQDQLGYPQHPGLNAHGAAQMQPMHRYDVSALQYNSMTSSQTYMNGSPTYSMSYSQQGTPGMALGSMGSVVKSEASSSPPVVTSSSHSRAPCQAGDLRDMISMYLPGAEVPEPAAPSRLHMSQHYQSGPVPGTAINGTLPLSHM

SEQ ID NO: 1312 - protein, 317 aa, Homo sapiens; identical to SEQ ID NO: 1311

SEQ ID NO: 1313 - protein, 393 aa, Homo sapiens
MHQAGYPGCRGAMAESHLLQWLLLLLPTLCGPGTAAWTTSSLACAQGPEFWCQSLEQALQCRALGHCLQEVWGHVGADDLCQECEDIVHILNKMAKEAIFQDTMRKFLEQECNVLPLKLLMPQCNQVLDDYFPLVIDYFQNQTDSNGICMHLGLCKSRQPEPEQEPGMSDPLPKPLRDPLPDPLLDKLVLPVLPGALQARPGPHTQDLSEQQFPIPLPYCWLCRALIKRIQAMIPKGALAVAVAQVCRVVPLVAGGICQCLAERYSVILLDTLLGRMLPQLVCRLVLRCSMDDSAGPRSPTGEWLPRDSECHLCMSVTTQAGNSSEQAIPQAMLQACVGSWLDREKCKQFVEQHTPQLLTLVPRGWDAHTTCQALGVCGTMSSPLQCIHSPDL

SEQ ID NO: 1314 - protein, 393 aa, Homo sapiens; identical to SEQ ID NO: 1313

SEQ ID NO: 1315 - protein, 349 aa, Homo sapiens
MAESHLLQWLLLLLPTLCGPGTAAWTTSSLACAQGPEFWCQSLEQALQCRALGHCLQDTMRKFLEQECNVLPLKLLMPQCNQVLDDYFPLVIDYFQNQTDSNGICMHLGLCKSRQPEPEQEPGMSDPLPKPLRDPLPDPLLDKLVLPVLPGALQARPGPHTQDLSEQQFPIPLPYCWLCRALIKRIQAMIPKGALAVAVAQVCRVVPLVAGGICQCLAERYSVILLDTLLGRMLPQLVCRLVLRCSMDDSAGPRSPTGEWLPRDSECHLCMSVTTQAGNSSEQAIPQAMLQACVGSWLDREKCKQFVEQHTPQLLTLVPRGWDAHTTCQALGVCGTMSSPLQCIHSPDL

SEQ ID NO: 1316 - protein, 383 aa, Homo sapiens
GAMAESHLLQWLLLLLPTLCGPGTAAWTTSSLACAQGPEFWCQSLEQALQCRALGHCLQEVWGHVGADDLCQECEDIVHILNKMAKEAIFQDTMRKFLEQECNVLPLKLLMPQCNQVLDDYFPLVIDYFQNQTDSNGICMHLGLCKSRQPEPEQEPGMSDPLPKPLRDPLPDPLLDKLVLPVLPGALQARPGPHTQDLSEQQFPIPLPYCWLCRALIKRIQAMIPKGALAVAVAQVCRVVPLVAGGICQCLAERYSVILLDTLLGRMLPQLVCRLVLRCSMDDSAGPRSPTGEWLPRDSECHLCMSVTTQAGNSSEQAIPQAMLQACVGSWLDREKCKQFVEQHTPQLLTLVPRGWDAHTTCQALGVCGTMSSPLQCIHSPDL

SEQ ID NO: 1317 - protein, 575 aa, Homo sapiens
MLGVLVLGALALAGLGFPAPAEPQPGGSQCVEHDCFALYPGPATFLNASQICDGLRGHLMTVRSSVAADVISLLLNGDGGVGRRRLWIGLQLPPGCGDPKRLGPLRGFQWVTGDNNTSYSRWARLDLNGAPLCGPLCVAVSAAEATVPSEPIWEEQQCEVKADGFLCEFHFPATCRPLAVEPGAAAAAVSITYGTPFAARGADFQALPVGSSAAVAPLGLQLMCTAPPGAVQGHWAREAPGAWDCSVENGGCEHACNAIPGAPRCQCPAGAALQADGRSCTASATQSCNDLCEHFCVPNPDQPGSYSCMCETGYRLAADQHRCEDVDDCILEPSPCPQRCVNTQGGFECHCYPNYDLVDGECVEPVDPCFRANCEYQCQPLNQTSYLCVCAEGFAPIPHEPHRCQMFCNQTACPADCDPNTQASCECPEGYILDDGFICTDIDECENGGFCSGVCHNLPGTFECICGPDSALARHIGTDCDSGKVDGGDSGSGEPPPSPTPGSTLTPPAVGLVHSGLLIGISIASLCLVVALLALLCHLRKKQGAARAKMEYKCAAPSKEVVLQHVRTERTPQRL

SEQ ID NO: 1318 - protein, 557 aa, Homo sapiens
MSEAASQGLRAAARSVWAGTDRRGCRHRRPVPLCSGTALSQCPRFPRRLHAARLGNMLGVLVLGALALAGLGFPAPGCGDPKRLGPLRGFQWVTGDNNTSYSRWARLDLNGAPLCGPLCVAVSAAEATVPSEPIWEEQQCEVKADGFLCEFHFPATCRPLAVEPGAAAAAVSITYGTPFAARGADFQALPVGSSAAVAPLGLQLMCTAPPGAVQGHWAREAPGAWDCSVENGGCEHACNAIPGAPRCQCPAGAALQADGRSCTASATQSCNDLCEHFCVPNPDQPGSYSCMCETGYRLAADQHRCEDVDDCILEPSPCPQRCVNTQGGFECHCYPNYDLVDGECVEPVDPCFRANCEYQCQPLNQTSYLCVCAEGFAPIPHEPHRCQMFCNQTACPADCDPNTQASCECPEGYILDDGFICTDIDECENGGFCSGVCHNLPGTFECICGPDSALARHIGTDCDSGKVDGGDSGSGEPPPSPTPGSTLTPPAVGLVHSGLLIGISIASLCLVVALLALLCHLRKKQGAARAKMEYKCAAPSKEVVLQHVRTERTPQRL

SEQ ID NO: 1319 - protein, 353 aa, Homo sapiens
MELTELLLVVMLLLTARLTLSSPAPPACDLRVLSKLLRDSHVLHSRLSQCPEVHPLPTPVLLPAVDFSLGEWKTQMEETKAQDILGAVTLLLEGVMAARGQLGPTCLSSLLGQLSGQVRLLLGALQSLLGTQLPPQGRTTAHKDPNAIFLSFQHLLRGKVRFLMLVGGSTLCVRRAPPTTAVPSRTSLVLTLNELPNRTSGLLETNFTASARTTGSGLLKWQQGFRAKIPGLLNQTSRSLDQIPGYLNRIHELLNGTRGLFPGPSRRTLGAPDISSGTSDTGSLPPNLQPGYSPSPTHPPTGQYTLFPLPPTLPTPVVQLHPLLPDPSAPTPTPTSPLLNTSYTHSQNLSQEG

SEQ ID NO: 1320 - protein, 314 aa, Homo sapiens
MELTELLLVVMLLLTARLTLSSPAPPACDLRVLSKLLRDSHVLHSRLSQCPEVHPLPTPVLLPAVDFSLGEWKTQMEETKAQDILGAVTLLLEGVMAARGQLGPTCLSSLLGQLSGQVRLLLGALQSLLGTQLPPQGRTTAHKDPNAIFLSFQHLLRGKTSGLLETNFTASARTTGSGLLKWQQGFRAKIPGLLNQTSRSLDQIPGYLNRIHELLNGTRGLFPGPSRRTLGAPDISSGTSDTGSLPPNLQPGYSPSPTHPPTGQYTLFPLPPTLPTPVVQLHPLLPDPSAPTPTPTSPLLNTSYTHSQNLSQEG

SEQ ID NO: 1321 - protein, 286 aa, Homo sapiens
MELTELLLVVMLLLTARLTLSSPAPPACDLRVLSKLLRDSHVLHSRLSQCPEVHPLPTPVLLPAVDFSLGEWKTQMEETKAQDILGAVTLLLEGVMAARGQLGPTCLSSLLGQLSGQVRLLLGALQSLLGTQLPPQGRTTAHKDPNAIFLSFQHLLRGKDFWIVGDKLHCLSQNYWLWASEVAAGIQSQDSWSAEPNLQVPGPNPRIPEQDTRTLEWNSWTLSWTLTQDPRSPGHFLRNIRHRLPATQPPAWIFSFPNPSSYWTVYALPSSTHLAHPCGPAPPPAS

SEQ ID NO: 1322 - protein, 349 aa, Homo sapiens
MELTELLLVVMLLLTARLTLSSPAPPACDLRVLSKLLRDSHVLHSRLSQCPEVHPLPTPVLLPAVDFSLGEWKTQMEETKAQDILGAVTLLLEGVMAARGQLGPTCLSSLLGQLSGQVRLLLGALQSLLGTQGRTTAHKDPNAIFLSFQHLLRGKVRFLMLVGGSTLCVRRAPPTTAVPSRTSLVLTLNELPNRTSGLLETNFTASARTTGSGLLKWQQGFRAKIPGLLNQTSRSLDQIPGYLNRIHELLNGTRGLFPGPSRRTLGAPDISSGTSDTGSLPPNLQPGYSPSPTHPPTGQYTLFPLPPTLPTPVVQLHPLLPDPSAPTPTPTSPLLNTSYTHSQNLSQEG

SEQ ID NO: 1323 - protein, 801 aa, Homo sapiens
MERLWGLFQRAQQLSPRSSQTVYQRVEGPRKGHLEEEEEDGEEGAETLAHFCPMELRGPEPLGSRPRQPNLIPWAAAGRRAAPYLVLTALLIFTGAFLLGYVAFRGSCQACGDSVLVVSEDVNYEPDLDFHQGRLYWSDLQAMFLQFLGEGRLEDTIRQTSLRERVAGSAGMAALTQDIRAALSRQKLDHVWTDTHYVGLQFPDPAHPNTLHWVDEAGKVGEQLPLEDPDVYCPYSAIGNVTGELVYAHYGRPEDLQDLRARGVDPVGRLLLVRVGVISFAQKVTNAQDFGAQGVLIYPEPADFSQDPPKPSLSSQQAVYGHVHLGTGDPYTPGFPSFNQTQFPPVASSGLPSIPAQPISADIASRLLRKLKGPVAPQEWQGSLLGSPYHLGPGPRLRLVVNNHRTSTPINNIFGCIEGRSEPDHYVVIGAQRDAWGPGAAKSAVGTAILLELVRTFSSMVSNGFRPRRSLLFISWDGGDFGSVGSTEWLEGYLSVLHLKAVVYVSLDNAVLGDDKFHAKTSPLLTSLIESVLKQVDSPNHSGQTLYEQVVFTNPSWDAEVIRPLPMDSSAYSFTAFVGVPAVEFSFMEDDQAYPFLHTKEDTYENLHKVLQGRLPAVAQAVAQLAGQLLIRLSHDRLLPLDFGRYGDVVLRHIGNLNEFSGDLKARGLTLQWVYSARGDYIRAAEKLRQEIYSSEERDERLTRMYNVRIMRVEFYFLSQYVSPADSPFRHIFMGRGDHTLGALLDHLRLLRSNSSGTPGATSSTGFQESRFRRQLALLTWTLQGAANALSGDVWNIDNNF

SEQ ID NO: 1324 - protein, 355 aa, Homo sapiens
MERLWGLFQRAQQLSPRSSQTVYQRVEGPRKGHLEEEEEDGEEGAETLAHFCPMELRGPEPLGSRPRQPNLIPWAAAGRRAAPYLVLTALLIFTGAFLLGYVAFRGSCQACGDSVLVVSEDVNYEPDLDFHQGRLYWSDLQAMFLQFLGEGRLEDTIRQTSLRERVAGSAGMAALTQDIRAALSRQKLDHVWTDTHYVGLQFPDPAHPNTLHWVDEAGKVGEQLPLEDPDVYCPYSAIGNVTGELVYAHYGRPEDLQDLRARGVDPVGRLLLVRVGVISFAQKEAQRPCGPPRMAGEPPRLPLSPGPRATTAASGQQSQDLHPHQQHLRLHRRPLRARSLRCHRGPEGCMGPRSS

SEQ ID NO: 1325 - protein, 801 aa, Homo sapiens; identical to SEQ ID NO: 1323

SEQ ID NO: 1326 - protein, 342 aa, Homo sapiens
MVSNGFRPRRSLLFISWDGGDFGSVGSTEWLEGYLSVLHLKAVVYVSLDNAVLGDDKFHAKTSPLLTSLIESVLKQVDSPNHSGQTLYEQVVFTNPSWDAEVIRPLPMDSSAYSFTAFVGVPAVEFSFMEDDQAYPFLHTKEDTYENLHKVLQGRLPAVAQAVAQLAGQLLIRLSHDRLLPLDFGRYGDVVLRHIGNLNEFSGDLKARGLTLQWVYSARGDYIRAAEKLRQEIYSSEERDERLTRMYNVRIMRVEFYFLSQYVSPADSPFRHIFMGRGDHTLGALLDHLRLLRSNSSGTPGATSSTGFQESRFRRQLALLTWTLQGAANALSGDVWNIDNNF

SEQ ID NO: 1327 - protein, 390 aa, Homo sapiens
MPPSGLRLLPLLLPLLWLLVLTPGRPAAGLSTCKTIDMELVKRKRIEAIRGQILSKLRLASPPSQGEVPPGPLPEAVLALYNSTRDRVAGESAEPEPEPEADYYAKEVTRVLMVETHNEIYDKFKQSTHSIYMFFNTSELREAVPEPVLLSRAELRLLRLKLKVEQHVELYQKYSNNSWRYLSNRLLAPSDSPEWLSFDVTGVVRQWLSRGGEIEGFRLSAHCSCDSRDNTLQVDINGFTTGRRGDLATIHGMNRPFLLLMATPLERAQHLQSSRHRRALDTNYCFSSTEKNCCVRQLYIDFRKDLGWKWIHEPKGYHANFCLGPCPYIWSLDTQYSKVLALYNQHNPGASAAPCCVPQALEPLPIVYYVGRKPKVEQLSNMIVRSCKCS

SEQ ID NO: 1328 - protein, 442 aa, Homo sapiens
MHYCVLSAFLILHLVTVALSLSTCSTLDMDQFMRKRIEAIRGQILSKLKLTSPPEDYPEPEEVPPEVISIYNSTRDLLQEKASRRAAACERERSDEEYYAKEVYKIDMPPFFPSETVCPVVTTPSGSVGSLCSRQSQVLCGYLDAIPPTFYRPYFRIVRFDVSAMEKNASNLVKAEFRVFRLQNPKARVPEQRIELYQILKSKDLTSPTQRYIDSKVVKTRAEGEWLSFDVTDAVHEWLHHKDRNLGFKISLHCPCCTFVPSNNYIIPNKSEELEARFAGIDGTSTYTSGDQKTIKSTRKKNSGKTPHLLLMLLPSYRLESQQTNRRKKRALDAAYCFRNVQDNCCLRPLYIDFKRDLGWKWIHEPKGYNANFCAGACPYLWSSDTQHSRVLSLYNTINPEASASPCCVSQDLEPLTILYYIGKTPKIEQLSNMIVKSCKCS

SEQ ID NO: 1329 - protein, 414 aa, Homo sapiens
MHYCVLSAFLILHLVTVALSLSTCSTLDMDQFMRKRIEAIRGQILSKLKLTSPPEDYPEPEEVPPEVISIYNSTRDLLQEKASRRAAACERERSDEEYYAKEVYKIDMPPFFPSENAIPPTFYRPYFRIVRFDVSAMEKNASNLVKAEFRVFRLQNPKARVPEQRIELYQILKSKDLTSPTQRYIDSKVVKTRAEGEWLSFDVTDAVHEWLHHKDRNLGFKISLHCPCCTFVPSNNYIIPNKSEELEARFAGIDGTSTYTSGDQKTIKSTRKKNSGKTPHLLLMLLPSYRLESQQTNRRKKRALDAAYCFRNVQDNCCLRPLYIDFKRDLGWKWIHEPKGYNANFCAGACPYLWSSDTQHSRVLSLYNTINPEASASPCCVSQDLEPLTILYYIGKTPKIEQLSNMIVKSCKCS

SEQ ID NO: 1330 - protein, 412 aa, Homo sapiens
MKMHLQRALVVLALLNFATVSLSLSTCTTLDFGHIKKKRVEAIRGQILSKLRLTSPPEPTVMTHVPYQVLALYNSTRELLEEMHGEREEGCTQENTESEYYAKEIHKFDMIQGLAEHNELAVCPKGITSKVFRFNVSSVEKNRTNLFRAEFRVLRVPNPSSKRNEQRIELFQILRPDEHIAKQRYIGGKNLPTRGTAEWLSFDVTDTVREWLLRRESNLGLEISIHCPCHTFQPNGDILENIHEVMEIKFKGVDNEDDHGRGDLGRLKKQKDHHNPHLILMMIPPHRLDNPGQGGQRKKRALDTNYCFRNLEENCCVRPLYIDFRQDLGWKWVHEPKGYYANFCSGPCPYLRSADTTHSTVLGLYNTLNPEASASPCCVPQDLEPLTILYYVGRTPKVEQLSNMVVKSCKCS

SEQ ID NO: 1331 - protein, 309 aa, Homo sapiens
MKMHLQRALVVLALLNFATVSLSLSTCTTLDFGHIKKKRVEAIRGQILSKLRLTSPPEPTVMTHVPYQVLALYNSTRELLEEMHGEREEGCTQENTESEYYAKEIHKFDMIQGLAEHNELAVCPKGITSKVFRFNVSSVEKNRTNLFRAEFRVLRVPNPSSKRNEQRIELFQILRPDEHIAKQRYIGGKNLPTRGTAEWLSFDVTDTVREWLLRRESNLGLEISIHCPCHTFQPNGDILENIHEVMEIKFKGVDNEDDHGRGDLGRLKKQKDHHNPHLILMMIPPHRLDNPGQGGQRKKRALDTNYCFR

SEQ ID NO: 1332 - protein, 147 aa, Homo sapiens
MASHRLLLLCLAGLVFVSEAGPTGTGESKCPLMVKVLDAVRGSPAINVAVHVFRKAADDTWEPFASGKTSESGELHGLTTEEEFVEGIYKVEIDTKSYWKALGISPFHEHAEVVFTANDSGPRRYTIAALLSPYSYSTTAVVTNPKE

SEQ ID NO: 1333 - protein, 184 aa, Homo sapiens
MASHRLLLLCLAGLVFVSEAGPTGTGESKCPLMVKVLDAVRGSPAINVAVHVFRKAADDTWEPFASGKTSESGELHGLTTEEEFVEGIYKVEIDTKSYWKALGISPFHEHAEVSIQTFEAFQEILYKKKFTTLWHWTSGGQSFFRALVEVVFTANDSGPRRYTIAALLSPYSYSTTAVVTNPKE

SEQ ID NO: 1334 - protein, 139 aa, Homo sapiens
MASHRLLLLCLAGLVFVSEAGPTGTGESKCPLMVKVLDAVRGSPAINVAVHVFRKAADDTWEPFASGKTSESGELHGLTTEEEFVEGIYKVEIDTKSYWKALGISPFHEHAEVVFTANDSGPRRYYSYSTTAVVTNPKE

SEQ ID NO: 1335 - protein, 331 aa, Homo sapiens
MNGTRNWCTLVDVHPEDQAAVYLKGRSGDKMIHEKNINQLKSEVQYIQEARNCLQKLREDISSKLDRNLGDSLHRQEIQVVLEKPNGFSQSPTALYSSPPEVDTCINEDVESLRKTVQDLLAKLQEAKRQHQSDCVAFEVTLSRYQREAEQSNVALQREEDRVEQKEAEVGELQRRLLGMETEHQALLAKVREGEVALEELRSNNADCQAEREKAATLEKEVAGLREKIHHLDDMLKSQQRKVRQMIEQLQNSKAVIQSKDATIQELKEKIAYLEAENLEMHDRMEHLIEKQISHGNFSTQARAKTENPGSIRISKPPSPKPMPVIRVVET

SEQ ID NO: 1336 - protein, 365 aa, Homo sapiens
MNGTRNWCTLVDVHPEDQAAAGRKTYAMVSSHSAGHSLASELVESHDGHEEIIKVYLKGRSGDKMIHEKNINQLKSEVQYIQEARNCLQKLREDISSKLDRNLGDSLHRQEIQVVLEKPNGFSQSPTALYSSPPEVDTCINEDVESLRKTVQDLLAKLQEAKRQHQSDCVAFEVTLSRYQREAEQSNVALQREEDRVEQKEAEVGELQRRLLGMETEHQALLAKVREGEVALEELRSNNADCQAEREKAATLEKEVAGLREKIHHLDDMLKSQQRKVRQMIEQLQNSKAVIQSKDATIQELKEKIAYLEAENLEMHDRMEHLIEKQISHGNFSTQARAKTENPGSIRISKPPSPKPMPVIRVVET

SEQ ID NO: 1337 - protein, 390 aa, Homo sapiens
MNGTRNWCTLVDVHPEDQAAGSVDILRLTLQGELTGDELEHIAQKAGRKTYAMVSSHSAGHSLASELVESHDGHEEIIKVYLKGRSGDKMIHEKNINQLKSEVQYIQEARNCLQKLREDISSKLDRNLGDSLHRQEIQVVLEKPNGFSQSPTALYSSPPEVDTCINEDVESLRKTVQDLLAKLQEAKRQHQSDCVAFEVTLSRYQREAEQSNVALQREEDRVEQKEAEVGELQRRLLGMETEHQALLAKVREGEVALEELRSNNADCQAEREKAATLEKEVAGLREKIHHLDDMLKSQQRKVRQMIEQLQNSKAVIQSKDATIQELKEKIAYLEAENLEMHDRMEHLIEKQISHGNFSTQARAKTENPGSIRISKPPSPKPMPVIRVVET

SEQ ID NO: 1338 - protein, 199 aa, Homo sapiens [sequence omitted]

SEQ ID NO: 1339 - protein, 409 aa, Homo sapiens
MSSPGMTSLQLEKEECMQCVPCSPRTRVALLELYRAMCQGSVDILRLTLQGELTGDELEHIAQKAGRKTYAMVSSHSAGHSLASELVESHDGHEEIIKVYLKGRSGDKMIHEKNINQLKSEVQYIQEARNCLQKLREDISSKLDRNLGDSLHRQEIQVVLEKPNGFSQSPTALYSSPPEVDTCINEDVESLRKTVQDLLAKLQEAKRQHQSDCVAFEVTLSRYQREAEQSNVALQREEDRVEQKEAEVGELQRRLLGMETEHQALLAKVREGEVALEELRSNNADCQAEREKAATLEKEVAGLREKIHHLDDMLKSQQRKVRQMIEQLQNSKAVIQSKDATIQELKEKIAYLEAENLEMHDRMEHLIEKQISHGNFSTQARAKTENPGSIRISKPPSPKPMPVIRVVET

SEQ ID NO: 1340 - protein, 180 aa, Homo sapiens
MNGTRNWCTLVDVHPEDQAAAGRKTYAMVSSHSAGHSLASELVESHDGHEEIIKVYLKGRSGDKMIHEKNINQLKSEVQYIQEARNCLQKLREDISSKLDRNLGDSLHRQEIQVVLEKPNGFSQSPTALKAGDTDVQSDWRMSWGNEVPSTNTAQFLATNCLFFYLLHLQPTLPWPPADR

SEQ ID NO: 1341 - protein, 393 aa, Homo sapiens [sequence omitted]

SEQ ID NO: 1342 - protein, 343 aa, Homo sapiens
MEEPQSDPSVEPPLSQETFSDLWKLLPENNVLSPLPSQAMDDLMLSPDDIEQWFTEDPGPDEAPRMPEAAPPVAPAPAAPTPAAPAPAPSWPLSSSVPSQKTYQGSYGFRLGFLHSGTAKSVTCTYSPALNKMFCQLAKTCPVQLWVDSTPPPGTRVRAMAIYKQSQHMTEVVRRCPHHERCSDSDGLAPPQHLIRVEGNLRVEYLDDRNTFRHSVVVPYEPPEVGSDCTTIHYNYMCNSSCMGGMNRRPILTIITLEDSSGNLLGRNSFEVRVCACPGRDRRTEEENLRKKGEPHHELPPGSTKRALPNNTSSSPQPKKKPLDGEYFTLQKTFPARHGGSHL

SEQ ID NO: 1343 - protein, 382 aa, Homo sapiens
MEEPQSDPSVEPPLSQETFSDLWKLLPENNVLSPLPSQAMDDLMLSPDDIEQWFTEDPGPDEAPRMPEAAPPVAPAPAAPTPAAPAPAPSWPLSSSVPSQKTYQGSYGFRLTCTYSPALNKMFCQLAKTCPVQLWVDSTPPPGTRVRAMAIYKQSQHMTEVVRRCPHHERCSDSDGLAPPQHLIRVEGNLRVEYLDDRNTFRHSVVVPYEPPEVGSDCTTIHYNYMCNSSCMGGMNRRPILTIITLEDSSGNLLGRNSFEVRVCACPGRDRRTEEENLRKKGEPHHELPPGSTKRALPNNTSSSPQPKKKPLDGEYFTLQIRGRERFEMFRELNEALELKDAQAGKEPGGSRAHSSHLKSKKGQSTSRHKKLMFKTEGPDSD

SEQ ID NO: 1344 - protein, 285 aa, Homo sapiens
MEEPQSDPSVEPPLSQETFSDLWKLLPENNVLSPLPSQAMDDLMLSPDDIEQWFTEDPGPDEAPRMPEAAPPVAPAPAAPTPAAPAPAPSWPLSSSVPSQKTYQGSYGFRLGFLHSGTAKSVTCTYSPALNKMFCQLAKTCPVQLWVDSTPPPGTRVRAMAIYKQSQHMTEVVRRCPHHERCSDSDGLAPPQHLIRVEGNLRVEYLDDRNTFRHSVVVPYEPPEVGSDCTTIHYNYMCNSSCMGGMNRRPILTIITLEDSRPRQVDHLRSGVQDSLANIAKSHLY

SEQ ID NO: 1345 - protein, 90 aa, Homo sapiens
MFCQLAKTCPVQLWVDSTPPPGTRVRAMAIYKQSQHMTEVVRRCPHHERCSDSDGLAPPQHLIRVEGNLRVEYLDDRNTFRHSVVSGRRG

SEQ ID NO: 1346 - protein, 44 aa, Homo sapiens
PLPSQRRNHWMENISPFSHLKSKKGQSTSRHKKLMFKTEGPDSD

SEQ ID NO: 1347 - protein, 341 aa, Homo sapiens
MEEPQSDPSVEPPLSQETFSDLWKLLPENNVLSPLPSQAMDDLMLSPDDIEQWFTEDPGPDEAPRMPEAAPPVAPAPAAPTPAAPAPAPSWPLSSSVPSQKTYQGSYGFRLGFLHSGTAKSVTCTYSPALNKMFCQLAKTCPVQLWVDSTPPPGTRVRAMAIYKQSQHMTEVVRRCPHHERCSDSDGLAPPQHLIRVEGNLRVEYLDDRNTFRHSVVVPYEPPEVGSDCTTIHYNYMCNSSCMGGMNRRPILTIITLEDSSGNLLGRNSFEVRVCACPGRDRRTEEENLRKKGEPHHELPPGSTKRALPNNTSSSPQPKKKPLDGEYFTLQDQTSFQKENC

SEQ ID NO: 1348 - protein, 393 aa, Homo sapiens [sequence omitted]

SEQ ID NO: 1349 - protein, 346 aa, Homo sapiens
MEEPQSDPSVEPPLSQETFSDLWKLLPENNVLSPLPSQAMDDLMLSPDDIEQWFTEDPGPDEAPRMPEAAPPVAPAPAAPTPAAPAPAPSWPLSSSVPSQKTYQGSYGFRLGFLHSGTAKSVTCTYSPALNKMFCQLAKTCPVQLWVDSTPPPGTRVRAMAIYKQSQHMTEVVRRCPHHERCSDSDGLAPPQHLIRVEGNLRVEYLDDRNTFRHSVVVPYEPPEVGSDCTTIHYNYMCNSSCMGGMNRRPILTIITLEDSSGNLLGRNSFEVRVCACPGRDRRTEEENLRKKGEPHHELPPGSTKRALPNNTSSSPQPKKKPLDGEYFTLQMLLDLRWCYFLINSS

SEQ ID NO: 1350 - protein, 128 aa, Homo sapiens
MEEPQSDPSVEPPLSQETFSDLWKLLPENNVLSPLPSQAMDDLMLSPDDIEQWFTEDPGPDEAPRMPEAAPPVAPAPAAPTPAAPAPAPSWPLSSSVPSQKTYQGSYGFRLGFLHSGTAKSVTCTYSP

SEQ ID NO: 1351 - protein, 165 aa, Homo sapiens
MEEPQSDPSVEPPLSQETFSDLWKLLPENNVLSPLPSQAMDDLMLSPDDIEQWFTEDPGPDEAPRMPEAAPPVAPAPAAPTPAAPAPAPSWPLSSSVPSQKTYQGSYGFRLGFLHSGTAKSVTCTYSPALNKMFCQLAKTCPVQLWVDSTPPPGTRVRAMAIYKQ

SEQ ID NO: 1352 - protein, 199 aa, Homo sapiens
MFCQLAKTCPVQLWVDSTPPPGTRVRAMAIYKQSQHMTEVVRRCPHHERCSDSDGLAPPQHLIRVEGNLRVEYLDDRNTFRHSVVVPYEPPEVGSDCTTIHYNYMCNSSCMGGMNRRPILTIITLEDSSGNLLGRNSFEVRVCACPGRDRRTEEENLRKKGEPHHELPPGSTKRALPNNTSSSPQPKKKPLDGEYFTLQ

SEQ ID NO: 1353 - protein, 155 aa, Homo sapiens
MEEPQSDPSVEPPLSQETFSDLWKLLPENNVLYSPALNKMFCQLAKTCPVQLWVDSTPPPGTRVRAMAIYKQSQHMTEVVRRCPHHERCSDSDGLAPPQHLIRVEGNLRVEYLDDRNTFRHSVVVPYEPPEVGSDCTTIHYNYMCNSSCMGGMNR

SEQ ID NO: 1354 - protein, 155 aa, Homo sapiens; identical to SEQ ID NO: 1353

SEQ ID NO: 1355 - protein, 529 aa, Homo sapiens [sequence omitted]

SEQ ID NO: 1356 - protein, 454 aa, Homo sapiens [sequence omitted]

SEQ ID NO: 1357 - protein, 533 aa, Homo sapiens
MAVESQGGRPLVLGLLLCVLGPVVSHAGKILLIPVDGSHWLSMLGAIQQLQQRGHEIVVLAPDASLYIRDGAFYTLKTYPVPFQREDVKESFVSLGHNVFENDSFLQRVIKTYKKIKKDSAMLLSGCSHLLHNKELMASLAESSFDVMLTDPFLPCSPIVAQYLSLPTVFFLHALPCSLEFEATQCPNPFSYVPRPLSSHSDHMTFLQRVKNMLIAFSQNFLCDVVYSPYATLASEFLQREVTVQDLLSSASVWLFRSDFVKDYPRPIMPNMVFVGGINCLHQNPLSQEFEAYINASGEHGIVVFSLGSMVSEIPEKKAMAIADALGKIPQTVLWRYTGTRPSNLANNTILVKWLPQNDLLGHPMTRAFITHAGSHGVYESICNGVPMVMMPLFGDQMDNAKRMETKGAGVTLNVLEMTSEDLENALKAVINDKSYKENIMRLSSLHKDRPVEPLDLAVFWVEFVMRHKGAPHLRPAAHDLTWYQYHSLDVIGFLLAVVLTVAFITFKCCAYGYRKCLGKKGRVKKAHKSKTH

SEQ ID NO: 1358 - protein, 444 aa, Homo sapiens
MAVESQGGRPLVLGLLLCVLGPVVSHAGKILLIPVDGSHWLSMLGAIQQLQQRGHEIVVLAPDASLYIRDGAFYTLKTYPVPFQREDVKESFVSLGHNVFENDSFLQRVIKTYKKIKKDSAMLLSGCSHLLHNKELMASLAESSFDVMLTDPFLPCSPIVAQYLSLPTVFFLHALPCSLEFEATQCPNPFSYVPRPLSSHSDHMTFLQRVKNMLIAFSQNFLCDVVYSPYATLASEFLQREVTVQDLLSSASVWLFRSDFVKDYPRPIMPNMVFVGGINCLHQNPLSQEFEAYINASGEHGIVVFSLGSMVSEIPEKKAMAIADALGKIPQTVLWRYTGTRPSNLANNTILVKWLPQNDLLGHPMTRAFITHAGSHGVYESICNGVPMVMMPLFGDQMDNAKRMETKGAGVTLNVLEMTSEDLENALKAVINDKRKKQQSGRQM

SEQ ID NO: 1359 - protein, 530 aa, Homo sapiens
MARAGWTSPVPLCVCLLLTCGFAEAGKLLVVPMDGSHWFTMQSVVEKLILRGHEVVVVMPEVSWQLERSLNCTVKTYSTSYTLEDQNREFMVFAHAQWKAQAQSIFSLLMSSSSGFLDLFFSHCRSLFNDRKLVEYLKESSFDAVFLDPFDTCGLIVAKYFSLPSVVFTRGIFCHHLEEGAQCPAPLSYVPNDLLGFSDAMTFKERVWNHIVHLEDHLFCQYLFRNALEIASEILQTPVTAYDLYSHTSIWLLRTDFVLDYPKPVMPNMIFIGGINCHQGKPLPMEFEAYINASGEHGIVVFSLGSMVSEIPEKKAMAIADALGKIPQTVLWRYTGTRPSNLANNTILVKWLPQNDLLGHPMTRAFITHAGSHGVYESICNGVPMVMMPLFGDQMDNAKRMETKGAGVTLNVLEMTSEDLENALKAVINDKSYKENIMRLSSLHKDRPVEPLDLAVFWVEFVMRHKGAPHLRPAAHDLTWYQYHSLDVIGFLLAVVLTVAFITFKCCAYGYRKCLGKKGRVKKAHKSKTH

SEQ ID NO: 1360 - protein, 534 aa, Homo sapiens
MATGLQVPLPWLATGLLLLLSVQPWAESGKVLVVPIDGSHWLSMREVLRELHARGHQAVVLTPEVNMHIKEENFFTLTTYAISWTQDEFDRHVLGHTQLYFETEHFLKKFFRSMAMLNNMSLVYHRSCVELLHNEALIRHLNATSFDVVLTDPVNLCAAVLAKYLSIPTVFFLRNIPCDLDFKGTQCPNPSSYIPRLLTTNSDHMTFMQRVKNMLYPLALSYICHAFSAPYASLASELFQREVSVVDILSHASVWLFRGDFVMDYPRPIMPNMVFIGGINCANRKPLSQEFEAYINASGEHGIVVFSLGSMVSEIPEKKAMAIADALGKIPQTVLWRYTGTRPSNLANNTILVKWLPQNDLLGHPMTRAFITHAGSHGVYESICNGVPMVMMPLFGDQMDNAKRMETKGAGVTLNVLEMTSEDLENALKAVINDKSYKENIMRLSSLHKDRPVEPLDLAVFWVEFVMRHKGAPHLRPAAHDLTWYQYHSLDVIGFLLAVVLTVAFITFKCCAYGYRKCLGKKGRVKKAHKSKTH

SEQ ID NO: 1361 - protein, 489 aa, Homo sapiens
MAGQRVLLLVGFLLPGVLLSEAAKILTISTVDFKKEEKSYQVISWLAPEDHQREFKKSFDFFLEETLGGRGKFENLLNVLEYLALQCSHFLNRKDIMDSLKNENFDMVIVETFDYCPFLIAEKLGKPFVAILSTSFGSLEFGLPIPLSYVPVFRSLLTDHMDFWGRVKNFLMFFSFCRRQQHMQSTFDNTIKEHFTEGSRPVLSHLLLKAELWFINSDFAFDFARPLLPNTVYVGGLMEKPIKPVPQDLENFIAKFGDSGFVLVTLGSMVNTCQNPEIFKEMNNAFAHLPQGVIWKCQCSHWPKDVHLAANVKIVDWLPQSDLLAHPSIRLFVTHGGQNSIMEAIQHGVPMVGIPLFGDQPENMVRVEAKKFGVSIQLKKLKAETLALKMKQIMEDKRYKSAAVAASVILRSHPLSPTQRLVGWIDHVLQTGGATHLKPYVFQQPWHEQYLLDVFVFLLGLTLGTLWLCGKLLGMAVWWLRGARKVKET

SEQ ID NO: 1362 - protein, 523 aa, Homo sapiens
MAGQRVLLLVGFLLPGVLLSEAAKILTISTVGGSHYLLMDRVSQILQDHGHNVTMLNHKRGPFMPDFKKEEKSYQVISWLAPEDHQREFKKSFDFFLEETLGGRGKFENLLNVLEYLALQCSHFLNRKDIMDSLKNENFDMVIVETFDYCPFLIAEKLGKPFVAILSTSFGSLEFGLPIPLSYVPVFRSLLTDHMDFWGRVKNFLMFFSFCRRQQHMQSTFDNTIKEHFTEGSRPVLSHLLLKAELWFINSDFAFDFARPLLPNTVYVGGLMEKPIKPVPQDLENFIAKFGDSGFVLVTLGSMVNTCQNPEIFKEMNNAFAHLPQGVIWKCQCSHWPKDVHLAANVKIVDWLPQSDLLAHPSIRLFVTHGGQNSIMEAIQHGVPMVGIPLFGDQPENMVRVEAKKFGVSIQLKKLKAETLALKMKQIMEDKRYKSAAVAASVILRSHPLSPTQRLVGWIDHVLQTGGATHLKPYVFQQPWHEQYLLDVFVFLLGLTLGTLWLCGKLLGMAVWWLRGARKVKET

SEQ ID NO: 1363 - protein, 138 aa, Homo sapiens
MAGQRVLLLVGFLLPGVLLSEAAKILTISTVGGSHYLLMDRVSQILQDHGHNVTMLNHKRGPFMPDFKKEEKSYQVISWLAPEDHQREFKKSFDFFLEETLGGRGKFENLLNVLEYLALQCSHFLNRKDIMDSLKNEN

SEQ ID NO: 1364 - protein, 221 aa, Homo sapiens
MVNTCQNPEIFKEMNNAFAHLPQGVIWKCQCSHWPKDVHLAANVKIVDWLPQSDLLAHPSIRLFVTHGGQNSIMEAIQHGVPMVGIPLFGDQPENMVRVEAKKFGVSIQLKKLKAETLALKMKQIMEDKRYKSAAVAASVILRSHPLSPTQRLVGWIDHVLQTGGATHLKPYVFQQPWHEQYLLDVFVFLLGLTLGTLWLCGKLLGMAVWWLRGARKVKET

SEQ ID NO: 1365 - protein, 163 aa, Homo sapiens
MAEGGGQNHHEVVKFMDVYQRSYCHPIETLVDIFQEYPDEIEYIFKPSCVPLMRCGGCCNDEGLECVPTEESNITMQIMRIKPHQGQHIGEMSFLQHNKCECRPKKDRARQENPCGPCSERRKHLFVQDPQTCKCSCKNTDSRCKARQLELNERTCRCDKPRR

SEQ ID NO: 1366 - protein, 317 aa, Homo sapiens
LTDRQTDTAPSPSYHLLPGRRRTVDAAASRGQGPEPAPGGGVEGVGARGVALKLFVQLLGCSRFGGAVVRAGEAEPSGAARSASSGREEPQPEEGEEEEEKEEERGPQWRLGARKPGSWTGEAAVCADSAPAARAPQALARASGRGGRVARRGAEESGPPHSPSRRGSASRAGPGRASETMNFLLSWVHWSLALLLYLHHAKWSQAAPMAEGGGQNHHEVVKFMDVYQRSYCHPIETLVDIFQEYPDEIEYIFKPSCVPLMRCGGCCNDEGLECVPTEESNITMQIMRIKPHQGQHIGEMSFLQHNKCECRCDKPRR

SEQ ID NO: 1367 - protein, 412 aa, Homo sapiens
LTDRQTDTAPSPSYHLLPGRRRTVDAAASRGQGPEPAPGGGVEGVGARGVALKLFVQLLGCSRFGGAVVRAGEAEPSGAARSASSGREEPQPEEGEEEEEKEEERGPQWRLGARKPGSWTGEAAVCADSAPAARAPQALARASGRGGRVARRGAEESGPPHSPSRRGSASRAGPGRASETMNFLLSWVHWSLALLLYLHHAKWSQAAPMAEGGGQNHHEVVKFMDVYQRSYCHPIETLVDIFQEYPDEIEYIFKPSCVPLMRCGGCCNDEGLECVPTEESNITMQIMRIKPHQGQHIGEMSFLQHNKCECRPKKDRARQEKKSVRGKGKGQKRKRKKSRYKSWSVYVGARCCLMPWSLPGPHPCGPCSERRKHLFVQDPQTCKCSCKNTDSRCKARQLELNERTCRCDKPRR

SEQ ID NO: 1368 - protein, 327 aa, Homo sapiens
LTDRQTDTAPSPSYHLLPGRRRTVDAAASRGQGPEPAPGGGVEGVGARGVALKLFVQLLGCSRFGGAVVRAGEAEPSGAARSASSGREEPQPEEGEEEEEKEEERGPQWRLGARKPGSWTGEAAVCADSAPAARAPQALARASGRGGRVARRGAEESGPPHSPSRRGSASRAGPGRASETMNFLLSWVHWSLALLLYLHHAKWSQAAPMAEGGGQNHHEVVKFMDVYQRSYCHPIETLVDIFQEYPDEIEYIFKPSCVPLMRCGGCCNDEGLECVPTEESNITMQIMRIKPHQGQHIGEMSFLQHNKCECRPKKDRARQEKCDKPRR

SEQ ID NO: 1369 - protein, 371 aa, Homo sapiens
LTDRQTDTAPSPSYHLLPGRRRTVDAAASRGQGPEPAPGGGVEGVGARGVALKLFVQLLGCSRFGGAVVRAGEAEPSGAARSASSGREEPQPEEGEEEEEKEEERGPQWRLGARKPGSWTGEAAVCADSAPAARAPQALARASGRGGRVARRGAEESGPPHSPSRRGSASRAGPGRASETMNFLLSWVHWSLALLLYLHHAKWSQAAPMAEGGGQNHHEVVKFMDVYQRSYCHPIETLVDIFQEYPDEIEYIFKPSCVPLMRCGGCCNDEGLECVPTEESNITMQIMRIKPHQGQHIGEMSFLQHNKCECRPKKDRARQENPCGPCSERRKHLFVQDPQTCKCSCKNTDSRCKARQLELNERTCRCDKPRR

SEQ ID NO: 1370 - protein, 147 aa, Homo sapiens
MNFLLSWVHWSLALLLYLHHAKWSQAAPMAEGGGQNHHEVVKFMDVYQRSYCHPIETLVDIFQEYPDEIEYIFKPSCVPLMRCGGCCNDEGLECVPTEESNITMQIMRIKPHQGQHIGEMSFLQHNKCECRPKKDRARQEKCDKPRR

SEQ ID NO: 1371 - protein, 389 aa, Homo sapiens
LTDRQTDTAPSPSYHLLPGRRRTVDAAASRGQGPEPAPGGGVEGVGARGVALKLFVQLLGCSRFGGAVVRAGEAEPSGAARSASSGREEPQPEEGEEEEEKEEERGPQWRLGARKPGSWTGEAAVCADSAPAARAPQALARASGRGGRVARRGAEESGPPHSPSRRGSASRAGPGRASETMNFLLSWVHWSLALLLYLHHAKWSQAAPMAEGGGQNHHEVVKFMDVYQRSYCHPIETLVDIFQEYPDEIEYIFKPSCVPLMRCGGCCNDEGLECVPTEESNITMQIMRIKPHQGQHIGEMSFLQHNKCECRPKKDRARQEKKSVRGKGKGQKRKRKKSRPCGPCSERRKHLFVQDPQTCKCSCKNTDSRCKARQLELNERTCRCDKPRR

SEQ ID NO: 1372 - protein, 354 aa, Homo sapiens
LTDRQTDTAPSPSYHLLPGRRRTVDAAASRGQGPEPAPGGGVEGVGARGVALKLFVQLLGCSRFGGAVVRAGEAEPSGAARSASSGREEPQPEEGEEEEEKEEERGPQWRLGARKPGSWTGEAAVCADSAPAARAPQALARASGRGGRVARRGAEESGPPHSPSRRGSASRAGPGRASETMNFLLSWVHWSLALLLYLHHAKWSQAAPMAEGGGQNHHEVVKFMDVYQRSYCHPIETLVDIFQEYPDEIEYIFKPSCVPLMRCGGCCNDEGLECVPTEESNITMQIMRIKPHQGQHIGEMSFLQHNKCECRPKKDRARQENPCGPCSERRKHLFVQDPQTCKCSCKNTDSRCKM

SEQ ID NO: 1373 - protein, 395 aa, Homo sapiens
LTDRQTDTAPSPSYHLLPGRRRTVDAAASRGQGPEPAPGGGVEGVGARGVALKLFVQLLGCSRFGGAVVRAGEAEPSGAARSASSGREEPQPEEGEEEEEKEEERGPQWRLGARKPGSWTGEAAVCADSAPAARAPQALARASGRGGRVARRGAEESGPPHSPSRRGSASRAGPGRASETMNFLLSWVHWSLALLLYLHHAKWSQAAPMAEGGGQNHHEVVKFMDVYQRSYCHPIETLVDIFQEYPDEIEYIFKPSCVPLMRCGGCCNDEGLECVPTEESNITMQIMRIKPHQGQHIGEMSFLQHNKCECRPKKDRARQEKKSVRGKGKGQKRKRKKSRYKSWSVPCGPCSERRKHLFVQDPQTCKCSCKNTDSRCKARQLELNERTCRCDKPRR

SEQ ID NO: 1374 - protein, 137 aa, Homo sapiens
MNFLLSWVHWSLALLLYLHHAKWSQAAPMAEGGGQNHHEVVKFMDVYQRSYCHPIETLVDIFQEYPDEIEYIFKPSCVPLMRCGGCCNDEGLECVPTEESNITMQIMRIKPHQGQHIGEMSFLQHNKCECRCDKPRR

SEQ ID NO: 1375 - protein, 371 aa, Homo sapiens
LTDRQTDTAPSPSYHLLPGRRRTVDAAASRGQGPEPAPGGGVEGVGARGVALKLFVQLLGCSRFGGAVVRAGEAEPSGAARSASSGREEPQPEEGEEEEEKEEERGPQWRLGARKPGSWTGEAAVCADSAPAARAPQALARASGRGGRVARRGAEESGPPHSPSRRGSASRAGPGRASETMNFLLSWVHWSLALLLYLHHAKWSQAAPMAEGGGQNHHEVVKFMDVYQRSYCHPIETLVDIFQEYPDEIEYIFKPSCVPLMRCGGCCNDEGLECVPTEESNITMQIMRIKPHQGQHIGEMSFLQHNKCECRPKKDRARQENPCGPCSERRKHLFVQDPQTCKCSCKNTDSRCKARQLELNERTCRSLTRKD

SEQ ID NO: 1376 - protein, 209 aa, Homo sapiens
MNFLLSWVHWSLALLLYLHHAKWSQAAPMAEGGGQNHHEVVKFMDVYQRSYCHPIETLVDIFQEYPDEIEYIFKPSCVPLMRCGGCCNDEGLECVPTEESNITMQIMRIKPHQGQHIGEMSFLQHNKCECRPKKDRARQEKKSVRGKGKGQKRKRKKSRPCGPCSERRKHLFVQDPQTCKCSCKNTDSRCKARQLELNERTCRCDKPRR

SEQ ID NO: 1377 - protein, 191 aa, Homo sapiens
MNFLLSWVHWSLALLLYLHHAKWSQAAPMAEGGGQNHHEVVKFMDVYQRSYCHPIETLVDIFQEYPDEIEYIFKPSCVPLMRCGGCCNDEGLECVPTEESNITMQIMRIKPHQGQHIGEMSFLQHNKCECRPKKDRARQENPCGPCSERRKHLFVQDPQTCKCSCKNTDSRCKARQLELNERTCRSLTRKD

SEQ ID NO: 1378 - protein, 323 aa, Homo sapiens
  VARIANT 1: note = MOD_RES - Any amino acid
XRGQGPEPAPGGGVEGVGARGVALKLFVQLLGCSRFGGAVVRAGEAEPSGAARSASSGREEPQPEEGEEEEEKEEERGPQWRLGARKPGSWTGEAAVCADSAPAARAPQALARASGRGGRVARRGAEESGPPHSPSRRGSASRAGPGRASETMNFLLSWVHWSLALLLYLHHAKWSQAAPMAEGGGQNHHEVVKFMDVYQRSYCHPIETLVDIFQEYPDEIEYIFKPSCVPLMRCGGCCNDEGLECVPTEESNITMQIMRIKPHQGQHIGEMSFLQHNKCECRPKKDRARQEKKSVRGKGKGQKRKRKKSRYKSWSVCDKPRR

SEQ ID NO: 1379 - protein, 215 aa, Homo sapiens
MNFLLSWVHWSLALLLYLHHAKWSQAAPMAEGGGQNHHEVVKFMDVYQRSYCHPIETLVDIFQEYPDEIEYIFKPSCVPLMRCGGCCNDEGLECVPTEESNITMQIMRIKPHQGQHIGEMSFLQHNKCECRPKKDRARQEKKSVRGKGKGQKRKRKKSRYKSWSVPCGPCSERRKHLFVQDPQTCKCSCKNTDSRCKARQLELNERTCRCDKPRR

SEQ ID NO: 1380 - protein, 174 aa, Homo sapiens
MNFLLSWVHWSLALLLYLHHAKWSQAAPMAEGGGQNHHEVVKFMDVYQRSYCHPIETLVDIFQEYPDEIEYIFKPSCVPLMRCGGCCNDEGLECVPTEESNITMQIMRIKPHQGQHIGEMSFLQHNKCECRPKKDRARQENPCGPCSERRKHLFVQDPQTCKCSCKNTDSRCKM

SEQ ID NO: 1381 - protein, 232 aa, Homo sapiens
MNFLLSWVHWSLALLLYLHHAKWSQAAPMAEGGGQNHHEVVKFMDVYQRSYCHPIETLVDIFQEYPDEIEYIFKPSCVPLMRCGGCCNDEGLECVPTEESNITMQIMRIKPHQGQHIGEMSFLQHNKCECRPKKDRARQEKKSVRGKGKGQKRKRKKSRYKSWSVYVGARCCLMPWSLPGPHPCGPCSERRKHLFVQDPQTCKCSCKNTDSRCKARQLELNERTCRCDKPRR

SEQ ID NO: 1382 - protein, 191 aa, Homo sapiens
MNFLLSWVHWSLALLLYLHHAKWSQAAPMAEGGGQNHHEVVKFMDVYQRSYCHPIETLVDIFQEYPDEIEYIFKPSCVPLMRCGGCCNDEGLECVPTEESNITMQIMRIKPHQGQHIGEMSFLQHNKCECRPKKDRARQENPCGPCSERRKHLFVQDPQTCKCSCKNTDSRCKARQLELNERTCRCDKPRR

SEQ ID NO: 1383 - protein, 420 aa, Homo sapiens
MHLLGFFSVACSLLAAALLPGPREAPAAAAAFESGLDLSDAEPDAGEATAYASKDLEEQLRSVSSVDELMTVLYPEYWKMYKCQLRKGGWQHNREQANLNSRTEETIKFAAAHYNTEILKSIDNEWRKTQCMPREVCIDVGKEFGVATNTFFKPPCVSVYRCGGCCNSEGLQCMNTSTSYLSKTLFEITVPLSQGPKPVTISFANHTSCRCMSKLDVYRQVHSIIRRSLPATLPQCQAANKTCPTNYMWNNHICRCLAQEDFMFSSDAGDDSTDGFHDICGPNKELDEETCQCVCRAGLRPASCGPHKELDRNSCQCVCKNKLFPSQCGANREFDENTCQCVCKRTCPRNQPLNPGKCACECTESPQKCLLKGKKFHHQTCSCYRRPCTNRQKACEPGFSYSEEVCRCVPSYWKRPQMMS

SEQ ID NO: 1384 - protein, 169 aa, Homo sapiens
MDTRNKAQLLVLLTLLSVLFSQTSAWPLYRAPSALRLGDRIPFEGANEPDQVSLKEDIDMLQNALAENDTPYYDVSRNARHADGVFTSDFSKLLGQLSAKKYLESLMGKRVSNISEDPVPVKRHSDAVFTDNYTRLRKQMAVKKYLNSILNGKRSSEGESPDFPEELEK

SEQ ID NO: 1385 - protein, 170 aa, Homo sapiens
MDTRNKAQLLVLLTLLSVLFSQTSAWPLYRAPSALRLGDRIPFEGANEPDQVSLKEDIDMLQNALAENDTPYYDVSRNARHADGVFTSDFSKLLGQLSAKKYLESLMGKRVSSNISEDPVPVKRHSDAVFTDNYTRLRKQMAVKKYLNSILNGKRSSEGESPDFPEELEK

SEQ ID NO: 1386 - protein, 119 aa, Homo sapiens
  VARIANT 1: note = MOD_RES - Any amino acid
XVSLKEDIDMLQNALAENDTPYYDVSRNARHADGVFTSDFSKLLGQLSAKKYLESLMGKRVSSNISEDPVPVKRHSDAVFTDNYTRLRKQMAVKKYLNSILNGKRSEGESPDFPEELEK

SEQ ID NO: 1387 - protein, 257 aa, Homo sapiens
MPLNVSFTNRNYDLDYDSVQPYFYCDEEENFYQQQQQSELQPPAPSEDIWKKFELLPTPPLSPSRRSGLCSPSYVAVTPFSLRGDNDGGGGSFSTADQLEMVTELLGGDMVNQSFICDPDDETFIKNIIIQDCMWSGFSAAAKLVSEKLASYQAARKDSGSPNPARGHSVCSTSSLYLQDLSAAASECIDPSVVFPYPLNDSSSPKSCASQDSSAFSPSSDSLLSSTESSPQGSPEPLVLHEETPPTTSSDSGGTRR

SEQ ID NO: 1388 - protein, 454 aa, Homo sapiens
LDFFRVVENQQPPATMPLNVSFTNRNYDLDYDSVQPYFYCDEEENFYQQQQQSELQPPAPSEDIWKKFELLPTPPLSPSRRSGLCSPSYVAVTPFSLRGDNDGGGGSFSTADQLEMVTELLGGDMVNQSFICDPDDETFIKNIIIQDCMWSGFSAAAKLVSEKLASYQAARKDSGSPNPARGHSVCSTSSLYLQDLSAAASECIDPSVVFPYPLNDSSSPKSCASQDSSAFSPSSDSLLSSTESSPQGSPEPLVLHEETPPTTSSDSEEEQEDEEEIDVVSVEKRQAPGKRSESGSPSAGGHSKPPHSPLVLKRCHVSTHQHNYAAPPSTRKDYPAAKRVKLDSVRVLRQISNNRKCTSPRSSDTEENVKRRTHNVLERQRRNELKRSFFALRDQIPELENNEKAPKVVILKKATAYILSVQAEEQKLISEEDLLRKRREQLKHKLEQLRNSCA

SEQ ID NO: 1389 - protein, 420 aa, Homo sapiens
MPLNVSFTNRNYDLDYDSVQPYFYCDEEDIWKKFELLPTPPLSPSRRSGLCSPSYVAVTPFSLRGDNDGGGGSFSTADQLEMVTELLGGDMVNQSFICDPDDETFIKNIIIQDCMWSGFSAAAKLVSEKLASYQAARKDSGSPNPARGHSVCSTSSLYLQDLSAAASECIDPSVVFPYPLNDSSSPKSCASQDSSAFSPSSDSLLSSTESSPQGSPEPLVLHEETPPTTSSDSEEEQEDEEEIDVVSVEKRQAPGKRSESGSPSAGGHSKPPHSPLVLKRCHVSTHQHNYAAPPSTRKDYPAAKRVKLDSVRVLRQISNNRKCTSPRSSDTEENVKRRTHNVLERQRRNELKRSFFALRDQIPELENNEKAPKVVILKKATAYILSVQAEEQKLISEEDLLRKRREQLKHKLEQLRNSCA

SEQ ID NO: 1390 - protein, 453 aa, Homo sapiens
LDFFRVVENQPPATMPLNVSFTNRNYDLDYDSVQPYFYCDEEENFYQQQQQSELQPPAPSEDIWKKFELLPTPPLSPSRRSGLCSPSYVAVTPFSLRGDNDGGGGSFSTADQLEMVTELLGGDMVNQSFICDPDDETFIKNIIIQDCMWSGFSAAAKLVSEKLASYQAARKDSGSPNPARGHSVCSTSSLYLQDLSAAASECIDPSVVFPYPLNDSSSPKSCASQDSSAFSPSSDSLLSSTESSPQGSPEPLVLHEETPPTTSSDSEEEQEDEEEIDVVSVEKRQAPGKRSESGSPSAGGHSKPPHSPLVLKRCHVSTHQHNYAAPPSTRKDYPAAKRVKLDSVRVLRQISNNRKCTSPRSSDTEENVKRRTHNVLERQRRNELKRSFFALRDQIPELENNEKAPKVVILKKATAYILSVQAEEQKLISEEDLLRKRREQLKHKLEQLRNSCA

SEQ ID NO: 1391 - protein, 2813 aa, Homo sapiens
MIPARFAGVLLALALILPGTLCAEGTRGRSSTARCSLFGSDFVNTFDGSMYSFAGYCSYLLAGGCQKRSFSIIGDFQNGKRVSLSVYLGEFFDIHLFVNGTVTQGDQRVSMPYASKGLYLETEAGYYKLSGEAYGFVARIDGSGNFQVLLSDRYFNKTCGLCGNFNIFAEDDFMTQEGTLTSDPYDFANSWALSSGEQWCERASPPSSSCNISSGEMQKGLWEQCQLLKSTSVFARCHPLVDPEPFVALCEKTLCECAGGLECACPALLEYARTCAQEGMVLYGWTDHSACSPVCPAGMEYRQCVSPCARTCQSLHINEMCQERCVDGCSCPEGQLLDEGLCVESTECPCVHSGKRYPPGTSLSRDCNTCICRNSQWICSNEECPGECLVTGQSHFKSFDNRYFTFSGICQYLLARDCQDHSFSIVIETVQCADDRDAVCTRSVTVRLPGLHNSLVKLKHGAGVAMDGQDVQLPLLKGDLRIQHTVTASVRLSYGEDLQMDWDGRGRLLVKLSPVYAGKTCGLCGNYNGNQGDDFLTPSGLAEPRVEDFGNAWKLHGDCQDLQKQHSDPCALNPRMTRFSEEACAVLTSPTFEACHRAVSPLPYLRNCRYDVCSCSDGRECLCGALASYAAACAGRGVRVAWREPGRCELNCPKGQVYLQCGTPCNLTCRSLSYPDEECNEACLEGCFCPPGLYMDERGDCVPKAQCPCYYDGEIFQPEDIFSDHHTMCYCEDGFMHCTMSGVPGSLLPDAVLSSPLSHRSKRSLSCRPPMVKLVCPADNLRAEGLECTKTCQNYDLECMSMGCVSGCLCPPGMVRHENRCVALERCPCFHQGKEYAPGETVKIGCNTCVCQDRKWNCTDHVCDATCSTIGMAHYLTFDGLKYLFPGECQYVLVQDYCGSNPGTFRILVGNKGCSHPSVKCKKRVTILVEGGEIELFDGEVNVKRPMKDETHFEVVESGRYIILLLGKALSVVWDRHLSISVVLKQTYQEKVCGLCGNFDGIQNNDLTSSNLQVEEDPVDFGNSWKVSSQCADTRKVPLDSSPATCHNNIMKQTMVDSSCRILTSDVFQDCNKLVDPEPYLDVCIYDTCSCESIGDCACFCDTIAAYAHVCAQHGKVVTWRTATLCPQSCEERNLRENGYECEWRYNSCAPACQVTCQHPEPLACPVQCVEGCHAHCPPGKILDELLQTCVDPEDCPVCEVAGRRFASGKKVTLNPSDPEHCQICHCDVVNLTCEACQEPGGLVVPPTDAPVSPTTLYVEDISEPPLHDFYCSRLLDLVFLLDGSSRLSEAEFEVLKAFVVDMMERLRISQKWVRVAVVEYHDGSHAYIGLKDRKRPSELRRIASQVKYAGSQVASTSEVLKYTLFQIFSKIDRPEASRITLLLMASQEPQRMSRNFVRYVQGLKKKKVIVIPVGIGPHANLKQIRLIEKQAPENKAFVLSSVDELEQQRDEIVSYLCDLAPEAPPPTLPPDMAQVTVGPGLLGVSTLGPKRNSMVLDVAFVLEGSDKIGEADFNRSKEFMEEVIQRMDVGQDSIHVTVLQYSYMVTVEYPFSEAQSKGDILQRVREIRYQGGNRTNTGLALRYLSDHSFLVSQGDREQAPNLVYMVTGNPASDEIKRLPGDIQVVPIGVGPNANVQELERIGWPNAPILIQDFETLPREAPDLVLQRCCSGEGLQIPTLSPAPDCSQPLDVILLLDGSSSFPASYFDEMKSFAKAFISKANIGPRLTQVSVLQYGSITTIDVPWNVVPEKAHLLSLVDVMQREGGPSQIGDALGFAVRYLTSEMHGARPGASKAVVILVTDVSVDSVDAAADAARSNRVTVFPIGIGDRYDAAQLRILAGPAGDSNVVKLQRIEDLPTMVTLGNSFLHKLCSGFVRICMDEDGNEKRPGDVWTLPDQCHTVTCQPDGQTLLKSHRVNCDRGLRPSCPNSQSPVKVEETCGCRWTCPCVCTGSSTRHIVTFDGQNFKLTGSCSYVLFQNKEQDLEVILHNGACSPGARQGCMKSIEVKHSALSVELHSDMEVTVNGRLVSVPYVGGNMEVNVYGAIMHEVRFNHLGHIFTFTPQNNEFQLQLSPKTFASKTYGLCGICDENGANDFMLRDGTVTTDWKTLVQEWTVQRPGQTCQPILEEQCLVPDSSHCQVLLLPLFAECHKVLAPATFYAICQQDSCHQEQVCEVIASYAHLCRTNGVCVDWRTPDFCAMSCPPSLVYNHCEHGCPRHCDGNVSSCGDHPSEGCFCPPDKVMLEGSCVPEEACTQCIGEDGVQHQFLEAWVPDHQPCQICTCLSGRKVNCTTQPCPTAKAPTCGLCEVARLRQNADQCCPEYECVCDPVSCDLPPVPHCERGLQPTLTNPGECRPNFTCACRKEECKRVSPPSCPPHRLPTLRKTQCCDEYECACNCVNSTVSCPLGYLASTATNDCGCTTTTCLPDKVCVHRSTIYPVGQFWEEGCDVCTCTDMEDAVMGLRVAQCSQKPCEDSCRSGFTYVLHEGECCGRCLPSACEVVTGSPRGDSQSSWKSVGSQWASPENPCLINECVRVKEEVFIQQRNVSCPQLEVPVCPSGFQLSCKTSACCPSCRCERMEACMLNGTVIGPGKTVMIDVCTTCRCMVQVGVISGFKLECRKTTCNPCPLGYKEENNTGECCGRCLPTACTIQLRGGQIMTLKRDETLQDGCDTHFCKVNERGEYFWEKRVTGCPPFDEHKCLAEGGKIMKIPGTCCDTCEEPECNDITARLQYVKVGSCKSEVEVDIHYCQGKCASKAMYSIDINDVQDQCSCCSPTRTEPMQVALHCTNGSVVYHEVLNAMECKCSPRKCSK

SEQ ID NO: 1392 - protein, 271 aa, Homo sapiens
MTEPQVGCVACPRVHKEPAQVGTPWPAKPRSHPRKRDPTALLPRSLWPACQESVTALCFLQETVERLGQSPAQDTPVLGPCWDPMALGTQGRLLLDRDSKDTQTRISQKGRRLQPPGTPSAPPQRRPRKQLNPCRGTERVDPGFEGVTLKFQIKPDSSLQIIPTYSLPCSSRSQESPADAVGGPAAHPGGTEAHSAGSEALEPRRCASCRTQRTPLWRDAEDGTPLCNACGIRYKKYGTRCSSCWLVPRKNVQPKRLCGRCGVSLDPIQEG

SEQ ID NO: 1393 - DNA, 4113 bp, synthetic construct
  misc_feature 1..4113: note = source = /note="Description of Artificial Sequence: Synthetic coding sequence"
  source 1..4113: mol_type = other DNA
atgcaccagcgccacccccgcgcccgctgcccccccctgtgcgtggccggcatcctggcctgcggcttcctgctgggctgctggggccccagccacttccagcagagctgcctgcaggccctggagccccaggccgtgagcagctacctgagccccggcgcccccctgaagggccgcccccccagccccggcttccagcgccagcgccagcgccagcgccgcgccgccggcggcatcctgcacctggagctgctggtggccgtgggccccgacgtgttccaggcccaccaggaggacaccgagcgctacgtgctgaccaacctgaacatcggcgccgagctgctgcgcgaccccagcctgggcgcccagttccgcgtgcacctggtgaagatggtgatcctgaccgagcccgagggcgcccccaacatcaccgccaacctgaccagcagcctgctgagcgtgtgcggctggagccagaccatcaaccccgaggacgacaccgaccccggccacgccgacctggtgctgtacatcacccgcttcgacctggagctgcccgacggcaaccgccaggtgcgcggcgtgacccagctgggcggcgcctgcagccccacctggagctgcctgatcaccgaggacaccggcttcgacctgggcgtgaccatcgcccacgagatcggccacagcttcggcctggagcacgacggcgcccccggcagcggctgcggccccagcggccacgtgatggccagcgacggcgccgccccccgcgccggcctggcctggagcccctgcagccgccgccagctgctgagcctgctgagcgccggccgcgcccgctgcgtgtgggaccccccccgcccccagcccggcagcgccggccacccccccgacgcccagcccggcctgtactacagcgccaacgagcagtgccgcgtggccttcggccccaaggccgtggcctgcaccttcgcccgcgagcacctggacatgtgccaggccctgagctgccacaccgaccccctggaccagagcagctgcagccgcctgctggtgcccctgctggacggcaccgagtgcggcgtggagaagtggtgcagcaagggccgctgccgcagcctggtggagctgacccccatcgccgccgtgcacggccgctggagcagctggggcccccgcagcccctgcagccgcagctgcggcggcggcgtggtgacccgccgccgccagtgcaacaacccccgccccgccttcggcggccgcgcctgcgtgggcgccgacctgcaggccgagatgtgcaacacccaggcctgcgagaagacccagctggagttcatgagccagcagtgcgcccgcaccgacggccagcccctgcgcagcagccccggcggcgccagcttctaccactggggcgccgccgtgccccacagccagggcgacgccctgtgccgccacatgtgccgcgccatcggcgagagcttcatcatgaagcgcggcgacagcttcctggacggcacccgctgcatgcccagcggcccccgcgaggacggcaccctgagcctgtgcgtgagcggcagctgccgcaccttcggctgcgacggccgcatggacagccagcaggtgtgggaccgctgccaggtgtgcggcggcgacaacagcacctgcagcccccgcaagggcagcttcaccgccggccgcgcccgcgagtacgtgaccttcctgaccgtgacccccaacctgaccagcgtgtacatcgccaaccaccgccccctgttcacccacctggccgtgcgcatcggcggccgctacgtggtggccggcaagatgagcatcagccccaacaccacctaccccagcctgctggaggacggccgcgtggagtaccgcgtggccctgaccgaggaccgcctgccccgcctggaggagatccgcatctggggccccctgcaggaggacgccgacatccaggtgtaccgccgctacggcgaggagtacggcaacctgacccgccccgacatcaccttcacctacttccagcccaagccccgccaggcctgggtgtgggccgccgtgcgcggcccctgcagcgtgagctgcggcgccggcctgcgctgggtgaactacagctgcctggaccaggcccgcaaggagctggtggagaccgtgcagtgccagggcagccagcagccccccgcctggcccgaggcctgcgtgctggagccctgccccccctactgggccgtgggcgacttcggcccctgcagcgccagctgcggcggcggcctgcgcgagcgccccgtgcgctgcgtggaggcccagggcagcctgctgaagaccctgccccccgcccgctgccgcgccggcgcccagcagcccgccgtggccctggagacctgcaacccccagccctgccccgcccgctgggaggtgagcgagcccagcagctgcaccagcgccggcggcgccggcctggccctggagaacgagacctgcgtgcccggcgccgacggcctggaggcccccgtgaccgagggccccggcagcgtggacgagaagctgcccgcccccgagccctgcgtgggcatgagctgcccccccggctggggccacctggacgccaccagcgccggcgagaaggcccccagcccctggggcagcatccgcaccggcgcccaggccgcccacgtgtggacccccgccgccggcagctgcagcgtgagctgcggccgcggcctgatggagctgcgcttcctgtgcatggacagcgccctgcgcgtgcccgtgcaggaggagctgtgcggcctggccagcaagcccggcagccgccgcgaggtgtgccaggccgtgccctgccccgcccgctggcagtacaagctggccgcctgcagcgtgagctgcggccgcggcgtggtgcgccgcatcctgtactgcgcccgcgcccacggcgaggacgacggcgaggagatcctgctggacacccagtgccagggcctgccccgccccgagccccaggaggcctgcagcctggagccctgccccccccgctggaaggtgatgagcctgggcccctgcagcgccagctgcggcctgggcaccgcccgccgcagcgtggcctgcgtgcagctggaccagggccaggacgtggaggtggacgaggccgcctgcgccgccctggtgcgccccgaggccagcgtgccctgcctgatcgccgactgcacctaccgctggcacgtgggcacctggatggagtgcagcgtgagctgcggcgacggcatccagcgccgccgcgacacctgcctgggcccccaggcccaggcccccgtgcccgccgacttctgccagcacctgcccaagcccgtgaccgtgcgcggctgctgggccggcccctgcgtgggccagggcgcctgcggccgccagcacctggagcccaccggcaccatcgacatgcgcggccccggccaggccgactgcgccgtggccatcggccgccccctgggcgaggtggtgaccctgcgcgtgctggagagcagcctgaactgcagcgccggcgacatgctgctgctgtggggccgcctgacctggcgcaagatgtgccgcaagctgctggacatgaccttcagcagcaagaccaacaccctggtggtgcgccagcgctgcggccgccccggcggcggcgtgctgctgcgctacggcagccagctggcccccgagaccttctaccgcgagtgcgacatgcagctgttcggcccctggggcgagatcgtgagccccagcctgagccccgccaccagcaacgccggcggctgccgcctgttcatcaacgtggccccccacgcccgcatcgccatccacgccctggccaccaacatgggcgccggcaccgagggcgccaacgccagctacatcctgatccgcgacacccacagcctgcgcaccaccgccttccacggccagcaggtgctgtactgggagagcgagagcagccaggccgagatggagttcagcgagggcttcctgaaggcccaggccagcctgcgcggccagtactggaccctgcagagctgggtgcccgagatgcaggacccccagagctggaagggcaaggagggcacc

SEQ ID NO: 1394 - DNA, 4020 bp, synthetic construct
  misc_feature 1..4020: note = source = /note="Description of Artificial Sequence: Synthetic coding sequence"
  source 1..4020: mol_type = other DNA
atgcaccagcgccacccccgcgcccgctgcccccccctgtgcgtggccggcatcctggcctgcggcttcctgctgggctgctggggccccagccacttccagcagagctgcctgcaggccctggagccccaggccgtgagcagctacctgagccccggcgcccccctgaagggccgcccccccagccccggcttccagcgccagcgccagcgccagcgccgcgccgccggcggcatcctgcacctggagctgctggtggccgtgggccccgacgtgttccaggcccaccaggaggacaccgagcgctacgtgctgaccaacctgaacatcggcgccgagctgctgcgcgaccccagcctgggcgcccagttccgcgtgcacctggtgaagatggtgatcctgaccgagcccgagggcgcccccaacatcaccgccaacctgaccagcagcctgctgagcgtgtgcggctggagccagaccatcaaccccgaggacgacaccgaccccggccacgccgacctggtgctgtacatcacccgcttcgacctggagctgcccgacggcaaccgccaggtgcgcggcgtgacccagctgggcggcgcctgcagccccacctggagctgcctgatcaccgaggacaccggcttcgacctgggcgtgaccatcgcccacgagatcggccacagcttcggcctggagcacgacggcgcccccggcagcggctgcggccccagcggccacgtgatggccagcgacggcgccgccccccgcgccggcctggcctggagcccctgcagccgccgccagctgctgagcctgctgagcgccaacgagcagtgccgcgtggccttcggccccaaggccgtggcctgcaccttcgcccgcgagcacctggacatgtgccaggccctgagctgccacaccgaccccctggaccagagcagctgcagccgcctgctggtgcccctgctggacggcaccgagtgcggcgtggagaagtggtgcagcaagggccgctgccgcagcctggtggagctgacccccatcgccgccgtgcacggccgctggagcagctggggcccccgcagcccctgcagccgcagctgcggcggcggcgtggtgacccgccgccgccagtgcaacaacccccgccccgccttcggcggccgcgcctgcgtgggcgccgacctgcaggccgagatgtgcaacacccaggcctgcgagaagacccagctggagttcatgagccagcagtgcgcccgcaccgacggccagcccctgcgcagcagccccggcggcgccagcttctaccactggggcgccgccgtgccccacagccagggcgacgccctgtgccgccacatgtgccgcgccatcggcgagagcttcatcatgaagcgcggcgacagcttcctggacggcacccgctgcatgcccagcggcccccgcgaggacggcaccctgagcctgtgcgtgagcggcagctgccgcaccttcggctgcgacggccgcatggacagccagcaggtgtgggaccgctgccaggtgtgcggcggcgacaacagcacctgcagcccccgcaagggcagcttcaccgccggccgcgcccgcgagtacgtgaccttcctgaccgtgacccccaacctgaccagcgtgtacatcgccaaccaccgccccctgttcacccacctggccgtgcgcatcggcggccgctacgtggtggccggcaagatgagcatcagccccaacaccacctaccccagcctgctggaggacggccgcgtggagtaccgcgtggccctgaccgaggaccgcctgccccgcctggaggagatccgcatctggggccccctgcaggaggacgccgacatccaggtgtaccgccgctacggcgaggagtacggcaacctgacccgccccgacatcaccttcacctacttccagcccaagccccgccaggcctgggtgtgggccgccgtgcgcggcccctgcagcgtgagctgcggcgccggcctgcgctgggtgaactacagctgcctggaccaggcccgcaaggagctggtggagaccgtgcagtgccagggcagccagcagccccccgcctggcccgaggcctgcgtgctggagccctgccccccctactgggccgtgggcgacttcggcccctgcagcgccagctgcggcggcggcctgcgcgagcgccccgtgcgctgcgtggaggcccagggcagcctgctgaagaccctgccccccgcccgctgccgcgccggcgcccagcagcccgccgtggccctggagacctgcaacccccagccctgccccgcccgctgggaggtgagcgagcccagcagctgcaccagcgccggcggcgccggcctggccctggagaacgagacctgcgtgcccggcgccgacggcctggaggcccccgtgaccgagggccccggcagcgtggacgagaagctgcccgcccccgagccctgcgtgggcatgagctgcccccccggctggggccacctggacgccaccagcgccggcgagaaggcccccagcccctggggcagcatccgcaccggcgcccaggccgcccacgtgtggacccccgccgccggcagctgcagcgtgagctgcggccgcggcctgatggagctgcgcttcctgtgcatggacagcgccctgcgcgtgcccgtgcaggaggagctgtgcggcctggccagcaagcccggcagccgccgcgaggtgtgccaggccgtgccctgccccgcccgctggcagtacaagctggccgcctgcagcgtgagctgcggccgcggcgtggtgcgccgcatcctgtactgcgcccgcgcccacggcgaggacgacggcgaggagatcctgctggacacccagtgccagggcctgccccgccccgagccccaggaggcctgcagcctggagccctgccccccccgctggaaggtgatgagcctgggcccctgcagcgccagctgcggcctgggcaccgcccgccgcagcgtggcctgcgtgcagctggaccagggccaggacgtggaggtggacgaggccgcctgcgccgccctggtgcgccccgaggccagcgtgccctgcctgatcgccgactgcacctaccgctggcacgtgggcacctggatggagtgcagcgtgagctgcggcgacggcatccagcgccgccgcgacacctgcctgggcccccaggcccaggcccccgtgcccgccgacttctgccagcacctgcccaagcccgtgaccgtgcgcggctgctgggccggcccctgcgtgggccagggcgcctgcggccgccagcacctggagcccaccggcaccatcgacatgcgcggccccggccaggccgactgcgccgtggccatcggccgccccctgggcgaggtggtgaccctgcgcgtgctggagagcagcctgaactgcagcgccggcgacatgctgctgctgtggggccgcctgacctggcgcaagatgtgccgcaagctgctggacatgaccttcagcagcaagaccaacaccctggtggtgcgccagcgctgcggccgccccggcggcggcgtgctgctgcgctacggcagccagctggcccccgagaccttctaccgcgagtgcgacatgcagctgttcggcccctggggcgagatcgtgagccccagcctgagccccgccaccagcaacgccggcggctgccgcctgttcatcaacgtggccccccacgcccgcatcgccatccacgccctggccaccaacatgggcgccggcaccgagggcgccaacgccagctacatcctgatccgcgacacccacagcctgcgcaccaccgccttccacggccagcaggtgctgtactgggagagcgagagcagccaggccgagatggagttcagcgagggcttcctgaaggcccaggccagcctgcgcggccagtactggaccctgcagagctgggtgcccgagatgcaggacccccagagctggaagggcaaggagggcacc

SEQ ID NO: 1395 - DNA, 669 bp, synthetic construct
  misc_feature 1..669: note = source = /note="Description of Artificial Sequence: Synthetic coding sequence"
  source 1..669: mol_type = other DNA
atgcgcggccccggccaggccgactgcgccgtggccatcggccgccccctgggcgaggtggtgaccctgcgcgtgctggagagcagcctgaactgcagcgccggcgacatgctgctgctgtggggccgcctgacctggcgcaagatgtgccgcaagctgctggacatgaccttcagcagcaagaccaacaccctggtggtgcgccagcgctgcggccgccccggcggcggcgtgctgctgcgctacggcagccagctggcccccgagaccttctaccgcgagtgcgacatgcagctgttcggcccctggggcgagatcgtgagccccagcctgagccccgccaccagcaacgccggcggctgccgcctgttcatcaacgtggccccccacgcccgcatcgccatccacgccctggccaccaacatgggcgccggcaccgagggcgccaacgccagctacatcctgatccgcgacacccacagcctgcgcaccaccgccttccacggccagcaggtgctgtactgggagagcgagagcagccaggccgagatggagttcagcgagggcttcctgaaggcccaggccagcctgcgcggccagtactggaccctgcagagctgggtgcccgagatgcaggacccccagagctggaagggcaaggagggcacc

SEQ ID NO: 1396 - DNA, 1032 bp, synthetic construct
  misc_feature 1..1032: note = source = /note="Description of Artificial Sequence: Synthetic coding sequence"
  source 1..1032: mol_type = other DNA
atgcaccagcgccacccccgcgcccgctgcccccccctgtgcgtggccggcatcctggcctgcggcttcctgctgggctgctggggccccagccacttccagcagagctgcctgcaggccctggagccccaggccgtgagcagctacctgagccccggcgcccccctgaagggccgcccccccagccccggcttccagcgccagcgccagcgccagcgccgcgccgccggcggcatcctgcacctggagctgctggtggccgtgggccccgacgtgttccaggcccaccaggaggacaccgagcgctacgtgctgaccaacctgaacatcggcgccgagctgctgcgcgaccccagcctgggcgcccagttccgcgtgcacctggtgaagatggtgatcctgaccgagcccgagggcgcccccaacatcaccgccaacctgaccagcagcctgctgagcgtgtgcggctggagccagaccatcaaccccgaggacgacaccgaccccggccacgccgacctggtgctgtacatcacccgcttcgacctggagctgcccgacggcaaccgccaggtgcgcggcgtgacccagctgggcggcgcctgcagccccacctggagctgcctgatcaccgaggacaccggcttcgacctgggcgtgaccatcgcccacgagatcggccacagcttcggcctggagcacgacggcgcccccggcagcggctgcggccccagcggccacgtgatggccagcgacggcgccgccccccgcgccggcctggcctggagcccctgcagccgccgccagctgctgagcctgctgcgccccgtgccccccagccccctgcccctgctggccacccacctgtgcgccggccgcagcctgagcctgggccccagccaggagcccgcccccggcggcggccgcggcccccgcacccccgtgcccacccacaagcgcccccgcttccagaccctgcccagcagctgccccctgctgcgccccgccagcagccgctgcaccccccgcgac

SEQ ID NO: 1397 - DNA, 828 bp, synthetic construct
  misc_feature 1..828: note = source = /note="Description of Artificial Sequence: Synthetic coding sequence"
  source 1..828: mol_type = other DNA
atgcaccagcgccacccccgcgcccgctgcccccccctgtgcgtggccggcatcctggcctgcggcttcctgctgggctgctggggccccagccacttccagcagagctgcctgcaggccctggagccccaggccgtgagcagctacctgagccccggcgcccccctgaagggccgcccccccagccccggcttccagcgccagcgccagcgccagcgccgcgccgccggcggcatcctgcacctggagctgctggtggccgtgggccccgacgtgttccaggcccaccaggaggacaccgagcgctacgtgctgaccaacctgaacatcggcgccgagctgctgcgcgaccccagcctgggcgcccagttccgcgtgcacctggtgaagatggtgatcctgaccgagcccgagggcgcccccaacatcaccgccaacctgaccagcagcctgctgagcgtgtgcggctggagccagaccatcaaccccgaggacgacaccgaccccggccacgccgacctggtgctgtacatcacccgcttcgacctggagctgcccgacggcaaccgccaggtgcgcggcgtgacccagctgggcggcgcctgcagccccacctggagctgcctgatcaccgaggacaccggcttcgacctgggcgtgaccatcgcccacgagatcggccaccgcatctgcgcccgccccagccccgccacccagacccgctggaccaaggccgccgccgccgccagcagcttcctgagctggatgggccagaacgtggcctggcgcagcggcgccccccgcgtggccgccgccccctggtggagc

SEQ ID NO: 1398 - DNA, 4281 bp, synthetic construct
  misc_feature 1..4281: note = source = /note="Description of Artificial Sequence: Synthetic coding sequence"
  source 1..4281: mol_type = other DNA
atgcaccagcgccacccccgcgcccgctgcccccccctgtgcgtggccggcatcctggcctgcggcttcctgctgggctgctggggccccagccacttccagcagagctgcctgcaggccctggagccccaggccgtgagcagctacctgagccccggcgcccccctgaagggccgcccccccagccccggcttccagcgccagcgccagcgccagcgccgcgccgccggcggcatcctgcacctggagctgctggtggccgtgggccccgacgtgttccaggcccaccaggaggacaccgagcgctacgtgctgaccaacctgaacatcggcgccgagctgctgcgcgaccccagcctgggcgcccagttccgcgtgcacctggtgaagatggtgatcctgaccgagcccgagggcgcccccaacatcaccgccaacctgaccagcagcctgctgagcgtgtgcggctggagccagaccatcaaccccgaggacgacaccgaccccggccacgccgacctggtgctgtacatcacccgcttcgacctggagctgcccgacggcaaccgccaggtgcgcggcgtgacccagctgggcggcgcctgcagccccacctggagctgcctgatcaccgaggacaccggcttcgacctgggcgtgaccatcgcccacgagatcggccacagcttcggcctggagcacgacggcgcccccggcagcggctgcggccccagcggccacgtgatggccagcgacggcgccgccccccgcgccggcctggcctggagcccctgcagccgccgccagctgctgagcctgctgagcgccggccgcgcccgctgcgtgtgggaccccccccgcccccagcccggcagcgccggccacccccccgacgcccagcccggcctgtactacagcgccaacgagcagtgccgcgtggccttcggccccaaggccgtggcctgcaccttcgcccgcgagcacctggacatgtgccaggccctgagctgccacaccgaccccctggaccagagcagctgcagccgcctgctggtgcccctgctggacggcaccgagtgcggcgtggagaagtggtgcagcaagggccgctgccgcagcctggtggagctgacccccatcgccgccgtgcacggccgctggagcagctggggcccccgcagcccctgcagccgcagctgcggcggcggcgtggtgacccgccgccgccagtgcaacaacccccgccccgccttcggcggccgcgcctgcgtgggcgccgacctgcaggccgagatgtgcaacacccaggcctgcgagaagacccagctggagttcatgagccagcagtgcgcccgcaccgacggccagcccctgcgcagcagccccggcggcgccagcttctaccactggggcgccgccgtgccccacagccagggcgacgccctgtgccgccacatgtgccgcgccatcggcgagagcttcatcatgaagcgcggcgacagcttcctggacggcacccgctgcatgcccagcggcccccgcgaggacggcaccctgagcctgtgcgtgagcggcagctgccgcaccttcggctgcgacggccgcatggacagccagcaggtgtgggaccgctgccaggtgtgcggcggcgacaacagcacctgcagcccccgcaagggcagcttcaccgccggccgcgcccgcgagtacgtgaccttcctgaccgtgacccccaacctgaccagcgtgtacatcgccaaccaccgccccctgttcacccacctggccgtgcgcatcggcggccgctacgtggtggccggcaagatgagcatcagccccaacaccacctaccccagcctgctggaggacggccgcgtggagtaccgcgtggccctgaccgaggaccgcctgccccgcctggaggagatccgcatctggggccccctgcaggaggacgccgacatccaggtgtaccgccgctacggcgaggagtacggcaacctgacccgccccgacatcaccttcacctacttccagcccaagccccgccaggcctgggtgtgggccgccgtgcgcggcccctgcagcgtgagctgcggcgccggcctgcgctgggtgaactacagctgcctggaccaggcccgcaaggagctggtggagaccgtgcagtgccagggcagccagcagccccccgcctggcccgaggcctgcgtgctggagccctgccccccctactgggccgtgggcgacttcggcccctgcagcgccagctgcggcggcggcctgcgcgagcgccccgtgcgctgcgtggaggcccagggcagcctgctgaagaccctgccccccgcccgctgccgcgccggcgcccagcagcccgccgtggccctggagacctgcaacccccagccctgccccgcccgctgggaggtgagcgagcccagcagctgcaccagcgccggcggcgccggcctggccctggagaacgagacctgcgtgcccggcgccgacggcctggaggcccccgtgaccgagggccccggcagcgtggacgagaagctgcccgcccccgagccctgcgtgggcatgagctgcccccccggctggggccacctggacgccaccagcgccggcgagaaggcccccagcccctggggcagcatccgcaccggcgcccaggccgcccacgtgtggacccccgccgccggcagctgcagcgtgagctgcggccgcggcctgatggagctgcgcttcctgtgcatggacagcgccctgcgcgtgcccgtgcaggaggagctgtgcggcctggccagcaagcccggcagccgccgcgaggtgtgccaggccgtgccctgccccgcccgctggcagtacaagctggccgcctgcagcgtgagctgcggccgcggcgtggtgcgccgcatcctgtactgcgcccgcgcccacggcgaggacgacggcgaggagatcctgctggacacccagtgccagggcctgccccgccccgagccccaggaggcctgcagcctggagccctgccccccccgctggaaggtgatgagcctgggcccctgcagcgccagctgcggcctgggcaccgcccgccgcagcgtggcctgcgtgcagctggaccagggccaggacgtggaggtggacgaggccgcctgcgccgccctggtgcgccccgaggccagcgtgccctgcctgatcgccgactgcacctaccgctggcacgtgggcacctggatggagtgcagcgtgagctgcggcgacggcatccagcgccgccgcgacacctgcctgggcccccaggcccaggcccccgtgcccgccgacttctgccagcacctgcccaagcccgtgaccgtgcgcggctgctgggccggcccctgcgtgggccagggcacccccagcctggtgccccacgaggaggccgccgcccccggccgcaccaccgccacccccgccggcgccagcctggagtggagccaggcccgcggcctgctgttcagccccgccccccagccccgccgcctgctgcccggcccccaggagaacagcgtgcagagcagcgcctgcggccgccagcacctggagcccaccggcaccatcgacatgcgcggccccggccaggccgactgcgccgtggccatcggccgccccctgggcgaggtggtgaccctgcgcgtgctggagagcagcctgaactgcagcgccggcgacatgctgctgctgtggggccgcctgacctggcgcaagatgtgccgcaagctgctggacatgaccttcagcagcaagaccaacaccctggtggtgcgccagcgctgcggccgccccggcggcggcgtgctgctgcgctacggcagccagctggcccccgagaccttctaccgcgagtgcgacatgcagctgttcggcccctggggcgagatcgtgagccccagcctgagccccgccaccagcaacgccggcggctgccgcctgttcatcaacgtggccccccacgcccgcatcgccatccacgccctggccaccaacatgggcgccggcaccgagggcgccaacgccagctacatcctgatccgcgacacccacagcctgcgcaccaccgccttccacggccagcaggtgctgtactgggagagcgagagcagccaggccgagatggagttcagcgagggcttcctgaaggcccaggccagcctgcgcggccagtactggaccctgcagagctgggtgcccgagatgcaggacccccagagctggaagggcaaggagggcacc

SEQ ID NO: 1399 - DNA, 1092 bp, synthetic construct
  misc_feature 1..1092: note = source = /note="Description of Artificial Sequence: Synthetic coding sequence"
  source 1..1092: mol_type = other DNA
atggacatgtgccaggccctgagctgccacaccgaccccctggaccagagcagctgcagccgcctgctggtgcccctgctggacggcaccgagtgcggcgtggagaagtggtgcagcaagggccgctgccgcagcctggtggagctgacccccatcgccgccgtgcacggccgctggagcagctggggcccccgcagcccctgcagccgcagctgcggcggcggcgtggtgacccgccgccgccagtgcaacaacccccgccccgccttcggcggccgcgcctgcgtgggcgccgacctgcaggccgagatgtgcaacacccaggcctgcgagaagacccagctggagttcatgagccagcagtgcgcccgcaccgacggccagcccctgcgcagcagccccggcggcgccagcttctaccactggggcgccgccgtgccccacagccagggcgacgccctgtgccgccacatgtgccgcgccatcggcgagagcttcatcatgaagcgcggcgacagcttcctggacggcacccgctgcatgcccagcggcccccgcgaggacggcaccctgagcctgtgcgtgagcggcagctgccgcaccttcggctgcgacggccgcatggacagccagcaggtgtgggaccgctgccaggtgtgcggcggcgacaacagcacctgcagcccccgcaagggcagcttcaccgccggccgcgcccgcgagtacgtgaccttcctgaccgtgacccccaacctgaccagcgtgtacatcgccaaccaccgccccctgttcacccacctggccgtgcgcatcggcggccgctacgtggtggccggcaagatgagcatcagccccaacaccacctaccccagcctgctggaggacggccgcgtggagtaccgcgtggccctgaccgaggaccgcctgccccgcctggaggagatccgcatctggggccccctgcaggaggacgccgacatccaggtgggcggcgtgcgcgcccagctgatgcacatcagctggtggagccgccccggcctgggcgagcgcgacctgtgcgcccgcggccgctggcccggcggcagcagcgac

SEQ ID NO: 1400 - DNA, 801 bp, synthetic construct
  misc_feature 1..801: note = source = /note="Description of Artificial Sequence: Synthetic coding sequence"
  source 1..801: mol_type = other DNA
atgaaggccgccgtgctgaccctggccgtgctgttcctgaccggcagccaggcccgccacttctggcagcaggacgagcccccccagagcccctgggaccgcgtgaaggacctggccaccgtgtacgtggacgtgctgaaggacagcggccgcgactacgtgagccagttcgagggcagcgccctgggcaagcagctgaacctgaagctgctggacaactgggacagcgtgaccagcaccttcagcaagctgcgcgagcagctgggccccgtgacccaggagttctgggacaacctggagaaggagaccgagggcctgcgccaggagatgagcaaggacctggaggaggtgaaggccaaggtgcagccctacctggacgacttccagaagaagtggcaggaggagatggagctgtaccgccagaaggtggagcccctgcgcgccgagctgcaggagggcgcccgccagaagctgcacgagctgcaggagaagctgagccccctgggcgaggagatgcgcgaccgcgcccgcgcccacgtggacgccctgcgcacccacctggccccctacagcgacgagctgcgccagtgcctggccgcccgcctggaggccctgaaggagaacggcggcgcccgcctggccgagtaccacgccaaggccaccgagcacctgagcaccctgagcgagaaggccaagcccgccctggaggacctgcgccagggcctgctgcccgtgctggagagcttcaaggtgagcttcctgagcgccctggaggagtacaccaagaagctgaacacccag

SEQ ID NO: 1401 - DNA, 801 bp, synthetic construct
  misc_feature 1..801: note = source = /note="Description of Artificial Sequence: Synthetic coding sequence"
  source 1..801: mol_type = other DNA
atgaaggccgccgtgctgaccctggccgtgctgttcctgaccggcagccaggcccgccacttctggcagcaggacgagcccccccagagcccctgggaccgcgtgaaggacctggccaccgtgtacgtggacgtgctgaaggacagcggccgcgactacgtgagccagttcgagggcagcgccctgggcaagcagctgaacctgaagctgctggacaactgggacagcgtgaccagcaccttcagcaagctgcgcgagcagctgggccccgtgacccaggagttctgggacaacctggagaaggagaccgagggcctgcgccaggagatgagcaaggacctggaggaggtgaaggccaaggtgcagccctacctggacgacttccagaagaagtggcaggaggagatggagctgtaccgccagaaggtggagcccctgcgcgccgagctgcaggagggcgcccgccagaagctgcacgagctgcaggagaagctgagccccctgggcgaggagatgcgcgactgcgcccgcgcccacgtggacgccctgcgcacccacctggccccctacagcgacgagctgcgccagcgcctggccgcccgcctggaggccctgaaggagaacggcggcgcccgcctggccgagtaccacgccaaggccaccgagcacctgagcaccctgagcgagaaggccaagcccgccctggaggacctgcgccagggcctgctgcccgtgctggagagcttcaaggtgagcttcctgagcgccctggaggagtacaccaagaagctgaacacccag

SEQ ID NO: 1402 - DNA, 801 bp, synthetic construct
  misc_feature 1..801: note = source = /note="Description of Artificial Sequence: Synthetic coding sequence"
  source 1..801: mol_type = other DNA
atgaaggccgccgtgctgaccctggccgtgctgttcctgaccggcagccaggcccgccacttctggcagcaggacgagcccccccagagcccctgggaccgcgtgaaggacctggccaccgtgtacgtggacgtgctgaaggacagcggccgcgactacgtgagccagttcgagggcagcgccctgggcaagcagctgaacctgaagctgctggacaactgggacagcgtgaccagcaccttcagcaagctgcgcgagcagctgggccccgtgacccaggagttctgggacaacctggagaaggagaccgagggcctgcgccaggagatgagcaaggacctggaggaggtgaaggccaaggtgcagccctacctggacgacttccagaagaagtggcaggaggagatggagctgtaccgccagaaggtggagcccctgcgcgccgagctgcaggagggcgcccgccagaagctgcacgagctgcaggagaagctgagccccctgggcgaggagatgcgcgaccgcgcccgcgcccacgtggacgccctgcgcacccacctggccccctacagcgacgagctgcgccagcgcctggccgcccgcctggaggccctgaaggagaacggcggcgcccgcctggccgagtaccacgccaaggccaccgagcacctgagcaccctgagcgagaaggccaagcccgccctggaggacctgcgccagggcctgctgcccgtgctggagagcttcaaggtgagcttcctgagcgccctggaggagtacaccaagaagctgaacacccag

SEQ ID NO: 1403 - DNA, 1236 bp, synthetic construct
  misc_feature 1..1236: note = source = /note="Description of Artificial Sequence: Synthetic coding sequence"
  source 1..1236: mol_type = other DNA
atgagcagcaagggcagcgtggtgctggcctacagcggcggcctggacaccagctgcatcctggtgtggctgaaggagcagggctacgacgtgatcgcctacctggccaacatcggccagaaggaggacttcgaggaggcccgcaagaaggccctgaagctgggcgccaagaaggtgttcatcgaggacgtgagccgcgagttcgtggaggagttcatctggcccgccatccagagcagcgccctgtacgaggaccgctacctgctgggcaccagcctggcccgcccctgcatcgcccgcaagcaggtggagatcgcccagcgcgagggcgccaagtacgtgagccacggcgccaccggcaagggcaacgaccaggtgcgcttcgagctgagctgctacagcctggccccccagatcaaggtgatcgccccctggcgcatgcccgagttctacaaccgcttcaagggccgcaacgacctgatggagtacgccaagcagcacggcatccccatccccgtgacccccaagaacccctggagcatggacgagaacctgatgcacatcagctacgaggccggcatcctggagaaccccaagaaccaggccccccccggcctgtacaccaagacccaggaccccgccaaggcccccaacacccccgacatcctggagatcgagttcaagaagggcgtgcccgtgaaggtgaccaacgtgaaggacggcaccacccaccagaccagcctggagctgttcatgtacctgaacgaggtggccggcaagcacggcgtgggccgcatcgacatcgtggagaaccgcttcatcggcatgaagagccgcggcatctacgagacccccgccggcaccatcctgtaccacgcccacctggacatcgaggccttcaccatggaccgcgaggtgcgcaagatcaagcagggcctgggcctgaagttcgccgagctggtgtacaccggcttctggcacagccccgagtgcgagttcgtgcgccactgcatcgccaagagccaggagcgcgtggagggcaaggtgcaggtgagcgtgctgaagggccaggtgtacatcctgggccgcgagagccccctgagcctgtacaacgaggagctggtgagcatgaacgtgcagggcgactacgagcccaccgacgccaccggcttcatcaacatcaacagcctgcgcctgaaggagtaccaccgcctgcagagcaaggtgaccgccaag

SEQ ID NO: 1404 - DNA, 507 bp, synthetic construct
  misc_feature 1..507: note = source = /note="Description of Artificial Sequence: Synthetic coding sequence"
  source 1..507: mol_type = other DNA
gagcccggccccctgcagctgatggtggtggccgaggcccagggcggcaagcacggcgtgggccgcatcgacatcgtggagaaccgcttcatcggcatgaagagccgcggcatctacgagacccccgccggcaccatcctgtaccacgcccacctggacatcgaggccttcaccatggaccgcgaggtgcgcaagatcaagcagggcctgggcctgaagttcgccgagctggtgtacaccggcttctggcacagccccgagtgcgagttcgtgcgccactgcatcgccaagagccaggagcgcgtggagggcaaggtgcaggtgagcgtgctgaagggccaggtgtacatcctgggccgcgagagccccctgagcctgtacaacgaggagctggtgagcatgaacgtgcagggcgactacgagcccaccgacgccaccggcttcatcaacatcaacagcctgcgcctgaaggagtaccaccgcctgcagagcaaggtgaccgccaag

SEQ ID NO: 1405 - DNA, 594 bp, synthetic construct
  misc_feature 1..594: note = source = /note="Description of Artificial Sequence: Synthetic coding sequence"
  source 1..594: mol_type = other DNA
atgagcagcaagggcagcgtggtgctggcctacagcggcggcctggacaccagctgcatcctggtgtggctgaaggagcagggctacgacgtgatcgcctacctggccaacatcggccagaaggaggacttcgaggaggcccgcaagaaggccctgaagctgggcgccaagaaggtgttcatcgaggacgtgagccgcgagttcgtggaggagttcatctggcccgccatccagagcagcgccctgtacgaggaccgctacctgctgggcaccagcctggcccgcccctgcatcgcccgcaagcaggtggagatcgcccagcgcgagggcgccaagtacgtgagccacggcgccaccggcaagggcaacgaccaggtgcgcttcgagctgagctgctacagcctggccccccagatcaaggtgatcgccccctggcgcatgcccgagttctacaaccgcttcaagggccgcaacgacctgatggagtacgccaagcagcacggcatccccatccccgtgacccccaagaacccctggagcatggacgagaacctgatgcacatcagctacgaggccggcatcctggagaacccc

SEQ ID NO: 1406 - DNA, 537 bp, synthetic construct
  misc_feature 1..537: note = source = /note="Description of Artificial Sequence: Synthetic coding sequence"
  source 1..537: mol_type = other DNA
atgagcagcaagggcagcgtggtgctggcctacagcggcggcctggacaccagctgcatcctggtgtggctgaaggagcagggctacgacgtgatcgcctacctggccaacatcggccagaaggaggacttcgaggaggcccgcaagaaggccctgaagctgggcgccaagaaggtgttcatcgaggacgtgagccgcgagttcgtggaggagttcatctggcccgccatccagagcagcgccctgtacgaggaccgctacctgctgggcaccagcctggcccgcccctgcatcgcccgcaagcaggtggagatcgcccagcgcgagggcgccaagtacgtgagccacggcgccaccggcaaggtgatcgccccctggcgcatgcccgagttctacaaccgcttcaagggccgcaacgacctgatggagtacgccaagcagcacggcatccccatccccgtgacccccaagaacccctggagcatggacgagaacctgatgcacatcagctacgaggccggcatcctggagaacccc

SEQ ID NO: 1407 - DNA, 3753 bp, synthetic construct
  misc_feature 1..3753: note = source = /note="Description of Artificial Sequence: Synthetic coding sequence"
  source 1..3753: mol_type = other DNA
atgagcaccgagcgcgacagcgagaccaccttcgacgaggacagccagcccaacgacgaggtggtgccctacagcgacgacgagaccgaggacgagctggacgaccagggcagcgccgtggagcccgagcagaaccgcgtgaaccgcgaggccgaggagaaccgcgagcccttccgcaaggagtgcacctggcaggtgaaggccaacgaccgcaagtaccacgagcagccccacttcatgaacaccaagttcctgtgcatcaaggagagcaagtacgccaacaacgccatcaagacctacaagtacaacgccttcaccttcatccccatgaacctgttcgagcagttcaagcgcgccgccaacctgtacttcctggccctgctgatcctgcaggccgtgccccagatcagcaccctggcctggtacaccaccctggtgcccctgctggtggtgctgggcgtgaccgccatcaaggacctggtggacgacgtggcccgccacaagatggacaaggagatcaacaaccgcacctgcgaggtgatcaaggacggccgcttcaaggtggccaagtggaaggagatccaggtgggcgacgtgatccgcctgaagaagaacgacttcgtgcccgccgacatcctgctgctgagcagcagcgagcccaacagcctgtgctacgtggagaccgccgagctggacggcgagaccaacctgaagttcaagatgagcctggagatcaccgaccagtacctgcagcgcgaggacaccctggccaccttcgacggcttcatcgagtgcgaggagcccaacaaccgcctggacaagttcaccggcaccctgttctggcgcaacaccagcttccccctggacgccgacaagatcctgctgcgcggctgcgtgatccgcaacaccgacttctgccacggcctggtgatcttcgccggcgccgacaccaagatcatgaagaacagcggcaagacccgcttcaagcgcaccaagatcgactacctgatgaactacatggtgtacaccatcttcgtggtgctgatcctgctgagcgccggcctggccatcggccacgcctactgggaggcccaggtgggcaacagcagctggtacctgtacgacggcgaggacgacacccccagctaccgcggcttcctgatcttctggggctacatcatcgtgctgaacaccatggtgcccatcagcctgtacgtgagcgtggaggtgatccgcctgggccagagccacttcatcaactgggacctgcagatgtactacgccgagaaggacacccccgccaaggcccgcaccaccaccctgaacgagcagctgggccagatccactacatcttcagcgacaagaccggcaccctgacccagaacatcatgaccttcaagaagtgctgcatcaacggccagatctacggcgaccaccgcgacgccagccagcacaaccacaacaagatcgagcaggtggacttcagctggaacacctacgccgacggcaagctggccttctacgaccactacctgatcgagcagatccagagcggcaaggagcccgaggtgcgccagttcttcttcctgctggccgtgtgccacaccgtgatggtggaccgcaccgacggccagctgaactaccaggccgccagccccgacgagggcgccctggtgaacgccgcccgcaacttcggcttcgccttcctggcccgcacccagaacaccatcaccatcagcgagctgggcaccgagcgcacctacaacgtgctggccatcctggacttcaacagcgaccgcaagcgcatgagcatcatcgtgcgcacccccgagggcaacatcaagctgtactgcaagggcgccgacaccgtgatctacgagcgcctgcaccgcatgaaccccaccaagcaggagacccaggacgccctggacatcttcgccaacgagaccctgcgcaccctgtgcctgtgctacaaggagatcgaggagaaggagttcaccgagtggaacaagaagttcatggccgccagcgtggccagcaccaaccgcgacgaggccctggacaaggtgtacgaggagatcgagaaggacctgatcctgctgggcgccaccgccatcgaggacaagctgcaggacggcgtgcccgagaccatcagcaagctggccaaggccgacatcaagatctgggtgctgaccggcgacaagaaggagaccgccgagaacatcggcttcgcctgcgagctgctgaccgaggacaccaccatctgctacggcgaggacatcaacagcctgctgcacgcccgcatggagaaccagcgcaaccgcggcggcgtgtacgccaagttcgccccccccgtgcaggagagcttcttcccccccggcggcaaccgcgccctgatcatcaccggcagctggctgaacgagatcctgctggagaagaagaccaagcgcaacaagatcctgaagctgaagttcccccgcaccgaggaggagcgccgcatgcgcacccagagcaagcgccgcctggaggccaagaaggagcagcgccagaagaacttcgtggacctggcctgcgagtgcagcgccgtgatctgctgccgcgtgacccccaagcagaaggccatggtggtggacctggtgaagcgctacaagaaggccatcaccctggccatcggcgacggcgccaacgacgtgaacatgatcaagaccgcccacatcggcgtgggcatcagcggccaggagggcatgcaggccgtgatgagcagcgactacagcttcgcccagttccgctacctgcagcgcctgctgctggtgcacggccgctggagctacatccgcatgtgcaagttcctgcgctacttcttctacaagaacttcgccttcaccctggtgcacttctggtacagcttcttcaacggctacagcgcccagaccgcctacgaggactggttcatcaccctgtacaacgtgctgtacaccagcctgcccgtgctgctgatgggcctgctggaccaggacgtgagcgacaagctgagcctgcgcttccccggcctgtacatcgtgggccagcgcgacctgctgttcaactacaagcgcttcttcgtgagcctgctgcacggcgtgctgaccagcatgatcctgttcttcatccccctgggcgcctacctgcagaccgtgggccaggacggcgaggcccccagcgactaccagagcttcgccgtgaccatcgccagcgccctggtgatcaccgtgaacttccagatcggcctggacaccagctactggaccttcgtgaacgccttcagcatcttcggcagcatcgccctgtacttcggcatcatgttcgacttccacagcgccggcatccacgtgctgttccccagcgccttccagttcaccggcaccgccagcaacgccctgcgccagccctacatctggctgaccatcatcctggccgtggccgtgtgcctgctgcccgtggtggccatccgcttcctgagcatgaccatctggcccagcgagagcgacaagatccagaagcaccgcaagcgcctgaaggccgaggagcagtggcagcgccgccagcaggtgttccgccgcggcgtgagcacccgccgcagcgcctacgccttcagccaccagcgcggctacgccgacctgatcagcagcggccgcagcatccgcaagaagcgcagccccctggacgccatcgtggccgacggcaccgccgagtaccgccgcaccggcgacagc

SEQ ID NO: 1408 - DNA, 3963 bp, synthetic construct
  misc_feature 1..3963: note = source = /note="Description of Artificial Sequence: Synthetic coding sequence"
  source 1..3963: mol_type = other DNA
atgagcgacagcgtgatcctgcgcagcatcaagaagttcggcgaggagaacgacggcttcgagagcgacaagagctacaacaacgacaagaagagccgcctgcaggacgagaagaagggcgacggcgtgcgcgtgggcttcttccagctgttccgcttcagcagcagcaccgacatctggctgatgttcgtgggcagcctgtgcgccttcctgcacggcatcgcccagcccggcgtgctgctgatcttcggcaccatgaccgacgtgttcatcgactacgacgtggagctgcaggagctgcagatccccggcaaggcctgcgtgaacaacaccatcgtgtggaccaacagcagcctgaaccagaacatgaccaacggcacccgctgcggcctgctgaacatcgagagcgagatgatcaagttcgccagctactacgccggcatcgccgtggccgtgctgatcaccggctacatccagatctgcttctgggtgatcgccgccgcccgccagatccagaagatgcgcaagttctacttccgccgcatcatgcgcatggagatcggctggttcgactgcaacagcgtgggcgagctgaacacccgcttcagcgacgacatcaacaagatcaacgacgccatcgccgaccagatggccctgttcatccagcgcatgaccagcaccatctgcggcttcctgctgggcttcttccgcggctggaagctgaccctggtgatcatcagcgtgagccccctgatcggcatcggcgccgccaccatcggcctgagcgtgagcaagttcaccgactacgagctgaaggcctacgccaaggccggcgtggtggccgacgaggtgatcagcagcatgcgcaccgtggccgccttcggcggcgagaagcgcgaggtggagcgctacgagaagaacctggtgttcgcccagcgctggggcatccgcaagggcatcgtgatgggcttcttcaccggcttcgtgtggtgcctgatcttcctgtgctacgccctggccttctggtacggcagcaccctggtgctggacgagggcgagtacacccccggcaccctggtgcagatcttcctgagcgtgatcgtgggcgccctgaacctgggcaacgccagcccctgcctggaggccttcgccaccggccgcgccgccgccaccagcatcttcgagaccatcgaccgcaagcccatcatcgactgcatgagcgaggacggctacaagctggaccgcatcaagggcgagatcgagttccacaacgtgaccttccactaccccagccgccccgaggtgaagatcctgaacgacctgaacatggtgatcaagcccggcgagatgaccgccctggtgggccccagcggcgccggcaagagcaccgccctgcagctgatccagcgcttctacgacccctgcgagggcatggtgaccgtggacggccacgacatccgcagcctgaacatccagtggctgcgcgaccagatcggcatcgtggagcaggagcccgtgctgttcagcaccaccatcgccgagaacatccgctacggccgcgaggacgccaccatggaggacatcgtgcaggccgccaaggaggccaacgcctacaacttcatcatggacctgccccagcagttcgacaccctggtgggcgagggcggcggccagatgagcggcggccagaagcagcgcgtggccatcgcccgcgccctgatccgcaaccccaagatcctgctgctggacatggccaccagcgccctggacaacgagagcgaggccatggtgcaggaggtgctgagcaagatccagcacggccacaccatcatcagcgtggcccaccgcctgagcaccgtgcgcgccgccgacaccatcatcggcttcgagcacggcaccgccgtggagcgcggcacccacgaggagctgctggagcgcaagggcgtgtacttcaccctggtgaccctgcagagccagggcaaccaggccctgaacgaggaggacatcaaggacgccaccgaggacgacatgctggcccgcaccttcagccgcggcagctaccaggacagcctgcgcgccagcatccgccagcgcagcaagagccagctgagctacctggtgcacgagccccccctggccgtggtggaccacaagagcacctacgaggaggaccgcaaggacaaggacatccccgtgcaggaggaggtggagcccgcccccgtgcgccgcatcctgaagttcagcgcccccgagtggccctacatgctggtgggcagcgtgggcgccgccgtgaacggcaccgtgacccccctgtacgccttcctgttcagccagatcctgggcaccttcagcatccccgacaaggaggagcagcgcagccagatcaacggcgtgtgcctgctgttcgtggccatgggctgcgtgagcctgttcacccagttcctgcagggctacgccttcgccaagagcggcgagctgctgaccaagcgcctgcgcaagttcggcttccgcgccatgctgggccaggacatcgcctggttcgacgacctgcgcaacagccccggcgccctgaccacccgcctggccaccgacgccagccaggtgcagggcgccgccggcagccagatcggcatgatcgtgaacagcttcaccaacgtgaccgtggccatgatcatcgccttcagcttcagctggaagctgagcctggtgatcctgtgcttcttccccttcctggccctgagcggcgccacccagacccgcatgctgaccggcttcgccagccgcgacaagcaggccctggagatggtgggccagatcaccaacgaggccctgagcaacatccgcaccgtggccggcatcggcaaggagcgccgcttcatcgaggccctggagaccgagctggagaagcccttcaagaccgccatccagaaggccaacatctacggcttctgcttcgccttcgcccagtgcatcatgttcatcgccaacagcgccagctaccgctacggcggctacctgatcagcaacgagggcctgcacttcagctacgtgttccgcgtgatcagcgccgtggtgctgagcgccaccgccctgggccgcgccttcagctacacccccagctacgccaaggccaagatcagcgccgcccgcttcttccagctgctggaccgccagccccccatcagcgtgtacaacaccgccggcgagaagtgggacaacttccagggcaagatcgacttcgtggactgcaagttcacctaccccagccgccccgacagccaggtgctgaacggcctgagcgtgagcatcagccccggccagaccctggccttcgtgggcagcagcggctgcggcaagagcaccagcatccagctgctggagcgcttctacgaccccgaccagggcaaggtgatgatcgacggccacgacagcaagaaggtgaacgtgcagttcctgcgcagcaacatcggcatcgtgagccaggagcccgtgctgttcgcctgcagcatcatggacaacatcaagtacggcgacaacaccaaggagatccccatggagcgcgtgatcgccgccgccaagcaggcccagctgcacgacttcgtgatgagcctgcccgagaagtacgagaccaacgtgggcagccagggcagccagctgagccgcggcgagaagcagcgcatcgccatcgcccgcgccatcgtgcgcgaccccaagatcctgctgctggacgaggccaccagcgccctggacaccgagagcgagaagaccgtgcaggtggccctggacaaggcccgcgagggccgcacctgcatcgtgatcgcccaccgcctgagcaccatccagaacgccgacatcatcgccgtgatggcccagggcgtggtgatcgagaagggcacccacgaggagctgatggcccagaagggcgcctactacaagctggtgaccaccggcagccccatcagc

SEQ ID NO: 1409 - DNA, 3858 bp, synthetic construct
  misc_feature 1..3858: note = source = /note="Description of Artificial Sequence: Synthetic coding sequence"
  source 1..3858: mol_type = other DNA
atggacctggaggccgccaagaacggcaccgcctggcgccccaccagcgccgagggcgacttcgagctgggcatcagcagcaagcagaagcgcaagaagaccaagaccgtgaagatgatcggcgtgctgaccctgttccgctacagcgactggcaggacaagctgttcatgagcctgggcaccatcatggccatcgcccacggcagcggcctgcccctgatgatgatcgtgttcggcgagatgaccgacaagttcgtggacaccgccggcaacttcagcttccccgtgaacttcagcctgagcctgctgaaccccggcaagatcctggaggaggagatgacccgctacgcctactactacagcggcctgggcgccggcgtgctggtggccgcctacatccaggtgagcttctggaccctggccgccggccgccagatccgcaagatccgccagaagttcttccacgccatcctgcgccaggagatcggctggttcgacatcaacgacaccaccgagctgaacacccgcctgaccgacgacatcagcaagatcagcgagggcatcggcgacaaggtgggcatgttcttccaggccgtggccaccttcttcgccggcttcatcgtgggcttcatccgcggctggaagctgaccctggtgatcatggccatcagccccatcctgggcctgagcgccgccgtgtgggccaagatcctgagcgccttcagcgacaaggagctggccgcctacgccaaggccggcgccgtggccgaggaggccctgggcgccatccgcaccgtgatcgccttcggcggccagaacaaggagctggagcgctaccagaagcacctggagaacgccaaggagatcggcatcaagaaggccatcagcgccaacatcagcatgggcatcgccttcctgctgatctacgccagctacgccctggccttctggtacggcagcaccctggtgatcagcaaggagtacaccatcggcaacgccatgaccgtgttcttcagcatcctgatcggcgccttcagcgtgggccaggccgccccctgcatcgacgccttcgccaacgcccgcggcgccgcctacgtgatcttcgacatcatcgacaacaaccccaagatcgacagcttcagcgagcgcggccacaagcccgacagcatcaagggcaacctggagttcaacgacgtgcacttcagctaccccagccgcgccaacgtgaagatcctgaagggcctgaacctgaaggtgcagagcggccagaccgtggccctggtgggcagcagcggctgcggcaagagcaccaccgtgcagctgatccagcgcctgtacgaccccgacgagggcaccatcaacatcgacggccaggacatccgcaacttcaacgtgaactacctgcgcgagatcatcggcgtggtgagccaggagcccgtgctgttcagcaccaccatcgccgagaacatctgctacggccgcggcaacgtgaccatggacgagatcaagaaggccgtgaaggaggccaacgcctacgagttcatcatgaagctgccccagaagttcgacaccctggtgggcgagcgcggcgcccagctgagcggcggccagaagcagcgcatcgccatcgcccgcgccctggtgcgcaaccccaagatcctgctgctggacgaggccaccagcgccctggacaccgagagcgaggccgaggtgcaggccgccctggacaaggcccgcgagggccgcaccaccatcgtgatcgcccaccgcctgagcaccgtgcgcaacgccgacgtgatcgccggcttcgaggacggcgtgatcgtggagcagggcagccacagcgagctgatgaagaaggagggcgtgtacttcaagctggtgaacatgcagaccagcggcagccagatccagagcgaggagttcgagctgaacgacgagaaggccgccacccgcatggcccccaacggctggaagagccgcctgttccgccacagcacccagaagaacctgaagaacagccagatgtgccagaagagcctggacgtggagaccgacggcctggaggccaacgtgccccccgtgagcttcctgaaggtgctgaagctgaacaagaccgagtggccctacttcgtggtgggcaccgtgtgcgccatcgccaacggcggcctgcagcccgccttcagcgtgatcttcagcgagatcatcgccatcttcggccccggcgacgacgccgtgaagcagcagaagtgcaacatcttcagcctgatcttcctgttcctgggcatcatcagcttcttcaccttcttcctgcagggcttcaccttcggcaaggccggcgagatcctgacccgccgcctgcgcagcatggccttcaaggccatgctgcgccaggacatgagctggttcgacgaccacaagaacagcaccggcgccctgagcacccgcctggccaccgacgccgcccaggtgcagggcgccaccggcacccgcctggccctgatcgcccagaacatcgccaacctgggcaccggcatcatcatcagcttcatctacggctggcagctgaccctgctgctgctggccgtggtgcccatcatcgccgtgagcggcatcgtggagatgaagctgctggccggcaacgccaagcgcgacaagaaggagctggaggccgccggcaagatcgccaccgaggccatcgagaacatccgcaccgtggtgagcctgacccaggagcgcaagttcgagagcatgtacgtggagaagctgtacggcccctaccgcaacagcgtgcagaaggcccacatctacggcatcaccttcagcatcagccaggccttcatgtacttcagctacgccggctgcttccgcttcggcgcctacctgatcgtgaacggccacatgcgcttccgcgacgtgatcctggtgttcagcgccatcgtgttcggcgccgtggccctgggccacgccagcagcttcgcccccgactacgccaaggccaagctgagcgccgcccacctgttcatgctgttcgagcgccagcccctgatcgacagctacagcgaggagggcctgaagcccgacaagttcgagggcaacatcaccttcaacgaggtggtgttcaactaccccacccgcgccaacgtgcccgtgctgcagggcctgagcctggaggtgaagaagggccagaccctggccctggtgggcagcagcggctgcggcaagagcaccgtggtgcagctgctggagcgcttctacgaccccctggccggcaccgtgttcgtggacttcggcttccagctgctggacggccaggaggccaagaagctgaacgtgcagtggctgcgcgcccagctgggcatcgtgagccaggagcccatcctgttcgactgcagcatcgccgagaacatcgcctacggcgacaacagccgcgtggtgagccaggacgagatcgtgagcgccgccaaggccgccaacatccaccccttcatcgagaccctgccccacaagtacgagacccgcgtgggcgacaagggcacccagctgagcggcggccagaagcagcgcatcgccatcgcccgcgccctgatccgccagccccagatcctgctgctggacgaggccaccagcgccctggacaccgagagcgagaaggtggtgcaggaggccctggacaaggcccgcgagggccgcacctgcatcgtgatcgcccaccgcctgagcaccatccagaacgccgacctgatcgtggtgttccagaacggccgcgtgaaggagcacggcacccaccagcagctgctggcccagaagggcatctacttcagcatggtgagcgtgcaggccggcacccagaacctg

SEQ ID NO: 1410 - DNA, 3696 bp, synthetic construct
  misc_feature 1..3696: note = source = /note="Description of Artificial Sequence: Synthetic coding sequence"
  source 1..3696: mol_type = other DNA
atggacctggaggccgccaagaacggcaccgcctggcgccccaccagcgccgagggcgacttcgagctgggcatcagcagcaagcagaagcgcaagaagaccaagaccgtgaagatgatcggcgtgctgaccctgttccgctacagcgactggcaggacaagctgttcatgagcctgggcaccatcatggccatcgcccacggcagcggcctgcccctgatgatgatcgtgttcggcgagatgaccgacaagttcgtggacaccgccggcaacttcagcttccccgtgaacttcagcctgagcctgctgaaccccggcaagatcctggaggaggagatgacccgctacgcctactactacagcggcctgggcgccggcgtgctggtggccgcctacatccaggtgagcttctggaccctggccgccggccgccagatccgcaagatccgccagaagttcttccacgccatcctgcgccaggagatcggctggttcgacatcaacgacaccaccgagctgaacacccgcctgaccgacgacatcagcaagatcagcgagggcatcggcgacaaggtgggcatgttcttccaggccgtggccaccttcttcgccggcttcatcgtgggcttcatccgcggctggaagctgaccctggtgatcatggccatcagccccatcctgggcctgagcgccgccgtgtgggccaagatcctgagcgccttcagcgacaaggagctggccgcctacgccaaggccggcgccgtggccgaggaggccctgggcgccatccgcaccgtgatcgccttcggcggccagaacaaggagctggagcgctaccagaagcacctggagaacgccaaggagatcggcatcaagaaggccatcagcgccaacatcagcatgggcatcgccttcctgctgatctacgccagctacgccctggccttctggtacggcagcaccctggtgatcagcaaggagtacaccatcggcaacgccatgaccgtgttcttcagcatcctgatcggcgccttcagcgtgggccaggccgccccctgcatcgacgccttcgccaacgcccgcggcgccgcctacgtgatcttcgacatcatcgacaacaaccccaagatcgacagcttcagcgagcgcggccacaagcccgacagcatcaagggcaacctggagttcaacgacgtgcacttcagctaccccagccgcgccaacgtgaagatcctgaagggcctgaacctgaaggtgcagagcggccagaccgtggccctggtgggcagcagcggctgcggcaagagcaccaccgtgcagctgatccagcgcctgtacgaccccgacgagggcaccatcaacatcgacggccaggacatccgcaacttcaacgtgaactacctgcgcgagatcatcggcgtggtgagccaggagcccgtgctgttcagcaccaccatcgccgagaacatctgctacggccgcggcaacgtgaccatggacgagatcaagaaggccgtgaaggaggccaacgcctacgagttcatcatgaagctgccccagaagttcgacaccctggtgggcgagcgcggcgcccagctgagcggcggccagaagcagcgcatcgccatcgcccgcgccctggtgcgcaaccccaagatcctgctgctggacgaggccaccagcgccctggacaccgagagcgaggccgaggtgcaggccgccctggacaaggcccgcgagggccgcaccaccatcgtgatcgcccaccgcctgagcaccgtgcgcaacgccgacgtgatcgccggcttcgaggacggcgtgatcgtggagcagggcagccacagcgagctgatgaagaaggagggcgtgtacttcaagctggtgaacatgcagaccagcggcagccagatccagagcgaggagttcgagctgaacgacgagaaggccgccacccgcatggcccccaacggctggaagagccgcctgttccgccacagcacccagaagaacctgaagaacagccagatgtgccagaagagcctggacgtggagaccgacggcctggaggccaacgtgccccccgtgagcttcctgaaggtgctgaagctgaacaagaccgagtggccctacttcgtggtgggcaccgtgtgcgccatcgccaacggcggcctgcagcccgccttcagcgtgatcttcagcgagatcatcgccatcttcggccccggcgacgacgccgtgaagcagcagaagtgcaacatcttcagcctgatcttcctgttcctgggcatcatcagcttcttcaccttcttcctgcagggcttcaccttcggcaaggccggcgagatcctgacccgccgcctgcgcagcatggccttcaaggccatgctgcgccaggacatgagctggttcgacgaccacaagaacagcaccggcgccctgagcacccgcctggccaccgacgccgcccaggtgcagggcgccaccggcacccgcctggccctgatcgcccagaacatcgccaacctgggcaccggcatcatcatcagcttcatctacggctggcagctgaccctgctgctgctggccgtggtgcccatcatcgccgtgagcggcatcgtggagatgaagctgctggccggcaacgccaagcgcgacaagaaggagctggaggccgccggcaagatcgccaccgaggccatcgagaacatccgcaccgtggtgagcctgacccaggagcgcaagttcgagagcatgtacgtggagaagctgtacggcccctaccgcgtgttcagcgccatcgtgttcggcgccgtggccctgggccacgccagcagcttcgcccccgactacgccaaggccaagctgagcgccgcccacctgttcatgctgttcgagcgccagcccctgatcgacagctacagcgaggagggcctgaagcccgacaagttcgagggcaacatcaccttcaacgaggtggtgttcaactaccccacccgcgccaacgtgcccgtgctgcagggcctgagcctggaggtgaagaagggccagaccctggccctggtgggcagcagcggctgcggcaagagcaccgtggtgcagctgctggagcgcttctacgaccccctggccggcaccgtgctgctggacggccaggaggccaagaagctgaacgtgcagtggctgcgcgcccagctgggcatcgtgagccaggagcccatcctgttcgactgcagcatcgccgagaacatcgcctacggcgacaacagccgcgtggtgagccaggacgagatcgtgagcgccgccaaggccgccaacatccaccccttcatcgagaccctgccccacaagtacgagacccgcgtgggcgacaagggcacccagctgagcggcggccagaagcagcgcatcgccatcgcccgcgccctgatccgccagccccagatcctgctgctggacgaggccaccagcgccctggacaccgagagcgagaaggtggtgcaggaggccctggacaaggcccgcgagggccgcacctgcatcgtgatcgcccaccgcctgagcaccatccagaacgccgacctgatcgtggtgttccagaacggccgcgtgaaggagcacggcacccaccagcagctgctggcccagaagggcatctacttcagcatggtgagcgtgcaggccggcacccagaacctg

SEQ ID NO: 1411 - DNA, 3837 bp, synthetic construct
  misc_feature 1..3837: note = source = /note="Description of Artificial Sequence: Synthetic coding sequence"
  source 1..3837: mol_type = other DNA
atggacctggaggccgccaagaacggcaccgcctggcgccccaccagcgccgagggcgacttcgagctgggcatcagcagcaagcagaagcgcaagaagaccaagaccgtgaagatgatcggcgtgctgaccctgttccgctacagcgactggcaggacaagctgttcatgagcctgggcaccatcatggccatcgcccacggcagcggcctgcccctgatgatgatcgtgttcggcgagatgaccgacaagttcgtggacaccgccggcaacttcagcttccccgtgaacttcagcctgagcctgctgaaccccggcaagatcctggaggaggagatgacccgctacgcctactactacagcggcctgggcgccggcgtgctggtggccgcctacatccaggtgagcttctggaccctggccgccggccgccagatccgcaagatccgccagaagttcttccacgccatcctgcgccaggagatcggctggttcgacatcaacgacaccaccgagctgaacacccgcctgaccgacgacatcagcaagatcagcgagggcatcggcgacaaggtgggcatgttcttccaggccgtggccaccttcttcgccggcttcatcgtgggcttcatccgcggctggaagctgaccctggtgatcatggccatcagccccatcctgggcctgagcgccgccgtgtgggccaagatcctgagcgccttcagcgacaaggagctggccgcctacgccaaggccggcgccgtggccgaggaggccctgggcgccatccgcaccgtgatcgccttcggcggccagaacaaggagctggagcgctaccagaagcacctggagaacgccaaggagatcggcatcaagaaggccatcagcgccaacatcagcatgggcatcgccttcctgctgatctacgccagctacgccctggccttctggtacggcagcaccctggtgatcagcaaggagtacaccatcggcaacgccatgaccgtgttcttcagcatcctgatcggcgccttcagcgtgggccaggccgccccctgcatcgacgccttcgccaacgcccgcggcgccgcctacgtgatcttcgacatcatcgacaacaaccccaagatcgacagcttcagcgagcgcggccacaagcccgacagcatcaagggcaacctggagttcaacgacgtgcacttcagctaccccagccgcgccaacgtgaagatcctgaagggcctgaacctgaaggtgcagagcggccagaccgtggccctggtgggcagcagcggctgcggcaagagcaccaccgtgcagctgatccagcgcctgtacgaccccgacgagggcaccatcaacatcgacggccaggacatccgcaacttcaacgtgaactacctgcgcgagatcatcggcgtggtgagccaggagcccgtgctgttcagcaccaccatcgccgagaacatctgctacggccgcggcaacgtgaccatggacgagatcaagaaggccgtgaaggaggccaacgcctacgagttcatcatgaagctgccccagaagttcgacaccctggtgggcgagcgcggcgcccagctgagcggcggccagaagcagcgcatcgccatcgcccgcgccctggtgcgcaaccccaagatcctgctgctggacgaggccaccagcgccctggacaccgagagcgaggccgaggtgcaggccgccctggacaaggcccgcgagggccgcaccaccatcgtgatcgcccaccgcctgagcaccgtgcgcaacgccgacgtgatcgccggcttcgaggacggcgtgatcgtggagcagggcagccacagcgagctgatgaagaaggagggcgtgtacttcaagctggtgaacatgcagaccagcggcagccagatccagagcgaggagttcgagctgaacgacgagaaggccgccacccgcatggcccccaacggctggaagagccgcctgttccgccacagcacccagaagaacctgaagaacagccagatgtgccagaagagcctggacgtggagaccgacggcctggaggccaacgtgccccccgtgagcttcctgaaggtgctgaagctgaacaagaccgagtggccctacttcgtggtgggcaccgtgtgcgccatcgccaacggcggcctgcagcccgccttcagcgtgatcttcagcgagatcatcgccatcttcggccccggcgacgacgccgtgaagcagcagaagtgcaacatcttcagcctgatcttcctgttcctgggcatcatcagcttcttcaccttcttcctgcagggcttcaccttcggcaaggccggcgagatcctgacccgccgcctgcgcagcatggccttcaaggccatgctgcgccaggacatgagctggttcgacgaccacaagaacagcaccggcgccctgagcacccgcctggccaccgacgccgcccaggtgcagggcgccaccggcacccgcctggccctgatcgcccagaacatcgccaacctgggcaccggcatcatcatcagcttcatctacggctggcagctgaccctgctgctgctggccgtggtgcccatcatcgccgtgagcggcatcgtggagatgaagctgctggccggcaacgccaagcgcgacaagaaggagctggaggccgccggcaagatcgccaccgaggccatcgagaacatccgcaccgtggtgagcctgacccaggagcgcaagttcgagagcatgtacgtggagaagctgtacggcccctaccgcaacagcgtgcagaaggcccacatctacggcatcaccttcagcatcagccaggccttcatgtacttcagctacgccggctgcttccgcttcggcgcctacctgatcgtgaacggccacatgcgcttccgcgacgtgatcctggtgttcagcgccatcgtgttcggcgccgtggccctgggccacgccagcagcttcgcccccgactacgccaaggccaagctgagcgccgcccacctgttcatgctgttcgagcgccagcccctgatcgacagctacagcgaggagggcctgaagcccgacaagttcgagggcaacatcaccttcaacgaggtggtgttcaactaccccacccgcgccaacgtgcccgtgctgcagggcctgagcctggaggtgaagaagggccagaccctggccctggtgggcagcagcggctgcggcaagagcaccgtggtgcagctgctggagcgcttctacgaccccctggccggcaccgtgctgctggacggccaggaggccaagaagctgaacgtgcagtggctgcgcgcccagctgggcatcgtgagccaggagcccatcctgttcgactgcagcatcgccgagaacatcgcctacggcgacaacagccgcgtggtgagccaggacgagatcgtgagcgccgccaaggccgccaacatccaccccttcatcgagaccctgccccacaagtacgagacccgcgtgggcgacaagggcacccagctgagcggcggccagaagcagcgcatcgccatcgcccgcgccctgatccgccagccccagatcctgctgctggacgaggccaccagcgccctggacaccgagagcgagaaggtggtgcaggaggccctggacaaggcccgcgagggccgcacctgcatcgtgatcgcccaccgcctgagcaccatccagaacgccgacctgatcgtggtgttccagaacggccgcgtgaaggagcacggcacccaccagcagctgctggcccagaagggcatctacttcagcatggtgagcgtgcaggccggcacccagaacctg

SEQ ID NO: 1412 - DNA, 183 bp, synthetic construct
  misc_feature 1..183: note = source = /note="Description of Artificial Sequence: Synthetic coding sequence"
  source 1..183: mol_type = other DNA
atggacctggaggccgccaagaacggcaccgcctggcgccccaccagcgccgagggcgacttcgagctgggcatcagcagcaagcagaagcgcaagaagaccaagaccgtgaagatgatcggcgtgctgaccctgttccgctacagcgactggcaggacaagctgttcatgagcctgggcacc

SEQ ID NO: 1413 - DNA, 1446 bp, synthetic construct
  misc_feature 1..1446: note = source = /note="Description of Artificial Sequence: Synthetic coding sequence"
  source 1..1446: mol_type = other DNA
atggacgagggcatcccccacctgcaggagcgccagctgctggagcaccgcgacttcatcggcctggactacagcagcctgtacatgtgcaagcccaagcgcagcatgaagcgcgacgacaccaaggacacctacaagctgccccaccgcctgatcgagaagaagcgccgcgaccgcatcaacgagtgcatcgcccagctgaaggacctgctgcccgagcacctgaagctgaccaccctgggccacctggagaaggccgtggtgctggagctgaccctgaagcacctgaaggccctgaccgccctgaccgagcagcagcaccagaagatcatcgccctgcagaacggcgagcgcagcctgaagagccccatccagagcgacctggacgccttccacagcggcttccagacctgcgccaaggaggtgctgcagtacctgagccgcttcgagagctggaccccccgcgagccccgctgcgtgcagctgatcaaccacctgcacgccgtggccacccagttcctgcccaccccccagctgctgacccagcaggtgcccctgagcaagggcaccggcgcccccagcgccgccggcagcgccgccgccccctgcctggagcgcgccggccagaagctggagcccctggcctactgcgtgcccgtgatccagcgcacccagcccagcgccgagctggccgccgagaacgacaccgacaccgacagcggctacggcggcgaggccgaggcccgccccgaccgcgagaagggcaagggcgccggcgccagccgcgtgaccatcaagcaggagccccccggcgaggacagccccgcccccaagcgcatgaagctggacagccgcggcggcggcagcggcggcggccccggcggcggcgccgccgccgccgccgccgccctgctgggccccgaccccgccgccgccgccgccctgctgcgccccgacgccgccctgctgagcagcctggtggccttcggcggcggcggcggcgcccccttcccccagcccgccgccgccgccgcccccttctgcctgcccttctgcttcctgagccccagcgccgccgccgcctacgtgcagcccttcctggacaagagcggcctggagaagtacctgtaccccgccgccgccgccgcccccttccccctgctgtaccccggcatccccgcccccgccgccgccgccgccgccgccgccgccgccgccgccgccgccgccgccttcccctgcctgagcagcgtgctgagccccccccccgagaaggccggcgccgccgccgccaccctgctgccccacgaggtggcccccctgggcgccccccacccccagcacccccacggccgcacccacctgcccttcgccggcccccgcgagcccggcaaccccgagagcagcgcccaggaggaccccagccagcccggcaaggaggccccc

SEQ ID NO: 1414 - DNA, 1188 bp, synthetic construct
  misc_feature 1..1188: note = source = /note="Description of Artificial Sequence: Synthetic coding sequence"
  source 1..1188: mol_type = other DNA
atggtggccggcacccgctgcctgctggccctgctgctgccccaggtgctgctgggcggcgccgccggcctggtgcccgagctgggccgccgcaagttcgccgccgccagcagcggccgccccagcagccagcccagcgacgaggtgctgagcgagttcgagctgcgcctgctgagcatgttcggcctgaagcagcgccccacccccagccgcgacgccgtggtgcccccctacatgctggacctgtaccgccgccacagcggccagcccggcagccccgcccccgaccaccgcctggagcgcgccgccagccgcgccaacaccgtgcgcagcttccaccacgaggagagcctggaggagctgcccgagaccagcggcaagaccacccgccgcttcttcttcaacctgagcagcatccccaccgaggagttcatcaccagcgccgagctgcaggtgttccgcgagcagatgcaggacgccctgggcaacaacagcagcttccaccaccgcatcaacatctacgagatcatcaagcccgccaccgccaacagcaagttccccgtgacccgcctgctggacacccgcctggtgaaccagaacgccagccgctgggagagcttcgacgtgacccccgccgtgatgcgctggaccgcccagggccacgccaaccacggcttcgtggtggaggtggcccacctggaggagaagcagggcgtgagcaagcgccacgtgcgcatcagccgcagcctgcaccaggacgagcacagctggagccagatccgccccctgctggtgaccttcggccacgacggcaagggccaccccctgcacaagcgcgagaagcgccaggccaagcacaagcagcgcaagcgcctgaagagcagctgcaagcgccaccccctgtacgtggacttcagcgacgtgggctggaacgactggatcgtggccccccccggctaccacgccttctactgccacggcgagtgccccttccccctggccgaccacctgaacagcaccaaccacgccatcgtgcagaccctggtgaacagcgtgaacagcaagatccccaaggcctgctgcgtgcccaccgagctgagcgccatcagcatgctgtacctggacgagaacgagaaggtggtgctgaagaactaccaggacatggtggtggagggctgcggctgccgc

SEQ ID NO: 1415 - DNA, 1293 bp, synthetic construct
  misc_feature 1..1293: note = source = /note="Description of Artificial Sequence: Synthetic coding sequence"
  source 1..1293: mol_type = other DNA
atgcacgtgcgcagcctgcgcgccgccgccccccacagcttcgtggccctgtgggcccccctgttcctgctgcgcagcgccctggccgacttcagcctggacaacgaggtgcacagcagcttcatccaccgccgcctgcgcagccaggagcgccgcgagatgcagcgcgagatcctgagcatcctgggcctgccccaccgcccccgcccccacctgcagggcaagcacaacagcgcccccatgttcatgctggacctgtacaacgccatggccgtggaggagggcggcggccccggcggccagggcttcagctacccctacaaggccgtgttcagcacccagggcccccccctggccagcctgcaggacagccacttcctgaccgacgccgacatggtgatgagcttcgtgaacctggtggagcacgacaaggagttcttccacccccgctaccaccaccgcgagttccgcttcgacctgagcaagatccccgagggcgaggccgtgaccgccgccgagttccgcatctacaaggactacatccgcgagcgcttcgacaacgagaccttccgcatcagcgtgtaccaggtgctgcaggagcacctgggccgcgagagcgacctgttcctgctggacagccgcaccctgtgggccagcgaggagggctggctggtgttcgacatcaccgccaccagcaaccactgggtggtgaacccccgccacaacctgggcctgcagctgagcgtggagaccctggacggccagagcatcaaccccaagctggccggcctgatcggccgccacggcccccagaacaagcagcccttcatggtggccttcttcaaggccaccgaggtgcacttccgcagcatccgcagcaccggcagcaagcagcgcagccagaaccgcagcaagacccccaagaaccaggaggccctgcgcatggccaacgtggccgagaacagcagcagcgaccagcgccaggcctgcaagaagcacgagctgtacgtgagcttccgcgacctgggctggcaggactggatcatcgcccccgagggctacgccgcctactactgcgagggcgagtgcgccttccccctgaacagctacatgaacgccaccaaccacgccatcgtgcagaccctggtgcacttcatcaaccccgagaccgtgcccaagccctgctgcgcccccacccagctgaacgccatcagcgtgctgtacttcgacgacagcagcaacgtgatcctgaagaagtaccgcaacatggtggtgcgcgcctgcggctgccac

SEQ ID NO: 1416 - DNA, 1095 bp, synthetic construct
  misc_feature 1..1095: note = source = /note="Description of Artificial Sequence: Synthetic coding sequence"
  source 1..1095: mol_type = other DNA
atgcacgtgcgcagcctgcgcgccgccgccccccacagcttcgtggccctgtgggcccccctgttcctgctgcgcagcgccctggccgacttcagcctggacaacgaggtgcacagcagcttcatccaccgccgcctgcgcagccaggagcgccgcgagatgcagcgcgagatcctgagcatcctgggcctgccccaccgcccccgcccccacctgcagggcaagcacaacagcgcccccatgttcatgctggacctgtacaacgccatggccgtggaggagggcggcggccccggcggccagggcttcagctacccctacaaggccgtgttcagcacccagggcccccccctggccagcctgcaggacagccacttcctgaccgacgccgacatggtgatgagcttcgtgaacctggtggagcacgacaaggagttcttccacccccgctaccaccaccgcgagttccgcttcgacctgagcaagatccccgagggcgaggccgtgaccgccgccgagttccgcatctacaaggactacatccgcgagcgcttcgacaacgagaccttccgcatcagcgtgtaccaggtgctgcaggagcacctgggccgcgagagcgacctgttcctgctggacagccgcaccctgtgggccagcgaggagggctggctggtgttcgacatcaccgccaccagcaaccactgggtggtgaacccccgccacaacctgggcctgcagctgagcgtggagaccctggacgagaacagcagcagcgaccagcgccaggcctgcaagaagcacgagctgtacgtgagcttccgcgacctgggctggcaggactggatcatcgcccccgagggctacgccgcctactactgcgagggcgagtgcgccttccccctgaacagctacatgaacgccaccaaccacgccatcgtgcagaccctggtgcacttcatcaaccccgagaccgtgcccaagccctgctgcgcccccacccagctgaacgccatcagcgtgctgtacttcgacgacagcagcaacgtgatcctgaagaagtaccgcaacatggtggtgcgcgcctgcggctgccac

SEQ ID NO: 1417 - DNA, 4500 bp, synthetic construct
  misc_feature 1..4500: note = source = /note="Description of Artificial Sequence: Synthetic coding sequence"
  source 1..4500: mol_type = other DNA
atgacccgcatcctgaccgccttcaaggtggtgcgcaccctgaagaccggcttcggcttcaccaacgtgaccgcccaccagaagtggaagttcagccgccccggcatccgcctgctgagcgtgaaggcccagaccgcccacatcgtgctggaggacggcaccaagatgaagggctacagcttcggccaccccagcagcgtggccggcgaggtggtgttcaacaccggcctgggcggctaccccgaggccatcaccgaccccgcctacaagggccagatcctgaccatggccaaccccatcatcggcaacggcggcgcccccgacaccaccgccctggacgagctgggcctgagcaagtacctggagagcaacggcatcaaggtgagcggcctgctggtgctggactacagcaaggactacaaccactggctggccaccaagagcctgggccagtggctgcaggaggagaaggtgcccgccatctacggcgtggacacccgcatgctgaccaagatcatccgcgacaagggcaccatgctgggcaagatcgagttcgagggccagcccgtggacttcgtggaccccaacaagcagaacctgatcgccgaggtgagcaccaaggacgtgaaggtgtacggcaagggcaaccccaccaaggtggtggccgtggactgcggcatcaagaacaacgtgatccgcctgctggtgaagcgcggcgccgaggtgcacctggtgccctggaaccacgacttcaccaagatggagtacgacggcatcctgatcgccggcggccccggcaaccccgccctggccgagcccctgatccagaacgtgcgcaagatcctggagagcgaccgcaaggagcccctgttcggcatcagcaccggcaacctgatcaccggcctggccgccggcgccaagacctacaagatgagcatggccaaccgcggccagaaccagcccgtgctgaacatcaccaacaagcaggccttcatcaccgcccagaaccacggctacgccctggacaacaccctgcccgccggctggaagcccctgttcgtgaacgtgaacgaccagaccaacgagggcatcatgcacgagagcaagcccttcttcgccgtgcagttccaccccgaggtgacccccggccccatcgacaccgagtacctgttcgacagcttcttcagcctgatcaagaagggcaaggccaccaccatcaccagcgtgctgcccaagcccgccctggtggccagccgcgtggaggtgagcaaggtgctgatcctgggcagcggcggcctgagcatcggccaggccggcgagttcgactacagcggcagccaggccgtgaaggccatgaaggaggagaacgtgaagaccgtgctgatgaaccccaacatcgccagcgtgcagaccaacgaggtgggcctgaagcaggccgacaccgtgtacttcctgcccatcaccccccagttcgtgaccgaggtgatcaaggccgagcagcccgacggcctgatcctgggcatgggcggccagaccgccctgaactgcggcgtggagctgttcaagcgcggcgtgctgaaggagtacggcgtgaaggtgctgggcaccagcgtggagagcatcatggccaccgaggaccgccagctgttcagcgacaagctgaacgagatcaacgagaagatcgcccccagcttcgccgtggagagcatcgaggacgccctgaaggccgccgacaccatcggctaccccgtgatgatccgcagcgcctacgccctgggcggcctgggcagcggcatctgccccaaccgcgagaccctgatggacctgagcaccaaggccttcgccatgaccaaccagatcctggtggagaagagcgtgaccggctggaaggagatcgagtacgaggtggtgcgcgacgccgacgacaactgcgtgaccgtgtgcaacatggagaacgtggacgccatgggcgtgcacaccggcgacagcgtggtggtggcccccgcccagaccctgagcaacgccgagttccagatgctgcgccgcaccagcatcaacgtggtgcgccacctgggcatcgtgggcgagtgcaacatccagttcgccctgcaccccaccagcatggagtactgcatcatcgaggtgaacgcccgcctgagccgcagcagcgccctggccagcaaggccaccggctaccccctggccttcatcgccgccaagatcgccctgggcatccccctgcccgagatcaagaacgtggtgagcggcaagaccagcgcctgcttcgagcccagcctggactacatggtgaccaagatcccccgctgggacctggaccgcttccacggcaccagcagccgcatcggcagcagcatgaagagcgtgggcgaggtgatggccatcggccgcaccttcgaggagagcttccagaaggccctgcgcatgtgccaccccagcatcgagggcttcaccccccgcctgcccatgaacaaggagtggcccagcaacctggacctgcgcaaggagctgagcgagcccagcagcacccgcatctacgccatcgccaaggccatcgacgacaacatgagcctggacgagatcgagaagctgacctacatcgacaagtggttcctgtacaagatgcgcgacatcctgaacatggagaagaccctgaagggcctgaacagcgagagcatgaccgaggagaccctgaagcgcgccaaggagatcggcttcagcgacaagcagatcagcaagtgcctgggcctgaccgaggcccagacccgcgagctgcgcctgaagaagaacatccacccctgggtgaagcagatcgacaccctggccgccgagtaccccagcgtgaccaactacctgtacgtgacctacaacggccaggagcacgacgtgaacttcgacgaccacggcatgatggtgctgggctgcggcccctaccacatcggcagcagcgtggagttcgactggtgcgccgtgagcagcatccgcaccctgcgccagctgggcaagaagaccgtggtggtgaactgcaaccccgagaccgtgagcaccgacttcgacgagtgcgacaagctgtacttcgaggagctgagcctggagcgcatcctggacatctaccaccaggaggcctgcggcggctgcatcatcagcgtgggcggccagatccccaacaacctggccgtgcccctgtacaagaacggcgtgaagatcatgggcaccagccccctgcagatcgaccgcgccgaggaccgcagcatcttcagcgccgtgctggacgagctgaaggtggcccaggccccctggaaggccgtgaacaccctgaacgaggccctggagttcgccaagagcgtggactacccctgcctgctgcgccccagctacgtgctgagcggcagcgccatgaacgtggtgttcagcgaggacgagatgaagaagttcctggaggaggccacccgcgtgagccaggagcaccccgtggtgctgaccaagttcgtggagggcgcccgcgaggtggagatggacgccgtgggcaaggacggccgcgtgatcagccacgccatcagcgagcacgtggaggacgccggcgtgcacagcggcgacgccaccctgatgctgcccacccagaccatcagccagggcgccatcgagaaggtgaaggacgccacccgcaagatcgccaaggccttcgccatcagcggccccttcaacgtgcagttcctggtgaagggcaacgacgtgctggtgatcgagtgcaacctgcgcgccagccgcagcttccccttcgtgagcaagaccctgggcgtggacttcatcgacgtggccaccaaggtgatgatcggcgagaacgtggacgagaagcacctgcccaccctggaccaccccatcatccccgccgactacgtggccatcaaggcccccatgttcagctggccccgcctgcgcgacgccgaccccatcctgcgctgcgagatggccagcaccggcgaggtggcctgcttcggcgagggcatccacaccgccttcctgaaggccatgctgagcaccggcttcaagatcccccagaagggcatcctgatcggcatccagcagagcttccgcccccgcttcctgggcgtggccgagcagctgcacaacgagggcttcaagctgttcgccaccgaggccaccagcgactggctgaacgccaacaacgtgcccgccacccccgtggcctggcccagccaggagggccagaaccccagcctgagcagcatccgcaagctgatccgcgacggcagcatcgacctggtgatcaacctgcccaacaacaacaccaagttcgtgcacgacaactacgtgatccgccgcaccgccgtggacagcggcatccccctgctgaccaacttccaggtgaccaagctgttcgccgaggccgtgcagaagagccgcaaggtggacagcaagagcctgttccactaccgccagtacagcgccggcaaggccgcc

SEQ ID NO: 1418 - DNA, 363 bp, synthetic construct
  misc_feature 1..363: note = source = /note="Description of Artificial Sequence: Synthetic coding sequence"
  source 1..363: mol_type = other DNA
atgacccgcatcctgaccgccttcaaggtggtgcgcaccctgaagaccggcttcggcttcaccaacgtgaccgcccaccagaagtggaagttcagccgccccggcatccgcctgctgagcgtgaaggcccagaccgcccacatcgtgctggaggacggcaccaagatgaagggctacagcttcggccaccccagcagcgtggccggcgaggtggtgttcaacaccggcctgggcggctaccccgaggccatcaccgaccccgcctacaagggccagatcctgaccatggccaaccccatcatcggcaacggcggcgcccccgacaccaccgccctggacgagctgggcctgagcaagtacctg

SEQ ID NO: 1419 - DNA, 4518 bp, synthetic construct
  misc_feature 1..4518: note = source = /note="Description of Artificial Sequence: Synthetic coding sequence"
  source 1..4518: mol_type = other DNA
atgccccagatcatcaagatgacccgcatcctgaccgccttcaaggtggtgcgcaccctgaagaccggcttcggcttcaccaacgtgaccgcccaccagaagtggaagttcagccgccccggcatccgcctgctgagcgtgaaggcccagaccgcccacatcgtgctggaggacggcaccaagatgaagggctacagcttcggccaccccagcagcgtggccggcgaggtggtgttcaacaccggcctgggcggctaccccgaggccatcaccgaccccgcctacaagggccagatcctgaccatggccaaccccatcatcggcaacggcggcgcccccgacaccaccgccctggacgagctgggcctgagcaagtacctggagagcaacggcatcaaggtgagcggcctgctggtgctggactacagcaaggactacaaccactggctggccaccaagagcctgggccagtggctgcaggaggagaaggtgcccgccatctacggcgtggacacccgcatgctgaccaagatcatccgcgacaagggcaccatgctgggcaagatcgagttcgagggccagcccgtggacttcgtggaccccaacaagcagaacctgatcgccgaggtgagcaccaaggacgtgaaggtgtacggcaagggcaaccccaccaaggtggtggccgtggactgcggcatcaagaacaacgtgatccgcctgctggtgaagcgcggcgccgaggtgcacctggtgccctggaaccacgacttcaccaagatggagtacgacggcatcctgatcgccggcggccccggcaaccccgccctggccgagcccctgatccagaacgtgcgcaagatcctggagagcgaccgcaaggagcccctgttcggcatcagcaccggcaacctgatcaccggcctggccgccggcgccaagacctacaagatgagcatggccaaccgcggccagaaccagcccgtgctgaacatcaccaacaagcaggccttcatcaccgcccagaaccacggctacgccctggacaacaccctgcccgccggctggaagcccctgttcgtgaacgtgaacgaccagaccaacgagggcatcatgcacgagagcaagcccttcttcgccgtgcagttccaccccgaggtgacccccggccccatcgacaccgagtacctgttcgacagcttcttcagcctgatcaagaagggcaaggccaccaccatcaccagcgtgctgcccaagcccgccctggtggccagccgcgtggaggtgagcaaggtgctgatcctgggcagcggcggcctgagcatcggccaggccggcgagttcgactacagcggcagccaggccgtgaaggccatgaaggaggagaacgtgaagaccgtgctgatgaaccccaacatcgccagcgtgcagaccaacgaggtgggcctgaagcaggccgacaccgtgtacttcctgcccatcaccccccagttcgtgaccgaggtgatcaaggccgagcagcccgacggcctgatcctgggcatgggcggccagaccgccctgaactgcggcgtggagctgttcaagcgcggcgtgctgaaggagtacggcgtgaaggtgctgggcaccagcgtggagagcatcatggccaccgaggaccgccagctgttcagcgacaagctgaacgagatcaacgagaagatcgcccccagcttcgccgtggagagcatcgaggacgccctgaaggccgccgacaccatcggctaccccgtgatgatccgcagcgcctacgccctgggcggcctgggcagcggcatctgccccaaccgcgagaccctgatggacctgagcaccaaggccttcgccatgaccaaccagatcctggtggagaagagcgtgaccggctggaaggagatcgagtacgaggtggtgcgcgacgccgacgacaactgcgtgaccgtgtgcaacatggagaacgtggacgccatgggcgtgcacaccggcgacagcgtggtggtggcccccgcccagaccctgagcaacgccgagttccagatgctgcgccgcaccagcatcaacgtggtgcgccacctgggcatcgtgggcgagtgcaacatccagttcgccctgcaccccaccagcatggagtactgcatcatcgaggtgaacgcccgcctgagccgcagcagcgccctggccagcaaggccaccggctaccccctggccttcatcgccgccaagatcgccctgggcatccccctgcccgagatcaagaacgtggtgagcggcaagaccagcgcctgcttcgagcccagcctggactacatggtgaccaagatcccccgctgggacctggaccgcttccacggcaccagcagccgcatcggcagcagcatgaagagcgtgggcgaggtgatggccatcggccgcaccttcgaggagagcttccagaaggccctgcgcatgtgccaccccagcatcgagggcttcaccccccgcctgcccatgaacaaggagtggcccagcaacctggacctgcgcaaggagctgagcgagcccagcagcacccgcatctacgccatcgccaaggccatcgacgacaacatgagcctggacgagatcgagaagctgacctacatcgacaagtggttcctgtacaagatgcgcgacatcctgaacatggagaagaccctgaagggcctgaacagcgagagcatgaccgaggagaccctgaagcgcgccaaggagatcggcttcagcgacaagcagatcagcaagtgcctgggcctgaccgaggcccagacccgcgagctgcgcctgaagaagaacatccacccctgggtgaagcagatcgacaccctggccgccgagtaccccagcgtgaccaactacctgtacgtgacctacaacggccaggagcacgacgtgaacttcgacgaccacggcatgatggtgctgggctgcggcccctaccacatcggcagcagcgtggagttcgactggtgcgccgtgagcagcatccgcaccctgcgccagctgggcaagaagaccgtggtggtgaactgcaaccccgagaccgtgagcaccgacttcgacgagtgcgacaagctgtacttcgaggagctgagcctggagcgcatcctggacatctaccaccaggaggcctgcggcggctgcatcatcagcgtgggcggccagatccccaacaacctggccgtgcccctgtacaagaacggcgtgaagatcatgggcaccagccccctgcagatcgaccgcgccgaggaccgcagcatcttcagcgccgtgctggacgagctgaaggtggcccaggccccctggaaggccgtgaacaccctgaacgaggccctggagttcgccaagagcgtggactacccctgcctgctgcgccccagctacgtgctgagcggcagcgccatgaacgtggtgttcagcgaggacgagatgaagaagttcctggaggaggccacccgcgtgagccaggagcaccccgtggtgctgaccaagttcgtggagggcgcccgcgaggtggagatggacgccgtgggcaaggacggccgcgtgatcagccacgccatcagcgagcacgtggaggacgccggcgtgcacagcggcgacgccaccctgatgctgcccacccagaccatcagccagggcgccatcgagaaggtgaaggacgccacccgcaagatcgccaaggccttcgccatcagcggccccttcaacgtgcagttcctggtgaagggcaacgacgtgctggtgatcgagtgcaacctgcgcgccagccgcagcttccccttcgtgagcaagaccctgggcgtggacttcatcgacgtggccaccaaggtgatgatcggcgagaacgtggacgagaagcacctgcccaccctggaccaccccatcatccccgccgactacgtggccatcaaggcccccatgttcagctggccccgcctgcgcgacgccgaccccatcctgcgctgcgagatggccagcaccggcgaggtggcctgcttcggcgagggcatccacaccgccttcctgaaggccatgctgagcaccggcttcaagatcccccagaagggcatcctgatcggcatccagcagagcttccgcccccgcttcctgggcgtggccgagcagctgcacaacgagggcttcaagctgttcgccaccgaggccaccagcgactggctgaacgccaacaacgtgcccgccacccccgtggcctggcccagccaggagggccagaaccccagcctgagcagcatccgcaagctgatccgcgacggcagcatcgacctggtgatcaacctgcccaacaacaacaccaagttcgtgcacgacaactacgtgatccgccgcaccgccgtggacagcggcatccccctgctgaccaacttccaggtgaccaagctgttcgccgaggccgtgcagaagagccgcaaggtggacagcaagagcctgttccactaccgccagtacagcgccggcaaggccgcc

SEQ ID NO: 1420 - DNA, 3147 bp, synthetic construct
  misc_feature 1..3147: note = source = /note="Description of Artificial Sequence: Synthetic coding sequence"
  source 1..3147: mol_type = other DNA
atgaaggaggagaacgtgaagaccgtgctgatgaaccccaacatcgccagcgtgcagaccaacgaggtgggcctgaagcaggccgacaccgtgtacttcctgcccatcaccccccagttcgtgaccgaggtgatcaaggccgagcagcccgacggcctgatcctgggcatgggcggccagaccgccctgaactgcggcgtggagctgttcaagcgcggcgtgctgaaggagtacggcgtgaaggtgctgggcaccagcgtggagagcatcatggccaccgaggaccgccagctgttcagcgacaagctgaacgagatcaacgagaagatcgcccccagcttcgccgtggagagcatcgaggacgccctgaaggccgccgacaccatcggctaccccgtgatgatccgcagcgcctacgccctgggcggcctgggcagcggcatctgccccaaccgcgagaccctgatggacctgagcaccaaggccttcgccatgaccaaccagatcctggtggagaagagcgtgaccggctggaaggagatcgagtacgaggtggtgcgcgacgccgacgacaactgcgtgaccgtgtgcaacatggagaacgtggacgccatgggcgtgcacaccggcgacagcgtggtggtggcccccgcccagaccctgagcaacgccgagttccagatgctgcgccgcaccagcatcaacgtggtgcgccacctgggcatcgtgggcgagtgcaacatccagttcgccctgcaccccaccagcatggagtactgcatcatcgaggtgaacgcccgcctgagccgcagcagcgccctggccagcaaggccaccggctaccccctggccttcatcgccgccaagatcgccctgggcatccccctgcccgagatcaagaacgtggtgagcggcaagaccagcgcctgcttcgagcccagcctggactacatggtgaccaagatcccccgctgggacctggaccgcttccacggcaccagcagccgcatcggcagcagcatgaagagcgtgggcgaggtgatggccatcggccgcaccttcgaggagagcttccagaaggccctgcgcatgtgccaccccagcatcgagggcttcaccccccgcctgcccatgaacaaggagtggcccagcaacctggacctgcgcaaggagctgagcgagcccagcagcacccgcatctacgccatcgccaaggccatcgacgacaacatgagcctggacgagatcgagaagctgacctacatcgacaagtggttcctgtacaagatgcgcgacatcctgaacatggagaagaccctgaagggcctgaacagcgagagcatgaccgaggagaccctgaagcgcgccaaggagatcggcttcagcgacaagcagatcagcaagtgcctgggcctgaccgaggcccagacccgcgagctgcgcctgaagaagaacatccacccctgggtgaagcagatcgacaccctggccgccgagtaccccagcgtgaccaactacctgtacgtgacctacaacggccaggagcacgacgtgaacttcgacgaccacggcatgatggtgctgggctgcggcccctaccacatcggcagcagcgtggagttcgactggtgcgccgtgagcagcatccgcaccctgcgccagctgggcaagaagaccgtggtggtgaactgcaaccccgagaccgtgagcaccgacttcgacgagtgcgacaagctgtacttcgaggagctgagcctggagcgcatcctggacatctaccaccaggaggcctgcggcggctgcatcatcagcgtgggcggccagatccccaacaacctggccgtgcccctgtacaagaacggcgtgaagatcatgggcaccagccccctgcagatcgaccgcgccgaggaccgcagcatcttcagcgccgtgctggacgagctgaaggtggcccaggccccctggaaggccgtgaacaccctgaacgaggccctggagttcgccaagagcgtggactacccctgcctgctgcgccccagctacgtgctgagcggcagcgccatgaacgtggtgttcagcgaggacgagatgaagaagttcctggaggaggccacccgcgtgagccaggagcaccccgtggtgctgaccaagttcgtggagggcgcccgcgaggtggagatggacgccgtgggcaaggacggccgcgtgatcagccacgccatcagcgagcacgtggaggacgccggcgtgcacagcggcgacgccaccctgatgctgcccacccagaccatcagccagggcgccatcgagaaggtgaaggacgccacccgcaagatcgccaaggccttcgccatcagcggccccttcaacgtgcagttcctggtgaagggcaacgacgtgctggtgatcgagtgcaacctgcgcgccagccgcagcttccccttcgtgagcaagaccctgggcgtggacttcatcgacgtggccaccaaggtgatgatcggcgagaacgtggacgagaagcacctgcccaccctggaccaccccatcatccccgccgactacgtggccatcaaggcccccatgttcagctggccccgcctgcgcgacgccgaccccatcctgcgctgcgagatggccagcaccggcgaggtggcctgcttcggcgagggcatccacaccgccttcctgaaggccatgctgagcaccggcttcaagatcccccagaagggcatcctgatcggcatccagcagagcttccgcccccgcttcctgggcgtggccgagcagctgcacaacgagggcttcaagctgttcgccaccgaggccaccagcgactggctgaacgccaacaacgtgcccgccacccccgtggcctggcccagccaggagggccagaaccccagcctgagcagcatccgcaagctgatccgcgacggcagcatcgacctggtgatcaacctgcccaacaacaacaccaagttcgtgcacgacaactacgtgatccgccgcaccgccgtggacagcggcatccccctgctgaccaacttccaggtgaccaagctgttcgccgaggccgtgcagaagagccgcaaggtggacagcaagagcctgttccactaccgccagtacagcgccggcaaggccgcc

SEQ ID NO: 1421 - DNA, 552 bp, synthetic construct
  misc_feature 1..552: note = source = /note="Description of Artificial Sequence: Synthetic coding sequence"
  source 1..552: mol_type = other DNA
atggccgaccacctgatgctggccgagggctaccgcctggtgcagcgcccccccagcgccgccgccgcccacggcccccacgccctgcgcaccctgcccccctacgccggccccggcctggacagcggcctgcgcccccgcggcgcccccctgggccccccccccccccgccagcccggcgccctggcctacggcgccttcggcccccccagcagcttccagcccttccccgccgtgcccccccccgccgccggcatcgcccacctgcagcccgtggccaccccctaccccggccgcgccgccgccccccccaacgcccccggcggcccccccggcccccagcccgcccccagcgccgccgccccccccccccccgcccacgccctgggcggcatggacgccgagctgatcgacgaggaggccctgaccagcctggagctggagctgggcctgcaccgcgtgcgcgagctgcccgagctgttcctgggccagagcgagttcgactgcttcagcgacctgggcagcgccccccccgccggcagcgtgagctgc

SEQ ID NO: 1422 - DNA, 3195 bp, synthetic construct
  misc_feature 1..3195: note = source = /note="Description of Artificial Sequence: Synthetic coding sequence"
  source 1..3195: mol_type = other DNA
atgaagatcctgatcctgggcatcttcctgttcctgtgcagcacccccgcctgggccaaggagaagcactactacatcggcatcatcgagaccacctgggactacgccagcgaccacggcgagaagaagctgatcagcgtggacaccgagcacagcaacatctacctgcagaacggccccgaccgcatcggccgcctgtacaagaaggccctgtacctgcagtacaccgacgagaccttccgcaccaccatcgagaagcccgtgtggctgggcttcctgggccccatcatcaaggccgagaccggcgacaaggtgtacgtgcacctgaagaacctggccagccgcccctacaccttccacagccacggcatcacctactacaaggagcacgagggcgccatctaccccgacaacaccaccgacttccagcgcgccgacgacaaggtgtaccccggcgagcagtacacctacatgctgctggccaccgaggagcagagccccggcgagggcgacggcaactgcgtgacccgcatctaccacagccacatcgacgcccccaaggacatcgccagcggcctgatcggccccctgatcatctgcaagaaggacagcctggacaaggagaaggagaagcacatcgaccgcgagttcgtggtgatgttcagcgtggtggacgagaacttcagctggtacctggaggacaacatcaagacctactgcagcgagcccgagaaggtggacaaggacaacgaggacttccaggagagcaaccgcatgtacagcgtgaacggctacaccttcggcagcctgcccggcctgagcatgtgcgccgaggaccgcgtgaagtggtacctgttcggcatgggcaacgaggtggacgtgcacgccgccttcttccacggccaggccctgaccaacaagaactaccgcatcgacaccatcaacctgttccccgccaccctgttcgacgcctacatggtggcccagaaccccggcgagtggatgctgagctgccagaacctgaaccacctgaaggccggcctgcaggccttcttccaggtgcaggagtgcaacaagagcagcagcaaggacaacatccgcggcaagcacgtgcgccactactacatcgccgccgaggagatcatctggaactacgcccccagcggcatcgacatcttcaccaaggagaacctgaccgcccccggcagcgacagcgccgtgttcttcgagcagggcaccacccgcatcggcggcagctacaagaagctggtgtaccgcgagtacaccgacgccagcttcaccaaccgcaaggagcgcggccccgaggaggagcacctgggcatcctgggccccgtgatctgggccgaggtgggcgacaccatccgcgtgaccttccacaacaagggcgcctaccccctgagcatcgagcccatcggcgtgcgcttcaacaagaacaacgagggcacctactacagccccaactacaacccccagagccgcagcgtgccccccagcgccagccacgtggcccccaccgagaccttcacctacgagtggaccgtgcccaaggaggtgggccccaccaacgccgaccccgtgtgcctggccaagatgtactacagcgccgtggagcccaccaaggacatcttcaccggcctgatcggccccatgaagatctgcaagaagggcagcctgcacgccaacggccgccagaaggacgtggacaaggagttctacctgttccccaccgtgttcgacgagaacgagagcctgctgctggaggacaacatccgcatgttcaccaccgcccccgaccaggtggacaaggaggacgaggacttccaggagagcaacaagatgcacagcatgaacggcttcatgtacggcaaccagcccggcctgaccatgtgcaagggcgacagcgtggtgtggtacctgttcagcgccggcaacgaggccgacgtgcacggcatctacttcagcggcaacacctacctgtggcgcggcgagcgccgcgacaccgccaacctgttcccccagaccagcctgaccctgcacatgtggcccgacaccgagggcaccttcaacgtggagtgcctgaccaccgaccactacaccggcggcatgaagcagaagtacaccgtgaaccagtgccgccgccagagcgaggacagcaccttctacctgggcgagcgcacctactacatcgccgccgtggaggtggagtgggactacagcccccagcgcgagtgggagaaggagctgcaccacctgcaggagcagaacgtgagcaacgccttcctggacaagggcgagttctacatcggcagcaagtacaagaaggtggtgtaccgccagtacaccgacagcaccttccgcgtgcccgtggagcgcaaggccgaggaggagcacctgggcatcctgggcccccagctgcacgccgacgtgggcgacaaggtgaagatcatcttcaagaacatggccacccgcccctacagcatccacgcccacggcgtgcagaccgagagcagcaccgtgacccccaccctgcccggcgagaccctgacctacgtgtggaagatccccgagcgcagcggcgccggcaccgaggacagcgcctgcatcccctgggcctactacagcaccgtggaccaggtgaaggacctgtacagcggcctgatcggccccctgatcgtgtgccgccgcccctacctgaaggtgttcaacccccgccgcaagctggagttcgccctgctgttcctggtgttcgacgagaacgagagctggtacctggacgacaacatcaagacctacagcgaccaccccgagaaggtgaacaaggacgacgaggagttcatcgagagcaacaagatgcacgccatcaacggccgcatgttcggcaacctgcagggcctgaccatgcacgtgggcgacgaggtgaactggtacctgatgggcatgggcaacgagatcgacctgcacaccgtgcacttccacggccacagcttccagtacaagcaccgcggcgtgtacagcagcgacgtgttcgacatcttccccggcacctaccagaccctggagatgttcccccgcacccccggcatctggctgctgcactgccacgtgaccgaccacatccacgccggcatggagaccacctacaccgtgctgcagaacgaggacaccaagagcggc

SEQ ID NO: 1423 - DNA, 1866 bp, synthetic construct
  misc_feature 1..1866: note = source = /note="Description of Artificial Sequence: Synthetic coding sequence"
  source 1..1866: mol_type = other DNA
atggcccacgtgcgcggcctgcagctgcccggctgcctggccctggccgccctgtgcagcctggtgcacagccagcacgtgttcctggccccccagcaggcccgcagcctgctgcagcgcgtgcgccgcgccaacaccttcctggaggaggtgcgcaagggcaacctggagcgcgagtgcgtggaggagacctgcagctacgaggaggccttcgaggccctggagagcagcaccgccaccgacgtgttctgggccaagtacaccgcctgcgagaccgcccgcaccccccgcgacaagctggccgcctgcctggagggcaactgcgccgagggcctgggcaccaactaccgcggccacgtgaacatcacccgcagcggcatcgagtgccagctgtggcgcagccgctacccccacaagcccgagatcaacagcaccacccaccccggcgccgacctgcaggagaacttctgccgcaaccccgacagcagcaccaccggcccctggtgctacaccaccgaccccaccgtgcgccgccaggagtgcagcatccccgtgtgcggccaggaccaggtgaccgtggccatgaccccccgcagcgagggcagcagcgtgaacctgagcccccccctggagcagtgcgtgcccgaccgcggccagcagtaccagggccgcctggccgtgaccacccacggcctgccctgcctggcctgggccagcgcccaggccaaggccctgagcaagcaccaggacttcaacagcgccgtgcagctggtggagaacttctgccgcaaccccgacggcgacgaggagggcgtgtggtgctacgtggccggcaagcccggcgacttcggctactgcgacctgaactactgcgaggaggccgtggaggaggagaccggcgacggcctggacgaggacagcgaccgcgccatcgagggccgcaccgccaccagcgagtaccagaccttcttcaacccccgcaccttcggcagcggcgaggccgactgcggcctgcgccccctgttcgagaagaagagcctggaggacaagaccgagcgcgagctgctggagagctacatcgacggccgcatcgtggagggcagcgacgccgagatcggcatgagcccctggcaggtgatgctgttccgcaagagcccccaggagctgctgtgcggcgccagcctgatcagcgaccgctgggtgctgaccgccgcccactgcctgctgtaccccccctgggacaagaacttcaccgagaacgacctgctggtgcgcatcggcaagcacagccgcacccgctacgagcgcaacatcgagaagatcagcatgctggagaagatctacatccacccccgctacaactggcgcgagaacctggaccgcgacatcgccctgatgaagctgaagaagcccgtggccttcagcgactacatccaccccgtgtgcctgcccgaccgcgagaccgccgccagcctgctgcaggccggctacaagggccgcgtgaccggctggggcaacctgaaggagacctggaccgccaacgtgggcaagggccagcccagcgtgctgcaggtggtgaacctgcccatcgtggagcgccccgtgtgcaaggacagcacccgcatccgcatcaccgacaacatgttctgcgccggctacaagcccgacgagggcaagcgcggcgacgcctgcgagggcgacagcggcggccccttcgtgatgaagagccccttcaacaaccgctggtaccagatgggcatcgtgagctggggcgagggctgcgaccgcgacggcaagtacggcttctacacccacgtgttccgcctgaagaagtggatccagaaggtgatcgaccagttcggcgag

SEQ ID NO: 1424 - DNA, 1749 bp, synthetic construct
  misc_feature 1..1749: note = source = /note="Description of Artificial Sequence: Synthetic coding sequence"
  source 1..1749: mol_type = other DNA
atggcccacgtgcgcggcctgcagctgcccggctgcctggccctggccgccctgtgcagcctggtgcacagccagcacgtgttcctggccccccagcaggcccgcagcctgctgcagcgcgtgcgccgcgccaacaccttcctggaggaggtgcgcaagggcaacctggagcgcgagtgcgtggaggagacctgcagctacgaggaggccttcgaggccctggagagcagcaccgccaccgacgtgttctgggccaagtacaccgcctgcgagaccgcccgcaccccccgcgacaagctggccgcctgcctggagggcaactgcgccgagggcctgggcaccaactaccgcggccacgtgaacatcacccgcagcggcatcgagtgccagctgtggcgcagccgctacccccacaagcccgagatcaacagcaccacccaccccggcgccgacctgcaggagaacttctgccgcaaccccgacagcagcaccaccggcccctggtgctacaccaccgaccccaccgtgcgccgccaggagtgcagcatccccgtgtgcggccaggaccaggtgaccgtggccatgaccccccgcagcgagggcagcagcgtgaacctgagcccccccctggagcagtgcgtgcccgaccgcggccagcagtaccagggccgcctggccgtgaccacccacggcctgccctgcctggcctgggccagcgcccaggccaaggccctgagcaagcaccaggacttcaacagcgccgtgcagctggtggagaacttctgccgcaaccccgacggcgacgaggagggcgtgtggtgctacgtggccggcaagcccggcgacttcggctactgcgacctgaactactgcgaggaggccgtggaggaggagaccggcgacggcctggacgaggacagcgaccgcgccatcgagggccgcaccgccaccagcgagtaccagaccttcttcaacccccgcaccttcggcagcggcgaggccgactgcggcctgcgccccctgttcgagaagaagagcctggaggacaagaccgagcgcgagctgctggagagctacatcgacggccgcatcgtggagggcagcgacgccgagatcggcatgagcccctggcaggtgatgctgttccgcaagagcccccaggagctgctgtgcggcgccagcctgatcagcgaccgctgggtgctgaccgccgcccactgcctgctgtaccccccctgggacaagaacttcaccgagaacgacctgctggtgcgcatcggcaagcacagccgcacccgctacgagcgcaacatcgagaagatcagcatgctggagaagatctacatccaccccagcctgctgcaggccggctacaagggccgcgtgaccggctggggcaacctgaaggagacctggaccgccaacgtgggcaagggccagcccagcgtgctgcaggtggtgaacctgcccatcgtggagcgccccgtgtgcaaggacagcacccgcatccgcatcaccgacaacatgttctgcgccggctacaagcccgacgagggcaagcgcggcgacgcctgcgagggcgacagcggcggccccttcgtgatgaagagccccttcaacaaccgctggtaccagatgggcatcgtgagctggggcgagggctgcgaccgcgacggcaagtacggcttctacacccacgtgttccgcctgaagaagtggatccagaaggtgatcgaccagttcggcgag

SEQ ID NO: 1425 - DNA, 885 bp, synthetic construct
  misc_feature 1..885: note = source = /note="Description of Artificial Sequence: Synthetic coding sequence"
  source 1..885: mol_type = other DNA
atggagacccccgcctggccccgcgtgccccgccccgagaccgccgtggcccgcaccctgctgctgggctgggtgttcgcccaggtggccggcgccagcggcaccaccaacaccgtggccgcctacaacctgacctggaagagcaccaacttcaagaccatcctggagtgggagcccaagcccgtgaaccaggtgtacaccgtgcagatcagcaccaagagcggcgactggaagagcaagtgcttctacaccaccgacaccgagtgcgacctgaccgacgagatcgtgaaggacgtgaagcagacctacctggcccgcgtgttcagctaccccgccggcaacgtggagagcaccggcagcgccggcgagcccctgtacgagaacagccccgagttcaccccctacctggagaccaacctgggccagcccaccatccagagcttcgagcaggtgggcaccaaggtgaacgtgaccgtggaggacgagcgcaccctggtgcgccgcaacaacaccttcctgagcctgcgcgacgtgttcggcaaggacctgatctacaccctgtactactggaagagcagcagcagcggcaagaagaccgccaagaccaacaccaacgagttcctgatcgacgtggacaagggcgagaactactgcttcagcgtgcaggccgtgatccccagccgcaccgtgaaccgcaagagcaccgacagccccgtggagtgcatgggccaggagaagggcgagttccgcgagatcttctacatcatcggcgccgtggtgttcgtggtgatcatcctggtgatcatcctggccatcagcctgcacaagtgccgcaaggccggcgtgggccagagctggaaggagaacagccccctgaacgtgagc

SEQ ID NO: 1426 - DNA, 714 bp, synthetic construct
  misc_feature 1..714: note = source = /note="Description of Artificial Sequence: Synthetic coding sequence"
  source 1..714: mol_type = other DNA
atggagacccccgcctggccccgcgtgccccgccccgagaccgccgtggcccgcaccctgctgctgggctgggtgttcgcccaggtggccggcgccagcggcaccaccaacaccgtggccgcctacaacctgacctggaagagcaccaacttcaagaccatcctggagtgggagcccaagcccgtgaaccaggtgtacaccgtgcagatcagcaccaagagcggcgactggaagagcaagtgcttctacaccaccgacaccgagtgcgacctgaccgacgagatcgtgaaggacgtgaagcagacctacctggcccgcgtgttcagctaccccgccggcaacgtggagagcaccggcagcgccggcgagcccctgtacgagaacagccccgagttcaccccctacctggagaccaacctgggccagcccaccatccagagcttcgagcaggtgggcaccaaggtgaacgtgaccgtggaggacgagcgcaccctggtgcgccgcaacaacaccttcctgagcctgcgcgacgtgttcggcaaggacctgatctacaccctgtactactggaagagcagcagcagcggcaagaagtacagcaccagcctggagctgtggtacctgtggagcagcagcctgagcagcagctggctgtacctgtacaccagcgtggagcgccaggagtggggccgcgccggccgccgcaccccccac

SEQ ID NO: 1427 - DNA, 1383 bp, synthetic construct
  misc_feature 1..1383: note = source = /note="Description of Artificial Sequence: Synthetic coding sequence"
  source 1..1383: mol_type = other DNA
atgcagcgcgtgaacatgatcatggccgagagccccggcctgatcaccatctgcctgctgggctacctgctgagcgccgagtgcaccgtgttcctggaccacgagaacgccaacaagatcctgaaccgccccaagcgctacaacagcggcaagctggaggagttcgtgcagggcaacctggagcgcgagtgcatggaggagaagtgcagcttcgaggaggcccgcgaggtgttcgagaacaccgagcgcaccaccgagttctggaagcagtacgtggacggcgaccagtgcgagagcaacccctgcctgaacggcggcagctgcaaggacgacatcaacagctacgagtgctggtgccccttcggcttcgagggcaagaactgcgagctggacgtgacctgcaacatcaagaacggccgctgcgagcagttctgcaagaacagcgccgacaacaaggtggtgtgcagctgcaccgagggctaccgcctggccgagaaccagaagagctgcgagcccgccgtgcccttcccctgcggccgcgtgagcgtgagccagaccagcaagctgacccgcgccgagaccgtgttccccgacgtggactacgtgaacagcaccgaggccgagaccatcctggacaacatcacccagagcacccagagcttcaacgacttcacccgcgtggtgggcggcgaggacgccaagcccggccagttcccctggcaggtggtgctgaacggcaaggtggacgccttctgcggcggcagcatcgtgaacgagaagtggatcgtgaccgccgcccactgcgtggagaccggcgtgaagatcaccgtggtggccggcgagcacaacatcgaggagaccgagcacaccgagcagaagcgcaacgtgatccgcatcatcccccaccacaactacaacgccgccatcaacaagtacaaccacgacatcgccctgctggagctggacgagcccctggtgctgaacagctacgtgacccccatctgcatcgccgacaaggagtacaccaacatcttcctgaagttcggcagcggctacgtgagcggctggggccgcgtgttccacaagggccgcagcgccctggtgctgcagtacctgcgcgtgcccctggtggaccgcgccacctgcctgcgcagcaccaagttcaccatctacaacaacatgttctgcgccggcttccacgagggcggccgcgacagctgccagggcgacagcggcggcccccacgtgaccgaggtggagggcaccagcttcctgaccggcatcatcagctggggcgaggagtgcgccatgaagggcaagtacggcatctacaccaaggtgagccgctacgtgaactggatcaaggagaagaccaagctgacc

SEQ ID NO: 1428 - DNA, 1269 bp, synthetic construct
  misc_feature 1..1269: note = source = /note="Description of Artificial Sequence: Synthetic coding sequence"
  source 1..1269: mol_type = other DNA
atgcagcgcgtgaacatgatcatggccgagagccccggcctgatcaccatctgcctgctgggctacctgctgagcgccgagtgcaccgtgttcctggaccacgagaacgccaacaagatcctgaaccgccccaagcgctacaacagcggcaagctggaggagttcgtgcagggcaacctggagcgcgagtgcatggaggagaagtgcagcttcgaggaggcccgcgaggtgttcgagaacaccgagcgcaccaccgagttctggaagcagtacgtggacgtgacctgcaacatcaagaacggccgctgcgagcagttctgcaagaacagcgccgacaacaaggtggtgtgcagctgcaccgagggctaccgcctggccgagaaccagaagagctgcgagcccgccgtgcccttcccctgcggccgcgtgagcgtgagccagaccagcaagctgacccgcgccgagaccgtgttccccgacgtggactacgtgaacagcaccgaggccgagaccatcctggacaacatcacccagagcacccagagcttcaacgacttcacccgcgtggtgggcggcgaggacgccaagcccggccagttcccctggcaggtggtgctgaacggcaaggtggacgccttctgcggcggcagcatcgtgaacgagaagtggatcgtgaccgccgcccactgcgtggagaccggcgtgaagatcaccgtggtggccggcgagcacaacatcgaggagaccgagcacaccgagcagaagcgcaacgtgatccgcatcatcccccaccacaactacaacgccgccatcaacaagtacaaccacgacatcgccctgctggagctggacgagcccctggtgctgaacagctacgtgacccccatctgcatcgccgacaaggagtacaccaacatcttcctgaagttcggcagcggctacgtgagcggctggggccgcgtgttccacaagggccgcagcgccctggtgctgcagtacctgcgcgtgcccctggtggaccgcgccacctgcctgcgcagcaccaagttcaccatctacaacaacatgttctgcgccggcttccacgagggcggccgcgacagctgccagggcgacagcggcggcccccacgtgaccgaggtggagggcaccagcttcctgaccggcatcatcagctggggcgaggagtgcgccatgaagggcaagtacggcatctacaccaaggtgagccgctacgtgaactggatcaaggagaagaccaagctgacc

SEQ ID NO: 1429 - DNA, 6687 bp, synthetic construct
  misc_feature 1..6687: note = source = /note="Description of Artificial Sequence: Synthetic coding sequence"
  source 1..6687: mol_type = other DNA
atgttccccggctgcccccgcctgtgggtgctggtggtgctgggcaccagctgggtgggctggggcagccagggcaccgaggccgcccagctgcgccagttctacgtggccgcccagggcatcagctggagctaccgccccgagcccaccaacagcagcctgaacctgagcgtgaccagcttcaagaagatcgtgtaccgcgagtacgagccctacttcaagaaggagaagccccagagcaccatcagcggcctgctgggccccaccctgtacgccgaggtgggcgacatcatcaaggtgcacttcaagaacaaggccgacaagcccctgagcatccacccccagggcatccgctacagcaagctgagcgagggcgccagctacctggaccacaccttccccgccgagaagatggacgacgccgtggcccccggccgcgagtacacctacgagtggagcatcagcgaggacagcggccccacccacgacgaccccccctgcctgacccacatctactacagccacgagaacctgatcgaggacttcaacagcggcctgatcggccccctgctgatctgcaagaagggcaccctgaccgagggcggcacccagaagaccttcgacaagcagatcgtgctgctgttcgccgtgttcgacgagagcaagagctggagccagagcagcagcctgatgtacaccgtgaacggctacgtgaacggcaccatgcccgacatcaccgtgtgcgcccacgaccacatcagctggcacctgctgggcatgagcagcggccccgagctgttcagcatccacttcaacggccaggtgctggagcagaaccaccacaaggtgagcgccatcaccctggtgagcgccaccagcaccaccgccaacatgaccgtgggccccgagggcaagtggatcatcagcagcctgacccccaagcacctgcaggccggcatgcaggcctacatcgacatcaagaactgccccaagaagacccgcaacctgaagaagatcacccgcgagcagcgccgccacatgaagcgctgggagtacttcatcgccgccgaggaggtgatctgggactacgcccccgtgatccccgccaacatggacaagaagtaccgcagccagcacctggacaacttcagcaaccagatcggcaagcactacaagaaggtgatgtacacccagtacgaggacgagagcttcaccaagcacaccgtgaaccccaacatgaaggaggacggcatcctgggccccatcatccgcgcccaggtgcgcgacaccctgaagatcgtgttcaagaacatggccagccgcccctacagcatctacccccacggcgtgaccttcagcccctacgaggacgaggtgaacagcagcttcaccagcggccgcaacaacaccatgatccgcgccgtgcagcccggcgagacctacacctacaagtggaacatcctggagttcgacgagcccaccgagaacgacgcccagtgcctgacccgcccctactacagcgacgtggacatcatgcgcgacatcgccagcggcctgatcggcctgctgctgatctgcaagagccgcagcctggaccgccagggcatccagcgcgccgccgacatcgagcagcaggccgtgttcgccgtgttcgacgagaacaagagctggtacctggaggacaacatcaacaagttctgcgagaaccccgacgaggtgaagcgcgacgaccccaagttctacgagagcaacatcatgagcaacttcaccctgagcgccatcaacggctacgtgcccgagagcatcaccaccctgggcttctgcttcgacgacaccgtgcagtggcacttctgcagcgtgggcacccagaacgagatcctgaccatccacttcaccggccacagcttcatctacggcaagcgccacgaggacaccctgaccctgttccccatgcgcggcgagagcgtgaccgtgaccatggacaacgtgggcacctggatgctgaccagcatgaacagcagcccccgcagcaagaagctgcgcctgaagttccgcgacgtgaagtgcatccccgacgacgacgaggacagctacgagatcttcgagccccccgagagcaccgtgatggccacccgcaagatgcacgaccgcctggagcccgaggacgaggagagcgacgccgactacgactaccagaaccgcctggccgccgccctgggcatccgcagcttccgcaacagcagcctgaaccaggaggaggaggagttcaacctgaccgccctggccctggagaacggcaccgagttcgtgagcagcaacaccgacatcatcgtgggcagcaactacagcagccccagcaacatcagcaagttcaccgtgaacaacctggccgagccccagaaggcccccagccaccagcaggccaccaccgccggcagccccctgcgccacctgatcggcaagaacagcgtgctgaacagcagcaccgccgagcacagcagcccctacagcgaggaccccatcgaggaccccctgcagcccgacgtgaccggcatccgcctgctgagcctgggcgccggcgagttcaagagccaggagcacgccaagcacaagggccccaaggtggagcgcgaccaggccgccaagcaccgcttcagctggatgaagctgctggcccacaaggtgggccgccacctgagccaggacaccggcagccccagcggcatgcgcccctgggaggacctgcccagccaggacaccggcagccccagccgcatgcgcccctggaaggacccccccagcgacctgctgctgctgaagcagagcaacagcagcaagatcctggtgggccgctggcacctggccagcgagaagggcagctacgagatcatccaggacaccgacgaggacaccgccgtgaacaactggctgatcagcccccagaacgccagccgcgcctggggcgagagcacccccctggccaacaagcccggcaagcagagcggccaccccaagttcccccgcgtgcgccacaagagcctgcaggtgcgccaggacggcggcaagagccgcctgaagaagagccagttcctgatcaagacccgcaagaagaagaaggagaagcacacccaccacgcccccctgagcccccgcaccttccaccccctgcgcagcgaggcctacaacaccttcagcgagcgccgcctgaagcacagcctggtgctgcacaagagcaacgagaccagcctgcccaccgacctgaaccagaccctgcccagcatggacttcggctggatcgccagcctgcccgaccacaaccagaacagcagcaacgacaccggccaggccagctgcccccccggcctgtaccagaccgtgccccccgaggagcactaccagaccttccccatccaggaccccgaccagatgcacagcaccagcgaccccagccaccgcagcagcagccccgagctgagcgagatgctggagtacgaccgcagccacaagagcttccccaccgacatcagccagatgagccccagcagcgagcacgaggtgtggcagaccgtgatcagccccgacctgagccaggtgaccctgagccccgagctgagccagaccaacctgagccccgacctgagccacaccaccctgagccccgagctgatccagcgcaacctgagccccgccctgggccagatgcccatcagccccgacctgagccacaccaccctgagccccgacctgagccacaccaccctgagcctggacctgagccagaccaacctgagccccgagctgagccagaccaacctgagccccgccctgggccagatgcccctgagccccgacctgagccacaccaccctgagcctggacttcagccagaccaacctgagccccgagctgagccacatgaccctgagccccgagctgagccagaccaacctgagccccgccctgggccagatgcccatcagccccgacctgagccacaccaccctgagcctggacttcagccagaccaacctgagccccgagctgagccagaccaacctgagccccgccctgggccagatgcccctgagccccgaccccagccacaccaccctgagcctggacctgagccagaccaacctgagccccgagctgagccagaccaacctgagccccgacctgagcgagatgcccctgttcgccgacctgagccagatccccctgacccccgacctggaccagatgaccctgagccccgacctgggcgagaccgacctgagccccaacttcggccagatgagcctgagccccgacctgagccaggtgaccctgagccccgacatcagcgacaccaccctgctgcccgacctgagccagatcagccccccccccgacctggaccagatcttctaccccagcgagagcagccagagcctgctgctgcaggagttcaacgagagcttcccctaccccgacctgggccagatgcccagccccagcagccccaccctgaacgacaccttcctgagcaaggagttcaaccccctggtgatcgtgggcctgagcaaggacggcaccgactacatcgagatcatccccaaggaggaggtgcagagcagcgaggacgactacgccgagatcgactacgtgccctacgacgacccctacaagaccgacgtgcgcaccaacatcaacagcagccgcgaccccgacaacatcgccgcctggtacctgcgcagcaacaacggcaaccgccgcaactactacatcgccgccgaggagatcagctgggactacagcgagttcgtgcagcgcgagaccgacatcgaggacagcgacgacatccccgaggacaccacctacaagaaggtggtgttccgcaagtacctggacagcaccttcaccaagcgcgacccccgcggcgagtacgaggagcacctgggcatcctgggccccatcatccgcgccgaggtggacgacgtgatccaggtgcgcttcaagaacctggccagccgcccctacagcctgcacgcccacggcctgagctacgagaagagcagcgagggcaagacctacgaggacgacagccccgagtggttcaaggaggacaacgccgtgcagcccaacagcagctacacctacgtgtggcacgccaccgagcgcagcggccccgagagccccggcagcgcctgccgcgcctgggcctactacagcgccgtgaaccccgagaaggacatccacagcggcctgatcggccccctgctgatctgccagaagggcatcctgcacaaggacagcaacatgcccatggacatgcgcgagttcgtgctgctgttcatgaccttcgacgagaagaagagctggtactacgagaagaagagccgcagcagctggcgcctgaccagcagcgagatgaagaagagccacgagttccacgccatcaacggcatgatctacagcctgcccggcctgaagatgtacgagcaggagtgggtgcgcctgcacctgctgaacatcggcggcagccaggacatccacgtggtgcacttccacggccagaccctgctggagaacggcaacaagcagcaccagctgggcgtgtggcccctgctgcccggcagcttcaagaccctggagatgaaggccagcaagcccggctggtggctgctgaacaccgaggtgggcgagaaccagcgcgccggcatgcagacccccttcctgatcatggaccgcgactgccgcatgcccatgggcctgagcaccggcatcatcagcgacagccagatcaaggccagcgagttcctgggctactgggagccccgcctggcccgcctgaacaacggcggcagctacaacgcctggagcgtggagaagctggccgccgagttcgccagcaagccctggatccaggtggacatgcagaaggaggtgatcatcaccggcatccagacccagggcgccaagcactacctgaagagctgctacaccaccgagttctacgtggcctacagcagcaaccagatcaactggcagatcttcaagggcaacagcacccgcaacgtgatgtacttcaacggcaacagcgacgccagcaccatcaaggagaaccagttcgacccccccatcgtggcccgctacatccgcatcagccccacccgcgcctacaaccgccccaccctgcgcctggagctgcagggctgcgaggtgaacggctgcagcacccccctgggcatggagaacggcaagatcgagaacaagcagatcaccgccagcagcttcaagaagagctggtggggcgactactgggagcccttccgcgcccgcctgaacgcccagggccgcgtgaacgcctggcaggccaaggccaacaacaacaagcagtggctggagatcgacctgctgaagatcaagaagatcaccgccatcatcacccagggctgcaagagcctgagcagcgagatgtacgtgaagagctacaccatccactacagcgagcagggcgtggagtggaagccctaccgcctgaagagcagcatggtggacaagatcttcgagggcaacaccaacaccaagggccacgtgaagaacttcttcaacccccccatcatcagccgcttcatccgcgtgatccccaagacctggaaccagagcatcgccctgcgcctggagctgttcggctgcgacatctac

SEQ ID NO: 1430 - DNA, 6672 bp, synthetic construct
  misc_feature 1..6672: note = source = /note="Description of Artificial Sequence: Synthetic coding sequence"
  source 1..6672: mol_type = other DNA
atgttccccggctgcccccgcctgtgggtgctggtggtgctgggcaccagctgggtgggctggggcagccagggcaccgaggccgcccagctgcgccagttctacgtggccgcccagggcatcagctggagctaccgccccgagcccaccaacagcagcctgaacctgagcgtgaccagcttcaagaagatcgtgtaccgcgagtacgagccctacttcaagaaggagaagccccagagcaccatcagcggcctgctgggccccaccctgtacgccgaggtgggcgacatcatcaaggtgcacttcaagaacaaggccgacaagcccctgagcatccacccccagggcatccgctacagcaagctgagcgagggcgccagctacctggaccacaccttccccgccgagaagatggacgacgccgtggcccccggccgcgagtacacctacgagtggagcatcagcgaggacagcggccccacccacgacgaccccccctgcctgacccacatctactacagccacgagaacctgatcgaggacttcaacagcggcctgatcggccccctgctgatctgcaagaagggcaccctgaccgagggcggcacccagaagaccttcgacaagcagatcgtgctgctgttcgccgtgttcgacgagagcaagagctggagccagagcagcagcctgatgtacaccgtgaacggctacgtgaacggcaccatgcccgacatcaccgtgtgcgcccacgaccacatcagctggcacctgctgggcatgagcagcggccccgagctgttcagcatccacttcaacggccaggtgctggagcagaaccaccacaaggtgagcgccatcaccctggtgagcgccaccagcaccaccgccaacatgaccgtgggccccgagggcaagtggatcatcagcagcctgacccccaagcacctgcaggccggcatgcaggcctacatcgacatcaagaactgccccaagaagacccgcaacctgaagaagatcacccgcgagcagcgccgccacatgaagcgctgggagtacttcatcgccgccgaggaggtgatctgggactacgcccccgtgatccccgccaacatggacaagaagtaccgcagccagcacctggacaacttcagcaaccagatcggcaagcactacaagaaggtgatgtacacccagtacgaggacgagagcttcaccaagcacaccgtgaaccccaacatgaaggaggacggcatcctgggccccatcatccgcgcccaggtgcgcgacaccctgaagatcgtgttcaagaacatggccagccgcccctacagcatctacccccacggcgtgaccttcagcccctacgaggacgaggtgaacagcagcttcaccagcggccgcaacaacaccatgatccgcgccgtgcagcccggcgagacctacacctacaagtggaacatcctggagttcgacgagcccaccgagaacgacgcccagtgcctgacccgcccctactacagcgacgtggacatcatgcgcgacatcgccagcggcctgatcggcctgctgctgatctgcaagagccgcagcctggaccgccagggcatccagcgcgccgccgacatcgagcagcaggccgtgttcgccgtgttcgacgagaacaagagctggtacctggaggacaacatcaacaagttctgcgagaaccccgacgaggtgaagcgcgacgaccccaagttctacgagagcaacatcatgagcaccatcaacggctacgtgcccgagagcatcaccaccctgggcttctgcttcgacgacaccgtgcagtggcacttctgcagcgtgggcacccagaacgagatcctgaccatccacttcaccggccacagcttcatctacggcaagcgccacgaggacaccctgaccctgttccccatgcgcggcgagagcgtgaccgtgaccatggacaacgtgggcacctggatgctgaccagcatgaacagcagcccccgcagcaagaagctgcgcctgaagttccgcgacgtgaagtgcatccccgacgacgacgaggacagctacgagatcttcgagccccccgagagcaccgtgatggccacccgcaagatgcacgaccgcctggagcccgaggacgaggagagcgacgccgactacgactaccagaaccgcctggccgccgccctgggcatccgcagcttccgcaacagcagcctgaaccaggaggaggaggagttcaacctgaccgccctggccctggagaacggcaccgagttcgtgagcagcaacaccgacatcatcgtgggcagcaactacagcagccccagcaacatcagcaagttcaccgtgaacaacctggccgagccccagaaggcccccagccaccagcaggccaccaccgccggcagccccctgcgccacctgatcggcaagaacagcgtgctgaacagcagcaccgccgagcacagcagcccctacagcgaggaccccatcgaggaccccctgcagcccgacgtgaccggcatccgcctgctgagcctgggcgccggcgagttcaagagccaggagcacgccaagcacaagggccccaaggtggagcgcgaccaggccgccaagcaccgcttcagctggatgaagctgctggcccacaaggtgggccgccacctgagccaggacaccggcagccccagcggcatgcgcccctgggaggacctgcccagccaggacaccggcagccccagccgcatgcgcccctggaaggacccccccagcgacctgctgctgctgaagcagagcaacagcagcaagatcctggtgggccgctggcacctggccagcgagaagggcagctacgagatcatccaggacaccgacgaggacaccgccgtgaacaactggctgatcagcccccagaacgccagccgcgcctggggcgagagcacccccctggccaacaagcccggcaagcagagcggccaccccaagttcccccgcgtgcgccacaagagcctgcaggtgcgccaggacggcggcaagagccgcctgaagaagagccagttcctgatcaagacccgcaagaagaagaaggagaagcacacccaccacgcccccctgagcccccgcaccttccaccccctgcgcagcgaggcctacaacaccttcagcgagcgccgcctgaagcacagcctggtgctgcacaagagcaacgagaccagcctgcccaccgacctgaaccagaccctgcccagcatggacttcggctggatcgccagcctgcccgaccacaaccagaacagcagcaacgacaccggccaggccagctgcccccccggcctgtaccagaccgtgccccccgaggagcactaccagaccttccccatccaggaccccgaccagatgcacagcaccagcgaccccagccaccgcagcagcagccccgagctgagcgagatgctggagtacgaccgcagccacaagagcttccccaccgacatcagccagatgagccccagcagcgagcacgaggtgtggcagaccgtgatcagccccgacctgagccaggtgaccctgagccccgagctgagccagaccaacctgagccccgacctgagccacaccaccctgagccccgagctgatccagcgcaacctgagccccgccctgggccagatgcccatcagccccgacctgagccacaccaccctgagccccgacctgagccacaccaccctgagcctggacctgagccagaccaacctgagccccgagctgagccagaccaacctgagccccgccctgggccagatgcccctgagccccgacctgagccacaccaccctgagcctggacttcagccagaccaacctgagccccgagctgagccacatgaccctgagccccgagctgagccagaccaacctgagccccgccctgggccagatgcccatcagccccgacctgagccacaccaccctgagcctggacttcagccagaccaacctgagccccgagctgagccagaccaacctgagccccgccctgggccagatgcccctgagccccgaccccagccacaccaccctgagcctggacctgagccagaccaacctgagccccgagctgagccagaccaacctgagccccgacctgagcgagatgcccctgttcgccgacctgagccagatccccctgacccccgacctggaccagatgaccctgagccccgacctgggcgagaccgacctgagccccaacttcggccagatgagcctgagccccgacctgagccaggtgaccctgagccccgacatcagcgacaccaccctgctgcccgacctgagccagatcagccccccccccgacctggaccagatcttctaccccagcgagagcagccagagcctgctgctgcaggagttcaacgagagcttcccctaccccgacctgggccagatgcccagccccagcagccccaccctgaacgacaccttcctgagcaaggagttcaaccccctggtgatcgtgggcctgagcaaggacggcaccgactacatcgagatcatccccaaggaggaggtgcagagcagcgaggacgactacgccgagatcgactacgtgccctacgacgacccctacaagaccgacgtgcgcaccaacatcaacagcagccgcgaccccgacaacatcgccgcctggtacctgcgcagcaacaacggcaaccgccgcaactactacatcgccgccgaggagatcagctgggactacagcgagttcgtgcagcgcgagaccgacatcgaggacagcgacgacatccccgaggacaccacctacaagaaggtggtgttccgcaagtacctggacagcaccttcaccaagcgcgacccccgcggcgagtacgaggagcacctgggcatcctgggccccatcatccgcgccgaggtggacgacgtgatccaggtgcgcttcaagaacctggccagccgcccctacagcctgcacgcccacggcctgagctacgagaagagcagcgagggcaagacctacgaggacgacagccccgagtggttcaaggaggacaacgccgtgcagcccaacagcagctacacctacgtgtggcacgccaccgagcgcagcggccccgagagccccggcagcgcctgccgcgcctgggcctactacagcgccgtgaaccccgagaaggacatccacagcggcctgatcggccccctgctgatctgccagaagggcatcctgcacaaggacagcaacatgcccatggacatgcgcgagttcgtgctgctgttcatgaccttcgacgagaagaagagctggtactacgagaagaagagccgcagcagctggcgcctgaccagcagcgagatgaagaagagccacgagttccacgccatcaacggcatgatctacagcctgcccggcctgaagatgtacgagcaggagtgggtgcgcctgcacctgctgaacatcggcggcagccaggacatccacgtggtgcacttccacggccagaccctgctggagaacggcaacaagcagcaccagctgggcgtgtggcccctgctgcccggcagcttcaagaccctggagatgaaggccagcaagcccggctggtggctgctgaacaccgaggtgggcgagaaccagcgcgccggcatgcagacccccttcctgatcatggaccgcgactgccgcatgcccatgggcctgagcaccggcatcatcagcgacagccagatcaaggccagcgagttcctgggctactgggagccccgcctggcccgcctgaacaacggcggcagctacaacgcctggagcgtggagaagctggccgccgagttcgccagcaagccctggatccaggtggacatgcagaaggaggtgatcatcaccggcatccagacccagggcgccaagcactacctgaagagctgctacaccaccgagttctacgtggcctacagcagcaaccagatcaactggcagatcttcaagggcaacagcacccgcaacgtgatgtacttcaacggcaacagcgacgccagcaccatcaaggagaaccagttcgacccccccatcgtggcccgctacatccgcatcagccccacccgcgcctacaaccgccccaccctgcgcctggagctgcagggctgcgaggtgaacggctgcagcacccccctgggcatggagaacggcaagatcgagaacaagcagatcaccgccagcagcttcaagaagagctggtggggcgactactgggagcccttccgcgcccgcctgaacgcccagggccgcgtgaacgcctggcaggccaaggccaacaacaacaagcagtggctggagatcgacctgctgaagatcaagaagatcaccgccatcatcacccagggctgcaagagcctgagcagcgagatgtacgtgaagagctacaccatccactacagcgagcagggcgtggagtggaagccctaccgcctgaagagcagcatggtggacaagatcttcgagggcaacaccaacaccaagggccacgtgaagaacttcttcaacccccccatcatcagccgcttcatccgcgtgatccccaagacctggaaccagagcatcgccctgcgcctggagctgttcggctgcgacatctac

SEQ ID NO: 1431 - DNA, 996 bp, synthetic construct
  misc_feature 1..996: note = source = /note="Description of Artificial Sequence: Synthetic coding sequence"
  source 1..996: mol_type = other DNA
atggacgacgccgtggcccccggccgcgagtacacctacgagtggagcatcagcgaggacagcggccccacccacgacgaccccccctgcctgacccacatctactacagccacgagaacctgatcgaggacttcaacagcggcctgatcggccccctgctgatctgcaagaagggcaccctgaccgagggcggcacccagaagaccttcgacaagcagatcgtgctgctgttcgccgtgttcgacgagagcaagagctggagccagagcagcagcctgatgtacaccgtgaacggctacgtgaacggcaccatgcccgacatcaccgtgtgcgcccacgaccacatcagctggcacctgctgggcatgagcagcggccccgagctgttcagcatccacttcaacggccaggtgctggagcagaaccaccacaaggtgagcgccatcaccctggtgagcgccaccagcaccaccgccaacatgaccgtgggccccgagggcaagtggatcatcagcagcctgacccccaagcacctgcaggccggcatgcaggcctacatcgacatcaagaactgccccaagaagacccgcaacctgaagaagatcacccgcgagcagcgccgccacatgaagcgctgggagtacttcatcgccgccgaggaggtgatctgggactacgcccccgtgatccccgccaacatggacaagaagtaccgcagccagcacctggacaacttcagcaaccagatcggcaagcactacaagaaggtgatgtacacccagtacgaggacgagagcttcaccaagcacaccgtgaaccccaacatgaaggaggacggcatcctgggccccatcatccgcgcccaggtgcgcgacaccctgaagatcgtgttcaagaacatggccagccgcccctacagcatctacccccacggcgtgaccttcagcccctacgaggacgaggtgaacagcagcttcaccagcggcaccaccccc

SEQ ID NO: 1432 - DNA, 1332 bp, synthetic construct
  misc_feature 1..1332: note = source = /note="Description of Artificial Sequence: Synthetic coding sequence"
  source 1..1332: mol_type = other DNA
atggtgagccaggccctgcgcctgctgtgcctgctgctgggcctgcagggctgcctggccgccgtgttcgtgacccaggaggaggcccacggcgtgctgcaccgccgccgccgcgccaacgccttcctggaggagctgcgccccggcagcctggagcgcgagtgcaaggaggagcagtgcagcttcgaggaggcccgcgagatcttcaaggacgccgagcgcaccaagctgttctggatcagctacagcgacggcgaccagtgcgccagcagcccctgccagaacggcggcagctgcaaggaccagctgcagagctacatctgcttctgcctgcccgccttcgagggccgcaactgcgagacccacaaggacgaccagctgatctgcgtgaacgagaacggcggctgcgagcagtactgcagcgaccacaccggcaccaagcgcagctgccgctgccacgagggctacagcctgctggccgacggcgtgagctgcacccccaccgtggagtacccctgcggcaagatccccatcctggagaagcgcaacgccagcaagccccagggccgcatcgtgggcggcaaggtgtgccccaagggcgagtgcccctggcaggtgctgctgctggtgaacggcgcccagctgtgcggcggcaccctgatcaacaccatctgggtggtgagcgccgcccactgcttcgacaagatcaagaactggcgcaacctgatcgccgtgctgggcgagcacgacctgagcgagcacgacggcgacgagcagagccgccgcgtggcccaggtgatcatccccagcacctacgtgcccggcaccaccaaccacgacatcgccctgctgcgcctgcaccagcccgtggtgctgaccgaccacgtggtgcccctgtgcctgcccgagcgcaccttcagcgagcgcaccctggccttcgtgcgcttcagcctggtgagcggctggggccagctgctggaccgcggcgccaccgccctggagctgatggtgctgaacgtgccccgcctgatgacccaggactgcctgcagcagagccgcaaggtgggcgacagccccaacatcaccgagtacatgttctgcgccggctacagcgacggcagcaaggacagctgcaagggcgacagcggcggcccccacgccacccactaccgcggcacctggtacctgaccggcatcgtgagctggggccagggctgcgccaccgtgggccacttcggcgtgtacacccgcgtgagccagtacatcgagtggctgcagaagctgatgcgcagcgagccccgccccggcgtgctgctgcgcgcccccttcccc

SEQ ID NO: 1433 - DNA, 1398 bp, synthetic construct
  misc_feature 1..1398: note = source = /note="Description of Artificial Sequence: Synthetic coding sequence"
  source 1..1398: mol_type = other DNA
atggtgagccaggccctgcgcctgctgtgcctgctgctgggcctgcagggctgcctggccgccggcggcgtggccaaggccagcggcggcgagacccgcgacatgccctggaagcccggcccccaccgcgtgttcgtgacccaggaggaggcccacggcgtgctgcaccgccgccgccgcgccaacgccttcctggaggagctgcgccccggcagcctggagcgcgagtgcaaggaggagcagtgcagcttcgaggaggcccgcgagatcttcaaggacgccgagcgcaccaagctgttctggatcagctacagcgacggcgaccagtgcgccagcagcccctgccagaacggcggcagctgcaaggaccagctgcagagctacatctgcttctgcctgcccgccttcgagggccgcaactgcgagacccacaaggacgaccagctgatctgcgtgaacgagaacggcggctgcgagcagtactgcagcgaccacaccggcaccaagcgcagctgccgctgccacgagggctacagcctgctggccgacggcgtgagctgcacccccaccgtggagtacccctgcggcaagatccccatcctggagaagcgcaacgccagcaagccccagggccgcatcgtgggcggcaaggtgtgccccaagggcgagtgcccctggcaggtgctgctgctggtgaacggcgcccagctgtgcggcggcaccctgatcaacaccatctgggtggtgagcgccgcccactgcttcgacaagatcaagaactggcgcaacctgatcgccgtgctgggcgagcacgacctgagcgagcacgacggcgacgagcagagccgccgcgtggcccaggtgatcatccccagcacctacgtgcccggcaccaccaaccacgacatcgccctgctgcgcctgcaccagcccgtggtgctgaccgaccacgtggtgcccctgtgcctgcccgagcgcaccttcagcgagcgcaccctggccttcgtgcgcttcagcctggtgagcggctggggccagctgctggaccgcggcgccaccgccctggagctgatggtgctgaacgtgccccgcctgatgacccaggactgcctgcagcagagccgcaaggtgggcgacagccccaacatcaccgagtacatgttctgcgccggctacagcgacggcagcaaggacagctgcaagggcgacagcggcggcccccacgccacccactaccgcggcacctggtacctgaccggcatcgtgagctggggccagggctgcgccaccgtgggccacttcggcgtgtacacccgcgtgagccagtacatcgagtggctgcagaagctgatgcgcagcgagccccgccccggcgtgctgctgcgcgcccccttcccc

SEQ ID NO: 1434 - DNA, 1191 bp, synthetic construct
  misc_feature 1..1191: note = source = /note="Description of Artificial Sequence: Synthetic coding sequence"
  source 1..1191: mol_type = other DNA
atgggcaacgtgaaccgccagggccagcactgccgcgacttcatcatggtgagccaggccctgcgcctgctgtgcctgctgctgggcctgcagggctgcctggccgccgacggcgaccagtgcgccagcagcccctgccagaacggcggcagctgcaaggaccagctgcagagctacatctgcttctgcctgcccgccttcgagggccgcaactgcgagacccacaaggacgaccagctgatctgcgtgaacgagaacggcggctgcgagcagtactgcagcgaccacaccggcaccaagcgcagctgccgctgccacgagggctacagcctgctggccgacggcgtgagctgcacccccaccgtggagtacccctgcggcaagatccccatcctggagaagcgcaacgccagcaagccccagggccgcatcgtgggcggcaaggtgtgccccaagggcgagtgcccctggcaggtgctgctgctggtgaacggcgcccagctgtgcggcggcaccctgatcaacaccatctgggtggtgagcgccgcccactgcttcgacaagatcaagaactggcgcaacctgatcgccgtgctgggcgagcacgacctgagcgagcacgacggcgacgagcagagccgccgcgtggcccaggtgatcatccccagcacctacgtgcccggcaccaccaaccacgacatcgccctgctgcgcctgcaccagcccgtggtgctgaccgaccacgtggtgcccctgtgcctgcccgagcgcaccttcagcgagcgcaccctggccttcgtgcgcttcagcctggtgagcggctggggccagctgctggaccgcggcgccaccgccctggagctgatggtgctgaacgtgccccgcctgatgacccaggactgcctgcagcagagccgcaaggtgggcgacagccccaacatcaccgagtacatgttctgcgccggctacagcgacggcagcaaggacagctgcaagggcgacagcggcggcccccacgccacccactaccgcggcacctggtacctgaccggcatcgtgagctggggccagggctgcgccaccgtgggccacttcggcgtgtacacccgcgtgagccagtacatcgagtggctgcagaagctgatgcgcagcgagccccgccccggcgtgctgctgcgcgcccccttcccc

SEQ ID NO: 1435 - DNA, 7053 bp, synthetic construct
  misc_feature 1..7053: note = source = /note="Description of Artificial Sequence: Synthetic coding sequence"
  source 1..7053: mol_type = other DNA
atgcagatcgagctgagcacctgcttcttcctgtgcctgctgcgcttctgcttcagcgccacccgccgctactacctgggcgccgtggagctgagctgggactacatgcagagcgacctgggcgagctgcccgtggacgcccgcttccccccccgcgtgcccaagagcttccccttcaacaccagcgtggtgtacaagaagaccctgttcgtggagttcaccgaccacctgttcaacatcgccaagccccgccccccctggatgggcctgctgggccccaccatccaggccgaggtgtacgacaccgtggtgatcaccctgaagaacatggccagccaccccgtgagcctgcacgccgtgggcgtgagctactggaaggccagcgagggcgccgagtacgacgaccagaccagccagcgcgagaaggaggacgacaaggtgttccccggcggcagccacacctacgtgtggcaggtgctgaaggagaacggccccatggccagcgaccccctgtgcctgacctacagctacctgagccacgtggacctggtgaaggacctgaacagcggcctgatcggcgccctgctggtgtgccgcgagggcagcctggccaaggagaagacccagaccctgcacaagttcatcctgctgttcgccgtgttcgacgagggcaagagctggcacagcgagaccaagaacagcctgatgcaggaccgcgacgccgccagcgcccgcgcctggcccaagatgcacaccgtgaacggctacgtgaaccgcagcctgcccggcctgatcggctgccaccgcaagagcgtgtactggcacgtgatcggcatgggcaccacccccgaggtgcacagcatcttcctggagggccacaccttcctggtgcgcaaccaccgccaggccagcctggagatcagccccatcaccttcctgaccgcccagaccctgctgatggacctgggccagttcctgctgttctgccacatcagcagccaccagcacgacggcatggaggcctacgtgaaggtggacagctgccccgaggagccccagctgcgcatgaagaacaacgaggaggccgaggactacgacgacgacctgaccgacagcgagatggacgtggtgcgcttcgacgacgacaacagccccagcttcatccagatccgcagcgtggccaagaagcaccccaagacctgggtgcactacatcgccgccgaggaggaggactgggactacgcccccctggtgctggcccccgacgaccgcagctacaagagccagtacctgaacaacggcccccagcgcatcggccgcaagtacaagaaggtgcgcttcatggcctacaccgacgagaccttcaagacccgcgaggccatccagcacgagagcggcatcctgggccccctgctgtacggcgaggtgggcgacaccctgctgatcatcttcaagaaccaggccagccgcccctacaacatctacccccacggcatcaccgacgtgcgccccctgtacagccgccgcctgcccaagggcgtgaagcacctgaaggacttccccatcctgcccggcgagatcttcaagtacaagtggaccgtgaccgtggaggacggccccaccaagagcgacccccgctgcctgacccgctactacagcagcttcgtgaacatggagcgcgacctggccagcggcctgatcggccccctgctgatctgctacaaggagagcgtggaccagcgcggcaaccagatcatgagcgacaagcgcaacgtgatcctgttcagcgtgttcgacgagaaccgcagctggtacctgaccgagaacatccagcgcttcctgcccaaccccgccggcgtgcagctggaggaccccgagttccaggccagcaacatcatgcacagcatcaacggctacgtgttcgacagcctgcagctgagcgtgtgcctgcacgaggtggcctactggtacatcctgagcatcggcgcccagaccgacttcctgagcgtgttcttcagcggctacaccttcaagcacaagatggtgtacgaggacaccctgaccctgttccccttcagcggcgagaccgtgttcatgagcatggagaaccccggcctgtggatcctgggctgccacaacagcgacttccgcaaccgcggcatgaccgccctgctgaaggtgagcagctgcgacaagaacaccggcgactactacgaggacagctacgaggacatcagcgcctacctgctgagcaagaacaacgccatcgagccccgcagcttcagccagaacagccgccaccccagcacccgccagaagcagttcaacgccaccaccatccccgagaacgacatcgagaagaccgacccctggttcgcccaccgcacccccatgcccaagatccagaacgtgagcagcagcgacctgctgatgctgctgcgccagagccccaccccccacggcctgagcctgagcgacctgcaggaggccaagtacgagaccttcagcgacgaccccagccccggcgccatcgacagcaacaacagcctgagcgagatgacccacttccgcccccagctgcaccacagcggcgacatggtgttcacccccgagagcggcctgcagctgcgcctgaacgagaagctgggcaccaccgccgccaccgagctgaagaagctggacttcaaggtgagcagcaccagcaacaacctgatcagcaccatccccagcgacaacctggccgccggcaccgacaacaccagcagcctgggcccccccagcatgcccgtgcactacgacagccagctggacaccaccctgttcggcaagaagagcagccccctgaccgagagcggcggccccctgagcctgagcgaggagaacaacgacagcaagctgctggagagcggcctgatgaacagccaggagagcagctggggcaagaacgtgagcagcaccgagagcggccgcctgttcaagggcaagcgcgcccacggccccgccctgctgaccaaggacaacgccctgttcaaggtgagcatcagcctgctgaagaccaacaagaccagcaacaacagcgccaccaaccgcaagacccacatcgacggccccagcctgctgatcgagaacagccccagcgtgtggcagaacatcctggagagcgacaccgagttcaagaaggtgacccccctgatccacgaccgcatgctgatggacaagaacgccaccgccctgcgcctgaaccacatgagcaacaagaccaccagcagcaagaacatggagatggtgcagcagaagaaggagggccccatcccccccgacgcccagaaccccgacatgagcttcttcaagatgctgttcctgcccgagagcgcccgctggatccagcgcacccacggcaagaacagcctgaacagcggccagggccccagccccaagcagctggtgagcctgggccccgagaagagcgtggagggccagaacttcctgagcgagaagaacaaggtggtggtgggcaagggcgagttcaccaaggacgtgggcctgaaggagatggtgttccccagcagccgcaacctgttcctgaccaacctggacaacctgcacgagaacaacacccacaaccaggagaagaagatccaggaggagatcgagaagaaggagaccctgatccaggagaacgtggtgctgccccagatccacaccgtgaccggcaccaagaacttcatgaagaacctgttcctgctgagcacccgccagaacgtggagggcagctacgacggcgcctacgcccccgtgctgcaggacttccgcagcctgaacgacagcaccaaccgcaccaagaagcacaccgcccacttcagcaagaagggcgaggaggagaacctggagggcctgggcaaccagaccaagcagatcgtggagaagtacgcctgcaccacccgcatcagccccaacaccagccagcagaacttcgtgacccagcgcagcaagcgcgccctgaagcagttccgcctgcccctggaggagaccgagctggagaagcgcatcatcgtggacgacaccagcacccagtggagcaagaacatgaagcacctgacccccagcaccctgacccagatcgactacaacgagaaggagaagggcgccatcacccagagccccctgagcgactgcctgacccgcagccacagcatcccccaggccaaccgcagccccctgcccatcgccaaggtgagcagcttccccagcatccgccccatctacctgacccgcgtgctgttccaggacaacagcagccacctgcccgccgccagctaccgcaagaaggacagcggcgtgcaggagagcagccacttcctgcagggcgccaagaagaacaacctgagcctggccatcctgaccctggagatgaccggcgaccagcgcgaggtgggcagcctgggcaccagcgccaccaacagcgtgacctacaagaaggtggagaacaccgtgctgcccaagcccgacctgcccaagaccagcggcaaggtggagctgctgcccaaggtgcacatctaccagaaggacctgttccccaccgagaccagcaacggcagccccggccacctggacctggtggagggcagcctgctgcagggcaccgagggcgccatcaagtggaacgaggccaaccgccccggcaaggtgcccttcctgcgcgtggccaccgagagcagcgccaagacccccagcaagctgctggaccccctggcctgggacaaccactacggcacccagatccccaaggaggagtggaagagccaggagaagagccccgagaagaccgccttcaagaagaaggacaccatcctgagcctgaacgcctgcgagagcaaccacgccatcgccgccatcaacgagggccagaacaagcccgagatcgaggtgacctgggccaagcagggccgcaccgagcgcctgtgcagccagaacccccccgtgctgaagcgccaccagcgcgagatcacccgcaccaccctgcagagcgaccaggaggagatcgactacgacgacaccatcagcgtggagatgaagaaggaggacttcgacatctacgacgaggacgagaaccagagcccccgcagcttccagaagaagacccgccactacttcatcgccgccgtggagcgcctgtgggactacggcatgagcagcagcccccacgtgctgcgcaaccgcgcccagagcggcagcgtgccccagttcaagaaggtggtgttccaggagttcaccgacggcagcttcacccagcccctgtaccgcggcgagctgaacgagcacctgggcctgctgggcccctacatccgcgccgaggtggaggacaacatcatggtgaccttccgcaaccaggccagccgcccctacagcttctacagcagcctgatcagctacgaggaggaccagcgccagggcgccgagccccgcaagaacttcgtgaagcccaacgagaccaagacctacttctggaaggtgcagcaccacatggcccccaccaaggacgagttcgactgcaaggcctgggcctacttcagcgacgtggacctggagaaggacgtgcacagcggcctgatcggccccctgctggtgtgccacaccaacaccctgaaccccgcccacggccgccaggtgaccgtgcaggagttcgccctgttcttcaccatcttcgacgagaccaagagctggtacttcaccgagaacatggagcgcaactgccgcgccccctgcaacatccagatggaggaccccaccttcaaggagaactaccgcttccacgccatcaacggctacatcatggacaccctgcccggcctggtgatggcccaggaccagcgcatccgctggtacctgctgagcatgggcagcaacgagaacatccacagcatccacttcagcggccacgtgttcaccgtgcgcaagaaggaggagtacaagatggccctgtacaacctgtaccccggcgtgttcgagaccgtggagatgctgcccagcaaggccggcatctggcgcgtggagtgcctgatcggcgagcacctgcacgccggcatgagcaccctgttcctggtgtacagcaacaagtgccagacccccctgggcatggccagcggccacatccgcgacttccagatcaccgccagcggccagtacggccagtgggcccccaagctggcccgcctgcactacagcggcagcatcaacgcctggagcaccaaggagcccttcagctggatcaaggtggacctgctggcccccatgatcatccacggcatcaagacccagggcgcccgccagaagttcagcagcctgtacatcagccagttcatcatcatgtacagcctggacggcaagaagtggcagacctaccgcggcaacagcaccggcaccctgatggtgttcttcggcaacgtggacagcagcggcatcaagcacaacatcttcaacccccccatcatcgcccgctacatccgcctgcaccccacccactacagcatccgcagcaccctgcgcatggagctgatgggctgcgacctgaacagctgcagcatgcccctgggcatggagagcaaggccatcagcgacgcccagatcaccgccagcagctacttcaccaacatgttcgccacctggagccccagcaaggcccgcctgcacctgcagggccgcagcaacgcctggcgcccccaggtgaacaaccccaaggagtggctgcaggtggacttccagaagaccatgaaggtgaccggcgtgaccacccagggcgtgaagagcctgctgaccagcatgtacgtgaaggagttcctgatcagcagcagccaggacggccaccagtggaccctgttcttccagaacggcaaggtgaaggtgttccagggcaaccaggacagcttcacccccgtggtgaacagcctggacccccccctgctgacccgctacctgcgcatccacccccagagctgggtgcaccagatcgccctgcgcatggaggtgctgggctgcgaggcccaggacctgtac

SEQ ID NO: 1436 - DNA, 996 bp, synthetic construct
  misc_feature 1..996: note = source = /note="Description of Artificial Sequence: Synthetic coding sequence"
  source 1..996: mol_type = other DNA
atgggccgccccctgcacctggtgctgctgagcgccagcctggccggcctgctgctgctgggcgagagcctgttcatccgccgcgagcaggccaacaacatcctggcccgcgtgacccgcgccaacagcttcctggaggagatgaagaagggccacctggagcgcgagtgcatggaggagacctgcagctacgaggaggcccgcgaggtgttcgaggacagcgacaagaccaacgagttctggaacaagtacaaggacggcgaccagtgcgagaccagcccctgccagaaccagggcaagtgcaaggacggcctgggcgagtacacctgcacctgcctggagggcttcgagggcaagaactgcgagctgttcacccgcaagctgtgcagcctggacaacggcgactgcgaccagttctgccacgaggagcagaacagcgtggtgtgcagctgcgcccgcggctacaccctggccgacaacggcaaggcctgcatccccaccggcccctacccctgcggcaagcagaccctggagcgccgcaagcgcagcgtggcccaggccaccagcagcagcggcgaggcccccgacagcatcacctggaagccctacgacgccgccgacctggaccccaccgagaaccccttcgacctgctggacttcaaccagacccagcccgagcgcggcgacaacaacctgacccgcatcgtgggcggccaggagtgcaaggacggcgagtgcccctggcaggccctgctgatcaacgaggagaacgagggcttctgcggcggcaccatcctgagcgagttctacatcctgaccgccgcccactgcctgtaccaggccaagcgcttcaagggcaccggcacccgcagccgccgccgcgccgtgcgccgctgcacccgctggcgctggagcagcagcaccaccggcagccagcgccgccccatgaccagcaccagcccctgcagcggcagccgcccccccagccccagcgcc

SEQ ID NO: 1437 - DNA, 1464 bp, synthetic construct
  misc_feature 1..1464: note = source = /note="Description of Artificial Sequence: Synthetic coding sequence"
  source 1..1464: mol_type = other DNA
atgggccgccccctgcacctggtgctgctgagcgccagcctggccggcctgctgctgctgggcgagagcctgttcatccgccgcgagcaggccaacaacatcctggcccgcgtgacccgcgccaacagcttcctggaggagatgaagaagggccacctggagcgcgagtgcatggaggagacctgcagctacgaggaggcccgcgaggtgttcgaggacagcgacaagaccaacgagttctggaacaagtacaaggacggcgaccagtgcgagaccagcccctgccagaaccagggcaagtgcaaggacggcctgggcgagtacacctgcacctgcctggagggcttcgagggcaagaactgcgagctgttcacccgcaagctgtgcagcctggacaacggcgactgcgaccagttctgccacgaggagcagaacagcgtggtgtgcagctgcgcccgcggctacaccctggccgacaacggcaaggcctgcatccccaccggcccctacccctgcggcaagcagaccctggagcgccgcaagcgcagcgtggcccaggccaccagcagcagcggcgaggcccccgacagcatcacctggaagccctacgacgccgccgacctggaccccaccgagaaccccttcgacctgctggacttcaaccagacccagcccgagcgcggcgacaacaacctgacccgcatcgtgggcggccaggagtgcaaggacggcgagtgcccctggcaggccctgctgatcaacgaggagaacgagggcttctgcggcggcaccatcctgagcgagttctacatcctgaccgccgcccactgcctgtaccaggccaagcgcttcaaggtgcgcgtgggcgaccgcaacaccgagcaggaggagggcggcgaggccgtgcacgaggtggaggtggtgatcaagcacaaccgcttcaccaaggagacctacgacttcgacatcgccgtgctgcgcctgaagacccccatcaccttccgcatgaacgtggcccccgcctgcctgcccgagcgcgactgggccgagagcaccctgatgacccagaagaccggcatcgtgagcggcttcggccgcacccacgagaagggccgccagagcacccgcctgaagatgctggaggtgccctacgtggaccgcaacagctgcaagctgagcagcagcttcatcatcacccagaacatgttctgcgccggctacgacaccaagcaggaggacgcctgccagggcgacagcggcggcccccacgtgacccgcttcaaggacacctacttcgtgaccggcatcgtgagctggggcgagggctgcgcccgcaagggcaagtacggcatctacaccaaggtgaccgccttcctgaagtggatcgaccgcagcatgaagacccgcggcctgcccaaggccaagagccacgcccccgaggtgatcaccagcagccccctgaag

SEQ ID NO: 1438 - DNA, 1002 bp, synthetic construct
  misc_feature 1..1002: note = source = /note="Description of Artificial Sequence: Synthetic coding sequence"
  source 1..1002: mol_type = other DNA
atgggccgccccctgcacctggtgctgctgagcgccagcctggccggcctgctgctgctgggcgagagcctgttcatccgccgcgagcaggccaacaacatcctggcccgcgtgacccgcgccaacagcttcctggaggagatgaagaagggccacctggagcgcgagtgcatggaggagacctgcagctacgaggaggcccgcgaggtgttcgaggacagcgacaagaccaacgagttctggaacaagtacaaggacggcgaccagtgcgagaccagcccctgccagaaccagggcaagtgcaaggacggcctgggcgagtacacctgcacctgcctggagggcttcgagggcaagaactgcgagctgttcacccgcaagctgtgcagcctggacaacggcgactgcgaccagttctgccacgaggagcagaacagcgtggtgtgcagctgcgcccgcggctacaccctggccgacaacggcaaggcctgcatccccaccggcccctacccctgcggcaagcagaccctggagcgccgcaagcgcagcgtggcccaggccaccagcagcagcggcgaggcccccgacagcatcacctggaagccctacgacgccgccgacctggaccccaccgagaaccccttcgacctgctggacttcaaccagacccagcccgagcgcggcgacaacaacctgacccgcatcgtgggcggccaggagtgcaaggacggcgagtgcccctggcaggccctgctgatcaacgaggagaacgagggcttctgcggcggcaccatcctgagcgagttctacatcctgaccgccgcccactgcctgtaccaggccaagcgcttcaaggtgcgcggcaccggcacccgcagccgccgccgcgccgtgcgccgctgcacccgctggcgctggagcagcagcaccaccggcagccagcgccgccccatgaccagcaccagcccctgcagcggcagccgcccccccagccccagcgcc

SEQ ID NO: 1439 - DNA, 1719 bp, synthetic construct
  misc_feature 1..1719: note = source = /note="Description of Artificial Sequence: Synthetic coding sequence"
  source 1..1719: mol_type = other DNA
atgatcttcctgtaccaggtggtgcacttcatcctgttcaccagcgtgagcggcgagtgcgtgacccagctgctgaaggacacctgcttcgagggcggcgacatcaccaccgtgttcacccccagcgccaagtactgccaggtggtgtgcacctaccacccccgctgcctgctgttcaccttcaccgccgagagccccagcgaggaccccacccgctggttcacctgcgtgctgaaggacagcgtgaccgagaccctgccccgcgtgaaccgcaccgccgccatcagcggctacagcttcaagcagtgcagccaccagatcagcgtgaacaacatctgcctgctgaagcacacccagaccggcacccccacccgcatcaccaagctggacaaggtggtgagcggcttcagcctgaagagctgcgccctgagcaacctggcctgcatccgcgacatcttccccaacaccgtgttcgccgacagcaacatcgacagcgtgatggcccccgacgccttcgtgtgcggccgcatctgcacccaccaccccggctgcctgttcttcaccttcttcagccaggagtggcccaaggagagccagcgcaacctgtgcctgctgaagaccagcgagagcggcctgcccagcacccgcatcaagaagagcaaggccctgagcggcttcagcctgcagagctgccgccacagcatccccgtgttctgccacagcagcttctaccacgacaccgacttcctgggcgaggagctggacatcgtggccgccaagagccacgaggcctgccagaagctgtgcaccaacgccgtgcgctgccagttcttcacctacacccccgcccaggccagctgcaacgagggcaagggcaagtgctacctgaagctgagcagcaacggcagccccaccaagatcctgcacggccgcggcggcatcagcggctacaccctgcgcctgtgcaagatggacaacgagtgcaccaccaagatcaagccccgcatcgtgggcggcaccgccagcgtgcgcggcgagtggccctggcaggtgaccctgcacaccaccagccccacccagcgccacctgtgcggcggcagcatcatcggcaaccagtggatcctgaccgccgcccactgcttctacggcgtggagagccccaagatcctgcgcgtgtacagcggcatcctgaaccagagcgagatcaaggaggacaccagcttcttcggcgtgcaggagatcatcatccacgaccagtacaagatggccgagagcggctacgacatcgccctgctgaagctggagaccaccgtgaactacaccgacagccagcgccccatctgcctgcccagcaagggcgaccgcaacgtgatctacaccgactgctgggtgaccggctggggctaccgcaagctgcgcgacaagatccagaacaccctgcagaaggccaagatccccctggtgaccaacgaggagtgccagaagcgctaccgcggccacaagatcacccacaagatgatctgcgccggctaccgcgagggcggcaaggacgcctgcaagggcgacagcggcggccccctgagctgcaagcacaacgaggtgtggcacctggtgggcatcaccagctggggcgagggctgcgcccagcgcgagcgccccggcgtgtacaccaacgtggtggagtacgtggactggatcctggagaagacccaggccgtg

SEQ ID NO: 1440 - DNA, 1875 bp, synthetic construct
  misc_feature 1..1875: note = source = /note="Description of Artificial Sequence: Synthetic coding sequence"
  source 1..1875: mol_type = other DNA
atgatcttcctgtaccaggtggtgcacttcatcctgttcaccagcgtgagcggcgagtgcgtgacccagctgctgaaggacacctgcttcgagggcggcgacatcaccaccgtgttcacccccagcgccaagtactgccaggtggtgtgcacctaccacccccgctgcctgctgttcaccttcaccgccgagagccccagcgaggaccccacccgctggttcacctgcgtgctgaaggacagcgtgaccgagaccctgccccgcgtgaaccgcaccgccgccatcagcggctacagcttcaagcagtgcagccaccagatcagcgcctgcaacaaggacatctacgtggacctggacatgaagggcatcaactacaacagcagcgtggccaagagcgcccaggagtgccaggagcgctgcaccgacgacgtgcactgccacttcttcacctacgccacccgccagttccccagcctggagcaccgcaacatctgcctgctgaagcacacccagaccggcacccccacccgcatcaccaagctggacaaggtggtgagcggcttcagcctgaagagctgcgccctgagcaacctggcctgcatccgcgacatcttccccaacaccgtgttcgccgacagcaacatcgacagcgtgatggcccccgacgccttcgtgtgcggccgcatctgcacccaccaccccggctgcctgttcttcaccttcttcagccaggagtggcccaaggagagccagcgcaacctgtgcctgctgaagaccagcgagagcggcctgcccagcacccgcatcaagaagagcaaggccctgagcggcttcagcctgcagagctgccgccacagcatccccgtgttctgccacagcagcttctaccacgacaccgacttcctgggcgaggagctggacatcgtggccgccaagagccacgaggcctgccagaagctgtgcaccaacgccgtgcgctgccagttcttcacctacacccccgcccaggccagctgcaacgagggcaagggcaagtgctacctgaagctgagcagcaacggcagccccaccaagatcctgcacggccgcggcggcatcagcggctacaccctgcgcctgtgcaagatggacaacgagtgcaccaccaagatcaagccccgcatcgtgggcggcaccgccagcgtgcgcggcgagtggccctggcaggtgaccctgcacaccaccagccccacccagcgccacctgtgcggcggcagcatcatcggcaaccagtggatcctgaccgccgcccactgcttctacggcgtggagagccccaagatcctgcgcgtgtacagcggcatcctgaaccagagcgagatcaaggaggacaccagcttcttcggcgtgcaggagatcatcatccacgaccagtacaagatggccgagagcggctacgacatcgccctgctgaagctggagaccaccgtgaactacaccgacagccagcgccccatctgcctgcccagcaagggcgaccgcaacgtgatctacaccgactgctgggtgaccggctggggctaccgcaagctgcgcgacaagatccagaacaccctgcagaaggccaagatccccctggtgaccaacgaggagtgccagaagcgctaccgcggccacaagatcacccacaagatgatctgcgccggctaccgcgagggcggcaaggacgcctgcaagggcgacagcggcggccccctgagctgcaagcacaacgaggtgtggcacctggtgggcatcaccagctggggcgagggctgcgcccagcgcgagcgccccggcgtgtacaccaacgtggtggagtacgtggactggatcctggagaagacccaggccgtg

SEQ ID NO: 1441 - DNA, 627 bp, synthetic construct
  misc_feature 1..627: note = source = /note="Description of Artificial Sequence: Synthetic coding sequence"
  source 1..627: mol_type = other DNA
agcggcttcagcctgaagagctgcgccctgagcaacctggcctgcatccgcgacatcttccccaacaccgtgttcgccgacagcaacatcgacagcgtgatggcccccgacgccttcgtgtgcggccgcatctgcacccaccaccccggctgcctgttcttcaccttcttcagccaggagtggcccaaggagagccagcgcaacctgtgcctgctgaagaccagcgagagcggcctgcccagcacccgcatcaagaagagcaaggccctgagcggcttcagcctgcagagctgccgccacagcatccccgtgttctgccacagcagcttctaccacgacaccgacttcctgggcgaggagctggacatcgtggccgccaagagccacgaggcctgccagaagctgtgcaccaacgccgtgcgctgccagttcttcacctacacccccgcccaggccagctgcaacgagggcaagggcaagtgctacctgaagctgagcagcaacggcagccccaccaagatcctgcacggccgcggcggcatcagcggctacaccctgcgcctgtgcaagatggacaacgagctgcgcggcgcccccatgaagatcagcggctggctgaagaccagc

SEQ ID NO: 1442 - DNA, 2196 bp, synthetic construct
  misc_feature 1..2196: note = source = /note="Description of Artificial Sequence: Synthetic coding sequence"
  source 1..2196: mol_type = other DNA
atgagcgagaccagccgcaccgccttcggcggccgccgcgccgtgccccccaacaacagcaacgccgccgaggacgacctgcccaccgtggagctgcagggcgtggtgccccgcggcgtgaacctgcaggagttcctgaacgtgaccagcgtgcacctgttcaaggagcgctgggacaccaacaaggtggaccaccacaccgacaagtacgagaacaacaagctgatcgtgcgccgcggccagagcttctacgtgcagatcgacttcagccgcccctacgacccccgccgcgacctgttccgcgtggagtacgtgatcggccgctacccccaggagaacaagggcacctacatccccgtgcccatcgtgagcgagctgcagagcggcaagtggggcgccaagatcgtgatgcgcgaggaccgcagcgtgcgcctgagcatccagagcagccccaagtgcatcgtgggcaagttccgcatgtacgtggccgtgtggaccccctacggcgtgctgcgcaccagccgcaaccccgagaccgacacctacatcctgttcaacccctggtgcgaggacgacgccgtgtacctggacaacgagaaggagcgcgaggagtacgtgctgaacgacatcggcgtgatcttctacggcgaggtgaacgacatcaagacccgcagctggagctacggccagttcgaggacggcatcctggacacctgcctgtacgtgatggaccgcgcccagatggacctgagcggccgcggcaaccccatcaaggtgagccgcgtgggcagcgccatggtgaacgccaaggacgacgagggcgtgctggtgggcagctgggacaacatctacgcctacggcgtgccccccagcgcctggaccggcagcgtggacatcctgctggagtaccgcagcagcgagaaccccgtgcgctacggccagtgctgggtgttcgccggcgtgttcaacaccttcctgcgctgcctgggcatccccgcccgcatcgtgaccaactacttcagcgcccacgacaacgacgccaacctgcagatggacatcttcctggaggaggacggcaacgtgaacagcaagctgaccaaggacagcgtgtggaactaccactgctggaacgaggcctggatgacccgccccgacctgcccgtgggcttcggcggctggcaggccgtggacagcaccccccaggagaacagcgacggcatgtaccgctgcggccccgccagcgtgcaggccatcaagcacggccacgtgtgcttccagttcgacgcccccttcgtgttcgccgaggtgaacagcgacctgatctacatcaccgccaagaaggacggcacccacgtggtggagaacgtggacgccacccacatcggcaagctgatcgtgaccaagcagatcggcggcgacggcatgatggacatcaccgacacctacaagttccaggagggccaggaggaggagcgcctggccctggagaccgccctgatgtacggcgccaagaagcccctgaacaccgagggcgtgatgaagagccgcagcaacgtggacatggacttcgaggtggagaacgccgtgctgggcaaggacttcaagctgagcatcaccttccgcaacaacagccacaaccgctacaccatcaccgcctacctgagcgccaacatcaccttctacaccggcgtgcccaaggccgagttcaagaaggagaccttcgacgtgaccctggagcccctgagcttcaagaaggaggccgtgctgatccaggccggcgagtacatgggccagctgctggagcaggccagcctgcacttcttcgtgaccgcccgcatcaacgagacccgcgacgtgctggccaagcagaagagcaccgtgctgaccatccccgagatcatcatcaaggtgcgcggcacccaggtggtgggcagcgacatgaccgtgaccgtggagttcaccaaccccctgaaggagaccctgcgcaacgtgtgggtgcacctggacggccccggcgtgacccgccccatgaagaagatgttccgcgagatccgccccaacagcaccgtgcagtgggaggaggtgtgccgcccctgggtgagcggccaccgcaagctgatcgccagcatgagcagcgacagcctgcgccacgtgtacggcgagctggacgtgcagatccagcgccgccccagcatg

SEQ ID NO: 1443 - DNA, 414 bp, synthetic construct
  misc_feature 1..414: note = source = /note="Description of Artificial Sequence: Synthetic coding sequence"
  source 1..414: mol_type = other DNA
atgagcgagaccagccgcaccgccttcggcggccgccgcgccgtgccccccaacaacagcaacgccgccgaggacgacctgcccaccgtggagctgcagggcgtggtgccccgcggcgtgaacctgcaggagttcctgaacgtgaccagcgtgcacctgttcaaggagcgctgggacaccaacaaggtggaccaccacaccgacaagtacgagaacaacaagctgatcgtgcgccgcggccagagcttctacgtgcagatcgacttcagccgcccctacgacccccgccgcgacctgttccgcgtggagtacgtgatcggccgctacccccaggagaacaagggcacctacatccccgtgcccatcgtgagcgagctgcagagcggcaagtggggcgccaagatcgtgatgcgc

SEQ ID NO: 1444 - DNA, 3693 bp, synthetic construct
  misc_feature 1..3693: note = source = /note="Description of Artificial Sequence: Synthetic coding sequence"
  source 1..3693: mol_type = other DNA
atgcgcctgctggccaagatcatctgcctgatgctgtgggccatctgcgtggccgaggactgcaacgagctgcccccccgccgcaacaccgagatcctgaccggcagctggagcgaccagacctaccccgagggcacccaggccatctacaagtgccgccccggctaccgcagcctgggcaacgtgatcatggtgtgccgcaagggcgagtgggtggccctgaaccccctgcgcaagtgccagaagcgcccctgcggccaccccggcgacacccccttcggcaccttcaccctgaccggcggcaacgtgttcgagtacggcgtgaaggccgtgtacacctgcaacgagggctaccagctgctgggcgagatcaactaccgcgagtgcgacaccgacggctggaccaacgacatccccatctgcgaggtggtgaagtgcctgcccgtgaccgcccccgagaacggcaagatcgtgagcagcgccatggagcccgaccgcgagtaccacttcggccaggccgtgcgcttcgtgtgcaacagcggctacaagatcgagggcgacgaggagatgcactgcagcgacgacggcttctggagcaaggagaagcccaagtgcgtggagatcagctgcaagagccccgacgtgatcaacggcagccccatcagccagaagatcatctacaaggagaacgagcgcttccagtacaagtgcaacatgggctacgagtacagcgagcgcggcgacgccgtgtgcaccgagagcggctggcgccccctgcccagctgcgaggagaagagctgcgacaacccctacatccccaacggcgactacagccccctgcgcatcaagcaccgcaccggcgacgagatcacctaccagtgccgcaacggcttctaccccgccacccgcggcaacaccgccaagtgcaccagcaccggctggatccccgccccccgctgcaccctgaagccctgcgactaccccgacatcaagcacggcggcctgtaccacgagaacatgcgccgcccctacttccccgtggccgtgggcaagtactacagctactactgcgacgagcacttcgagacccccagcggcagctactgggaccacatccactgcacccaggacggctggagccccgccgtgccctgcctgcgcaagtgctacttcccctacctggagaacggctacaaccagaaccacggccgcaagttcgtgcagggcaagagcatcgacgtggcctgccaccccggctacgccctgcccaaggcccagaccaccgtgacctgcatggagaacggctggagccccaccccccgctgcatccgcgtgaagacctgcagcaagagcagcatcgacatcgagaacggcttcatcagcgagagccagtacacctacgccctgaaggagaaggccaagtaccagtgcaagctgggctacgtgaccgccgacggcgagaccagcggcagcatcacctgcggcaaggacggctggagcgcccagcccacctgcatcaagagctgcgacatccccgtgttcatgaacgcccgcaccaagaacgacttcacctggttcaagctgaacgacaccctggactacgagtgccacgacggctacgagagcaacaccggcagcaccaccggcagcatcgtgtgcggctacaacggctggagcgacctgcccatctgctacgagcgcgagtgcgagctgcccaagatcgacgtgcacctggtgcccgaccgcaagaaggaccagtacaaggtgggcgaggtgctgaagttcagctgcaagcccggcttcaccatcgtgggccccaacagcgtgcagtgctaccacttcggcctgagccccgacctgcccatctgcaaggagcaggtgcagagctgcggccccccccccgagctgctgaacggcaacgtgaaggagaagaccaaggaggagtacggccacagcgaggtggtggagtactactgcaacccccgcttcctgatgaagggccccaacaagatccagtgcgtggacggcgagtggaccaccctgcccgtgtgcatcgtggaggagagcacctgcggcgacatccccgagctggagcacggctgggcccagctgagcagccccccctactactacggcgacagcgtggagttcaactgcagcgagagcttcaccatgatcggccaccgcagcatcacctgcatccacggcgtgtggacccagctgccccagtgcgtggccatcgacaagctgaagaagtgcaagagcagcaacctgatcatcctggaggagcacctgaagaacaagaaggagttcgaccacaacagcaacatccgctaccgctgccgcggcaaggagggctggatccacaccgtgtgcatcaacggccgctgggaccccgaggtgaactgcagcatggcccagatccagctgtgccccccccccccccagatccccaacagccacaacatgaccaccaccctgaactaccgcgacggcgagaaggtgagcgtgctgtgccaggagaactacctgatccaggagggcgaggagatcacctgcaaggacggccgctggcagagcatccccctgtgcgtggagaagatcccctgcagccagcccccccagatcgagcacggcaccatcaacagcagccgcagcagccaggagagctacgcccacggcaccaagctgagctacacctgcgagggcggcttccgcatcagcgaggagaacgagaccacctgctacatgggcaagtggagcagccccccccagtgcgagggcctgccctgcaagagcccccccgagatcagccacggcgtggtggcccacatgagcgacagctaccagtacggcgaggaggtgacctacaagtgcttcgagggcttcggcatcgacggccccgccatcgccaagtgcctgggcgagaagtggagccacccccccagctgcatcaagaccgactgcctgagcctgcccagcttcgagaacgccatccccatgggcgagaagaaggacgtgtacaaggccggcgagcaggtgacctacacctgcgccacctactacaagatggacggcgccagcaacgtgacctgcatcaacagccgctggaccggccgccccacctgccgcgacaccagctgcgtgaacccccccaccgtgcagaacgcctacatcgtgagccgccagatgagcaagtaccccagcggcgagcgcgtgcgctaccagtgccgcagcccctacgagatgttcggcgacgaggaggtgatgtgcctgaacggcaactggaccgagcccccccagtgcaaggacagcaccggcaagtgcggcccccccccccccatcgacaacggcgacatcaccagcttccccctgagcgtgtacgcccccgccagcagcgtggagtaccagtgccagaacctgtaccagctggagggcaacaagcgcatcacctgccgcaacggccagtggagcgagccccccaagtgcctgcacccctgcgtgatcagccgcgagatcatggagaactacaacatcgccctgcgctggaccgccaagcagaagctgtacagccgcaccggcgagagcgtggagttcgtgtgcaagcgcggctaccgcctgagcagccgcagccacaccctgcgcaccacctgctgggacggcaagctggagtaccccacctgcgccaagcgc

(The sequence listing continues in the following parts.)

1-92. (canceled)

93. A pharmaceutical composition comprising a plurality of lipid nanoparticles, wherein the plurality of lipid nanoparticles has a mean particle size of from 80 nm to 160 nm, wherein the lipid nanoparticles encapsulate an mRNA molecule comprising an open reading frame encoding a glucose-6-phophatase (G6PC) polypeptide comprising an amino acid sequence that is at least 99% identical to SEQ ID NO: 1013.

94. The pharmaceutical composition of claim 93, wherein the mRNA molecule comprises, in the 5′-to-3′ direction:
(i) a 5′-cap;
(ii) a 5′-untranslated region (UTR);
(iii) the open reading frame encoding the G6PC polypeptide;
(iv) a 3′-UTR; and
(v) a poly-A tail.

95. The pharmaceutical composition of claim 93, wherein the open reading frame comprises nucleosides consisting of N1-methyl-pseudouridine, adenosine, guanosine, and cytidine.

96. The pharmaceutical composition of claim 93, wherein the plurality of lipid nanoparticles has a mean polydispersity index (PDI) of between 0.02 and 0.2.

97. The pharmaceutical composition of claim 93, wherein the plurality of lipid nanoparticles has a mean lipid to polynucleotide ratio (wt/wt) of between 10 and 20.

98. The pharmaceutical composition of claim 94, wherein the poly-A tail is at least 100 nucleotides in length.

99. The pharmaceutical composition of claim 94, wherein the poly-A tail is from about 100 nucleotides to about 160 nucleotides in length.

100. The pharmaceutical composition of claim 94, wherein the 5′-cap is selected from the group consisting of cap0, cap1, ARCA, inosine, N1-methyl-guanosine, 2′-fluoro-guanosine, 7-deaza-guanosine, 8-oxo-guanosine, 2-amino-guanosine, LNA-guanosine, and 2-azido-guanosine.

101. The pharmaceutical composition of claim 94, wherein the 5′-UTR comprises a Kozak sequence.

102. A method of expressing a G6PC polypeptide in a mammalian cell, the method comprising administering to the cell a pharmaceutical composition comprising a plurality of lipid nanoparticles, wherein the plurality of lipid nanoparticles has a mean particle size of from 80 nm to 160 nm, wherein the lipid nanoparticles encapsulate an mRNA molecule comprising an open reading frame encoding a G6PC polypeptide comprising an amino acid that is at least 99% identical to SEQ ID NO: 1013.

103. The method of claim 102, wherein the mRNA molecule comprises, in the 5′-to-3′ direction:
(i) a 5′-cap;
(ii) a 5′-UTR;
(iii) the open reading frame encoding the G6PC polypeptide;
(iv) a 3′-UTR; and
(v) a poly-A tail.

104. The method of claim 102, wherein the open reading frame comprises nucleosides consisting of N1-methyl-pseudouridine, adenosine, guanosine, and cytidine.
